United States Patent Application Publication US 2014/0057251 A1 - sequence listing, part 146

SEQ ID NO: 283908 - DNA, 639 bp, Cannabis indica
actttgccaatgtctggaaagaacataacactcgtgcaaagtgtaagtacacttcatcactgattatcacatcagtgtaatccagtgcactgatgagttagggactttgtcttctgaagcatataatcacaatcacattcaattgtgttgacatcactgtaattgtgaatgactatatgttctggacttagcagattttgtatatattaaaccataaacatgaaaactacatgtaaacataaatgacttctaatctgtcattgataacaaatcagattagattgaaatgagttttatttagggcataaaatcccaacagtttttagctttggaggcattagttggataatgagaccataaccttccttttatactaattatttggaataaaaaattgataaaaatagagtaaaataagcacctaatggccgaccatataatgggccctacattagtttggtttttgtcatttttctcaactattttatctatttttcacaaatatcactttttagcactttcaaccctataaatgccaaaactatttatttaataattaaaataattatcaaagaaaattgtcatttataatatttattaattagactccacaaattctcttaattaataaattaaccc

SEQ ID NO: 283909 - DNA, 462 bp, Cannabis indica
acccaagctttactttgaccaatgctctagaaagaacatagcattcatccaaaatgcaagtaaactatgttgtagattgtcatatcagtaaaactctgtgttctgataaatctaggaatatatcttaatcacataatcttgattactttccactgtgctgacgacaatgaatttataaatcaatcagacaagtaattgataacatgaaccaaataacacacaaatgaatgaaaaatacttctgtttctttattgatattgaataatagagattacattgaaatggagttttatttagggcataaaacccaacaaactcccacttgaaaatataaaactaatcagtacatatcaattaatcctaaattctgacggtgcttttcgaatgcagttcctgccaagaccttagtgaatggatcagctaggttgtcctctgtgttcactttctccaccagtacatccc

SEQ ID NO: 283910 - DNA, 121 bp, Cannabis indica
atatagaacgctctatatgctccaagatatagatacgctatcaattatctattgttataatcccaacaatcaatgatcctctatagatgatttacattgtatagggattaaattaccatta

SEQ ID NO: 283911 - DNA, 677 bp, Cannabis indica
ttatagtattaaatttttctaaatagtctatcgggttagaagtacctttatacttgagggattcggataaacgaaaccctttcggaagttgagcctgccgcacctctgcagtaaaaggcgaggtgccatgcagcttatatataggcttacgctgctgctcgagcatctttaaagcttgcagaagcatgctttggtcgattcctcctgtcgcaggggctggagtcgctgcgactgcggggctcgcaactactgcggcaaggtttgctgggatattaatcccagtggtcgcgatcggcgcgataggcgggttattatctgcgttgacaccctgatcgcccgcctggggatcacggagtgtctcggtattatgtgggccgcgggagcgtgccctgaaaactgcgttgagatgatcacgtagatcacctcggtgtacttgataacgtcctccctgttgtgtctgtatagagccggaccttgtatacctgctcggagtgcgtccatgcgatgacgaagaggctgactctgcgtcgttgtctctcgatggtcgactgcgaggattacggcgctcaggatcttcgtcaatttgtgcgctctggttaggaaaccttgcggattgatctcttgacatcggatggttcaagtccagagcttcagggttagttcttcgttccctgcgt

SEQ ID NO: 283912 - DNA, 1112 bp, Cannabis indica
attgaattaaagagtaacacttgctgccctggttgaaactccttccgtactagaccttgatcgtgccactttttagttctctccttgtatatttttgcgttttcataggcttcgtttcgaaactcctctagctcattcagctgtaacagtcttttctcccctgcagcttttagttccatgttaagagtcttcatggcccaaaaagctttatgctctaactccaccggtagatgacaagcctttccaaacaccaaccgatatggggacatgccaatcggtgttttgaaagcagttctgtatgcccacaatgcatcatctaattttcttgaccaatctttccttgatctttgcactgttttctctagaatcatcttaatctcccgattagaaatttcagcttggccattactttggggatggtatggtaaagcagttcgatgtcggacaccatatcttgaaagaagtgcttcaaactgcttgttacagaagtgactcccttcatcgcttactattgctcgaggagtaccaaaccgagtaaagatgttcttttgtaggaagcggagaactgtcttaccatcattctgaggtgtagctgcagcttcgacccatttagacacataatcgacagccaaaagaatgtactgattgctaaaggatgaaggaaaaggacccatgaagtctattccccacacatcaaacaattcaacttctaaaattcctgttaaaggcatctcgtttcttcttgagatattacctgttcgttgacaacgatcacatgcctttacaaaggtagtagcatccttgaatagcgttggccaaaagaatccactttgcaacacctttgcagctgttctatttccactaaaatgtcctccacatggtaaagcatgacaatgatttaggatagaatacatctcctcttcaggcacacatctcctaattatctgatcagcgcagtgcttgtagaggattggttcttcccaatagtaatgtttcacctcagaaaagaatttcttcaattgttgacgcgaaagctcgggaggagttatttttgcagccaaaaattaacatagtcagcgtaccacggtaccatcaggttttccctcacacta

SEQ ID NO: 283913 - DNA, 488 bp, Cannabis indica
ccatgcaacattaaatgttaattctgatctatattaataagtaaatctaattatattgaaatgagttttatttagggcataaaacccaacagtaacatccatctatcatctcacaatgaagttccctactgccgctggagtaggctctgtgcgaggagtccaatgagactcgcgagaatgctacaatgcagcagtcaagctcgcggaaaagaagtcaattaatgtcatctatttattagaggcaccacctcctcgccaggaagtccttaggatcgaagaggttccacacacagatggaccagatctagacccaaggatcctcgatcatgccgcagcggcccaagccgcggaagacactatcaaggtacctatagaccccatagataatagtaaagttttgaaaattggttctaaattgacttttcagcagcgagaacaactaacgacttttctcaaacaaaatcttgatgtttttgcttggaaacatt

SEQ ID NO: 283914 - DNA, 614 bp, Cannabis indica
ataatacatatatatattaatattttccaaaatatgcatttcataattattaatttaatctcatacataaatcctaattatttaataattcaaggtattaatcatatgcggtctttacaattatccccccgttgaaaggatttcgtccccgaaatctacctgaacagctctggatgctgagttttcatatccgactccagttcccaagtggcttcttccactttactattcctccagagtactttaaccagcgctatggttttggttcgtaagaccttttccttcctatctaaaatttgcacttgttgttcatcatatgataggtcaggttgcaattccaatgcttcataactcaaaacgtgcattggatcagacacgtactttctcagcatggaaacatgaaatacattatgcgccgctgacaatgaaggaggtaaggctaaccgataagcaacttgtccaactttctccagaatttcaaaaggtccaataaacctaggacttaacttgcctttcttcccaaagcgtctgattcctttcatcggtgacatacgcaagaaaacatggtccccaggttggaatgcaacatcccgtcgcttaggatctgcataact

SEQ ID NO: 283915 - DNA, 730 bp, Cannabis indica
tccttggtagagcctcattgtccgcttcaagctgagcggtggacagcatatccttaatctcctgctacagttcctcaacaagcttgttagcaggcagaagttgcttattaacctcacccaggttcagactcttctcctcggcctcctttttggcttctgtaatatctgctttcttgggtaattaattttctttatacttttagtttattttgtttgccaatggggataattaatcatttcgaatatttattagtttagtggtgtatgagattttttttttctagtgacaataaaatttattattttattattattattattattttattttgaggatatgtatagtgttagataaataattaaactattggagataatttaatatttaattatttatgaatattattataggtatattaataataatatgggtaaatatattacagcttattgtttagtttattattattattactgttattattattattattagtaatattattattattatataagtattatattagcaaactagtaaactaatatatatacgagacatgttatatatatatatttttaaaaaaattaagttgttgatgtaaggttatattagggttatgacttaaaatgtttatatgatcgtttagggatttagaaacggcgttgagatactaagagagagagagagagagagagagagagagagagtagagagtagagagagaga

SEQ ID NO: 283916 - DNA, 352 bp, Cannabis indica
ttttaggtcttctggattgctagtgactgcattgttgcagtgagtaactggttctccatctaaatagtacaacccttcatgtttgtggccctttaataattgtcatagcacccttacttagcttcattgaacctgcttcaattttgctaacaatacccatgtcatctagaacacttatagaaattgaaccttctatattgcatgtattgttgtttcccaatattactttgccacctttaaaatccctgtagtcagttaggatttccctagagtttgtcatgtgaaaagtgcacccagaatccaaaatccaatcatctttgaaagatgtagatgcaacatagacttcaccact

SEQ ID NO: 283917 - DNA, 117 bp, Cannabis indica
catagaagtgaaataatgatttccttcgagcttggctaaacagagataaatggttgagtactcataatagtgtatctatatcgtggaacatatagagcgttctatatgactagagtg

SEQ ID NO: 283918 - DNA, 738 bp, Cannabis indica
ggatcaaaacgaggtggagcaaatgccgtttccccaacatcaaaatggaggagccgctatgacatgcacagaagagtttcccctcatttcaatagggatatcacggagcatacgtatcgaggaaattatagaagaacaagaacaaccaagagaaaacagcatggtagagccattgttaaaaactaaattatttcgtaatttcttcgattgcttagaatttggccaagatgcaaggactgaggctacagaaaatttgcttaaaatttcccaacaacatggcccttcttgttatatggtagggcgcccaatgcataatattgctaaaaaatctgaaggagcgattgtctttaccaatgctgacatacaaacttctccgttccttcacaaccgaccattatatgtcgaggcaaaaatcaatggcttaaaagtgaaacgtgctttagtagataacggagcttcagtaaatctcatgccaattggagtgtattctgctatgaaagaggtcaaaggggggttgatcccacaaccgattacactcactggatttgctgccaagtctgtaaaaactatggggtatgtgactgttgagctagaggttggaccaatcagaggacccactcgattccatgtgatagaagcagataaaaactatggggtatgtgactgttgagctagaggtggaacaaaacagcacccactcgattccatgtgatagaagcagacacttcgtaccatctc

SEQ ID NO: 283919 - DNA, 834 bp, Cannabis indica
tgtccaaccggaattccggttctaaattttcaaaacccatccggaattccggatgcacaaccggaattccggttcctcgcaggcagaatttcaaaaattcataactcaaccaaatcaaatccaaatcacacaaaaccttccagacctgttctaaacatcctatagaacaattctaaagcatcaatacagcccagaaagcacagaattaaaaatcaccatgtgagctccaagctttgagttcaaactcaaacttggctaaagctcacttacaagcctcaaaactagcttagaactacataatcaagcataaaaacactgcagaaaacaaaccctaattcatgcaataactacagccaccaaatcctcaattttcactttgaaaaccatagctttttaacaagaaaattatccaactaaagcaagaacaactagcatgcatttcaacctaactaaacatatttaattcaacattttaaacatagaaacaacaacaacaactagcagcagcaacatcatcaaaatcatccatgcattactcatttttttcatcatttttcaagaagacaaaagtaaagaagctagacaagaattacctcaactagaatcactctaacttgcttaaaatcacttgaaattgaattggaaaatccacttttcttgctgcctcaaatggccgaaatagagagaggaaaagagagagagctttttttgagaaatttgtaattttttctaagttttggaaaaaatgaaaagaattgccacttaacccttttcacttcagccaataaaagcattattaaacaaatattttcaccaaataaagtccactaaagg

SEQ ID NO: 283920 - DNA, 639 bp, Cannabis indica
aactcccacttgcactaatgtaaaacaaaacttgcactaatgtaaaacaaaagagcatttcaaataatctcaacaccttgatatacaaacgaagtgtagtatgtagtatactctgcgtaataggattttacaggtttaatgaacacaagcttttctccacctttacatttccttaatcacaaaaccatggctatgaggccagttgttggaattattttaccagaatctagatttactaacaagtatatttttaacatcctaaacatgaacttctaaaacgatatgaaataaacacatataaagttccagaaaccttacagtgggtgcagcgaaattataatggctccttccactcagatctctaacccttatatcctttctgtagcagaatatcacaaagatctgagcctgaatctccttctcttgaatctggattcttcacagccttacatactatgattgagtaccacttaatgtgtgtgggcacttactctaatcaatctagggtttcggttttgaagagagaaagagagagaggatttcgaaataggtagagagaagatggctcaaaattttactaaaggaaagtgtttgcatcatcttttcctttgagctggaggtaaaatatcgatttcaagc

SEQ ID NO: 283921 - DNA, 686 bp, Cannabis indica
atagctgaactcttctactgagggagccctatgaacatattccatgtacatcgcatagaaggctagggcagtgcgataactgtttggagttagctgaaaaggtgatacatcgtatcgcctgagaatagctgcgatgaaaggatggaaggggaccgataccccacatcggagaatgggtattgagactaccacatcctttgtgggaataatcgcagggttggtaaacggaagatgcgccctctcggacggtttaggtcgctgaaacgcaagtcgcagcaaatgtaacctcacaaaggtagtgaaatctgatttggaaaccctcgaaatcagatcttcacacgcgaagggctcattcagctgggtatcgtcaaccgagtctgtcccgctcccttccgcctcctcttcatcctcgcctgactcgcgaactggggtcgtccagtcatcatccatctcctcgacctcgacgtcaggagcatgcctcgagtgtataaggtagtcgcgggccgacaccgtggactcgctgtctcgaatgtcgatggtcccaggttcggcgagttcctgcaccatcctttcgatgtctgcagaagacatcgggcctagctctattggtgcggcctcctcttctgaaatcgaggttgggagaaagctgtcctcctcctggtcaactttgttgggttttatgccct

SEQ ID NO: 283922 - DNA, 575 bp, Cannabis indica
gtgtgcttgcataagcgttatatttttgtatatgtagattaacatatgtaagacctactggtatgtatattatattattatgaaatctgcttgcactttccataatttctaattagtagcttttcttgctgagtcattgtgactcacgagtgcttcatggtgcaggtaaggagattaggtgctgcatttggccatgagtcagaggtctcccagtaatgtacatatcagccgtggtgtcttggcttccgggaagcaggatcgacttcttttctttgtgttttgaaatgtaactttattttggtaataatgctttgaaatttgttctaaggaaattttataaacaagggatccccatactttagtagtatttttaaagaaaaaaaaaacttatatgtatattttaaattatcaaactttatttaaaccacacttttcctaagctagtaggttattgataataagattgtaaaagcacacacgtggcgttcctgagagtcagggcgttacaaaccctgtgtctgataaatctaggagactttattcacatagtcatgtttactttccaatgtgtttac

SEQ ID NO: 283923 - DNA, 804 bp, Cannabis indica
tctacataaagtcgagctagcttggtaagcttgtaaatccttcctaaataaaatcaacagacttagtcaaacggtcaacaatcacccaaacagcgtcatgcttcaaaggtttcaatggcaacccagtaacaaagtccatggtaatcttgtcccacttccattctggtataggcaaaggttgaagtaaacctgagggtctctgatgctcagccttaacttgctgacatactatacacttagctacaaagctggctacatctcttttcataccttcccaccaatattgtctctttaaatcttggtacatcttcgtacttccaggatgtacaacaaatttggatctatgagcctcaatcaaaatggtctccctaagatcagggatatctgcaacaactagtcttcccatatggtatagatacccttcactattaactgtccacccatctagttgctcaccatcctggattcggttccaaataagtcttagcttttcatcttgccactgacgttgcttaacttgttgaagtagtactggtgtagccactaagttagagatacaagctacttcttccccttcatagtattgcaagttataatcacccattgtgattgtccttttccagtcctcaagagccaaacatgccaaagtaccatgaggctttctacttagtgcatcagctactacattagctttcccggggtgatactgcaaagtgaaatcatagtcttccatatactcaacccatcttctttgcctcaagttcaagtccctttgagtaaaaagatacttcaagctcttatgat

SEQ ID NO: 283924 - DNA, 627 bp, Cannabis indica
cacaaccaacaagggttctaccagcagagaaatcagccccaacaaaaccaacaacagccgcaacaacaaagtcctagtggaggctcaaatatccaagctgatttattgctccaattcatgatggagactagagcctccattaaaaccttggaaactcaaatgggacagttgacagctcaaatgggcaaccgtactcaagggaattcacctagcactagtgaggcaaggggaaaagagcaatgtcaagcaatttccttgaggagtggaaagagttatgaggaacctagtggcaatcaaccagttgaagatgtggttcaggatcaacgggcacagacacaagcaccaaaggaaaagaagactactgaaagtcttgcaccgaaagaagtttcacctccgatcagcatagatcaccatattaaaattccttaccctcaaagactccgcaagaacaacctcaacaagcagttttcaaaatttcttgaaatatttaggaaactgcacattaacattccatttgcggaggccttggagcaaatgccaacttacctgaagttcatgaaagaaattttagctaagaaaaggaagttggaagaattcaagacagtggcactcactgaggagtgcagt

SEQ ID NO: 283925 - DNA, 264 bp, Cannabis indica
tatcatttatctctatttagcatagctcgaaggaaatcctcgtatcacttctatgtctggatagaagctatagattccatatctatgattaccgctcccaccgctcccactcaatcgtactaccatgttcccaaaatgtatgtatcacccagaccaaaaggtaggtttaactaacaaataaaagaacacaaataacactcttgagatcgaacctaatcatgtcaagattaagatcatttgatttaggatcaactaggtgatatt

SEQ ID NO: 283926 - DNA, 632 bp, Cannabis indica
ccaaaaaaggtatgatatgaaatttttttcaaaaataaatctacgtcatatacagttgcattctggttgattccctggtttccaacaggcaattcagattcttaaaaacaataaacaagatctgattctaattaaggaacgacatgttacgtataaccctgttttaactttttgcgttgccttacagttgcaatatcattttaaaatggtttacaaattatgaaagaatgtcacttgacgggtaccaaaaaatagcagatatacaaggtacgatttatgtaaatggtggcaaattagttttataatagttggaaattgatctgattcaaataaaactgatgaaaaagcacaatgaccacaactatgttaaattgagttaagtgttatggtttttcaagttgatttacagttgcatcatcattttataatagtttaattcaattttttgcaggaatttattttggaaataagaaaaggagaaaacactttgagaaatggttagtttctgaaataaatttaaacgtttcttaatagtttcattttagttttattatagtttattaacagcaataaaataaataaaaatgacaaaagcaggaatcagaacaggaaatacaagacttgaacaaagg

SEQ ID NO: 283927 - DNA, 1189 bp, Cannabis indica
gagtttatgtgccaatgctgtttgatatttataggcaagtcacgaaaagagataatcatctcaaaggaacctcagacgcctcaatttccctccttaaaagcgaatatgggaaatcaaaaataatcaagtgcagccgtcagccgtggagagagaaaattggatttcaaaatattaattgtcagagtatttatcagcctcacatcgagtctcagacggtcgcgcttgacacgtgtccccatccaaaggtagaagcagctcggatgaagtctacatgcaacttcagaagtcccgtacagacttggggggcaaatgttatcccaatttttgcactctgacgtggaatcgcatttatggtgacacgtggaatccactcggaccatctgctcgggaagcatagtccgagcaggatgcctcactggcatgcccagagcaaagcaatcagcaatccgcacagagcaaccaacacttagtgaattcagctttcgcattgtgactcatcaatgaaattagattacaaggatatggcatacacacaatcccactattagtgtatccagcatcaatcccaagatctttgtattcagcattgatcccacgatctttctgtttatacgcattgtgacgagaggggaaactcttcctctccaagcttactagccctataaatagtgatgcatgttcactgggaaataggtcaaaaacaacttagctgagactataccctaaatatactatctaagaattatacattcaaggatacagttgtaagagctataagaaaaggaacctttctccttgatcttaagtcaatacaaataacgaggattaggctattaccgaactgctcggggctgaacctctataaaattcctgtgtctttacattgctttattatatatcgattgctataaatcacttatcgcttactaaattcaactcgttgtcgttggctaaaagcgaggtcaacatgcgccattcaatttcctaagagaaaatagaatgacattaaaagcaaatgatttataaaccattcatccaatgatatattatttaagctaattcaaaatgaataagctaagaggaaaaataaaggataatttcgattaaaaataagaatccaacgaggtcccgattagcgagagtcaaagttattcttatttttataaacttcttcattgtttcatattgt

SEQ ID NO: 283928 - DNA, 1112 bp, Cannabis indica
aattcacaattaatgtccctatctccaatttattacaaaatcccacatttataatttatataccaaaattaatattatgttatctataataaactcatatttataatttatatacccaaaattaatattgtgttatctataataaactaataaggcaataatctcataattatataccataattgttagctattaaattttataatatttttaaaattcatgatatcttgtaattttaaccaattaccctaaataattaggggccagccataaatcatgcgcgaaaaccttaaaaggcaccaaagccataaacaatggcgcaactcatccatcaaatttgtacttccatttcttccatcaaaaaactaataccactcatccagaaattctttaaaaatacaaataatataataattttggtacattcccataatattgagaacaaactaaattttcataataatttgacttcccaaatatatctaaaccaatatattctcattagaccattagtgtttccacctccctttattacaagatcctcaagattcttattcttcaatttacttaattaattataatattaaaatctgaatactaaaattcaaaacactttccttttatgctgaaaatttctaaaaaaatataaaccaaaacatagctaataggaattagcgtttaaagtaaaccctcttaaaccttatttcagtttaaaatattctttaaatcataccttaaccaaaataatcattttattccgactaataaatctgtatagtgcataacttattaactttaaaatattattgtgtcaaaattttcttatacattcaataccgaaaaacatgaaaatttaaacaaactaccctaaataattaggggcccaaccatataataggtgctaaagccttataaggcgccaaagccatatataatgacgcaaaatagaacaaaatcaatataaataatgctatatttatccattcaaaaaaaatgctatatttataatcatgattccaaaaaaaggtaaacgtagaaatataattattactcccaaaattaaagaaaatgcaaattaaattaaataccataaatgtagaaaccataattat

SEQ ID NO: 283929 - DNA, 728 bp, Cannabis indica
tacttgtagtaaatctagatcctggtaaaataatttccaataactggcaccagagccatggtaatgatttccttcatgaaatatgaattaaacgatgatttatatgtttttgtgttgatttggattgcttcatgtggtttatgtgttagttgatgaatgtatatgttgtacagtacttttcatgaaaatatttttttcgattttgaaaatatttatttggattccttgtaaaaattagaattttgtttttacagaactcgattccgataaaaattgaaaaagttatgaattttggaaaatcgggatttcgggtatgcatgggtgctcaatcgcacgcatcaggtgcctcggtcaccaacccatccgcgcgcgcgtgacacgcccgtgtcaccctgcatctcgcccagatgcaccctgcagctgaccgagttttctcggtcaggcatgctgcaggcgccgaagttcctcggtgtgcatccctcctccgcgcgcgcatgaaggctgcgtgcagcctgttgcacgcccaatcctgggcagcaatccaaaagtgcgattttttgggatttttccccaaaaatccaattttttcatgggattgtttcccaaaattcatttttccatttttttaaatatttctaaattgaaatatttccaattttaaatattttcaatttggaatttttccaattttaaacatttcctttttggaatatttccaattttaaata

SEQ ID NO: 283930 - DNA, 622 bp, Cannabis indica
tcaaatctttagttatgcatggtagcaaaatattcctatttcactactaattaatacctaaaagaaaaggtaaaaatcatgcatcaattagaggggttcaactaggtcttgcttttccaagtaagatctagcttggtaaatgttaaaaatggccaaaaattaacattcaatcaacatttcatcacaactaattgaactaagacaagattacttcatcattgcaaaatcaaaacactagtccatacaagggttcataaccacccaaatctcaaagagtttagttcatagctgaaattaaaaacaacaaaccagaaaataaatgttcatggagttaaagagaaaattagagagaagaaaatgatacaaaatgaagtggagagcaagagaaatgagtggtgagctcaaatcctttctttggaagttgccttcttctccttcttctcttctttgtactctttctttctctgtacttaatttcttttctgctgtaattttcgtactccacattcaaagtgcagccaccattcttctaatgtcctcctctttctttttgctccccaattagggtaccaaagtttaccctaattggaaaatccaagtcatcacccacttgtccttcatt

SEQ ID NO: 283931 - DNA, 805 bp, Cannabis indica
ttctatttatctctattaagctataagctcgaaggaaatcatcatttcacttttatgtccagatagaagctatagattacatatctatgactagcactcccactcaattgtactatcatgttcccaagctgtacgtgtgacccgaaccaaatagtaggctttgactaacaactttaagaacataaataaaactcttgagatcgaacctaaccatgtcaggattatgatcttttgatctaagatcaaccagtgatattgacttacaaagatacaacggtaatattataatatcattaccaaaccaatccaatgtataatccatacatctgatactagcatactttgtcaatattctggaaagaacataacacttatccaaggtgtaagtaagctttatcgctgactatcacatcactgtaaatccagtgcactgatgaatcatgggacattatcttttgaagcatataatcacaattaccttccactgtgttgacatcattgtaattgtgaataactatatcttctggacttaacataaatttgtatactttaaaccataaacatgaaaactacatgtaaccataaatgatttctaatcttctattgataacaaatcagattatattgaaataggttttatttaaggcataaaatcccaacatgacaatgataaaaaatcaagatacttctaaaaaaaagtttctttcttgctttctgaataaataaacctaagcaatttcatgtaccgttcatcaccatttaaattatacttttttttttattctttttcatatcagtagccaaa

SEQ ID NO: 283932 - DNA, 556 bp, Cannabis indica
tggtgatccttaacaagaagtttaagggtttttctcaaacttttatgaaatggtgcaaaggtggttccttttccttattttatacccacgataatgatttcaaaaaagatttgaatcaatggacgtgattcgaagcgaaagtggaaaaaatggtcatttaattctgatgtacctcgaaaccgcacaaccgccaaaattaaagggaatgcgtcttttcaaaaacagaggagcgtgacgaaaataccctttgtaatcattaaaaagctctttttaattaaaaagaactttttaagaggcaattgttatacccgaagttcggtaagcacatcagaggaggacacatgtcgagctgggaagagctaaaacacacaaacgacaagtacgcttagcatggaacaactcgttggaaatataatttgtagggtaggtttataactcggctggctgaatagccttctgcgagatagaaacatacgaactgctaatttatgtattgacgagaaaccatgtgggtgcatacgttcatgacgaggcctcaacctcgctgcgtgaaaga

SEQ ID NO: 283933 - DNA, 355 bp, Cannabis indica
gttgtcgataataagttgtagtgttttttatggtagttaattgtgattatgtcgacaatttgtcgactgtatgtcgataggttgtcgataataagttgtagtgttttttatggtagttaattgtgattatgtcgacaatttgtcgactgtatgtcgataggttgtcgatattaagttgtagtggatttttatggtagttaattgtgattatgtcgactatatgtcgataggttgtcgataataagtttgataatgtcgacggaatatcgacatgatgtcgatgttatgtcgacctttcttaactttaattaacatttttttggtttttattttttcagatggctcccagactcat

SEQ ID NO: 283934 - DNA, 528 bp, Cannabis indica
caccccataaaaattctggcaagctaaaatgaatcaacatacaacgtaccatatcaagaagtgtgcgattccttctttcagctattctattttgttggggtgtccctgacattgtatatcttgcatcaataccacattccagcaagtatttggcaaaaggcctggggttccttctaggttcatcataacgcccataatactctccacctatatcagaattgacaactttaatcttctttcccttttgaagctcaacattcgtcttgaaaatcttgaaagcatctaaagattcaaatttttcacgaatgagctcaacatggccatatcgggaaaaatcattaatgaaggtgataaagtatttataaccacccatagcaggtggaaaaaaagacccacaaatatcagtatgaataagctctaacgcatctgcacatctgtctgacttactctttctaaccttggcagtcaactttccttttatacaatcaacacagtgtaatacccggtaaaaatatacatatattttaa

SEQ ID NO: 283935 - DNA, 580 bp, Cannabis indica
tataacaagttgcaaaaccgttattacaaaaaaaagtaaagttacactttcatacataagggaaaagtggtcgaccctgcttcccagaagccaagacaacacggttgatatgtacactgctggaagacctctgacccatggccgaacagaactgctaatcttcttacctgcaccatgaagtacccgtgagtcatagtgactcagcaagaaaagctattagataaagaaaatcatggaaaataatagcaaattatagtaccaccgattatacataccaagagatcattctctttcaacatacatatacaattcaacgtttatacaagcaaacttgttataaaattaagagtatttatagttatacataaccaataacctcagtgtttcataaataccataatcatatagtattgtaaacacttactttcaatgcttcataaagcactccagttcacacattaacatatccactcaatttcagtacttcataaagcactctaatcatgcatcattacaagaaaagtgattaacttcacaagcaatataacattcgttcagtcacactataacataatatatt

SEQ ID NO: 283936 - DNA, 503 bp, Cannabis indica
tctctgccaggtaatagggttccaaaccctgattcatatctatcatgcggtctatccaatttactaaagattctggctgccacataagaatgtgtggccccagagtcaaacaatacagagtaaaaagagttgttgaccgagagctgacctgtcaccactgaagggctggcttctgcatcagcctgagtaatggcgaacaccctagctggagtgggtctcgctggagcctttggtgcttctgttctaagctgagggcaatccctcttatagtgtcctggcatgccacactgaaagcacccctgtcctctacactcacgcagatggtgccttttacaactggggcactctgggtaagtataacgggtttcagaactaccctgacaactgcgtcgactctggttcccccgagctaaaatgaaggaaaaacagaaagataaatggagaaagaaatgctctgtatattgctaaattaatgcctttttttttctgcaattgatacaaca

SEQ ID NO: 283937 - DNA, 432 bp, Cannabis indica
gttagttgataagggttgtattcaataaaaactttcctccaccattacatttccttaaacacaaaatccttgatattgtaaaattcctctctatatgtctactcctctagggatattggattctttagtttttggcaactgcttttgtgttagtcaggaagtaacactagtagttaataattcgttggtacaatgccaaaaactgtatagaactttccatagactgaataagtatctttcatacaactttaacattcagtctcactggtagagtaagaaatcccatatcagtttttacacttctccaaaatcactgctccacccccagagtaatcaccatctcatcagcagactttctaacacttaggtaagtctagaaacttgatttggtgtagtataagactattaaaatacaacccttatcaactaaca

SEQ ID NO: 283938 - DNA, 568 bp, Cannabis indica
ttctggctgccacgtgtcacaatcccaatcaataagggatatgggtatttaaatactttgatacgaatcacaattcccatttttccctctcactcttaacttcttctttccctccattacatacacttcgaaaatccatccccagatttcctaccatttttccacaacattctcaatctcagaagtgatcgaaagcaatcgcagaaatcaaaactcaaggttagttttcaaatcactgcattttcgttttctgttttggggaaaaaatgctttactttctgggttcgggtattttaaagggttttttaggaatgtatgctagtgggtgttaatgaggctatgtgttttaggtaagaaaacctgggtaaattcgtaggatatgacctgtaaactgacataaccgcacacaattcataggcactgttccacgtcttgaatactcgcggatattcggatgaacaacttgaatgttcgcgggtgttcagatgaacagcttgaatactcgcatattgccaagatttatttccatttgactgttagctagatcttttaggatttttatatgtcg

SEQ ID NO: 283939 - DNA, 572 bp, Cannabis indica
gccgagggaagcagaacccgaccgtccctccatctcagcccgtccccgagcttaaaagggaaaggaagagctagagccaaaaaatgcaaaaatctggcaaagaaaaagcgtctgacattgttggaggtccattggtgccaccttcgaacctcagccgctatagaccatgaagccctgaaaaccttgacctcccctcgacggtgacttcgaaaaatcttcactgttgccggcttctccttgtttgcgtgcaaggaaccatgaccacgagtaccaccatccctctcggctagagaacaccaaccgcacagccagactggtggctaggtctctagccgagcaaggaaaagagaaagagatgggccgagatggggatggggacaatttaattttatttatttcttttataatatttaaattttttttatgaatttttatagcatattagtatttttttaggcaattttatttattttggacagcatttaatagtttataatattaacataacatattcttttattaatcttttatgtaatcactttttcttaataactaattttgttgttgagagt

SEQ ID NO: 283940 - DNA, 315 bp, Cannabis indica
atatgtcatatatatatatatattgagagagaaaaaaatggtcagtacacatgcattgagaaaaagaaaattagtataaaaaaaaaaaaaagacaaaagtaaagaatatgcgtcagtgtaataggaaagaaaacatatgcatttttataggtatatacgtattacaataaaatgaattgaataaccggtatatgtgcaaattaattgaataacaatattgtggtaattaatttcaaattttagttgttagatgcaattttttcttatttaaaactaatcaaaaaataactttattatgacaactataaaacaact

SEQ ID NO: 283941 - DNA, 516 bp, Cannabis indica
tttctagatactaaaccatttaaactagtgactaggagtaaggaatcagactccacaaaatcaagttgaacatgtaaagattttgcccattggagaccatgatagagagccttagcctccatttcatgaggttgtaaattctcaggcagaggtttagaaagagcagcttgaacatgcccgtaagagtcccttataatagctccaagtcccatcttattgctggccgagtcaattgcagcatcaacattcattttcaattttgacaaatattttcacctttagtttagacaaaaaattataatcacttttaataaattgattcaaattatgtagacatttgactattataaaaaaatatatgtgtgacttttttactattttagtatatgattatcaaataaaaataaacatatatttattttttttatgtgatttttttttttcaaagtgtggctatgtatactgtatacatgattggatccgtcctgatgatgacacttgcattcaaggacaaac

SEQ ID NO: 283942 - DNA, 756 bp, Cannabis indica
agtaaatcttatcaatatgcgagtattcgaattgttcatctgaatacccgcgagtattcaaagcatgaaacagtgcctattcaagtatttcgtatgcggttatgccaacttacaggtcatattctatgaagttacccaggttttttacctaaaaaacatagcctcatgcataccatctataaacattcatccttaaacaaccctcatgcacactaaaaacccagaaaatacagtccccactcaaacagaaaacgaagcacggtgaagattcgaaaactaacctttttctttgccaaatctgttcccacgaatcgcccttgacagcaatgcagaatcaagaagaacccacgaagaaaggcgaaaatctgggcaatttatggaaatttttcttagtggtttctctgagagtgaaggaacaaagaagttaagggagttgaaggaaaatgagggaaaatggggatttttggttcgaatcagggggtttaaatacccaaatccctcattaattgggatcacgacacgtggcagttggaatgcctagagtcgcccaatccaacggccagagatggccacgcctacacagaaaccgaagagttttgtgacgtggcaccataaatgcaataaaagtaatgattatagccgtcatttttcgaaaccctcgaagggacaaccaaaggtcacctcctcgtgacaacctttcacctgtctctcgaatatagtttcccttgtgaccgcacctgtcacatcgcgaaacta

SEQ ID NO: 283943 - DNA, 538 bp, Cannabis indica
tcaaaaaaaaaaaaagtaacttaagtgacaaaaataacaatgctcaaatataaatagacttattggttggaaaaattatagggataagtgatggtttgagaataaatttgtattggtttagatttgtatgggatggatattaggtagtgtagtatgatgatgttgataagttgataagtaggatgattggtgggacaaggaagagttatgtagagttttaatttttatgtgtgtagtaagagaggagacaaggtagtaggctagtagtaaaagacttactttggctactcaagcttggttacaatttggaagtttgatggggtatttatagttgctcaccccttacactttatggctagaattatttcttctagatccttcttttactagaaggaattatatccaaacaaatctaaatgtttctagagtacaacataactagtatattctagatttaatctaatctagaattctcttaagttcttagataatttttctacaagtgtatagaaatgtctagactaaattgtgtagaaat

SEQ ID NO: 283944 - DNA, 472 bp, Cannabis indica
tagggcataaaacctaacagaggtttgaatcactaaggaaggaactctctcatctaggtttggttgaataatcaagttgacaaaagttggatgagtgagagtgtcatgttccttttatagtatttcaactagggcttaggattgaattatatggattaaaaaagaataaaatattgggcaaaaatactatatggccgcacacttaaagtaagccactttctagttataattttgccactttatttcaacaacttattcttctttttaataataccatatttttcaattcaaacctataaatgccaaaactatttatttaataattataattaattactaaataaaattgccatttatgtaatttattaattagaccatacaaagtctcttaattaataaattgaccacaaaacctcttttcttcacaattaagcccttgcttagttaaaattcttaaataagacatagtcta

SEQ ID NO: 283945 - DNA, 1034 bp, Cannabis indica
ttggtttcatatcgctaaagcaccgcgaacatgtcgttaaaatttcgatagtaaaatcatgttttgactcttcagttgatgtcgttaacatgtcgcaattatgtcgcgaaaagtcgatacaaaagacgtttccacattaaatggtaattaatgtgacatttattatcccgcctaaccaactacttgactatgtcgataacatgtcgcgacatgtcgcgaaaattgcccagattgctttgtgcatgacaaacatgtgtacaattgtgtaattcaatttttacatttactatcccaccttcccaactactagttttctctataaaagccaattgtctatctcataagttacatattttcttaattttttccctcttaagataattctcttagcaatgtctactagaaggaacaagggcaaatatccgattcttactcctgaagagatcaagcaggagcctgattgtggggaaattacgcctcaaatgcaaaaagtgcttgacgacatgaatcgttttgaagatgaacggcttatgaacgagtggaggtttctaaaacttgaaaaaaaatttaacaaaacaggtgtatggccggctccaccaccagggttccccgaaggctgccgtcgctgcaagttaggttatttaaatggtaaacaggtgaagcctggatctctatgcaaatattgcaaggctacatgtcgcttcatgtcgcaaatgtaatcgttaaacgtcgctaaatatcgacttttcactgaataaataaaagttccattaatgtcgctaaatgtcgctaacttaatcgtgaaacgtcgctatttttaattttttccagaattgataaaagttcttcctacatcgcaccatgtcgctagtgtaatcgtggaaagtcgcagtttttaaatttttccataattgataaaagttcttcctatatcgcgacatgtcgctagtgtagtcgtggaaagtcgcattttcaggaccttctccagaataaaataaatttccaaacatgtcgtgaaagtgtcgctacatatc

SEQ ID NO: 283946 - DNA, 813 bp, Cannabis indica
acagaccaaagagaagtgtgaattttggatgactgaagtcaagttcttgggccatgtaatttctcaagatggtatcaccgttgatcctgcaaagatagactctattctacagtgggaaagaccaaagaatgtcactgaagttcgaagttttcttgggttggcaggctactaccgtcgctttgtagagaatttctcacgaattgctatgcctttgacgaagttaacaagaaaagaagtaaagtttatgtgggatgatagttgcgaagaagcttttagagaattgaaggaaagattaacttcggcgcctgttctcactgttcctaatagtgaggaaccatatgtggtattcactgatgcttcaggtactggattaggaggtgtcctcatgcaaaatggcaaggtggttgcctatgcttctcgacaattgaaaccacatgagaagaattaccctacacatgacctagaacttgctgcggtaatctttgtcttgaaaatttggagatgttatttatatggcgtaaagtttgagttatactcagatcataagagcttgaagtatctttttactcaaagggacttgaacttgaggcaaagaagatgggttgagtatatggaagactatgatttcactttgcagtatcaccccgggaaagctaatgtagtagctgatgcactaagtagaaagcctcatagtactttggcatgtttggctcttgaggactggaaaaggacaatcacaatgggtgattataacttgcaatactatgaaggggaagaagtagcttgtatctctaacttagtggctacaccagt

SEQ ID NO: 283947 - DNA, 190 bp, Cannabis indica
acaagggttaaagatatgagtggaatgagacattatattctgctgcaaccactgtaaggttcctgatactttatatatgtttatttcatattgttagtcctcaatcatagtgtgtaatgtttgaattattttaccaggatctagatttactaacaaactcccacctgtattaatttaatattttttaaat

SEQ ID NO: 283948 - DNA, 939 bp, Cannabis indica
actcttaattacatagaatgcactattactaaaaataaatgcgatttgaattacccattatttcaatttaaatagtcaaagatcttctatggatgatctacatcaaatagagacaaatttattgttctacccttcaatgtaatttatccttaaaatacttagctacctataaatgatatcctagtaaactaatataattaccgaaatgagacctcaatcatttatttctattaagccaagctcaaagaaaataatcatttcacttctatgcattcatagaagttatatattccatatttatgattagcgctcccacttaattatactaccatgttcccaagatgtaagtattgggccgatccattggtcagctttaacgaacaactctaagaacataaataacacagttgagatcgaacctaaccatatcaggattaagatctattgacctaaggtcaactgatattgacttagatagatataactgtaagtttatgatatcttattcaaatttaatataagtccagtttgacgtatacaccatacatctaatactagcatactttgctaatgctctagaaaggacataacatttatccaaggtgtaagtaatctttatcgttgattatcatgttagtgtaaattcattatactaacaaatgatgggacataaactttaaaacatataattatgattatatttcactgtgttgacaacattataattatgaataactatatgtcttggatttaaaagaatttatacattaaacatataatcatgaaagcaatcatgtgaaccatgcaacataaaaatgaatttctaatctcttattaattagtaaaatctgattatattgaaataggttttatttagggtatagaatctcaacaaactcacacttgcactaatataaaaactaaaagtgtattttaatt

SEQ ID NO: 283949 - DNA, 817 bp, Cannabis indica
aacaaataccccaaataacataaaaacgagaaaaactagggttcctgaaaatctcccaaccggcagaccggttgcacaaccggaattccggttctgggaatttcagaaccccatccggaattccggatgcacaaccggaattccggttcctcgcagaataaactcaaaaattcataacttgctcaaatcaaacccaattcaaacaaaaccttccagacctgctatttagaccctaaggaacatttctaaagcatcaaaaccgagcttcatgcaaacaatccaaaatcaccattaaagcatcaagctttgagttccaaactcaaacttgattaaacaacactatcatgcatcaaaccttgattaaaattacataatcaagcatatagaaactgcagaaatcaacagcaagcatcaacaaaaacaacagcaacagattcttcattttttctttgaaaactatattttgagtaaaaacttccaagcttgaaacaaagctactatcatgcatcaaactagctctaatctactcaaaataacatgctttaaacctcagaaacaacaacaaaatcacagcaacaacatcaacctaaactaagcatgcaaaccattaaattcttccaaaaattccaagaaacaaagaaaagaagctagaacaaggtttacctctactagaattactttaaacttgctgaaaatcacttgaataaagcaaagaaacacagccctagcaactcccaagcttggccgaaagaaagagagagaaagagcttttgaattttctaattttttctaagttttcaaatttgaataaaatgag

SEQ ID NO: 283950 - DNA, 603 bp, Cannabis indica
acaatttcaaaatataataatattgacagcctaagatgcaattttaaggtttttgtaagaaattattagcatccaagagtttagaaaacataaagtcataaatcataatagatttgttttctcccgaggttaaagtcttaaaatacttacaaaactagctttgaatagatcatggccacaaaattttcaccaataatgcattcccatcccactagacactatcattagcttctttaaaaagaaagtatcaccaaataactatttgagttcaacctactcattattcaagaaaatatacttgaaaaggaaaaaaatgatgtaccttcgctaaatcatctggatgtatgttgattaggttctttggccaagctacaaaattgtttacagctaaaccaactgtgtcgaagccttcatgttctatagggcatggtagaatggcattttcaaatcactcggtatttcataataccttttctttcaaccatgtactaaaatttcgataatgttcatgttgcacccatttgtggttcctcgacttactaggataagtagtcttgatccaatcaaaatgtttccttcaagatgtagttaaacattattctt

SEQ ID NO: 283951 - DNA, 574 bp, Cannabis indica
aggggtagcagctgactgagatcgcccaactccaccggatgtacataattgttgtatgggaaataaccgctagctcgaattagattcgcaaatagctcgctgtaaggcttcaaatatgactccatggctgcctcaacggtgccaccgatatcagaatcatatacaatgatctcccagttgtcaatatccacctcaactgccacccagtggcgctctttgggaaggtgcaacacaaagtatatgtaatcctggttctcccaacatggcaagtatctgtgcggtatcccctgcacgtaattcataacgccctcatcccatttcatcttgctcttgtcaccctcatagaaattccaatacatggcaaagatctgtggagcagatgtgtccaaaactacaccttttcgagtgtagacttctgggtacagggtccgtcttcttctcaataagtgcgccatggcatcaagttgttgtgttccaaaagaaaacagtaagacagcaatcgcataaaagtcgcacaaatatcgcaggaaatcgcacaaagaaattaccaaaattatttcaaaaatcgcacaaa

SEQ ID NO: 283952 - DNA, 752 bp, Cannabis indica
  modified_base (666)..(666): a, c, t, g, unknown or other
tatcatagggttaaagatttcttagtggttaaaatataataaaataactataattaataaaaaaaataataaaattaatattattagtaatatattattattattattattattattattattatatatgttttaaaagtttaaaataaaagaacgaatgaatcctcttcctttggtgcgatgaaacccctcactttcattatttattatttttttttttattttcaatccaaaatctagcaattcaagctccggtagtagcaagatagtaaatcatcaaagatggagagcttaagataaatattgattttgtttaagttgaatacaattagtttatgtagtaactttgtgatttagagtagttatggagattatgacttcatggaattgttcttgggtagctataggactagttttgatgttctttattgaatttgaggtgattttgagttagaaatcgagtttagaactatttaaagcttaagttcgaacattaatgacgtttttcatttaacggttcgattttaattttgttacgtaaagattgttgtaattatggtatatatgtgccatgtgaagtttggaatgtttttgataggtttgggtggtgtttcagtgagtgttaaatttaggaattttccacttctgttgcgacgaatcactccncccgcttgggtgcaaccggattacccgggttcttggggaagcgggttaacccgtttcctaactgatttaccgtttttggaaaattc

SEQ ID NO: 283953 - DNA, 545 bp, Cannabis indica
tttttcttatatatttcctatatcgcctgcatctctcttcaatctatctctcggcgcaggaaaggactgtcaatctccctgccactcaatcaactcgagtcacgtacatggaaaagtattcttctctaaaatcacacacacatatatatacatatagattatatatcttcccgtgtcgattcaaccgcaagatcttttcagttcaattatctttgtaatttggtgtaaatagctaaatccaatcttttgaatcaaagccaaataaacttttaaaaaattccattacctatatcttcttctcctcatcatttctttttttaatggttacattgtcgttagaaggagagcagtactacatttataaattttcatgacaaagaggtatgaagagttccattgtaatttatagtgatgtgattcctgttgtaacgtttttaactattgtctataaatctcaccaaacgataatagtatcaccactaacctatctttctttccaccaaaattcattttattttctctctataccaaagttttctatgtac

SEQ ID NO: 283954 - DNA, 874 bp, Cannabis indica
atattaaaagtaaatagtatctactttttaaaaaaaaagttttttttttttttgaagtgattgattgattttcatttattatcaactaattatatatataaataatttttatgtaataatatatataaaaaatataaaattagttattgttatttggtattttaaagaacccaacaccatactattgtagtgtcttataattagttgtcggtttcccatcatttattaaattaaaatttgtaagacccaatattaaaatgcatcaatagcattatgcaacgtcttgtagtgtttggcaccttaagatacctcttaatattttttcttaattaaacaacagtccacgttattagagttattttgcggcataacctcctaaagtgggcaggtttttgcaactaacctctaattctaaaattttggtggtaaaacctcctaaacccaagttctgttagcacttagcccctcccgtccatttttggctgttaactgccatggcggaatgtccacgtgtacacagtgtacacgtggcacaattttattggtccacgtaataaatatttaaagttaaaataaaaataattatttaaaaaataaaaaataaaaaaataaaattttttctttttactctttctcttctcgttctccctctctctctcagccttacccgcagcaacctcagcccctccccatccgtgcgctggcccctccccatccgtgcgccggcccctccccacttcttttctttcttcttcttcttcctcgatctccttctaaccccagccgctcttccctccaccttcgcacctccattcactaaaccagaaacccccactcgaaccacactaaccagcgactcccccacctgccaaac

SEQ ID NO: 283955 - DNA, 668 bp, Cannabis indica
cataaagttcagtatcttggttatcactgtcagccactgttcggctttcatgacgttcggacctcccagaaaaactggaggtgcttgcttccagaacctttcatacaggggttccattgtatttgccgctaccactatctcggcctgagcagcagaggcgggtgccacaggaacttctggcacaggcactgcaggagccccctgctgcctcaatctttgtatctcttgatcttgctcctctatcctggcttgcatttcagcaaacctagtctcccaattccgggcttcctgatcgacttgggcagcctgcgcagccagtggcgggttatcgtcaccccgaccacgggccctgcccctgggacctctaccacagcccctagcatgcgggggaaactggtctccctgaccctaatttcaccatattgagttgccctggctactggtattccgcctggcgtccatctagtctgaacagcctgtgaaaccaagagttggcacatcaggtcatgatcaaagagagcttattaatgccgctgagtttgaaaaattaaaaacatgcgcctattctactatcaggctactaacatgcttcctatcaggcttttcttatttcataataattaaataagctactaaagcaataaaagcttactgaactatagaacgag

SEQ ID NO: 283956 - DNA, 619 bp, Cannabis indica
gtcagttacctggttacttttacgtgctggaacagaagaatccaggtactattacagacattatcacaaaggataacaggttcaagtactgtttctggtcactggctgcttgtaggaggggatttaagttttgtcgtcctgtgattagtatcgacggcacgttcttgaagacaaggtttgggggcacaatgctagttgctgtagcgtacgatgcaaataaccaactgtttccgattgcctttgcaattgttgacagcgagaatcatgactcttggaagtatttcttgcagaagttaaaggaagcgattggggaggttgaaaacttagtgtttgtatcggataggcatcaaagcattgaacatgctgtcgaggttattttccccgaagcatgccactgtgcatgctacaaacatatttctatgaatgtcacccacaagttcaagactgatgtatgtaacacgcaaatatggctggccgcttacgcatggtcgaagagggaatgtgatagacatttgcaggtgctccgacagatggatcctcccatcgctgcttatgttgacaatataggattagaaaaatgggctcgtccttattgtctaggagacaggtacaacatcat

SEQ ID NO: 283957 - DNA, 203 bp, Cannabis indica
aattaactaaagaataacaaagttacaataattttggatcatgttcactccatatttcttaaatcccatcactcaacacttgagaaaagaaaatccactgaacaaaaacataatcagagctatcaccatcagtactttcttggtccaaatattgatcaatacaattactccaatgctaatttatcttatatggattcttttca

SEQ ID NO: 283958 - DNA, 611 bp, Cannabis indica
cttccttcaaatttgagtttgatgggtccagttggaacctgtctcctctcagatgagtcagattcgttaatggtgattgaggtgtcaggagacccatcttccttctttgatgaattgacattggagggtaaggaatgctcaacagacaagtcattcccttgcttatatagcatcttatatcctaatgaagttcgatcaccatagggcttctgaagctgtagggtttgattgatggcagcagtgcctgggggaatgaactgtaaagcttgcttggttcggattagatcagctgtgagtttgtagatctcattctccttttcatcaagaagtcggttgagatttttgacagagtcttctaactttcctttttcagtctccacttgctctagggagttctttagggcacgaatctgtttagtcatgtactcccattgtgcaaacatttcttcataagcatgttgacgacctgtgctgtctgcttctgatgaggtggagactgcatcatcttcagattcaactggattacagctttgggccatgaatgcaagtacctgcttttcctcatctgatccttcactggctgtggagttcttttcctcatcactatcact

SEQ ID NO: 283959 - DNA, 556 bp, Cannabis indica
tgatttcagtggcgttggaaagataattcaaagatctatcaattatgtagaaatagatttatcgtaattttaactttattggggtcaaaattaagctacaaagtgacgacctgttaagtttagtatagaaaccctaagttttaaaattcaaatttaaaacttatatctaacaaataagatttttatttaattattctatttagagttaaattagcatcagattataggggttattttattattttcttttataggtttaattagattataaaacctaaatctatcacattcttgatacgtaatatgcagagcctctaaccctaagaaaaataaaactcaatctcaatctctttctttcagcctgaacacaattctagcctgaacacaattcttagagaagacactcataaaatcctataccctacaagttattcatctcgctatctatcaaagatttataattttccttcttgtttcgttctcttcgccaaacaacactcatgattttcatcaacataagattgagatcatcatcaccattctaataatttgagat

SEQ ID NO: 283960 - DNA, 851 bp, Cannabis indica
agcacagtggaatataatcatgattatatgtttcaaaagttaattcacatgattgtcagttcattagatttagactgacatgataatcggcgataaggcatacttacacctttcgataagtgttatgccttttcagggcattgacaaagttagcagtattggatggataaactatacattggatgggaccgatattgatcttggaaaagatatcataagtacttactgttatatctttctaagtcaatatcatttgttgatcttaggtctaaggatcttaatcctgatatgattaggttcagcttagttgtattatttaatttcttcaagttgtttgtggaagctaaccaatggttctgacagatatttacatcttggtaacatggtagttcaattgagtgggagcgttgataatagatatggaatctatagctctataaatatttagaagtgaaacgataatttccttcgagcttggctgaatagagataaatgattaaggcctcatttcagtaattatagtagtttactaaaatatcatttataggcagctaagtgttttaaggataaaacacattgaagggtagaacggtaaatttgtcctttttcgaggtagatcatcaataaaggatctttcactattaggattgtaataatggataatcataatgtatcaatatcttggtacatatagagtgttctatataattgagagtgctattcaattctaaatctgtagtggcgcaaggaggaattaataaggtaaggaatttacttggtaaattctagatctacttattggaaactcgattatataggcccatgatccccacactagtcgagacaatact

SEQ ID NO: 283961 - DNA, 818 bp, Cannabis indica
tctacgagtggatcaagaatcagttacctcacctcaacccaggtcaggcggctggaactttgccacaagtagcaccgggggtgcagcaggggtattggctccagttgttccccccggagatgctcagcatattcccggcctgccacctagacctaacgggagagtggctatgatctcgggaggaccccacatcggaggaaccacccgcaaggagctgaaacggtacgcaggggccgtgaaacacgatgaggtgtgggaggttactcaactcccagctcgaaagccccggctaatggatcaacccattacattcacagaagaagatgcaaaaacagtgcgttttccccaccatgacccgttagtcatagagacccccattaccaataaggtggtggccagagtcctaatcgacaacgggagttccgtaaatttgctgttcaaagaggccttcactgcaataggcctaacggactgagacctctcaccaagtggttcccaactcacggggttcaatggaacaacacttatcccaatgggaaaagtgaggcttccagtcaccttgtgcccggacacaccccagagcactttcaagtactgcacgttcgtggtggtggactgcccgacagcctacaacgcaatcctcggccgaccggccttggtggactttggcccagtcacgtcaatacggtacttgtgcctgaaattcccaacccaggaagctaggatagggacggtgaagggaaatcaggggaggcaaggcaatgctataacgttgctgcccacctacccgtgctgatggtccgagaaactattgagcc

SEQ ID NO: 283962 - DNA, 403 bp, Cannabis indica
tctgagcccaaatgtccttcttgttgaatgtctttcttcactatcttcctcactatgattgaggtactacttactatgtgtgggcactactctatcactgagagggttcgaaatattcaatgaagaagaagaaaggagagtcgcggctaggtttagagtgaaggctcaagtttttctctgaaggaaacaagatggcaaagtcactttatcctgaacccatcactatctatttatagcatgccacatagggttaggtttgaattatttggcattaaaataatgaaaatataaaatgataaaacctacaaaggtggccgaccatggcttagtggacttgggcctcacttttgcaattttgctgttttatcatttctgcatctcattttctcaaaagtgccaattt

SEQ ID NO: 283963 - DNA, 555 bp, Cannabis indica
aggggaaccgcttggaggagaaggttgatgctttggagactgtcggcctcgagctcttcttcaatttttggaaggctaatccgcaggccaacttggactacttgggccacgccaaggacatgtacctcgagtactgcgcggcccaagctgcctatggtgggaaagaggtggctgcttcaacttccagccaagcttctgaccaggctgctgatgcttctcctgctcgaacaacagatcctcctgctccagtcgactccgaagaaccaaatccagagcctgggactctagctgtttgaacattgatctttctatctctcctgtttatatatatattatatatggccgtaaggcctttaagacatcatgaccggccagcagtctttaaacttggaattaattttcatctttcggacaacaggctgaccgggcagcttttaatcccggtactttaagctcttgttatccttaatgaattttattctctctttataattgcagtgcaattgtgattgttttatgtttaccagatgctttgtacaggtataggtgcccccc

SEQ ID NO: 283964 - DNA, 595 bp, Cannabis indica
gacgtaccaccggccgccccgcgacgcggagacgcccaatcacaattacggaggcttcggagcttggagccaaacgcatttgatgaccggggctatgcttccccttcaggattatttcattaatttccttgtatttgtcggccttgcgccataccaacttattccacaagcttaccgcctgctttcaggcttatttattttttacgctgcccggggctggggctctcccagtccggtagaaatattgtatttttatgaactcgtttctgtccccaagaagggggacaaacctaaggacaacttttatggcttccgggcccaccctttgaataagggcccggtccccttcaaccagcaaaagcacgtcaaggagtaccgtcaccgtttcttcttttcctccgggttccttgttgtggaacatccggagcttctcagagagtgggttaggatccctccttatgagcggactgcgcctactcagctcttcctccaacaggccaagaccttcgccacatatgacaagaaggaccttgacgtcgggggttggtcacgacgaagaatgccggaaaggccaagctgatcctggggcaccagt

SEQ ID NO: 283965 - DNA, 606 bp, Cannabis indica
aaaactgaaaaataatgaaaaatgacgatttacggtaagtttttcgaaaattgccaagaaaactagaaccttaccgaaaatgagttttatgcaacgaaattgaaaaattctttttccagcagttttataaaataaaatgtgaggtgtacaaacttacggaatcgaaaaatgttgaaaaatgagaaagtttggcgaaaaacactcttttaggcctaaaaatctataaattcaacaagtgaggtaccaaaaatttgtttcatgcaaatttcaatcaagacaaacctataggcacactaaatacattcaatttcacatattcaagcatatagacacataagaaaatcaaatatgcaaaaattcacatgttcacttgtttaaaaacaagtccaaagttcaccaaaaatccacattatgacctataatcttgagttttcaacaagtatggttcatataggtcaagtatcaataaattttctcatctatgcatataaatctcattaatatcatatttggaacaattatgcataaataagtaagtaaagagatatgaaatttttcatagctaacaaaccttatatttcatttaagttggtcatgcctagctct

SEQ ID NO: 283966 - DNA, 373 bp, Cannabis indica
tgttggatgatgtcgacagaatagtcgacaatttttataatttgttggcagtaatattgatttgttatttgttatttgttttttcaaatggctccgagactcataattctagcatctgagcattttactggccgcgtgacttacagtggcaccggaacttttgcgaaaatcaagtctcagtttgaggagttcaacttgaataacacggcgaaggaaagccatttcggcaacttttggaatgtcgttcccctgacattctcctcagtgttatttcaccagctgatgctgcacaagatgaaggttgatgctcaggaggagttgaagatgcggtttttcattggtcggaagtgttgaaatttattttaccaggatc

SEQ ID NO: 283967 - DNA, 414 bp, Cannabis indica
atgtatggagtatacatcgtactggaccgatattgaacttgataacgatatcataaacttaccgttatatctttctaagtcaatatcacttagttgatcttagatcaatatatcataatcctaatatggttaggttgttgggctttgtgccctaaagaaaactccatttcaatgtaatctttatcatttaattatcaataaagagacagaagtattttcatcacttatttagtgtgtcatttggttcatgttatcatttatttgtttatttgatttataaattcatcaaaacccttatcacattgatgttcttgtttattgtgtccttagcacattgaaaagtaatctagattgtgtgattaaatatatattcctagatttatcagtacacaggatttaactgatatgataatc

SEQ ID NO: 283968 - DNA, 1035 bp, Cannabis indica
aaccctaatgcctagcggggaattaattatctctagtaggcacattaggtctatgctggttgagatcgagggaagggagttgagtgctgaccttatagaactggaattaactgagtttgacattatattggggatggattttctgtctaagtatttggccagtatagattgtaagcgaaaaatggtgacttttcagccagaaggtgaagatctatttgtttatgttggatcagttcaggggtctcggatcgcagttatttctgtagtgagggctaaagatttactatacagtggctatttaggatttctagcagttgtgattgactccagcagacccgaaaaatttgggcctgaggcagtcagggtggtaagagactttctcgatgtgtttcccgaggagtggccggatgccaccgcaacagaaattgattttgaattgatctaacacatggagttgaacttatttctaaagctccatatagaatggctccagcagaactcaaggagcttaagttacaacttcaggggatgcttgacattgggttatccgacccagtgtatcgccctggggagctccggtctgtttgtgaaaaagaagatggttccctcagaatgtgtattgattatcgggaactaaacaagctgacgattaagaacaagtacccgttgcccagaatcgatgatctgttcgatcagcttcagggaaagacagtgttttcgaagattgatttacggtctggttatcatcaatcagaattcgagaggaggacataccgaagactgcttttagaaccagatatgggcactatgagtttctggtaatgtcattcggattgactaatgctcctgcggcctttatggatctcatgaatagggtattcaaggatttcctcgataactgcgttatagtgtttatcgatgacattcttgtatactctcagtcagaagaggagcacgagcatcatcttcgaatggtattgcagcgacttagggatcacaagttgtatgcaaagtttaaaaagtgcgaattctggt

SEQ ID NO: 283969 - DNA, 532 bp, Cannabis indica
gaatcctttgaattgacaattgattcattcaaaggtagaattcagcatgggattattatgaaaaataggaaggcagagaagggaggccagtatgatggttggtatagggctttgggatgtccttgggtttttacggtttggttttatgaatgctgtcctgctatggtgaactctttctgtaaaagagtttcatcttctattccaaggattctgaactggagcaacaccattgtcaccaaaaatccaactcttcgagacttgaagggcaagatttttgatttgccgttggacaaggtaatttacagtttctttactgtttcttttcagttttatttatgttgttaatttttagttttttaaattgtttttatattttcatattatgtttgattatgctgttcagttgaagatcaaaaacatgtgtcctactgatgaagagaggcagaagcttcaacttgacggtttatttctcgatgagtctattgatgaccgtggtgtagcgaagcaatcctttgagagtgggtcatcttca

SEQ ID NO: 283970 - DNA, 1354 bp, Cannabis indica
attattgtttcattatactaataagattagtcactaaagcaatacaagattagaaacacctctcataattatcttaaattataaataaaaattaagaatttatttttgaaactgtacacactgtttttctttttcttttatattatatattaattttttttttttaaataagattgtttgtttacttaaaaattttaaaagtgcactaaaattatcaatcctttcaaaaaaaaaattatcaataatattatatattataataattataaatcataaattataaattataatatataaaagagaaaactaaaatataacaaagtgtacgtgctatacgtgcaattgcacgtaacttcaatctagtatatatatatatatatatatatatacttaaaaaaaaacgttaagtatatatgtatatatcaaataagtattactacaatcaacaaaaggtacaacttaaaaatttaataaaaactagttatgtaataaaaaataattaattagtcataatagaaaatttattactataattaatataacttgtgtattcttaggtttaagtgaataaattttgctttattaattaattaattgtattatgctaattaataaattaaaattaactgtttttaatttaagtgaataaattttgctttctctctctcttcacttaaactaaaaaaccctaatctactcttttaacatacagccgctctcattaccctctctattttttcaagatgcgaccaaagcaaaatttggccatctctctcgtgcaaagacgcaggcgacctcaacactcctcaggcgaacccgtcaggcaggcgacctcaacactcctcaggcgaacccgtcaggcacaggcgacctcaacacatctactcctcaggcgaacccgtcactcctcagacgaacctgtctctcctcgggcaaactcgtgaaatcacagggccaaatccgatgatatctcttttcaatcggtatttttctttttgcttctctctctttaaatgtgaaaactgtttgaatctatcgtggatctacatgtttgaatcttgtcagtggatcttcggagttacgttagacgtttcgagatgggtggtcgacgacgtatttgttatttgtggtgtaccactgctctggattcatggacgacgtacttggttcatataaatgtgtattcttaggtttttatttagtgaatgggaagagacaaagagtatatatgaactgtgtattgttcatatcatctgtatttttatttttttaattttttttttatttttagttttatcttggatttgatgtatactgatatgtagttttttatttgtttgtatattaatcttga

SEQ ID NO: 283971 - DNA, 843 bp, Cannabis indica
ttgaataaaaaaggaaaactctaacctaaactttgtcttgttacattcttgcttttattatcttgttataacaattaaacatgagtaatattagagtggatgttgacaagtttgatggatcgggggactataggatttggaggaagaagattagagctcttcttgctcataacaaattacttagggttcttagtgaacctatagaatggccagaaaatacttctaaatctacacaagaagaacttcttgaaactgctactggtttaatcatttttaatttgtctgatgctattatcaggttagttgacaaagaagatacaccagcaaaaatatggaaaaagcttgaagatcagtttcaaaagaaatctttaatcaacaagatctttcttaaagaaaggatctttggtttcaagatgagcactagcaagactcttgatgaaaacctagatgaatttctaaggttacatattgaattggctaattctggtgaaaatgaggcattaagtgatgagaaccaagccatcatcatcttaaactcattacccgaatcctacaaagaagtgaagaatgccattaaatatggtaggacagaaattactttagaagaagtgatttcagccttgaagtcaaaggacttggagatcaagaatgagaagcatggaggttctaatggagaagtaaacttcagtagagggagaccaaatcaaagaaaacatggacactacaaaagtaaaagtcacagcagagatcaccacaaaggaaagagtcacaacaagggaagatcaaactcaaaagaaccaactgatcctacgggatgctacaactgtggcaagccagggcatt

SEQ ID NO: 283972 - DNA, 597 bp, Cannabis indica
atcaagtagtgtcgaaagttcaggagacaaaaatactaattattctaagaagaatatataattttattgtcatattgtttctcttagaatcaatttagggttagttcacaaatatacaaaaataacaaaaaaattaaaaaactacggttgttcggaattttaaatatttttacaattttattattttatttacagaaaatacggactttttatgtactcttgttaatttgttgttgatttttgttatctgtatgttattttttgttattattttgattttgtttggaagttattttcatgttacttttatgtagttttcttgttgttttcgtattgtttctatagaaaaccgcaaaaatataaaaaaaaatctttaaaacataaaaatgtaaattttttttcttacaataaatggtgctttgtgtaattatcctatcaatttaagtaactattgtttaaaaaatattaatttaaattttgatagcttatgtatgataattcaaaattatgcattttcaatgattttaacgaatcaaaaggggagaagagaagggaattcgaatattaataggagcctctctttatctgtttgacaaa

SEQ ID NO: 283973 - DNA, 525 bp, Cannabis indica
tttttggcattgttccaacatttattaactactagtgttatttcctgattaacgcaaaagtagttgccaaaaagtaaagaatccagtatccctaagggagtagacatatagaaagaaatttcacaatatcaagtattttgtgattaaggaaatgtaatggtggagaaaaggttgtattaatacaacctgtcagatcctattacgaagagtacactacatactacacttgatttgtctatcaaggtgttgagattatttgaaatgcactttttgtttcatattagtgcaagtgggagtttgttgggttttatgccctaaatataacccatttcaatataatcagatttactcataaagatcagaaataatattttatgttgcatggttaacatgatttatttcatgattgtttattgtacaaattctattaagcccggaacatatgtatttgttaatgattgtagtgttgtcagcacagtggaatatgatattgattgtatgttcaaaagtttaattccctgattt

SEQ ID NO: 283974 - DNA, 672 bp, Cannabis indica
gtttcgatgctttcttgctgaaatttaagtagttttggattagaaatcgagtttagaactttttaaagcttggtccgagcgttaatggcgttttccatttaagggctcgattttaacttctgttacgtagaatggtagtattcatggtatatatgtgccctgtgaagtttggagtgatttggataagttttggtagtgtttcggtgagtgcgaaatttgagattttcgtgtttcatagtttttagaaattcataggagatcagaaatcgtatttttatcataacttttcactcgggtgtccgttttggacgttctatataccatttcgaagcttgcgacgagctctacaatatggtgtatgttttagagccaaaatattatttttattttagtgtattatactacagagtttggtagaaaatcctagattgtcttgcgcgagtgttaagtggtgttttgggataaacacttattgatttattattgttatgacataggaaccgagattatcgatcgttctctaagcaggtcggccgacgtacctgattcggaacttgaggtaagaaaagtataatgtaccacatggcatgacatgttctgaaattatcaattgtctgattaggcaatgataatgtaatgatactatggacacgatatatgggctcatctgat

SEQ ID NO: 283975 - DNA, 725 bp, Cannabis indica
ttctgtcacctgtcacattcctgtcccttcaataaataactatcatgtgtctttttttttttcctatttaaccgattcaatgttcaagattcactctgttagttccatctcttcttctctctcctcataaataattatttcctaattaatgagtatattaaaaaaaatacatattctacgacatttaatatattattcaaaaaaattatgatatattcttataaataaagtttctatggtatatgcaaatgcaattttaataaaatttatttaaaatatttcatagcctaaaaattaaataaatggctactataatagaaaattaaatatacaatccatttaatttattattattattatatatatacaatccatttaatttattttctaaaaaaattgctctaagattattttttttttttttttgcaattaaaaaaattataatttatatacatgcaataaatatatatatataatcagacctaaatttttattttgtaaagacttaattattgtaaaaaaatatattgtatttatattaactataaataaatattacaataaagtagaatttcaaaaatatatataattaaaataagtttaattaatttttctaagccttaattgttataaatatatatttgttgggaacgtttttatttattattttgtatgatataattatcaaattaaaaatagattttattcttttttaaaaaataaa

SEQ ID NO: 283976 - DNA, 578 bp, Cannabis indica
  modified_base (130)..(130): a, c, t, g, unknown or other
tttttttattttttttttttttgactaaatttaaaaaaattattaattttatatacatgacaataaatatatatataatcagaccttaaatttttattttgtaaagactttaattattgtaaaaaaaatntattgtatttatattaactataaataaatattacaataaagtagaatttcaaaaatatatataattaaaataagtttaattaatttttcaagccttaattgttataaatatatatttgtgggaactttttatttattattttgatgatataattatcaaattaaaaatgattttattctttttaaaaaataaatgcacattttttttttcaataggactaacattgagtatttagagattgcatggatttttttttttaaaactggagattgcatggatttttttttggaataattacataatgcaccattttttttgtaaaatatttacatttttacgttcaaagaatatttttttttacatttttacggttttctaaaaattaacacgaaaacaacataaaatctacaagaaaacaacataaaagtaacatcaaaataacaacaaa

SEQ ID NO: 283977 - DNA, 881 bp, Cannabis indica
taaatttataccaattaatatataatttaaactatttataatttattaagatctattcaattttaaatatataccaattagtattttcaatttcaaatacctaatagtatctattacttatttttctctatatatacaattttaaatatagactaattagtatgtacattttcaaatgtatacctaattgtatctattactttttagtatctatataattttaaatatgtactaattagtatgtacaatgtcaaacatagtattaattacttcatacttgttaatagtaactattatatattctttaacatatactaattagtatatactgaaaaattgacgttttgcaaatgccaataataattacagaaatatacgaaatataaaactgtatacgtctgcagaagcagaatgtaattttgttactgcagaaaccagttttgcagcgacaaaactgaacagacggaatataaaaataattgcagaaaattaaatcacttgacacaagagatttgtacgtggtatctgtgttcttttgaacactactagtccacggggccacgcccagagaatgaaatcaattagtaaagtatcaaagattacaaaagcaattgacttaaacaaatttagactccctctagtgatttgcagcaactctttgtaatccaccttgctaatctgatctctgaaacataacaagtagtgaactcccttcagctattgatgtgagtgttatagtgagatttctctcacctagaaactcgagaacagactcctatttagagtacacgtatattcagatttccaatgaaagctgaaatgtccataagagactccttgaagtttaaccctcgcccaggataaagctagcgagatactgc

SEQ ID NO: 283978 - DNA, 104 bp, Cannabis indica
caccttcttttgataagctgtcattcgtatttgtgactcgtcccagacccataacactcttggaaactcttcaggccagttgattttgcaggccagcagctttt

SEQ ID NO: 283979 - DNA, 739 bp, Cannabis indica
aaaactcgggtaaagaaaaaagagtgcagtatgaaattactccccctcattttggcattcatggagatcctttaatcgacgcattccaatcttgtgaaccatcttctcaaaagttgatgttggtaatgacttcgtgaataagtctgcaagattatcacttgatcgaatttgttgaacatcgatatcaccattttcttgaagattgtgtgtaaagaagaattttggtgaaatatgtttagttctgtctcctttaatgtaccctcctttaagttgagcgatgcaagcaacattatcttcatagagaattgttggtacttctttattagatgttaatccacatgttcctcgaatatgttgtgtcattgatcttaaccaaacacattctcgacttgcctcgtgaattgcaagtatctcagcatgatttgaggaagtagccaccagagtttgctttgttgaccgccaggatatagcagtgtcaccgcaagtgaacaaatagccagtttgagatctagctttatgtggatcagataaatatcctgcatctgcgtagccaataagttgtgacccacaattattagaatagaataatcctttatcaatagtaccctggagatagcggagtatgtgcttaatccctttccaatgtctatatgttggagcagaactaaatcttgctaacaaattgacagagaaagctatatcaggtcttgtacaattagcaagatacatcaatgctcct

SEQ ID NO: 283980 - DNA, 622 bp, Cannabis indica
tagtgtgtaagactgtgaagaatccaaacaactgaaggagtttcgggctcagatcttgattatactctgcaacagaaaggagcaagggatagagatctgagcgaaaggagtcatttaattctgctggaactaatgtaaggtttcttataacttttatatgtttattttcatcgttttagaagttcatatttaggatgttaaaaatatagttgttagtaaatctaggtcctggtaaaatatattccaacagaatttgcagctactactactgaaaagaaaatgacaaagactaaaatttgccataagagattgggacatgtaaatgagaagggcatgctaaaactagagaaacaagaatagctagggaaagacaagttgaaaaaacttagtttttgtgaacattgttgttgaccgaggttttcgacaactaataaaataataagagtttagagagctgtaagaaattaagagagagatttttacgtggttggggcggtaatgagccttagtccacgagcctatatatttatgattgtatttaatatagagaatgttcttggtgagtatttactcttcttgcacttatgcaacccaaaattctcgacccccattaatgagcttt

SEQ ID NO: 283981 - DNA, 452 bp, Cannabis indica
attaacacacaataaaggttgtttaattttatatttaagttaaatcaaaataactaatttagaaattcaaacagttaaaaattttaatcaaataaaaatcatatcacttagttgagtattattaggatactcataaatatcttaacatcaaatattaaaataaagatatatttataaatttatttaaattttaaataaaaataaaaataaaaaatgtaaatccactccaaaattattaataaaaagtagtcattaattattcttagtcactcaagctcctataaatataaagaaattaaataccaacgttaccttttatatatttctatctaaaattttcaaaaaatatataaagaaaagtttttgctctctatagctttaggctattgcaaaatttgaaatgggggttttattaaaaaagtaaataatcgtatttttaaaacttataattt

SEQ ID NO: 283982 - DNA, 594 bp, Cannabis indica
gttagttaggttttcaacaagtaatttccaatgtacaaatttttgaaaagcctcatttttatgctttaacagataaacccaaaccttcctagaataatcatcaacaatagacaagaaataggcactacccccaaaagttagggttttctcaggaccccacaaatccgaatgaacataatctaagataccttgtgatttgtgtgtgccagtttgaaatttaagtctatgatgctttcctagtacacaaaattcacaaaaatctaccttggttaccttgtccttaccaagtagcttttgttcactcataagttgtagccctctttcactaatgtgtcccaacctcctatgccataggatagccttagtgtcttccgtcacatgctccttggtgttgtggcagcaagctacggggcttccttgcaagtagtatagaccaccatttttgtgtcctttgatgatagtcatagaaccttttgccaactttattgtacctgcctcaattttgctaacaacaccaagatcatcaagtacactaatagaaattaagtttctagataaatcaggaacatatctaacattagttaaggttctaat

SEQ ID NO: 283983 - DNA, 564 bp, Cannabis indica
gtcgtgtacccagaccggaactgagacccggacgtggacctaaatctaggaccgtatcccaaacacagagttggacctagatagggatccgcatacgaaccaggactcggaccaaaacccagactgggatcgaaatgttggacctagatctgggccgagatcctgacccagacccaaactttgaccagcacttcggacccgaacttggacttggacccgaacctagacccaaatcacggtccacacctggacacaaactcggactcgaactcaaacccacacttatcttcagacccaaagctagaccctgacccggacccaaactcaaaccctgaccaggatcagaaccaaggacaaagacgcagaattcaatctaaactaaaattggtattggaacttgggactcggaccgaactaagacgaagaccaaggaggcgaacccacacccgaagcctgatctggacctagacagaaatccggacacgaacccaaactaagacaagttctcgaactccgacacgaactcaaacccaaactcgaactcagaatcgcaaatggaactag

SEQ ID NO: 283984 - DNA, 655 bp, Cannabis indica
aatgattgtttatgtactaaaccatgttacccagactttgatatctaccaaatcatgccctacgaactttgacatgcactaaattatgcccctgaactttcatccatattagacttttttactaaaattaaaaaaaaaaaaaaataccttaaatccaacaatctcaatagttcaggagcattttcaatgacctttaagttcagggacataatttggtacttgtcaaagttcaggggcaaaaatcctaattagccattaattaaagactctaaccaaatcctaatatttatatatatacatattataaaaatcacaataaaatttatagttataaaaaaaattgtgacaaattataaatgatgactaaaagttgtcacaaatatttatataaattaaatatatttttactttttaattacaatacttattataactaatactaaattaataacaacttatatttaaatattatattttagtcaaaaaataacataaagttatcatgtaattaagttgtttttttttttaattttttcattttttacactttacaattacataaggttattgtttgtagtgatatatgtatgatttaaagatcttttaattattgtttgtttttgaaacaaatcgaattcaaaaattaattgatgac

SEQ ID NO: 283985 - DNA, 505 bp, Cannabis indica
gtttttgcaacatgtgcaaaaaaccgggcagcaacctgtatgattcgttggcttttcctcgtaattcttcttgcgcgtgctctttgcttctccatgctttcatgtagttcattctcaccccatacttgtgtttcatttctcctctgatgtcttgtggcgtttgagttgtttttatgttggtgaaccgtggcttgatgtagtttccaatcaatttcgttgtagcttgtctcttgtcggcaaatctgatgtttagatcacaagtgtgtatcacctttctgtcgtactttcgaatgatgaatgactttgttggcccgtttctggatgctgttagtgcccacttgcattttggatccaaacaacaaatcttgtatgttcttgcacatgattttttaactctgaattggaagttgttcctaattgcatagaaaccaagcacactctgcagtgtttctttgtctttgtatatttgtgcttcttctatttcaggatgatgcggatctgtgat

SEQ ID NO: 283986 - DNA, 702 bp, Cannabis indica
tgtaaaaaatgtagcacatcaacaaaatttcatattttaggtaccaaattactctagaaagcaaaataaaagacaaaagatggaaaattatgttactaacaaaattcaatattccaggtaccaagttactttagaaaatatcaggttactttttgatgttattaataggttacatgtgtaaaaaaaatatagaataacaagaaaatttaatatttcaagtaccaagttactttcaaaaatataataaaagacaaaaaggaaaaaaaaaatgttatgtttgcattaaaatcagtcaaaatgtagcacacaactaaattcaatattctaggtaccaggttactttagaatcatcgagttactttttgatgttgccaataagttgcatgtgtaatagtagtggcgtttaaaaaatattatgttactttttgatattgccaatagactacatgtgtaatggtagtggtattaaaaatatatcgggttactttgtgatgttgtctctagcatatgttaatttttatggcatttaaaagtactaggttactatttgttatgcatgtaattatttaggttactttaataatgttaaaataagtaggttccttttatcattatctttattaattgttccaggttacttttatagttacttctatagtgtccaaaaagtatcaggatatttttttttacgtttttttactt

SEQ ID NO: 283987 - DNA, 456 bp, Cannabis indica
gtaggtaatctccacaaattatcgagtctgtgggcgaaccaaaataggttgttgttgttgttgctgactctgcgcactgaaaatctgaccatacataggttgttgtggagatcctcccatttgaccatacacaggttgttgctgcaacaatgacccaaattgaccgtacacgggttgttgttgggatgacccaaattaaccataaatagggtattgttgttgggatgagcctccaatattggcaaccataggttgtgtctgagatcctcctgtggcatccgaaaacaatataggaggagactgtgagggaagcccgaacatgtaatgtaactgaggcgattgtgaagagccaccagacatgttgggagaatttcgttgttgttgttataagaactgaggcatccgaggcgattgttgttgttgttgttgttgttgttttgttgttgttgttgttgt

SEQ ID NO: 283988 - DNA, 475 bp, Cannabis indica
aggccaaagaagtccgccacattcttgaagtattcatgcaaaggcagcagtgccccttgctgggcatgggcacctgaccaggcacacatccccctttcagggtttgtggcacgattgttgtgggcgggaatgtagcaatccaattcgcccacgtatctgccctggtcgagagtctgaaggcacgcctcagtaaccctggacggagggcttacccacatgtcgcccaaggcaccttgccttctatgaggaatcgcaacagtaagctcctcactaacgtagtccacgccctcaaccaggacgtctccgtcagcatcgactggcttcccagcctcattgtactccccatagtttgggggttcaacctctgcctcttcctccgcctcggaggaactactaggacatacatcgccctgctcctcaatctcctggacctcagcgtccccttcatgatccccctccacctggacggctggat

SEQ ID NO: 283989 - DNA, 517 bp, Cannabis indica
tgtttaagatacattgagattatttttttttaatgtaactcatatgatgttttagataaccaacaacaataattccctaaacaatttgatatttacatgcagagatgtaattaattttaaaaaatatagaataacttgtgatgttgttgtattgaatttaaagtactatgtgattgccatatatttattttagaaacatattaaaattgttacaaaataagttaagtgtataagcttattacttagtaacttataaaattggttgatatataaatttggtttaagttgaaagttggattatttttgttaactagatacatagaaaagaaacttaaaagttactttttcgggtcatttgtttctgtagtggcagaaaaatatatgcttctcacatatcaaaatgatcatcataaaaaataaattataatggtgcaatttttaagtcaaaataataaatggtttagctgaaaaaactttttaaagttttaaaaaaaaaaaaataatatgtgtatatata

SEQ ID NO: 283990 - DNA, 793 bp, Cannabis indica
tccaagtttctaaccctagcggcggccaggctaaaactacttaagtatgccttaagtgtttcgtcaggctgatgctttatattggttagtgaggccgcttcgggtcgcctatccctagcgccttgaaattgcttcttgaaatccctggacagctgctcccaggaagttattgaatgaagagtaaacttgttaaacaagttactcactgctctaacaagcgaggtggggaacaaaatacagcgtaaattgttcgtcatgttactcgctcgcattatcatgttaaagttattcaaatgcgagaccggatctgtggttccatcataggacgagacatgaggatttttgaatcccgtaagaaaaggggtattcataatatctgggtgatacggctcaagctcctcgtcagagtcgtatccagatgatttccttaattgccccacttgatatctcctgaacttgtcctctagctcgtttatccgtaattggattggatcctcttgctttggaccaagctattggcgaaggtcaggtttcttccgattcaagtgctctcacagatcttgttgggagtaattgctagcagatcttattttactcatagatcgcgtcctactcatagactttgtctttaagtggctcgcggatttacttgtccccatactttcccgatcattggctcattgagtactttctcctcttcaagttgatcggctatgggttctggatcgcctcaaagtcacacttgcttcttcacgctctgttctttcctcccgagagcagtttgtcgtatttc

SEQ ID NO: 283991 - DNA, 764 bp, Cannabis indica
tctcttcatttactgtcggtaaacattcatactatttatggataattatacagatacaataacttattatttcagattttttgtttcattttagttaaaagattttgaaaaattctatggtgcacctatacattaatagagttacatatagttttttgcaccgataaataacctttggctagaataaataaaaatataaaaatataaatataaaaatggaataaaattaaatctaaaatgtataaaaaaataatatattttttttttaatttggcactggaatgatttttacagtcattcactaacatgattggaaagtcatttaattaaaatgacattcttatttaaacaaaaaaatagaatgaaaataaatttatttcctaaggccacctaatggtagcaaatttccaaaaaattcttaaaattttaacatgtggaaaataatattcgataatatattagatgtgttattgcatgtatgtaataatctgtttacattctatactgtaaattattctgatttttttaaaataaaaattaaaattataactattcaatattaaaattatagtgacagaactacttattaaaattatagtgttgtagtcctcttaattttttaattatatatcattttctaatttacccctcaaaagtattttttaacattttgccaccctccaaattgagtgagagtgtaccattttgcgatttgcatcttagagcacaaagatttttgtcattggtaagaagacaatgtaaac

SEQ ID NO: 283992 - DNA, 598 bp, Cannabis indica
gggcaaagggtcgaaaaacttgtctaagaatttatattcagagatactattgtaagagctctaagaaaagggattatattccttgttcttaagtcaatacaaacgaagaggattaggctattaccgaactgcttggggctgaacctctataaaattctcgtgtctttatttactttattatattacatacacattatactacttgtcgcttataatctagactcactctcgttggccaaaagcgaggtcaacattttggtgctttcattgagagctgaactcaagatcgttctcagatctaatcgcaaatacaatggtggtacagactcgtagaggcgtggttgatccggcaaatccacaagtggtggatcctgcactacagaacccagggaacacaagggttccaccaaccacaaatcccaaacaaccttcgaccataggtcacagtgtgacgactcctgtgagcgaaatcacgcctggtgtgcaagagacagggaataccagttcagcagctaatcagggcattcccaacactgtcgttacgccagtaacaaatgttcgaactgttgggttttgtgccctaaataaaacccattac

SEQ ID NO: 283993 - DNA, 358 bp, Cannabis indica
tattatttaataattattatttaataaatgacaatttgagaattatttataattctcaaattgatattttcattattttaatgccaaataattcctaaactaaacctagtagttgcctataaatagaaagtgatggctcagtcaaatcacatgttttgaataaccttttttgtcagaaaatttctcttcataaaaactgagccttccctttctcttctttggccgaaattactctctctcttttcttcttcataaattttgaaccttagtgatagagtaagttcccacacacaacaagtggtaactcaattatagattggaagactgtgaaggatcacacacaaagagagggattcgg

SEQ ID NO: 283994 - DNA, 664 bp, Cannabis indica
acaagagaagcaaacatatagaaaggaaataccatatcatcagagagtatgtggcaagaggggatgtactggtggagagagtggacacagaggacaacctagctgatccattcaccaaagttttggcaagaactccatttgaaaagcaccgtcagaattaagaattaattgaaatgtactgattgttttatattagtgcaagtgggagtttgttgggctttatgccctaaataaaactctatttcaatgtaatctctatcatttgaatatcaataaagagagagaagtattttcatcacttatataatttgtcatttggttcatgttatcatttatatgtttatttgatttatatattcatccaaatccttatcacatttatgttcttgattattgtgtcgtcagaacagtggaaagtaatcgagaatgtgtgattaaatatatattcctagatttatcagtacactggtttaactgatatgataatctacaacatactttacttgcactttgaataagtattatgtcctttccagcgcattggctaatgtaaagattgggttgtgtgcatggagtatgtatcggaaggaagcgatattgaactttgaatcagatatgataaagttaccgtaatatctattcaattcaataccacctagttgat

SEQ ID NO: 283995 - DNA, 495 bp, Cannabis indica
tgcccgtcgaactcgagccaccttcccacagaagattgacatacgatcaaggtaccgatcacatactccttatagaatcacttgatgaaatcgaagaaaggagagcagctgcaaacttaacgctgatggcccatcaacaaaaagtagctcggtatttcaacaaacaagtgaaagctcagaaattcttcgtggggagatatggtcctcagaacggtatttctaaacaccaatgatagtacgacaggtgtgctaggacctaacaaggaaggaccatatcaagtgttcgaagttctcaactccggagcatacaaattaggtaagtatgacgaaaaaaatgcaactcattctagtaccacggtactggaatggagaacatttaaaaaaatactaccaataaagtaccaggtcgggtgaccactttaagtactaaatgaacattcgcttttaagtgaatggccttctgggtggactacgcccaaaggtttcgataaagaa

SEQ ID NO: 283996 - DNA, 528 bp, Cannabis indica
gaggacggttaaatgtatgggtgtaaattttaatgaggtggcaaaatattactggttgggacagagagtgtgacaggaactagggacaggtgatttggctccgatacggatacgctaccgttgcgcatcactttattacaaactaaagaactaaggggccgtttggtaggaggtgttcaaaataatttgattataggaaatattatgaaggagaatatgattatagggaaatgtgtaaactgtgtttggttgtgtagggtaatatgtaatcatattcttgttaatttaattaaactgtttggttgagtacaggaatcttatatattattttaaaaaataaaaataaaaatattttttatatatatatttattgaatgttaattatatataaaaataaaataattatttattaaggaaatttatttattaattagtaaatattaaattagggatttactccatatactttttttttaaccttttttttttctaaatttacggtttgggtttctaaagtggttgcagcgc

SEQ ID NO: 283997 - DNA, 543 bp, Cannabis indica
gtcaaaaatgaagttagataatctgtgggttgataaagctttcgagttaggagaaactttgtgccaacgggatcccggcacttgtaaatatttttataaagtttataaagtttcttagtttatactaaaagttttaatttgacacaattttaaagaaaattctttgattagcaaagatagcacttcagttataaaattactgtagtgtgccttagcattagggcgttacaaaatattagcaactaggagtaaccaaacttgtgataactaggagtaactaagcttgtggtacttggtttaatccacatgggacaaccaggaaaagtaatgactataaactagaaccgtgattatgttccctacttaccggttatctctataaatagtatattaattaaacttgttattataggactattcttatagattttttttttaaaaaaattgtaattattgtatacaataaaataagactgtgtgataagacatcaataatatttttttatacattgaatctaaaaatatgaaatttgcacttagtgc

SEQ ID NO: 283998 - DNA, 678 bp, Cannabis indica
aaatccctttcaatttaacccaattctattcacacaatcaatttcaacaatgtatatagcaaaaatcccaaatatccaccaaataattcaaaactatccaacaaattcagaaatttttcaataaaaattggaatggaagtcttagaatcaatacctcaatgaaaatcactctttagtcaacctccattgatgagaaccttgaagctttagggaagaagaagatgaatagtgatttttctgaaatttgggtgaggtttagggattttggaatggatttttaagtgggaaatagtgtttaatgtgagaaagaagggtttaggatgattgttgatgaaagtttatggttagatttgatgaaaaaggagtttgaatgggattagatgaagaaaaaaatggtgaggaatggtgttttcggctgggagaagttagggtttgagtgtggggtttgatttgaaatgttagggaattggggtttaaaaaggccatctgaccattctcgccgcggcgaccatgtagcctcgccgcggcgagaatccgtgaatttatgggtcattctggaagtcttatctcgccgcggcgacctgtagcctcgccgcggcgagaatcctccaaaatactcttctttctgtaaaacaattctggccgcggccagacatttcatggccgcggccactgacc

SEQ ID NO: 283999 - DNA, 667 bp, Cannabis indica
agtaaaatattatgatattttcataagtaggtaatcgtttaactgatatgcaagtccattaggatttttataatatatctattagatttaattaattgtataagtggtattaaataatattattatttgattaatgttagaaaaatcgtaagtttagagaaattcgcaggtttagaaactgttttactaaaatgaccatatctggagttttataactccgattgaggtgattctagtggcgttggaaagataattcaaagatctataaatttgtagaaatagctatatcataattcgtaatttttctaggtcaaaactaacccctaaagttacgagattgagagcttacaatttaaatttaaaagtaagatatttgtttatttaataatttatcatattattattgctattatgttaatattattattattcataaaactaaacctaataagagtcagaatagtataggtttcattaaccctaaaattatatcgttctattcttcccacctatctgagcaagactaaccctaaaagttttcaagtcatcgccaaatctatagcactcttcactctcatctttgatcaccatcatctcatgtctattaatccaagcagcttgaagtatttgtgtaacaccctaactaacataggcgtattacgtgatt

SEQ ID NO: 284000 - DNA, 857 bp, Cannabis indica
atataatttacaatattaaacaccaaaatttaattttattaaaattattatttatcctcttacaactttaagctaacattaaccttctacttaaaattcataatttttttctcttaatttttaacttttgatagctaattgaaaagaattatatataagataaaaaaaatatctttggaatgaatagaatatgtatttttaaaaaattaatgaatagaccaggatgcacatgcttatagccggccctgcatatgaatagacacccataaaaaattacatctgttctaaaagttgtcattaagcatagggaaatttgattttctatacttatatatacttaatattttatctctaaactaatacatatcaccattgaaaatatatgaccactttatctaaaacccaaaaatacccctctcaaatttcccatactctttttagtgcaaaaacataaaaaaaaaaatggtagtccgatggggtctgatggtcacctggtgctacttttttaaagtaacaaaaaaaaaaaaaaaaattggtagtatatctagtccgatggggtccgatggtggtccgatggtcacctgatgctatttttttatgtattaaaaaacaaattagtagcagatatggtccgatggatccgatggtggtcagatatggggtccgattgtgtccgatgtggggtccgatgggagtccgattgtgtaaatgggggtgatgtaaatgggagtattttaggaatatcataaaaattgtcatatcctacaaatattagttattatttgtttaggaatttttttttaaccaaatgtaagcataaaaaatcaaattttcctaagcatatcaatactggtaac

SEQ ID NO: 284001 - DNA, 628 bp, Cannabis indica
taaagtgagtattttagttatatgtattttatataaagtgtgcctatataaccgaattcatgagaaattcatgggtgattttttatttatattaaaaataaaatggtttattattaaaaataaaatggtttatgagaaattcatgaaaaaaatacgattgggtttttgctgctgtacatctacgattgggttttctttaattatttattccttttcctattacaatttggacattcccatgagatcacacaacccaacaaagtttacaactaacaaatgattgtaagtgctcgacatatgcattagtttccaggagcaaaggtttttaaagttacataataatttacatatatgctgcaaacacaatatacaaaaaataaagaagaatatggaagaaagaagagaacattattcacatttagaaagtacgagtgtacaaaaattttcgtaaaccgcctaacccgaataatccgcccaaaccaaaccaacaaaaccgatataaaatacaaaccgacataactcgacaaaattctaaaccgaccaatcagttaattgggcgggttgaaaattgacccaaactgcccaatcaaatcctaaaattctttctcaacctctcaataaaattctt

SEQ ID NO: 284002 - DNA, 547 bp, Cannabis indica
aaagaaccatccgagaagcagcaagagcgaatagataagcgtctttctaagcaaactcctcgacaaatttcaggtaactcgtcttttgttataaactaacaggtaggattgtgatttatacttatctttcattcatgttcgcagatatgacttttctgaagtctgcccctgtcctgaagatcaaaccaaagggtggaacagcgacgacttcgccggttgttgcccagaagaggaagagcgatgtgatggcttcacttgtcgcagactcttccaagaagctggccaagaccacacaggacaaggggaagaaagtcgtcatcgacccacctgttcgagctcgcgacttcctggccatgcagaaaaagttcctggctgagatcccttacgaggatcttgtcacgcgatctactgaactagccgcgcagtccatggctttgttcataaaagctgcggctactccttcgaaggaagccgactcgctgaagaggcagaacgctcattttcaggagaatataaaaaagctgaagcaggatgtggcgaggatgga

SEQ ID NO: 284003 - DNA, 701 bp, Cannabis indica
aatagaccctgtattttccaaaatagtacaaataggatcctgaacttaatttttgacaacttttttttaatataaccaacttgaaaatacgaatagatacaaaaaatgtaaacaattttgtcataacacttttagatcggattattattaaattttattttgacaaaaaatcagttcagggtcctatttttatcaatttagaaaatacaggatccattttgtcatttaataaaacagatggtccaatcagtaacttttgcaaaacacagagtccaaaatggtatttacccttataaaaataacaaaaagtcacataaaaataataaaaaaaataacatcaaaataatataaaaaaacaatatacaaataacaaaaaaaaataataaaagtataaaagtataatacaaaaatataacaaaaaaccattatttatgtaaataaaattttaaaactataaaaatatttaaaaaaattttataattttttttagtttgtgtattttgaaatgatccctaaaaatatagtattgcagaattgtaaattttttttattgtttataaatgttttccacaaaattttgaaattgttgatttatattagggtaaatattatttagtaccctgtgttttgcaaaaattactaattagactctctcttttgttaaatgacaaaatggaccctatattttccaaaatgataaa

SEQ ID NO: 284004 - DNA, 751 bp, Cannabis indica
ttcaagatgttgaagagggaatgcattgtctgtggaccgggagataaaacggctcaggggagccacctttctagttaagctctggacatctttgtgcttcttgggggaaggcatgctcaggagagcttggatttttttttggatttgccccaattccctgctgactgacaatgaagcccagaaactttcctgacttaatcccgaaagtgcacttctttgggttgagtttcatttcgtatctccggaccacttcgaagcattcttctaggtcatccgcgtggctagtgcacgcctttgacttaaccagcatgtcgtccacgtatacttccatatttcgccccaggaggcccttgaacatctggttcaccatcctttggtaagttgcaccagcattcttcagtccgaaaggcatgactaagtagcagtatacccccttatcggtcctgaagcaagtgcagtcttgatctgtgatgtgcatcttaatctggttgtaaccagcgtatacgtccatgaaggatagtagcttgaatccagaggtggcgtccaccatctggtcgatccttggcaaggggaaacaatcttttgggcaggctttgtttagatcggtaaagtctatacaaacctgccatgtcccgttgggctttggcaccagtaccagattggctagccattctgggtaatacacatcccgaatcacgccactcgttagtagtttgtccacctctttttctaaggcttcaaccttcactga

SEQ ID NO: 284005 - DNA, 543 bp, Cannabis indica
aagggaagtcgaagaactcatctgtgaaggagaaaaggaagggaccaaactctgtgtctgatgtaattcgtacgaaatcgatggatgttgtattaggtattactcctctggaattatctgatgaagatgatgaacctgatgcgattcaaagtcgatcctcccttgcggttcaggatttccaggagccattatcgccaagggcttctttgagggaaataaggcgaaccgaagatgcgagatcagatttcttacactttgttcaagctaataatcaatgtaacagtaatgctagacatggtaagcccctatactcagatctggtactgttattaggaatttggatcaatcttttcaacaaattgagaagcctgtcaaggtcaaaattgaattggaagacattgagaggagatttcttactggaacccgtctattgtctgttatgtattgggatcaaatccccctctacatatcttagatggctttgctagtagaatatggaaggagaaggtagataaagtcaaattgctcacctatgggatattt

SEQ ID NO: 284006 - DNA, 563 bp, Cannabis indica
atatgggaggaagtgtacaaccaaccgctaccattcaaagggcagaaatttcttgtgtgtattgtggtgatgggcatacttttgaaaattgcccttcaaatccagcttcggtttgctatgtgggtaatcaaaacttcaaccgcaacaacaatccatactcaaactcctacaatccggcatggaagcatcatccaaacttttcatggggaggtcaaggggcaagttcaagaggagcacaagcacaaggaaaacaatcattttcaccgggattttctcaacaaccaagacctcaacaaccacaccaacctcaaggctctcaaacaagttctttggagagtttaattatatggccaagaatgacgctgtaattcaaagccaggcagcatctcttcggagccttgaaattcaattgaggcaattggccaatgatttgaagaatagaccacaaggcactttgcctagtgagactgaaaacccaagaagagatggcaaagaacattgcaaaacgataaccttaagaagtggaaaaataatcgagtcaaatgtggctgcaacaggcagta

SEQ ID NO: 284007 - DNA, 552 bp, Cannabis indica
ttatatttatatagctcaaaccacagtctatgtatatccacttaattaaaagtttggttaaaaaattatttgctcttaaaccaacccttcattgactatgatcatatcaaactaaataaaaagagaacacaatttgctttattaattaagattagagtaacaaaagtatatatgaactataaaaaaatttaggtatatagtcatcttctacaatgtataatgaagttagctctacccaaccacttatcatttatcaatgcatttaaaccatttttgttgggttaggtcaattttttttttttccctctttgagataagatatttttaagttaacctcaaacagggtcggccctatgttaatttgaactctcaacctcttaattattaaactaatcaaattactactagactacaacacatatttaactttaaaagtattattatttattttagaataattatcttttttaccccctgtacttatgacactatactattatgccccttaatctattcagcttgttacaaatagtccttgtataattttatatg

SEQ ID NO: 284008 - DNA, 489 bp, Cannabis indica
tcgttgattcttatttaaaacgaaattatcctaattcctcttagcttattcatttcgaattagcttaatgacatatcattggatgaatggtctataaatcatataaagtcttattttctcttaagaaattagatgacgcatatgattatattcccaaaattctatcccaaatgatataaatcctcaatcttaaaaatatcctacttgtatgggcaattcaacttagagttaaattagtagtaatggtccaagaaagaattactcattatacagttacactttcacaagtgtttaataaccattttctatcaatggattcaaactgtatggaatatgagtttagtattctgtgaccagaatccacttgcactattctaagaactctttgatgtaactaaacctaagtcatcaaaagatacaaccacatattttataaatctatggcatttgtatcttgttcatagttattttgacaagatcaatctctgc

SEQ ID NO: 284009 - DNA, 729 bp, Cannabis indica
tatgtctcatactgtagagctcgtcataagcttcgaatcggtatatagaatgtctaaaacggacacccgagtaaaaagttatggctaaaatacgaaaatcggcgattcctgaaaattgaccatccggaattccggttggtgcagctctgttccatccggaattccggttcacaacagcagaaactcgaaaatttcagctcttcaaagtcccaaaacttgctccaaacctaaccaattgttcccaaactttacagaacagtataataacataaatataacatatctcaagcttcaaaacacaaaaattcaatccctaactcaaaatcacatgttcaagtgaagaaattcaactttggcttcatcaaaccaaactcaattcaaacagccataaagaccacttaacaccactcccaacatactcaaaaacctaccctaaacacaccccaaactcagtttgattcctacagcaatagaaaagcaaaaccctacctcaaaaccaactcaaaaactagtgttctcaacccaaaaagtaggaaacctacctcaattcacttctaggctgattggaatagaaattctgcttggaaaaagaaagcttgttgaagaaaatcccctagagttggctggttcaagcttgcacgagagagagaaggagaagatgttgtgttttgatggttacttggtttctaagtaatatatagtaatggttttcttttctttcttcttttt

SEQ ID NO: 284010 - DNA, 566 bp, Cannabis indica
ctagattgatcacatgggtaagtttagaaccttatttcttagtgggaaatattttagagaaaataaattatcgggattgagcggggttatggattttgaccattttacccctagctttagaaaaaccttagtattgggttaaagggcattttagacatttggttaaatggtgggataggtggcagcctagttttgtgacacctagcactctaaatattcagcaaaggatagaaatcaatcctttatgcattttaggaaaaagaaagaaaataaagaaagtcaaaaaaatcaagaaactctcttttccttccctctctctcttcgaaaccagcagaagcaaagggattttgtggctggaattctgtgttttcatcaaggaattcaaagagaaatcaaaccaaggtaagctttagtcatatccctctttgtttcttgaaattcatggatgatggagtatgagatttttaggtttagtggctgttaggttttcatatgcttagggttcgaattttagggtccttttgagttgattttagttcctagatgctggtttggttgattggatt

SEQ ID NO: 284011 - DNA, 688 bp, Cannabis indica
agaatggatccggagcggggggtcaccatgatatcccccgaacggacttcgactccaagcagccctacgatttgacttctcagcttctaacaatgaggccgaatatgaagcactaatagcagggctgagattagcaaaaactgtgggagctaaaagagtagaattctacagcgattcccaactggtagtgaaccaagtatcgggagaatatcagacacgcggagaaagaatggccgcgtatgtagcaatagtccgggaactgctccacgagttcgcagactataaagtggaaagaatccccagagaaaagaatgctcacgcagactgtctggctaagttagcttcagacagcgaaatcgagaaactgggggtggtacctgtggaacgcttggcagagccaagcatcaaaataaaagaagccataacaacggttgggcaagaacccagctggatggtccccatcatcgaatacataacaaaaggtgagttgccccaagaaaaggcactgtccagaaggattcagtatcaagctcaccgttatgtgatgatggacaaaattctctatcgaagaggactcagcatgccttatttaaggtgtgtatcggaccctgaagctaagcaaatcatgctagaggtccatgaagggttctgtggagatcatacaggaggaccaagtctctcaaagaaa

SEQ ID NO: 284012 - DNA, 130 bp, Cannabis indica
tattgtctcaactagtggggggaccatgggtctatatatccgagcttccaataagcagatcaagaatttacatcctaaattcactgacttataattcttcattgaatccacgcatagaacttagaattgc

SEQ ID NO: 284013 - DNA, 1039 bp, Cannabis indica
acaagctaaaaacacatactcatgcaacaagttggatatagggtttatttaataattttcagaaaaaaataaaataaataataaaaatatttttttctcggttaaaataaataaataaataaataaataaaaaaattaaattaaacctataattttgaaaaattaggtttcaactaacctaaatatctttttcaaaaaaaaagctaactatcttttaaatttcatgttatttaaaaaataaaatattcaataaaataaaatgataatctaatatcacttttctgactttttaatttaatttaaataaaaaaaatttaaaagttagcataatatcctatttctattcaaaatatcatgattaaaataatcttattttaaatttcaaataaggtcaattaattaattaaaaaaatattaaatatcataccttaaatttaaaaataagataaaataatcaagttttaaaaataagataattaattaagcaaaaaaggtagagttttacctttttcaaattcaaatttcactaatatcatatataaattttaagaaaaaataatagtataattctgataattagatttgaaatttgaaaagtaaaaatcaaaatacaaaactacacaaaaaatccgaagttaattccatgaaaaagtatgaaaaaaatgaagaaaatagaaaaaaaattgtaagctatatcgatggtatgcattgcataccatccgcgcgcggaatggggagtgcctggccgaggtttctcggtgctagaggctgcaagcagcctctctgtgcacgtaccgtggcattcagacaaaatcagcacgttcagacggagaattctcggacatgtgcgtgtctgatgtgcatgcactcgagaaatctcaagcatccgcgcgcgcacgtgtagtgacaccacccctgattttttcaaaatttcaaaaaataataactaattcaaataaatcaaaattaagttctgtaaaaaagtgaattgcttaatttttcccaaactatccaacataaataattccagaacgaaaat

SEQ ID NO: 284014 - DNA, 595 bp, Cannabis indica
ggatgattgatcacaatatgcgaaagtactagattgatctactacgagatcaccttatccattgaggcaacaacttggaatggacacggaagtatggaggattgttcagaatacgcaaaagtatgcactgtaggggctttcattgtctgaatggacatggaaggttttctaagaattcgctggccctactacctagtggaagaaatctatccttaacacccactggttttggatataaaaattgtttaggtgttgacagttgtcgagcgcaacataaggtgttcatgctcaccttaacaaagcatggatgttgaattcgagaaaggcaagaaaacatcaagtcgtggagtaagtcgactttcggtaacaatcagatgataaaaagttatttggaaagaaggctggtcgaattggataaattggaaggaagtgttggcggaaatcaaactttaatggaggaaagaagaaagacaaaaaaggaatggcaaaatttagcttttgctgaagaaagaagtgcatggttgaaagctaaatgctagtaggccaaagagggtgatgctaactcgagattttttcatgacatgttgaatgcgag

SEQ ID NO: 284015 - DNA, 713 bp, Cannabis indica
agatggtggttactctgggggtggaggaattattctagaagagtgttaaaacccatctataataatttaagcttcatcagtgaagatacataactttgtaatttcaaaatactgaaagttattcaactgaagaaaattctacactatgttatatctattctattttggatagaatgagagatatgtcttctgtttattcagatgcacttaataagcagtaaagaattcagtatccctagatgagtaatgcatatagtaaataatgttgcataatgttttatgaacacaaaggaagtaatggtggagaaagcagtagcttaccacagacttacagttccagtaatttgggttgagtcaaatatactacacttgatctgaagatcaagacaatagattgattgaaatgcactacttgttttatgttagggcaaaggggaagttggtgggaatttaagccccaaaaaaaacccatttcaatctaatctgatttgttatcaatgaaagattagaagtcatttatctttacatgtagttttcatgtttatatggtttaatatatacaaaatctagtaagtcctgaacatatagtcattcaaagttacagtgatgtcaacacagtagaatgtgattgtgattatatgcttcaaaaagacaaaagttcctgattcatcagtgcactgaatttacactgatgtgataatcagcgatgaagt

SEQ ID NO: 284016 - DNA, 590 bp, Cannabis indica
tccaaagtcatctgcccgaacgtaagagctccggccgcagagaaggtgttccgagacgaaatcattgccatggcagaggacaagtaccagaagtacctcttcaaaaggcaacaggagctggcttacatcaaggcccaggcgaccgccggaagggcccttcgtattggagctccgtcggagcgaaggacccctagacccaagcccatggtcccagtaccaaatactgaggctcccgatgccagcacttcgggttccggtaagtcccctttaacaatacattatgttccttacgtccatgagtataccagccttaggcctataaggttcgatgagcgtctccgtaggtttaagatgccttccacccggtggggaaatcatgccaaggagtattatttctcccacttaggccattatctagctcggtcccggatggattctggacctccagcgcctattcccttggaccattcagcccatttatcctctagttggttccttccctcggacagctttctcggggatgatgaagccaacatcatgattcgagactttgctagggaagaattagagagtcagggtaggactagttt

SEQ ID NO: 284017 - DNA, 654 bp, Cannabis indica
tgtctttgatggctccagctttttccaataccagctggcatggatagaggctgtgtagttccaccaatcttgatccttaaggtatacactatgtatccacctttgccataggctgtcccgcttgttagatatggcccaaatgtatttacaaatagctgctttattccattcttctatctttatgattcccaaaccacctgctttttttggttgacatatgttttcccaagctacagccccaggaccattgaacattgcttggcccttccacaaaaaagccctacacacagtttctattgctcttacaactttttttggcaacaccatcatctgactccaatatgcctgaattgctattaataccgagttaattagagtaatccgacctgcaaatgagagatttcttgaactccaactcttaattctagccgtcattttttcaaccaacagttcacattccttacctgaaatcttcccagagcaaataggtatccccagataagtaaatggcagaacttgtctagagaaacccgatgctttaatcaatgtcttcacacttccttcattcatgttactgcaataaattgcagttttgctagcattcggttgaagcccagaagtgaaagaaaacagcttaagagcttgaagcatata

SEQ ID NO: 284018 - DNA, 500 bp, Cannabis indica
tgtagatgaactcaggtgagtctggggaactcgggcatcaaattgaccaggatctccttcaacttctgaatgaggatcatcctcgtctttgttctagtcctccttctagcaaaggacactcttctgaccttgtacccaaccataggatgatggctcgtacaaagaaaaccatgcgtctggtcgatgtttttgatcctcaagtggctcggcttgccactttgcccagcgctgaacaggattcggccgtcccgatggaggaggatcgcgaaggggacgttgaggtccaggaggttgaggagttggacgatgtgtgtccgggcagtccttccgaggtggagggagaagaagaggttgaacccccaaacttcagggagtacaacgaggctgggcaaccagtcaatgctgatggagacgtcccggttgagggcgtggactacgttagtgaggagcttgctttggcggttcctcataggaggcagggtgccttgggcgccaggtgg

SEQ ID NO: 284019 - DNA, 558 bp, Cannabis indica
tgtcagacacgtgtcctatcgacaagctatcgacatgacgtcgacatggcatcgacaaatgagttagcagtgacactaaattggcatgttgtcgacatcatgtcgacatagtatcgacattcagtcgacaaatacaccatttcatgcgttttacctgtacagttacacatttaatgaccattaaattttcctacattcccaacatgtttactgctctataaaagcaaatccctttcttattcataagtgctcttgtcttctacttctctcttactcttaaaaatttctcttattcttaagttctaaatatggccccaagaaagaacaaaggcaaattccccatcttaactcctgaagagctgaagcaggagcctgatgttggcataattactcctgaaatgcagaaagttttggacgccgatcgagctttcgaaagagaacgaaatggtaacgagttcaggttcatgcaacttgaaagagaattttgcaaaactggtgtatggccggctccaccaccagggttccccgaaggatgccgtcgttgcaaactaggcatct

SEQ ID NO: 284020 - DNA, 671 bp, Cannabis indica
gtaatgtttctttaagtattagaacatcaccttttaatttatttttggattaacttaagaacatatttaaatcatcaagctttcttaaacactaaatatattacattcggtattcacttttaattgacaacattataaactataatatttaaatacacataataataatctcacctaataactaataatatttttctttaattttaattgtatcattttcaaataacatagaaaaaaactagcataaaatttagtatacgtgcctcgcacgtaatttttgctagtcttcttataagcaacgatataaattcgtatcatatagtacccaataattttattttaataaatatataggcatctccaagaaaagatgccttaacttgacaccaaaagtgattaatattataaaataataataataataattattaattgaatcatgaatcacatgatatatatttaagcaaaagaaaaatcacatcatatatataatattaaaatgaaataattttagaaatgtaatggtacctatgcgtgattcatggtttatttaattaattttgggatatttgtggtgaaacttttaatatttataattagggtaaatagcggtataagtacccaatgttttgagtttgtaagtggcataaacttaatgattttttttagtg

SEQ ID NO: 284021 - DNA, 408 bp, Cannabis indica
taaaataatttccaacactcgcaacatcctaactattatgggaggacctcatatcgcaggggactctcgcaagtcacaagagcgatatgctagagaagctaaagaaaagccgttcaccaatgtcaacaatcttagtgagcagcccgagaaacttttcaagaaggaatgcgatgacatcacctttatggagagtgatgcgagatgggtccatcacccgcattctgatgcactagttataatcgccaatattggcggggataatgtccatcgcatacttgtcgacaatgggagttcagtgaatctgttgaatttccaagcattcaaacaaatggggttgcaggagaaggatctgcgacccgtgacgtcgagcatctatggttttacaggcgacgtcataacaataaaagg

SEQ ID NO: 284022 - DNA, 558 bp, Cannabis indica
agagtacacaaggatgtcgtcgataaacaaaactacacagatatcaaggaaatccttaaatactctattcatcaaatccataaatgttgcaggagcattggttagtccaaacgacataaccaagaattcgtaatgtccatacctagtacggaaagccgtcttcggaatgtcctcctctcgaattttcaactgatgataacccgatcagagatcaatctttaattctttaagctcaactatagccattctatacggagccttggaaagctattccactccgtgtgactaatcgataacaaaatcaatctcccgctgaggtggtaaacccggaagttcttcgggaaaagcatctagaaattccctaaccaccttgatgtcctctggccgaatagtatttggccgagtggtgtccatcaccacggccagaaaccctaaacaaccgccatgcagtaattccctagctgacagggccgaaatcacaagaatccgagatccctgaactgaaccgacaaaaacaaacggttcatccctttccggttggaatattaccatcttcct

SEQ ID NO: 284023 - DNA, 562 bp, Cannabis indica
aacttactcttcaaagaagccttcaccgcgataggcttgacagaccgggatctctcacccagtgggtcccagctcacagggtttaacgggacgacacttatcccaatgggaaaggtaaggctcccagtcaccttgtgcccggacaccccccagagcacattcaaatactgcaccttcgtagtggtggactgtccgacagcctacaacgcgatcctcggccgaccagccttggtagactttggcgcagtcacttcgatccggcacctatgcctaaagttccctacccgggaagccagaatcggaactgtaaggggaaaccagggggaagcaagacaatgttacaatgtcgcaacccacctgcccgtgctaatggtccgggagtcagctgagccagaagtggctgaagaggatgagttggacccccgtgtggggtccgaaagaattgtggaaccaatggaggacgtcgaagaagtatcagtgtgcgacgtcgactccaccaaagtactccggctagggaagaacctagacccggaggaaaaagaaaaaataataaaaacactga

SEQ ID NO: 284024 - DNA, 1112 bp, Cannabis indica
ttttgacatagtaacaacctatactcggtacgctagtcatactctagccgtaccaatgtgttatcgtatcagcctatacttggtatgtcagtcatactctgaccatatccatgtgatactgtcaaatagtacagtactatcgacgataatatcagcctatactcagtacgctagtcatactctagccgtaccgatgtgatactgtcagatagtacaaaagccaacatacatatctaatgtaatctaacaggcttcctaacatgcacgataaacatgtaaatacatatgcatactattatactaatcttacctcgattctgaattcaagtgtgccggtcaacgtgagtggaacaaactgctcgacgaattacaggctcctaaatcacatcaatcacaacactgataagcgacacgctaaatcacttcccgggaacttaaactcaaaactaaaagtttccctatcgataaataatatgagaataccctaaataacacaaaaatgggaaaaactagggttcccaaatttgccccaaccggtagaccgattctccaaccagaattctggttctgggaagaattcctggaagccaaccggaattccggttcctacaggcctccctgaaccggaattccagttcagtgcaggaataactcaaccaaatcaaccccaattcaaacaaaactctccagacctgctatatagaccacaaggaacattttcaaagcaacaaaacaaccctacacacacagaatcaaaatccaccatgtgagctccaagtttgagcttcaaagcttggctaacaccacaaccagccacaacaaccaacttaattcaaaataaaacaacatatctaacatccagaatccaaactcaaacacaaacaataatcatagcagcaaaaacatcactttaccattaaaatctaaagttttgagttcaaagctttacacttggttaaatttaactaactaacaacaaaaccagcttgataccactcaattaaacatatctaagcctctgaaaacaacaacaactaatcacagcaaccacaacaagtaaaatctcaaagcatgcaaaaatccatttctttaaaacccaagaaatcaaagag

SEQ ID NO: 284025 - DNA, 122 bp, Cannabis indica
taaaatagattattaaataatattgtcatttaatttaattattaataagacatataaagtctattaataaataaacctacaatctcttttctttacaatttcgcccctgcttagtgaaaatt

SEQ ID NO: 284026 - DNA, 533 bp, Cannabis indica
caattggtatcagagcgggacactaaactcttagtgtggtcctataacgtttttgtgttaaaatgtcattttttgcagaaggaagttctatttctagaccaccgttgcttaatgactctaactatccttattggaaagttagaatgagggccttcatcaaatctcaagatgagaaagcttggagaatggttctatcaggttggtctcttccagttgagacagattcttcaggtaatactactataaaatctgaactggaatggtctattgaagatgataaactttctgcctacaatagcaaagccttgcatgctatctttaatggtgtaggtgagggttacattaaacttatatcatcttgtgtttctgctaaggaagcttgggagatccttcaaactcagtttgaaggaacttctgatgtgaaaagatctagatttatcatgcttcaaactaaatttgatgagcttagaatgtctgataatgaaactttaactgaattctatgaaaaattatctgatattgctaatgaatac

SEQ ID NO: 284027 - DNA, 742 bp, Cannabis indica
gaataaatagaaaagtggaagagaaggtcgaagtttctcttccatctccaacaccttcaaccaaccctggaacggtgcgtcactttggcctatttgttagataccataaccatataaccaattttttcaccagcaatagtgttggcttaccgctaagcttattttgctctgttttattatggtttttgttttttaattttctggtggggttgggagtgaagggtatcaagaccaaaatgcattttaaatttgaacacccatgttatgtatagttgggttttggttagtggatccatgaatagtagatgcaattttttcttgtgcatgtgctagagaaaaaataatttttgaaacagaagactgaacaaggataataataataataacaatagaaatcaaacgtaattatccatgtaatatgcaatctctaatggttttcctctaatttcttaaaattgcagagtggatggaggccagaaggagtcaggaatccattttcacgggctacgttgcctaagggagtgggtgagacgtcccccacccctggcaatggccactgctaattcagtgctgccatcacatatgttagcgcctcacaatccgccagtaatttcttcatattcactgtctcaagtaactagcacggtgcatgaaaaatctccacctccataggttcatctctacatcatcaactcccttaactagctcccaatgtacatcgcatttaccccaggtcactgga

SEQ ID NO: 284028 - DNA, 682 bp, Cannabis indica
gatcgccgcactaagcagattcgtgtcaaaataaacggaaaaatgtgtcccattcttcaacatcctgggagaaaacaaacagttttagtggacagaagaatgtgaaagagctttccaagagctaaaggcacaacttgcaaaacctcccgtactttcaaaacgtgtggacggcgaggaactaggaatatacctagctgtcatggaccatgccgtgagtgtcgtgctgatcagggaagagaatagcgtacaacacccagtctagaacattagtaaaagactcattgaggcagagggccgatatccgttgatagaaaaactcgcctactgcctcattctagcaacaaggaagttgaggccttatttccaagctcatcctgttcgggtatataccgaccagccactacgacaacgtactacaaaaagccagatgcttctggacggttactcaagtgggcggtagagttgggcaaagtaaaaaatcactttccaaccccgaacaacaatcaaaggacaagccttggccgactttgtggtagaatgcacaggcaaaaaagaaaacataccagaaaagcaaccccgagtcaacactaatacctcagcaaagtcacaatgaagacaaactgacctggaaactacatgtggatgggtcggctacagatcaactatctggtgcagggattgc

SEQ ID NO: 284029 - DNA, 551 bp, Cannabis indica
tttttgaaacaagattgcctttcattaaagcaaatcagctaacaaaatagcttccaaaccagaagggacagaccccctactggaaatacgatcaggacatgaaccagaagaacgagctaaccagttagccgcttggttcccagatcgtttaacaaactgaactgaaatatcaaaactagaaaaggatcgtataagagaaatacaatccgaaacaataagaccaagaggagacagaatatggctcttgctattaatagcattaaccaacacaagacaatctgactccaataataccgctgtaggacacaagccctcaacagtcctgctatcttcccaacaggacttaatccaactcaaagcctccttcatggacagcgcctcagcaacaacaggatcaatatctcctcggtgtttgacagcagccgcagcaacacacaaaccagcatgatccctggcaatccaacccaaaccatgactcctttctccagaaaacagagcagcatcacaattaaccttcaactctcccaaagatggtttaatccagtgctcaa

SEQ ID NO: 284030 - DNA, 678 bp, Cannabis indica
ttatctctatggagtgaaatgtgaaatctacaccgatcataagagtttaaagtactttttcacccagagggagttaaacatgaggcagaggagatggttggagctagtcaaagactacgactgcgagataatgtaccatcccggtaaagccaatgtggtagcggatgcactcagccgtagaggtcccggactagtttccactttacaaggagtatcaagggaattagtggaagacatggaacgagctggtatagagtttattacagggcaacttgcaaaggtcacacttcaatccactttgttagaaagaattaaggaggggcagacgacagatcaaaagctcagtgaactaaagcaagaaattttgaatagtaacgccaaagattatgaaatatcagacacgggattaattcggttcaagggacgaatttatgtgcccgataatgatgagctcaagaaggggatattggtagaagctcatactacaccttattcagttcatcccgggaccactaaaatgtaccatgacctaaaagcattgtattggtggcctggtatgaaaaaggatgtagttgaatttgtggccaaatgcttaacatgtcaacaagttaaagcagagcatcaaagaccagcgggattgttacaaccactgaagctccctgaatggaagtgggaaga

SEQ ID NO: 284031 - DNA, 786 bp, Cannabis indica
ctttcactttcacaattatagtcgaataaatagatgtagaaagtaatacaagtaaagatgatattggatcaatttcacaatgtcaatactcagttattataagctaatttatatattacattattaactaatttaaacattagctaggagtatagatccgagtagtgtaaatttttaatgatatttactaacaaaattaatttatatataactaaataatagaacttccaaatacttttttcataaatgtaagaaattaaaataaaaacagacatctcatcttggagtagtattttacacaattcaagatgtcaaatagctatagatataattaagtatcatgttaatttaatataatatctttttataaatatattcttaagatatcaatagtgttatgtaccactaatgcttaataaaaaatgccccagagattttgatctcccaaagttcattcatttatgaactattgttcattattgcccagcccaacttgagttgtgatgaaatatattttcctataaacataaatacaaggatattatatatatatatatataaatataattataactacctttacaaaatgagatgaaaaaagaatttgagagtttagttgtaactcattatacttgtgaactcaatcaagctccatatcgatgtagtagtgagtcaaaagtcacaaaataaggttggatccctcaaacgagagacaaaataataatctaatattattggtgtttgtattgtatatcactttctaactaataatatgagactatatat

SEQ ID NO: 284032 - DNA, 782 bp, Cannabis indica
tctctctctctctctccctaaacttcttttccaagttttgatttttgttcagaaatagcttgaatttttgctaacttttggagcttggaatttggaggtgttgaggattgtttttgctataatttgaggtagtaattactgttttaaatttaattttcccttgctgaaatttgttgagagtaatgtttttaggctttgaatgcatgagggttgaaaaggggagctaatggtgatttttttgtaacttgaactttttaaattatggattttgcacctatgttgttagcaagttttagggctgtttttcaagttgagaaatctgatttttatcccaatttattattgttggatgatggtgaagcatgtggggattttcaagttcttgaattgcatgtatgtattaattgggttgttcttgatgttatgaacttgtggtgtcttaaattcttgatctttgctttgggtgtgattaattgagttatattttgtgtttatattatgatttatagctctgaatttattttgcttgaagcttgagattttgacttggatgagcaagtctttattgttggagttttatggatttaagctcttaatttggagcttagtttagatgttgttaaatctgaactttgaggggtatatggttggattttgatgcatgttttatgtattttaatgccctattttagaacttgcttgttagtggtgtatgactttgaattatatgaaaatttgtgttgaattggttaattttgggactgaaatttgttgttggtttt

SEQ ID NO: 284033 - DNA, 610 bp, Cannabis indica
ccagaacccagacgaagaaccaaacccgaacccagacctagacctgggacccaaaattagaacctgaacgagaattgccgaaccaggaccctataacaagactaggaccgtcaccaggacccggacccagacctagaaccgaacacagaccaagcctcagaccaaaacttagacaggaactcgggcccagacacggtcgtgtaaccagagcgtaactgagacccggacctggacctaaatcttggacccgatccccaacacatacttggacctagatagggatcttgatacgaacctttactcagacagagacccagactgggatcgaaatgctagacctagatctggaacgagatcctgaccacgacccaaacttggacccgcactcgagaccccaacttggaccaggaccagaacctagacccagatcggggtccagagctggacacaaacccagacacagactccgacccgaactcaaacccacacctagaatcagacccaaagcaagacccggacctggacccaaactcgaacccagaccaggatcagaaccaaggacttagacccaaaactgaatccagactcagatcgggattggaacttggga

SEQ ID NO: 284034 - DNA, 754 bp, Cannabis indica
cctcatgcatttttgcctataaaagccaccatctttccttcatttcggttacttcccatttcttgccaactttgctcgaatttcctagagagaaaattctcagacctagaacaaagccttcaaacactttgcgattttcccagttcttctttgctcgttgctaccagtccttctcgtctttactcgacttgcatcaggacccccagttcaacacttcattgtaagttttttgcatcctttgctattactgaatggcatgctattacttattctgtttgttcttttctgggtttgcattcgagatttctgggcatgcaagtgtttaagttcttcatgtagtctgtttgaatttaccgctctagtggtaggattgccattgtcatgcctctgttgttattgtgtattttctttgtagaaggccatatgttcttcgtttaatggttgcttagggcatagaacagaatcttttctttctgttttctttatcgcgtaaagccgtcttctgtgaatttactgcacccgacacttgtccagggaatccttctagggtttcctgtgtgacacgtgtccggagggggcctctttccagcggttaggggacccccattccctttttcttaattgagggtttggtacggggcctaactgtttggacttttactcttttttactagaatagaaaaatgtctgcttctggctccaagtcctcaaagaaaagtggaaagcgcatggctactcttgaggaggtctcctt

SEQ ID NO: 284035 - DNA, 579 bp, Cannabis indica
atttaaagtaaaacccgctgtgtatttctaaacagttttgagtcttttcaatttatgcatcaaagttagtattttgtaaaacaaggcaaatattggggcgttacatatatagatatcgtttttcataatttctattaaaggaataaaacatataataataccttttatgtaatgaagggtattttaggtattaaaaagtaaaaaaggatatttgctttattattttaaaaaagagacattaactataactagagttagaaatagggtcatttacttgcatttctctttctcaaattatgtcaaacacacattactaagacaaacaaagcctatatattatatgcttaaaatgaaaacagattccatagcatctgtgttttaatccatgagagaaaataaaagagataattacttgtaaaaaaattatattttttatgttcaaagtatttttttttttatttttacggttttttataaaaataatacgaaaaacaagaaataaactacatgagagtaacaagaaaataacatacagataacatcaaaacaacaataaaaataacatacaaataaataaaa

SEQ ID NO: 284036 - DNA, 266 bp, Cannabis indica
ttctatgttcgaattgtaatgaaaagggacatcatgaagaacgatgtcccaggcttctaaacaattcaaacgaaggtaatgcttttgtctttgaatcatgtgttttagagaacgacaaatccatctggattgttgattctgggtctactaaccatgtatgttcttcactgcagttgcttgaaacttgggaaaatctacttccaggagagttacagcttaaagttggcaatggcgaattagtatcggtcaaagctagaggaaaagcc

SEQ ID NO: 284037 - DNA, 571 bp, Cannabis indica
cctagacctgggacccaaaattagaacctaaacaagagtcgctgaaccaggacccttgaacaagactaggaccgtgaccaggaccctgacccagacctataaccgaacaaagagctagcctcatacccaaactgagattggaactcgggctcgaacacggtcgtgtacccagaccggaactgagacccggaactggacctaaatctgggacccgatcccaaacatagacttggacctagataaggatccggatacgaacttggactcggacaaagtcccagtaatggatcaaaatactggacctagatttggaccgggatcctgacacagacccaaacttggacccgcactcgggaccccaacttggacctggacctgaacctagaatcaaataggggtccagacccggaaacaaacccggacacagtctcggacccaaactcaaacccacaactagctagaatcagacccaaagctagacccggacccggacccaaactcgaacccagaccaggatcagaaccaaggacttagacctagaactgaatccagactcagatcgggattggaa

SEQ ID NO: 284038 - DNA, 425 bp, Cannabis indica
acagcagttactccaatttgatagtgcaatactatcaactaagtcttcctccctagatctctaaatcagaagcagtttattttatctgattatcaaaaggtatacaattgtgatgagacaatatgtatttatagagttagggaggggacttagctacaaaaccctagttgggctgggcctgctcatcaaaggcttcagtcaactagaaaagcccacacttctgcttcacctagactttactcacagatgctaagcccattaacaattgatcaccaacaacatgggctaacacagcaaagaactatccaatcaacccaagttttaataaaaccaataaaatttaatgtaagcccaaataaaagtctaacaatttagacaaacccaaactcgctaattctcgtgcaggtttcgagtcgtgttatcgt

SEQ ID NO: 284039 - DNA, 393 bp, Cannabis indica
agttgttaaccgagagctgacctgtcactactcaagggctggcttctgcatcagcctgagtaatggcaaacaccctagctggagtgggtctcgctggagcctttggtgcttcggttctaagttaagggcaatccctctcgtagtgtcttggcatgccacactgaaagcacccctgccctctacactcaccaagatggtgccttttacaactggggcactctgggtaggtatatcgagtctcagaattaccctgacgactgactcaaccctggttctgttgggttttatgccctaaataaactccatttcaatgtaatccattttattcaatatcaataaagaaacagtagtatttttcattcatttgtatgttttggttctatgttatctaat

SEQ ID NO: 284040 - DNA, 515 bp, Cannabis indica
tataaccggtttgagttatttcatgttatttgtttttattcattataacattattataaaaccggttctaattttaattataattagtttgagttattttattttatttatttttattctttatgttacagaaccggttatatttcaattataaccggtttgagttattttgtgtaatttatttttattcattatattatagaaccggttctaatttaattataattagtttgagttattttgttttatttgtttttattctttgtgttacagaacaagttatatttcaattataaccggttctaattttgtttatatttgagacatctagttctggtgactttttcagtaactttttccgacgacagtgacttttccgacgattttgacttttcaggtgactttctaggcaaacttattattgtttacaaatataaaatttccatctttttttacaaaaatatgtcataaaaaaaaacccatataaatgtaaaaaaacaaaaaaaatccataac

SEQ ID NO: 284041 - DNA, 808 bp, Cannabis indica
tactatacagatttattagtcggaataaaagattattaatttggttaaggtatgatttaaactgaaataaaatttaagagggtttactttaaacgctaattcctattagctatgttttggtttatatttttttaagagtttttagcataaaaggaaatgtttgaaattttagtattcagattctaatattataattaattaagtaaattgaagaataagaatcttgaggatcttgtaataaatggagatggaaacactaatggtctaaagagaatatattagttcagatatatttgggaagtcaaattattatgaaaatttggtttgttctcaatattatagaatgtaccaaaattttatattatttgtatttttaaagaatttctggatgagtggtattagttttttgatggaagaaatggaagtacaaatttgatggatgagctgcgccattgtttagggctttggtgccttttaaggttttcacgcatgatttatggctggcccctaattatttagggtaattgtttaaaattacaagatatcatgaattgtaaaatattataaaatttaatagctaacaattatggtatataattatgagattattgtcttattagtttattataaataacataatattaattttgagtatataaattataaatatgagtttattaattttggtatataaattataaatgtgagattttgtaataaattggaggtagtgacattaattgtgaattgagaatagtttatttattttttttgggaagatatttaaataaatgggaagtaaatacta

SEQ ID NO: 284042 - DNA, 630 bp, Cannabis indica
ctcatcctccttatgagctcattcaggccgggcagcagtagatttccccttcttccccgtcacggacttagaagaaaagtcctctgggtaaagcccgtactgcaccagatttgcatcggaggtcaactggatgatatccctgtcttccaccggcaaccgggcaagcttttgagccttatccctaagagtaagagtgatgggaggacggtgatatgtcgaaatctgctgaaaccgagtccaggtgatgttaggatccttcaccatgaagtactcatcaataaaacgccctattttgctgatggccttgtggtccgtcccgctcaaccacttgaagcctggctgagagaagtaaaaataccccgacctgccttgcttgggggtagacttcaggtcgaagaaccaagcgacttcgtggggagaaggagcgcgccatccctgggaagcgtagaggacgaagagagcggacaaatacttaatgcccttgggagtaatctgagccgggcagaggccgaagaagtttgccacgccttggaagtacttgtgcaagggcatcagcgccccttgcttgccgtgagcccccgaccaggcgtacatccccttatcagggtttgtagcgcgattgtcgtgggc

SEQ ID NO: 284043 - DNA, 688 bp, Cannabis indica
gtttgatgtgaactcattcttcattgaatctaactaattgtatacgtttgcagttgtcgacgttggaccttttgtttgaggagaataggtcgaagaatgtgactttcgtggatttcggaattgacaggaaagatcgcgggcttcctcaacaagacaatgaccgagattgcggtgtatacgtcatgaagtacatggaggctgtggccaatgaggaagaagtagttgatcaggtataccactgtttagttatttcagaatgtactacgcaagtttgattgagattaacgttgtgtaatttaaattttattcggtgttgtactgtcaagttgattagagttaattacattttcacaagtttttgtttttgtttctgtattgtgccacagtttcacccggttgaggcacgtttggaaatcgctgcgaggatcataactgatgaacaaaatgaaattcgtaccaaagtggttgaagatcgtagggctgcacaaggcagctcatttgcatcatcctcggcccctttgcgtagtccgtcaaagtctccacgcgatcctcggttcagtacagcgaagtctcgccatacaaacatgtttcccccgtcaagagcctcccctaggtttcagtctagcaaggctaagatttcatatggtgaatagtctgtaaaaaacacttgtgttattaataggttgtg

SEQ ID NO: 284044 - DNA, 594 bp, Cannabis indica
tattaatatttatactaactagacaatactaacaattgttaattagtccctataataaacacaaacttataatttaagattgggttggagtatgaaaagatgaaatttgatatgaatttgtaaagcatatcaattacaagaaatgttgtagtagagagtagtgagtgatatgatggtgggtgggtgggtagggatgagtgatgagggtaattggttggcagattttattcttaaatatctggaaaatgcgcagctgatttgtagctgccagttcccactgccgcctgccgtggcttaaatcctccattcccataacagccgccttcttttcaggcgcagtcaacttcaataacagatgatgctcattaatgggcccatctttgcttgcttcgaagtttggtccatctcaaccaaatgggcctacacctctcatgctgtttattgttaagctttatcaacctttgagaaattagaatctttggaggctttggtatcacattttttttttttatatagttattgtgtaaagttagtctaaataaaaaaaaagaaaaaaaaaagaaagaaagaagatttgttaatgtattttttttt

SEQ ID NO: 284045 - DNA, 732 bp, Cannabis indica
atactaacaattgttaattagtccctataataaacacaaacttataatttaagattgggttggagtatgaaaagatgaaatttgatatgaatttgtaaagcatatcaattacaagaaatgttgtagtagagagtagtgagtgatatgatggtgggtgggtgggtagggatgagtgatgagggtaattggttggcagattttattcttaaatatctggaaaatgcgcagctgatttgtagctgccagttcccactgccgcctgccgtggcttaaatcctccattcccataacagccgccttcttttcaggcgcagtcaacttcaataacagatgatgctcattaatgggcccatctttgcttgcttcgaagtttggtccatctcaaccaaatgggcctacacctctcatgctgtttattgttaagctttatcaacctttgagaaattagaatctttggaggcttttggtattacatttttttttatatatatagttattgtgtaaaaagtttgtctaaaaataaaataaaataaaaaaaaaataaagagaaaagagattttgttaatgtattttttttactgatttgtaaaatggtcttaaattaaaaatctaagttagtaaatgtcattattaaaaaaaaataagaaatagctaaatgtaataaattaattaataaaaattataaaaatatattaatacatatattttccaaaatatatataataattaaat

SEQ ID NO: 284046 - DNA, 817 bp, Cannabis indica
ggtataggattttatgagtgtcttctctaagaattgtattcaggctgaaagaaagagattgagattgagttttatttttcttagggttagaggctctgcatattacgtatcaagaatgtgatagatttaggttttataatctaattaaacctataaaagaaaataataaaataacccctataatctgatgctaatttaactctaaatagaataattaaataaaaatcttatttgttagatataagttttaaatttgaattttaaaacttagggtttctatactaaacttaacaggtcgtcactttgtaacttaattttgaccccaataaagttaaaattacgataaatctatttctacataattgatagatctttgaattatctttccaacgccactgaaatcacctcaatccgagctctagaactccagatatgatcgttttagtaaaacagtttttaatcctgcgaatttatccaaacctacgaatttttaacattaattctataataatgttatttgatatcacttataccattaattaaaatccactaaataatttataaaaccctaataaactttcatattgggctttaattaaatgattacctaccttgtaaaaataccataatattttactttcgtagttaatataactttaactctctctagaaaattggtacaataatctaagcaacaatctcaactcactaacaacacaaatatataagataattatcctcacacaattaatatcccaaggagagaaaaaaattaaatactattttaatctggatattacattctaccctccttaaa

SEQ ID NO: 284047 - DNA, 750 bp, Cannabis indica
atccaataaatacacattcataggctctactagctagttttattctcttaggatcaggaatcctaacataagctaaacaaccccaggttctaaaataagacacatttggttgcctatttttcaagatctcataaggtgaaattttactcttagttttaggaactctattcagaacataacaaacagttaataaaatttcaccccaccagtgagatgcagcaccagaattcaacaaaatagccacaactaattcagtaaatgttctattttttctttcagctttaccgttcatttcaggtgaatatggtgcagtcctttcgtgtatcataccatgtgaattataaaattcaataaacgagtttgattcatattcagttcctctatcactacgaagcatttttattttcttattaaattgattctcaatttcagctacgaataatttaaacatgtcaagtgcatcatttttatttttcatcaagtacacataagtaaagtcagaacaatcatctatgaaagtaataaaataacgtttaccatttctggttagcgttccatcaagttcacatatatcagaatgtatcaaatctaaaggttcagtttctttagtaactgatttatgtggtgtcttagttatttttgcttgactacaaaagatacatttttcaaaatccttttctgacattttcgggattaagccaatattactcatattcttaatgatacgtttattaacatgacaaagtctag

SEQ ID NO: 284048 - DNA, 487 bp, Cannabis indica
catatttataatttatataccaaaaattaatattatgttatcgataataaattattaaggcaaataatatttttacaattcatgatatcttgtaattttaaccaattaccctaaataattaggagccaaccataaatcatgcgcgaaaaccttaaaagacaccaaagccataaacaatggcgcaactcatccatcaaatttgtacttccatttcttccatcaaaaaactaataccactcatccaaaaattctttaaaaatacaaatagaacaaaccaaactttcaataatttgactttccaaatatatctgaactaatatattctcattagaccattagtgtttccacctccctttattacaagatcctcaagattcttattcttcaattttcttaattaattataatattagaatcttaatactaaaattcaaaacactttccttttatgctgacaattcctaaaaaaatataaaccaaaacatag

SEQ ID NO: 284049 - DNA, 720 bp, Cannabis indica
ttcagacatttgaaaatttgattggaggaccacagaaggaggagctaaagctcctagttctgggaatgctaatggtgcggctaaggctgaggcaaacattgcatctacttccaaacccaacaacaagaacaagtggaagaatagcaagaagcctgttcaagctgtgaaaacagttaaaaagaaaaaggctgctaatcccgatggaaagccaaaaggaaaatgcttctattgtagttgaaagggcaactggaaacctcaatgccctaagtttttttagcaaagaaaaaaggtatttctttctatgctataaactcatgtgttttagacaattattatccccttgggttattaattctggatctactaaccatgtttgtttttcttcttattttagctccagctgcttaaacttgtattgttatcctagcgagttgagtcggatgattggacaatagggtggagattgtccaagattgaagatgaagcttggaatttttttttataatttttgaattagttgttttattttatgaacaattcgatttcaattattgatttgggatttttattccttatttttcaaattattgcagactaattcattttttttgagaatatcataataaagttttctcttttggtaatgaattgcaattatgaaattgagcttcatatttcttaatcttatattaatatgcagttcaacgatctttatatcta

SEQ ID NO: 284050 - DNA, 535 bp, Cannabis indica
ggacaaactgaagttaataaaataatcaaacacaccataaaagggaaactagaagatcgcaaaggggcttggccagacgagttatcgcaagtcctatggtcctataatacgacccctcgatctacaactggcgaaacacccttctcactttcttacgggtgcgaggccatgttgccagttgaagttggggcaggttccctacgcagggatattttcaacatctcgcagaacaacgagaatcagctattctgccttgatcttttggaggaaaagcgtgataaagcgcacctaaaaaatgcggcttaccaacagcgaactgcaagatactttaactccaaagtgaaagtaaaacccctgcgagcaggagacttggtccttagaagagtaatgccaaacaccaaaaacccgtcgcacggggtcttcggggataattgggaaggaccatacctcatcgcagataaaattggtgatgcaacgtatcgactcgcaacactcgatggaactgcgattccacgagcatggaatagcgagagct

SEQ ID NO: 284051 - DNA, 865 bp, Cannabis indica
aagtctcaactattccagaaaagataaaggccaaggaaagaattccttaggatcaacagtgagaggtctcatatatgctttcgtatgcattagaccagacacctgttgttgagtgggagtaatgagtaggaatcaaattaatccaggaaatgaacattggaagataatcaagtgaattttaagatcaagaaaaggaactatatgttagtcgataagggtggtattttaatactcttagactgcaccaaatcaggtttctaaagttgccttagtgctagaaagtctgttgatgagatggtgattactctgggggtggactggtgatttttgagaagtgtaaaagcctatctgaagtctctaactctactagagagactgaatgttaaagttgcaggaaggatacttattcagtctatggaaagttctatatagtttttggcattgtcccaacaatttattaactactagtgttacttcctgactaacagagaagtagttgccaaaaagtaaagaatccaatttccctagacgagtagacataataaaaagaatttcacaatatcaaggattttttgattaaagaaatgtattagtggaggaaaggttgtattgaatacaacttgtcaaatcctattacggagagaatactacgtactacacttgatctgaatatcaagatgttgagattatttgaagtgcacgctttataattgcgcaagtgtacacaatcacaaacaagtaatacaatgataagtaatcaaagttcgtctccacagggacttttaactaaataatgttaaatccactaaaagtaattccaagaatttcaaataaaactaaaataaagtcacacattaatgcacga

SEQ ID NO: 284052 - DNA, 640 bp, Cannabis indica
aagcttgatttgtatgagattcgcaagataggaggtgatattggagtcccggcttcttccgaggttaatgagaggactactcctttcaagaaaaggaagtttgaatcttctgcatctctttgctcaaggcctcacaaaatccaccgcaagtacccaggtgtagtccgcgactttccctgggactccaagcaaaaagagaatgatcctgatatggtacttgatgagccttctgaggatagttctaactctccaagccgatctggtattttgaagaaccccttgattggttcatttgtgattgatgatgctgtttcgagtgggtctgcttactctcatacccctgtggaggagaatgtggaatctcctccacaggagccatgagaggcattgcttggaactgtagagggttagggcagacctctacagttcgggaattgaagtccctcatccggtctcgagctcctgattttctctttcttaccgagcttaaggtggatgctaatcctctggtacgtactcttaaatccctccatttttattttaatgtctgtgttccggctagaggcaatgcgggtggtattatcttggcttggaaggctgggtttatttttgaatgtatttcgtgttcttgtaatcatat

SEQ ID NO: 284053 - DNA, 108 bp, Cannabis indica
tctatctcaaacctaaagcctttaccttctatttatagaataccacatagggttaaggttgaattacttgacatttaaaattgaaaaataaaatgagaaaaaggaagc

SEQ ID NO: 284054 - DNA, 488 bp, Cannabis indica
cattgctctcagtaaaaagacgatcagaccaaaaacaagcaccgcgagcaacacaatgcgcggctttgttagcagatcgtttaacatgacaaatagaaacattatgtaaagacgaaagaatcaattggcactcctgaacaaacaaaccaaaaactgatggaagagcaaccgagctattaagagcttgaacaacagcaatacaatctgtttcaactagcacattgaacaaattctttgacttcaaccaactaagggcctccctgacgctcaatacttcagccacagccggctgacaagccccagaatgcaaagaggaactagtttcgatcaacttcccatgacaatccctaatgaccatgcccgtaccatattgagttgttgcctcaaaaatcgccccatcagtgttgatcttcagcttcccagcaggcggctttacccaacaaacactgctaccaacaacagtagcatcaaactgttgggttttatgc

SEQ ID NO: 284055 - DNA, 677 bp, Cannabis indica
cataaaaccatccaaatcacaaacaaatcgtttttaagtccaaatttattgcaagaaaatcaatatgaacttctaaaatgataagaaataaacacatataaagtatgagaaaccttacagtggttgcagcggaataatatgtctccttccactcagatctctaacccttgtagtatcaccaagatttgagcccgaatgtccttctcttcagtttggattcttcacaatctttcagactatgattgagataccacttgatgtgtatgggcactactctatcactcaaggtttttgaaaattgaagaagaaaagagggagagagagattcggctatagtatataggataggacgctcaatttttctgaaggcaaaattttttgattttcaatctcttgttaagtgtgagccatcactatctatttataggtaaccactaggtttagattagcaattacttggcattaaaataatgaaaatagtaattggaaaaagcctcatcaagtggccggccatagagttaatggaccccacttggtattttgcaattttgacaatttgcatttctattttctcaaaaacgccaattttccaattctaaccacttaaatgccaaaactaattatttaataactaaataaattattaaataatattgtcattaaatataattattaat

SEQ ID NO: 284056 - DNA, 547 bp, Cannabis indica
gaattttttttgagaaaaagcaaaggaaatttctggtttactccaccccacacccaaccctctttctctctcaaccctctcttgatttttcaacttaaattggtgaggaattgcttgaattgggcttggaattttggtgtgttgtgcttaattcttgcttgaggcttgaggtagctttctttcattgaatttaattgaagttcttgctggtttttaattgttgaaaagcatgaaaagtgatgttgttcttagatttgcatgataagagaattggtgcttgactttgttgattttggttatgaaattgcaagaattagttgtgagtttattgttgattattaaaggagattattgagtattttctaggtcaaatttatgtgtttattggttgaatttgcagctggaaagtatgggtttgaataggttgaagttcatgtttatgagcttaatgagttgttagtttaaagcatgattttgtgttgaattgtgggatttatttttggtaaattcagaggcatttttagggtttcattgagtttgaaatctg

SEQ ID NO: 284057 - DNA, 782 bp, Cannabis indica
ccccggctgatggaccaacccatcacgttcacggaagaagacgccaagacagtgcgcttccctcatcatgacccattggtcatagagacccccatcgcgaataaagtggtggccagagtcttaattgacaatggaagttccgtgaacctactcttcaaggaagccttcaccgcaataggcttgacggaccgggacctctcgcctagtgggtcccagctcacagggtttaacgggacgacacttatcccaatgggaaaagtaaggctcccagtcaccttgtgcccggacaccccccagagcacatttaaatactgcactttcgtagtggtggactgtccgacagcttacaacgcgatcctcggccgaccggccttggtagactttggcgcagtcacatcgattcggcacctgtgcctgaagttccctacccgggaagccgggatcggaacggtgaggggaaaccagggggaagcaagacaatgttacaatgtcgcaacccacctgcccgtactaatggtccgggagtcagttgagccagaagtggctgaagaagatgagttagacccccgtgtggggtccgaaagaattgtggaaccaatggaggatgtcgaggaattatcagtgtgcgacctcgactccaccaaagtactccggctggggaagaacctagatccggaggaaaaagaaaaaataataaaaacactgaagggcgccatcgacatctttgcatggcgccaagaagacatgactggcataagccctcatgtcatcacccacgtact

SEQ ID NO: 284058 - DNA, 771 bp, Cannabis indica
ggattaatcaattataattctagcattagactacgtctagtttatgaattttcactaagcaagggctaaattgtgaagagagagtttctagggttgatttgttaattaagagactttgttgagtctaattaataaatatattaaatgacaatattatttaataattaatttttagttattaaataattagaattagaatttaagtggttaaattgaaaattggcatttttaagaaaataagttggaaaaatgacaaaatggcaaaattgcaaagtgcggcccaatacaatccatgaccggccactagggattgattttgtcactttattgttctattattttaatgctaattaaatctaacctaatcctaagtgctttcctataaataggtaatgatggcttaagggaaaagatgatgcatctcattccttcagtaaaattttaagcctcttctcactaccctagctgaaacctctctctctctcttcctctcttctaaaccgtagccttgttggaattaattttaccaggatcttagatctactcacaagtatgttgatttaacaacctaaatatgaacttctaaaacgataaataaaaacacataaaagttaagaaaccttacagtgatggcagcggaattatatgtctccttccactcagatctctaacccttgattcctgtctatctcagagtataatcaagatatgagcctgaaagtccttcagatggatgtgatccttcacagtcttccaatctatgattgaggt

SEQ ID NO: 284059 - DNA, 894 bp, Cannabis indica
acactccacagatgaaacagaaggtagggactttctcatatttaaaattggcatagaaaaaagaatcgttaccccgtcgacggaatttcattctccgttttaatggaagagagacgttaatccgcacccgaactctgaaatattccctccaaacacctgtgaaattattcgggtcagattctaaatattcccctatgaatcggcctgcctctagtactgctttttcagttcgaaaaccagattggagatcatgtatttgcacccacatatcaagggtgtttaacagaacatttttgggattagcccctggtttgagacgttcaatgagaagttgtttccgatcgtaggtccatgggctgccattgattactctttgaatatcaatttcgtggtaaaattgaaaaaggaatcgattttgttcaaggatcttcacatacatgccttttccgggcttccaaagatcagccatgatgttttgaaaaatgagaaaatcggataccttcccagtcaaaagtctaccaatcaggcaccagcggtcgtcaaggtcgggttccctttcatcagcatcttcatcctcaaaaacaacttctgtagcttcttcttcctcaagacacatatcagcccacttttcatgtaaattccctccattgctactgctagaagccatgccgtaccactcaagcaacaaccagaaaaatagccaaatacaagaactatacactcaaacaagagcgacaaaacacactcaaacgagagcgagagcgactgttaacatatatatatatatatattttttttattttgaataatcgtctactaaaatagtaaaaaaagtcacagaaaatataattttttataatagtcaaatgtctacataatttgaatcaatttatt

SEQ ID NO: 284060 - DNA, 535 bp, Cannabis indica
tccggatgcacaaccggaattccggttcctcgcaggcagcaaactcaaaaattcataacttgctcaaatcaacctccaaatcacatcaaaccttccagacctattccatataacccctagaacatttctaaggcatcaaaaccacccagattgcacataatcaaaaatcaccattaaagctcaagctttgagttctaaactcaaacttgagcaaacctagctaacatgcaatcaaaccagcttgaatctacttaaacatgcataactaagcctctggaaacaactacaaacatccacaacatcacagcaacagaacatagacatttctttcaaaaaatcatatattttgcatagaaaaccatagctttgctcaacctaagaatcatgcttcaaaaacaactcaaataacatctaacaaacatgctttaacctctgaaaatatccacaaaacacagcagcaacaacaaccaaaaattcatgcatgcatcatcatcttttcttgaaaattaagaaaactaaatagcaagtttcaagg

SEQ ID NO: 284061 - DNA, 525 bp, Cannabis indica
aaagagttttatttagggcataaaacccaacagagatgtccccaacctatcaaatacggaaaagcctggctgcctcagtgactgattggtttggccaatttgctaaccgacaccatttacttggttggaagtattgggtatgacttctcctgatgaattactagacaaggtttgcccgcctaccacttggcccataggcggaacctgtgaccggggatttgacggttgaccatttatatctgagaggtattcatcgctggatcttcgtctatttcgccaaaggggatgatggttacaagttgttgccaagcagtctgataggctttttcgtataagcacagtggcttgccgactacggtcgtcaatgactgcttgctgagcccttaacgtttccatctccttatctctccattcggcgaacatgcgcctctgctcttcaaacgcgagattcaccacgacacggagttcctcctgatcatggtgcaaggtgttagtatgaccctgcatgactccaagagcagcacg

SEQ ID NO: 284062 - DNA, 677 bp, Cannabis indica
tacaataaggtttggtcatgcgttattatatgtataatatatatttatacgagccacataatttctctatgcttaatgtgtatcatgagatataggcccatacaaatggatgatatatacattcactcatggcttcacgtgggcaacaaaataatagaagaatgtgtgcattcaactctaattaaatttcaatgtctcaggtgtattccacgatatatatatacatatatataaacgacttacattcataaagaaagcgtatgtatatattaacacttaaaatgtatatatacggtctgatcgatgtacaagaataaaataacaaacctgtaatcgatcacccaatcttgaaacgtggttgtctttgatggatactgataaagaagccttaactcaaagtgaagtaatattaaataaaagtcacttgatttttattattatttatcatcgagtacggcaaaaaatatatatggggatgtaaattatgtctcaaatttgattcaatttaaaatgatacatacacattacgctaattagtaatttttccccctaattttgacatgtactaaatcgtattctttgaacttttttacccgttaaaaattcccctcgaactattaagattgttaaatttaaggacttttatctaattttagtaaaaaaattctaacatggat

SEQ ID NO: 284063 - DNA, 582 bp, Cannabis indica
cataccaccagaagtagggtttcaaatcctaatacatattggtggttcccggatgcaatgaataaggtgtggtatgagcttcatctagtatctctttcttaagctcatcaacattaggaacacaaactcgagctttgtttaacaacattccactattcgagactgaaaagtctttaggtcgacccgccattacctcatctcgaaccttaactagctcaggatcttttagttgtgcctttctgattctctccaacaaatcagattggagtgtcaaattatgcaatttcccaaccacgaactcaatccctgcactaaccatttcagaagctagttgaggggctatcataaccgtggtacaaacctgcccgggaccttttctgcttaaagcatcggccacaacattggctttcccgggatgatacaaaattcacaatcgtagtccttaaccaactccaaccaccttctctgcctcatatttaaatctttctgggtgaaaaagtatttgagacttttatgatcaatataaatctcgcacttctcaccgtgaagataatgtcgccatatctttaaagcaaaaaccac

SEQ ID NO: 284064 - DNA, 655 bp, Cannabis indica
ttgatcctgaatcgcagtatattaatcagtggtgagtttttactattccctcggataccactgccggagtgacagggggaaaatgcatggttgctggtggtgtggatgtgtccccgacttgagggtcagtcgtttctgggaacaagttgagaggtctgatattgcctctccctattccgccgttaatgacgtccacaggtggcattccaattccagataacggtacattcatcgtcccaatgttgatggacccgttgttagctcctccgtttgtgtgatttccagccatgatggtattctttctttgaaatgaataaaatcttagtcgtttcccacagacggcgccaaatgttgtcgagtgaatttcgcaacaccaaattatataatattattagtaacaagaagaaatttatgtggaaagacaaacgcgagtattcaacctagaatggcgagtactcgactgggaatgagaaatattcaacgaaagctagaaaataacaataagacagagaattgtagtggttcaatcaaattatgatctgcttagtccactgtagcaagagatttgtaggtgccatttcatggtggatcacccctttatatacaaagcaggtgtccagttggttacacaaggatcacattcattgttaatcca

SEQ ID NO: 284065 - DNA, 335 bp, Cannabis indica
ttaaatggttagaattggaaaaatgacatttttgagaaaataaggaaaaatttgtcaaaagtggaaaaattccaaagtggggcccattactatggtcggccacttctatgggaatttccacttaatttttctattattttaatgcctaataaatcctaacctgaacctgggcagttgcttataaatagatagtgatggctcacacttaagagatgatgaaatttcttgccttcaggaaaaaattgagccatctattctatacctatattcgaaccagcccctctcttttcttcttcattttttcataccttgagtgatagagtgagtgcccagac

SEQ ID NO: 284066 - DNA, 508 bp, Cannabis indica
ttctttcgggtcagctccattaacggtacagcaataaaaaccctcaacgaatcgacgataataacccgctaaacctagaaaacttctaacctttgtagctgatttcggtgctggccaatcccgaacagctttaattttggctggatcaaccaatgatcccatctttatccactatgtgccccaaaaatgagacacgagataaccagaattcacactttttaaatttagcatagagcttatgatcccgtaaccgttgcaaaactgctctgagatgcaactcatgctcttcttctgactcggagtacaccaagatgtcatctataaacacaattacgcatctatccaggtagtccttaaacacccgattcattaaatccatgaatgttgcaggggcattagtgagtccaaaagacatcacaagaaattcatagtgtccataccgagtacggaacgcagttttcgggatatcttcctctcaaattctcagctgatgatagcctgagcgaag

SEQ ID NO: 284067 - DNA, 615 bp, Cannabis indica
actcacccagatggtgccttttagaattggggcactctgggtaagtataacgagtctcagaactaccctgacgactacctcgaccctggttcccccagaacctcttgtttttacctgagccactggttgcagtggatgctttccttttctagtccatggccgaaccactacttcccctgctaaagcctgatgcaggaggggtaggagccctgccaaccactggagtcctagcagactcagtcatacacccaactgcaccctaagctcgcagtgctttttccaccattcagcataggtggttttgtcgtctgtagtaatcatcagatcatgtcgaatcttcgcactcagcccatccaagtatttttcctttttactgaaatcggttggcacaattcccgaggccaacctcaccaaccgatcaaactgtgttgtgtactcagtaacgctcatattttctttctgggtcaggtgggtgaactctttccttttggcacttctgacggcctcattgtagtacttggcattgaaaaattccttgaccttttcccaagtcatcgttgtgacatcatgtatcatggacaccatgtcccaccatactaatgcatcttcttgaaa

SEQ ID NO: 284068 - DNA, 539 bp, Cannabis indica
tttattatggtctatatgtatatatatatatatatatatatatatatataaagctttatctagatatatgttataatgacacattatgatgatcatgattttcacaaactacaattgattaccactgactgaataagcattccaatcataatttcaaaaagaaaaagagagagagaacaatattccaatcttcctctcttcgtttaaatttttaatttatactcctcgttattttttagctcaatattgtaaaaaaagccaaatataatatacttggaatttttttccatcaatttaagtatattctaaattctagaaaaacaataaagaatgttatatttatagggatatgattttgtcccgtgatgtactttcacggaatgtattctgtggtacattagatgagtcttagagtacattaaatgagtgtcagggtacgtttttactttttaaccctaattacccctagatcaatctcagccgtcagatcaaataactccctcatctgacggctgctgtacatcacggattacaatccg

SEQ ID NO: 284069 - DNA, 509 bp, Cannabis indica
cactcggagtcactcagggctcctgaagaaatttcaccgcaccctcggctctcaaagccttttcgaccatttcagcatatgtagttgactcggtagtagtaatcaccaaatcgtgcctaatcgtcgcactcaaaccgaccaaatatttctctttcttgctaaagtcagttggcacgattcccacagcgagcttggccagatggtcaaacttagtagtatactcagtaaccgacattccctcggtttgaaccaatttggtgaactctttccgctttgcactacggatgacttcattgtaatatttggagttaaacaactccttcaattcttcccaggtcatcactatgacgtcttgagtgagggttatcaactcccaccacacgagagcgtcgtcctgaaactggaaagtggcgcaagtcactcgatcattaccaaccactcccataaagttaaggatacgctcaatcaccgagagccactgcttcgccttcattacatcaggacctccc

SEQ ID NO: 284070 - DNA, 909 bp, Cannabis indica
ggctagtaacggttggagagaatggagtttgagttctccccgcaaccaaggtgaaagcctttggatggcttctgatgggagtgatggtcgttcgtcacaggctccgtgggagttggagcaaagattcgcagaaatggaagctatgattcaacgacacgatgaggagattcagaggttgaaacaacaaaggtttcctgtactatctttacctcatatgccaggcattctcaattcggtattaccagcagagcatagtatggctgataaccaagtgggatcattgcatgagaaaatttggataaatgaacctacagtccttcagggagattcagatatgaagaatgctctctggactgggagccctaaagaatgtattttaggacctcaagagattatgccacgaaattgggataccgcttgccatatttctagttatggcagaggtggtaggggctccatggttgagcagaagagtaaacctacgtcgtcagtggtgggtttaaaacggaacaagcggttccgaggaaatcaaggcaagggtgtacgcaaggattattcttaccctgagtgcccgcgatgcaagaaacatcatcccggagagtgcaaccgaaaagcatgcttcctgtgtggcatggttgggcactttaagagaaattgccctcaggcaaagaaagataagcagaagctggaagtaaagcctgtacttgctcagacatttgttatcactcaggctgatgttgcatccagtccttctatggtgaaaggttagcttcttatcagcaactcccattttaatgtattatttgactttgggactatatactcgtatgtagtatcgagagtatttaatcttttggatagactttatgattttcttgtaagagggtttggaaccctaatgcctagcgg

SEQ ID NO: 284071 - DNA, 482 bp, Cannabis indica
aaacagtaactagttactagttactaaaattttcagctcttgcaaataacactcaaacctattccaaaccattcccactttattttttatcaattatacacattataaatgataaaattcaatccccaacaactatatttgaattatagtttttgaatttcaaaaattaagttgtgtaaccactttacacttaattagtgatcatgtggaagttacaaaatattaactccacttcttatgttacaactatatgtaactctcaatcacataatattgtgattattacatgtatataattcccaattatattatatgtaataatatatataatatatcacaattttaatcttaaacattatattatttattatattatttaataaataatataacaattacaattagaagttttctgttaagtgtaaacttgatgagttgtacagttagctttggttgttagctttgatagaccttacatctga

SEQ ID NO: 284072 - DNA, 617 bp, Cannabis indica
cctgaagtggaggaaacactccttcacgatccaatttaccaaggttagtgaattctttcactactggtcctatctttaattgctttctttattttcagtattttagtttattttctgtcatttgttttttttagaaaattaacatctatcactgtgcatattctccgtttttttcggttctcatctcatgttcttatcatatacatatttagacattgaggacactgtctcattttagttgggggtactgagtatattcttgcgttaagttcgataaatttcttacctttttgaaaattttgagtcaaattctgctgctaattatgtgaataaataaatattgtgttagactagtttatactatatttagttacttagatagtaattccagtaaaaattgcacaaaccaaacatatgatttgattgtttttaacacatttaattgagaaaaatcttaagttaaaagctttcatttttcgtgagaagtgagaattgagaaaacgactttttgaacatatattgatcttctgaattggtaaaatcgaaattttttgaaatttgaaaatatgacaattactagagggatacttttttttagaattgagcctaattgtaaa

SEQ ID NO: 284073 - DNA, 550 bp, Cannabis indica
ttaatatcctaaatatgaattttaaaacaatggaatttaaacacatataaagtttaagaaaccttacattggttgcagcggaaataaatgactcattccgctcagatttctaacccttgtatcctttctgtagcagagtatcactaagatctgagcccggttctccttcagttgattgaattcttcacagtcttatacactatgattgagtaccaacttgcttgcgtgggcatgtacactatcactataggctcgaattttgatagtgtagaaaactaagaatttcgaattagagaagagaaaagaagaagaagtttcaaactctctagttgtcaaatataatgaaaactaagtcaagattcattagttggattatgagacctttctcttcttttatattaattctactagggttagggttgatttatttggaataaaaaatgataaaaatagagcaaaaataggcactagtggccgatcatgaagtgggcccaacgctagttagatttttgctatttttctcaacaattttatatatttttcacaaata

SEQ ID NO: 284074 - DNA, 774 bp, Cannabis indica
aactaggaactaaaagtttccctatcgataaaaaacatggcaataccccaaataacataaaaacgaggaaatctagggttcctgaaatttcgccaaccggtagaccggttgcccaaccggaattttggttctgggaattttcagaaccccatccggaattctggatgcacaaccggaattccggttcctcgcaggcagaaatcaaaatttcacaactcattcaaatcaaacccaaatcacacaaaaccttccagacctgttctatatatcccctagaacatttctaaagcaacaaaaccaagctttaagcacagaaacacatttcaccattggaggttcaagattgagttcaaaaactcaaaacttgactaaacctccaaacagccactaaatcaagcataactaaacctatttcaacataaattaacaccagaaaacacaacataacaatagcagcaaccacagcaacgaaaatcaaaactttactttgaaaaccatagcttttgaacaaaatttcacaaacttgaacaaaggtaactagcatgcatgaaacctacttaattccattcaattcaagcatagaaaaccacagaaaacaacctaaaactacagcagcaacaacatcaaaattaaacatgcaaccattttcattttccttgaaaactaagaaaactaaagagcaagattcaaggcttaccaagagcttagaatcacacaaaatctgcttgaaaatcaaaggaaatccagccctagcacacacaaccagccgagaga

SEQ ID NO: 284075 - DNA, 628 bp, Cannabis indica
tgagtgggagtaatgagtaggtatcagattaatacaggaaagaaacattggaagaaaatcaaaagaatcttaagatcaagaagaggaaatatatgttagtcgataagggtggtcatttaatactcttagactacaccaaatcaggtttctagacttgcttgatgctagaaagtctactgataagatggtgattactcttggtggtggagcagtgattttagagaagtgtaaaaatagatccagaatctctaactttaatagtgagactgaatgttaaagttacaggaaagatattttttcagcctatggaaagttctatacagttgaattaactactagtgttacttcctgaccaacataaatgtagttgccaaaaagtaaagaatccagtatccctagatgagaagacatatagagagaaattttcacaaaataaaaagattgtgagataaaggaaatgtaatagtggagaaagtttgtattttatacaacatgtcagatcctattacaaatataatactacatactacacttgatttggatatcaagatgttaagattatttgaaatgcacttttcttttatattagtgcaagtgggagtttattggattttgtaccctaaataaa

SEQ ID NO: 284076 - DNA, 766 bp, Cannabis indica
tctgtaaaagtattttgataatgattgtaaaagtttaaacaggggatcctagtttatgaaaatatatatatgtttattaagtttaatagtttaaatcaaaaatttaatttggcacaatttttaagaaaaatcctttaattagcaaaggtggcacgttaatagaaaatcactgtagcgcgcctaagtatcagggtgttacaatacattgtaccaatacactcagtaccactaacgtactagtattggtagcatatgaattgaaaatatagcatgcatatattacgcatacacatattcatatacaattacattttatgctagttttacctcgtttttgaattcaagtgtgacagtcgacctaaatggaaaatcgcgcgctaaatggaagccctatgtcacaatcacgtaaaatgataaacaaccttctaaaacctattcggggaccttggattgggttgattcatgtcttcatggtacaaaatactaaaagatagtgagttggattcaagttattgaaatctgaacttctatcttggaaatcccgaagtcaacctgacgtaagtctagggtctcctcttaggtcaactactatgactcggttctactcaactctttgacatcatcattcatgccatgtgtcaaatattaatagtcacgtcaccaacaaacactataaaaaaaactagtacttttagtgtataacctttaagtcacaacataattttttttgttgtactaaatgtagacttttagtctacaacaaaaa

SEQ ID NO: 284077 - DNA, 496 bp, Cannabis indica
atagattatacttaaatggttatacatacatattttataaaataattttatttatatattgaatctcatatatataatgtaattaaatagtcatctagacttatacaatgtactttaaagtgaattactatacaattataaaatataatttatttataagattatacttaaatggttatacatacatattttttaaaataatttaatttatatattgaatctcatataaataatgtaattaaataatcacatagacttatagaattatataacatactttaattataatttataaattatactacacatacatacttaacgaaataattaagaaaatatagttaaataatttattgtcatatatataatgtattaaatgattatattgaaatatactatggtcgcacatagtcgcataaaccaatattaggatatattttgaaatatactatggtcgtacatagtcgcacatggtcgcacaggagcacatagacca

SEQ ID NO: 284078 - DNA, 476 bp, Cannabis indica
ccagaacacatcgcagacgatgccgacacaaccatgggagcagacatctcaaatgatgccgacacatctaggacaacagacttctcagatgatgccgacacaacaagggcagcagacatctcaaatgatgccgacactacatgggcagcagacatctcacatgatgaccagctcgcaaatgccgccatactacccacagatgccggatgttcctgggtcggatgttcctcgagatgctagtgatgaggacgatgctactacaaacttcttttagaatatctattttaattttacgaactatcggtctaatatgtttgttaatattttatgaacactaatttatatttaggtaggcagtactataatgtttatgacttactcttattgtaatattagtgactttaaatattttcttttagttaaatgattttatatcttaattaattcaataattttatatattaattaattaaata

SEQ ID NO: 284079 - DNA, 546 bp, Cannabis indica
aattgtctttctgggacttcaattcgaactggaacattttaagctagaatatgtgattttgtaattttctttgggtcagtgaatgcatttggtaattgatttgcaatattttgcaaatgaattattctttgaacttcaagttcacattgatttgtacgaggatcaaattgagataatgattgtgcattccatataatttctttttccagctgtttcttttcccctccccctaaagctgggaaacttgtctcatcaaaatgacaatcagcaaaacgtgctgtaaatacatctccagtgtgtgggttcgagatatttaatgatagatggagattcatacccaacatatattcccagcctcctttgaggacccatctttgttcgttgtggtggagcaatcagaacatatactgtatataaccaaagattcttagatgaatatttggctcctgaccaaaacccaattgtaatggggagaatttgtgatatgatgttggcctaatgcgtacaagtgtcgcaacatgtaaaatagcatgtccccaagctaaa

SEQ ID NO: 284080 - DNA, 576 bp, Cannabis indica
ttaaattaatttacaactcaaatttaatttctataaatatatatttcatttcgaaattaaagttgttatccaatttttgcactctgacgtggcatcacgtgaatggtaacacatggagtccacttgggaacatctgctcgggaagataggccgagcaagatgcctcgctaggatgcccagagcaagatattcaacgatccgtgtagagcaaccaacacttagcgaattcaacttttgcatcatgagtcatcatcacaatccctataactcagggatcaatttacgcggatatggcacacacatgatcccactatcagtgtattcagccccaatcccacgatccttgtattcaacattgatcccatgatctttctgtttatacgcattgtaacgagaggggaaactcttcctcctcaagcttacttgccctataaatagtgatgcatattcactgggcaagggatcggtcgaaaagcagttgagctaagactatattattatctaagaattatatattcagagatactgttgtaagagttataagaaaaggaatctttctccttgatcttaagtcaa

SEQ ID NO: 284081 - DNA, 539 bp, Cannabis indica
cattacctccaaccaaacgctaacttatatcgtgcaaatgagttttttttcctaaatgtgcaaatgagttaaaaaatttatacaagccctttacctcttgcagtactcatttagttttacaggcaccaaagccaagcatatacttgaatggtctttaatcggcccaatatctaacctctcaccttaatttagcattcacccagaaaacaaagcacaactaacctctaatttttactatcttttcccaaaggagtcgtaatttaaacttttgctcaagagaataaggtggcgtttggttgagaggaataaaaatatgggaatgagaataggaatggaataaaatttaaaatgcataaaaacaattgataaaaaaatcattaaattttttcttttgttacattggaatggtctttcttttttttttaaaatagaatagtcattccaccaaaatagtggaaagagcattccattagaatgccattctaatactttaaaatgcaaggaatggaatgaaaattatttccattctatttcattac

SEQ ID NO: 284082 - DNA, 552 bp, Cannabis indica
ttcatagaaaaacacaccaaatcaatttatgccattaacgctcaaagctttgaactctaagcttaaaattgcataaaaccatcaataccaattaaaatcagctgcaaggagttaaaatcaacctaaaaggaccttagaattcgaatcctaaacacatgaaaacttaacagccactaacctagaaatcacctcttgaaactaagcaaaacttgagaaaaaacataactagagagtagccaaggttaccttggttaattcccccttgaatacttgctaaatctcagcgaaatggaaggaaaaatctgcaccttgccctagctttgtcccagccgaaagaaggaaagagagagagttcaagagataactccaatttttaattttctcaaatgaaaagggttttccccaattaactctttgctgaaaaattaatgtgctaggtgtcaattaattgggcggccacctcactcaccccttaaccaaaagactaaaatgccctttaacccaatattaaggtttttctaaagctaggggtaaaatggtcaaaatccataa

SEQ ID NO: 284083 - DNA, 584 bp, Cannabis indica
aaagacaacttgaaaattgttgttgtacttgccttcaagcttggcaagtgatgagtttgaactaaaatcagcaccaacaacataagactttggatgatgtgcttggggagaagcctttcgtagctcgtagaggatataatatgatgtagatgaaatatatggattcattggtggtttatcagtcaatatcattgatgaagtcgaatcaatgatgccatgttcttcttcatcctccaatgtcacagtttctacactttcatctaacaacccttcttcttgttgctcactctccacttggctatccataccctcacttgtgatttcatattcaatgatttcctcttcacaaggatcttgatcttcaattgtaggctcattatcttccttgtattcaaataatgacccttcttcattgtaccaacaactctcataactttcatcattggagttattacattctgaatcatgagtcattgaattatcacataaggatctcaccatgtcagttaagcgattaatctctcctggaagtgattgtagaagtgatagtagttgtcctctttttcagtttgttgggatgaatt

SEQ ID NO: 284084 - DNA, 118 bp, Cannabis indica
tgggcctatatatctgagcttccaataagcagatctagaatttaccaagtaaattcactgacttattaattcctcgttgcatccaccatagaacttggaattgcactctcagttatat

SEQ ID NO: 284085 - DNA, 454 bp, Cannabis indica
ctagacccggacccggacccaaactcgaacccagaccaggatcagaaccaaggacttagaccaaaaattcaatccaaactcaaatcggtattggaacttgggactcggagcgaacctagacaaagacccaggaggcgaacccacacccgaagcctgatctggacctagacagaaatccggactcgaacccaaactaagaccagttctcgaactccgacacgaactcagactcgcaaatggaactagatccgaactaggcatagcaccaggaccaggacctaaaccaaaacctgaacctagatcaaaacacagatagagacctaaacccgaaccgtgattaggactcaaacctgaagctagaccgggacccaaacacacacaataactgggacctggacccagaatcaggataaggaccagggaaacacaactaggaccgggagctagtacccga

SEQ ID NO: 284086 - DNA, 558 bp, Cannabis indica
acctcttcactcactccttggatcttgaaagaatcactcacctccaagaatgaacggagatggaggtgaggatcctcagttggcatcccgctgaattgccccacggtttggagcatttgaaacatcactggcttgagctcaaactgcggtgcttgtatttcaggcctcacaatgcctggattgagctcattaaacatgggggctgcatactcccgtatagcccttgctcgatcatctgccaatatgatgggattaacaatttgttgggcaatcccatcatcatcaagattctcagccatgatgtctcggcccttagccttttgaacccttcttcttcttcggaatgtgcgttcaatctcggggtcaataggagcaagttcaaagtcctcttgttggttcatacactatagatacctgagatttcaaagaacaaaccagcaagattaaaagcacaaaaattcttagaatgtcaattagttgataaaacaaaatttagaacttaaagtccccggcaacggcgccaaaaacttgttgtgaaaattatattgatttataatt

SEQ ID NO: 284087 - DNA, 581 bp, Cannabis indica
atagggaaacttttagttcctagtttaagtccccggtctaccggttgtgatttttatggtttaagagcctataatccaccgcgcagatagttccagtcaggttgaccggcaaacctgaattcgggatccaagtaagattagtataacagtattcatatgtcgactacatgtttagcgtgcatgtaggaagcctgttagattacattagatatgtatgttggctttgaaccatccgactgtgtcacgtcggtacaggttggagtatgaccagttcgaccgattaggctgacactgtttcacatcagtataggctagagtatgactagcagctagagtatgaccagtatgaccaagtataggctgatacttaggttggtggttccgtactatttgacgtatcacgtcggtacaggctggagtacgaccagcagctggagtatgaccagttcgaccgattaggctgatactgtaacacgtcggtacaggctggagtatgaccaacagccggagtatgaccggttcgaccgattaggctgttacttgtcaatagtaccgtccctatgaacgttcagaactcagta

SEQ ID NO: 284088 - DNA, 969 bp, Cannabis indica
acattatctgtaggtttggaattcccatgaagatagtatccgataatggaacccaatttgacggcgacttgttcactgaattctgcgagaggaataaaattatcaaaagcttctcatcagtatccaggcctcagacaaatggacaagtggaagctgttaagaaaaccctaaaggatactatcaagaagaagctagacaaaggcagatggcttggcaagctacctcaagtactctaggcccacagaactactgagaagatatctacgggacacactcctttctcgctaacatttggctcggaagcaatggtgcctgttaaagtgaacatatcgagtcacagaagagagtttgataatcaagaagaaaaccaggaacttttaaaattgtccttggatctacttgagaaaaaatgaactgagtcgcaaatcaccaatgcagcatactagcaccgagttacaagatacttcaacaaaaaaagtcaagaaaaaactattcaatgttggagacttggtgctaagatgagtctttgcatatacgagagatgcatttgcaggagtgttcaacccaaattgggagggtccatatgtcatagaagcagtagttagagtgggagtttataaattgcctcaactcgatggctcgctaataaagaactgaaacgtagaaaatttgtgaccctactgccaataaataaatgatgtaactcgcattactgatgtaaactttaaacttcagttatgaataaagagaatcatttatattaagtaattacaaagtttcgttctttaaaaattacttaaggggcatttatgtatgactaaccggaattcatttggaaatacattgtataatgcaaacccgtctatttaaattttttttttttgaaaattccaacggttctacgactaaacctctttgacgaaagtggagtcgagccgttacaactccctgacaaacttttttgcgaag

SEQ ID NO: 284089 - DNA, 746 bp, Cannabis indica
tagtttctttacaattttttttttttttgaggagataattttttattttgtgtggctgggcctagttataaactagattgcctacgtacccggagtgggatcaagccttacgtagttcattgcacactcgctttttttttttaagtgcgctgtctacaccatgggtaaatacccttttgtttaagtgtagaactttttgatgaacttcccattaacacacggataaatgcgtcggccttctgaatttgaaagttcatatgcccctcttaggaagaccttagtaacaacataaggtccttcccattttgcctcaaatttgcctttcatccttctagttatgacaattggtcgtttcacagtaagcactagatctccaaccgaaaaagatcgaaatttaactttcttgttgaatgccccagctacctgggcttggtaaatttcgagcttttgttgaatagcaagccgcttttcatctaatgcttcaagctcggctagacggacttgcacattttcatctgggtttgttagttgagtagcaattcttaatgaaggtatttgtacctcaaaggtaacactgcctcagacccaaacaccaagttataaggtgtacaaccagtcgcagtcctcacatggttctataagcccacaaagcttctaggaggcgttcatgccaatccctcttatttttgtcgctgtcttcttcatgattttgcatacactttgtaaatgcttctgcttgaccattt

SEQ ID NO: 284090 - DNA, 522 bp, Cannabis indica
tatatactgagagtgaaattctaagttctatgcgtggattcaacaaagaattaataagacagtgaatttaatgaattttcactaagcaagggtgaaattgtaaagaaaagagtttctaggtttatttatttgacatttaaatggttaaattagaaaattgcgtttttgagaaaatgggatagaaaaatgacaaaatggcaaaattgcaaagtgggcccattatccattctagggccggtcacttagtgtgattttactatttatttttctattattttaatgccaaataattctaacctaaacctaggtggttacctataaatagatagtgatggctctcattcacacttaactttgtcagatgaaaactgagcctctttctatttaccctagccgccacttcttcttctcttttcctcttcaattttttcgaaccttgagtgaatgagtgagtgcccacacacatcaagtggtatctcaatcatagtgtgtaagactgtaggagattccaaacaacaagaa

SEQ ID NO: 284091 - DNA, 630 bp, Cannabis indica
cgcattgtaacgagagaggaaactcttcctccttaagtttcctgccctataaatagtgaggaatgttcactgggcaagggagatcgaaaaactgtaaacagagaaatcatacgccgaaacgctataagctaaggctatctaagaattatatattcagagatattattgtaagagctttaagaaaaggaatcttcttccttattcttaagtcaatagaactaacgaggattaggctattaccgaactgctcggggctgaacctccataaaattttggtgtcttattattgctttactacaaattcttattacgacatatcgtttatcgcttatcaaaaagactcattgtcgttggctaaaagcgaagtcaacatacactaagtgttatcacactcgatatgcgtcgctttcgtcttcccagatgtaacggagtcgatgtctcgttttatgcatccaatgacgtatagtttctcgttaatacactaaacaacagtttgtatatctatttctcgcataagaccttatagtcagcgagttgtaagtatactctgttacttatgcaattaatgacttatttcattaaaagtgatttcatcgatccatattcccgttatcttgacacgtgtcctcc

SEQ ID NO: 284092 - DNA, 495 bp, Cannabis indica
acccagaactgaatccagactcagatttggattggaacttgggactcggacccaacatagaccaagacccaggacgggaacccacacccagagcctgatctggacctagactgaaatccagacccgaaccaaaactcagacgaggactcgaactaggaaagagacctagtacatgacagggactcgaacttgaacctaggacccagctcgtgacccggcaccagaaatggaaccacactaggacccgagattgggatccggatctggacccagggcttggacaaaacctgtagttagtttctggatttaggacccagcccaggacacgaaccctgacgaggacccggacctaaacaatatcccagacccaaaagtggacaagaacgcgtaccctgtgaccgaaaattggaaccaaaactggaagttgaccgggactggaactagcacttggatttggaatcaaaactgaaattggacctagatctagagccgtaa

SEQ ID NO: 284093 - DNA, 352 bp, Cannabis indica
caaatgtgtgcctgtgtgagcctatatgtttattttagggaaatttacaaaaatactgtaatttgggttaacttttacaaaaatactgtcacacggaaaagttttcaaaaatactgtgtttttataaaacaccagtaaaacacaaagcaaaacaactcaaaacaatagtagaacaactacaaaacactagtagaacaccagtgaaaacttaacacagtatactgcagtatgaagcttataaaaaaaacacagtaaagaagtaaaaaataccgtctggcagtatttttgtaaaaaattagcaaaagttagtataccatgtaaatttcccttattttatatatagatgcatata

SEQ ID NO: 284094 - DNA, 703 bp, Cannabis indica
ggtttagggtgtgatataattttgttttttttttttgcagtcttccaaagttccacgacttttactgccagtgtctgaacattacactggtcgtgttacttggcggggcggtagttactattaccccaaagtaaaagccaagtttgtacaaatgcagttgttggaaagggtgaaggaggaatcccctttcaacaatttttttgagagagagccattagcgttttcaggtgctcttatccatcagctcttcatgcataagataaaatcagataaagatgatgaggtgcatttttatattgcaaagaagagatgccgattcggccgaactgagtttgccttggtgactgggcttaatttgttacgtggaccgactgaggctgaggtttcggagagggcgacgtcagaccgttgatagtagaatattttaatggggatccatctatcagcattggtcgtctgcgcagcgtctttgagagttgcactgagaaggatgattgttacaagttgggtttggtgctgttcgtgatgggtgttacaacaaaaatctcaccgaaaaaaatcttaattaatcattaataacaaaacaataataattaattgataataaaataataattaataattaataataaaataattattaataaaaaaaatgaaaaatgaaactataattaataattcataataaaacaataattaataa

SEQ ID NO: 284095 - DNA, 507 bp, Cannabis indica
ttccaagatcgtcattaattggtgaccgactttcctatgctgcaactctatgcgatagcaatcacgagccagcatctggtcgcctcgcaccactcccacaccctctggtgtttggaacttcaaagataggtgctcaatcgaactgactgtccttagtccgatcaatgctagatgacccaacaatatgttgtaagccgatggcaggtcgaaaactaggaaatcttgcgtaacagtggcggatagggatgccttgcccaaggtcaatgcgagctcaattatgcctagactggcaatgctgtccctagtgaatctgcaaagattcaccatacaaggcctcaatttggctttttcgagctccatctttctcagcatttccttgtaaaggatatttactaagctcccgttttctattaacactttcttgatccttttattggcgaattgaatggtaatcaccaatggatcgacgtgaggatatctcacatttttctcgtcttcctccgtgaa

SEQ ID NO: 284096 - DNA, 597 bp, Cannabis indica
catagcacccaaatttttttttctaactactctcaagatttttcaaaattttgacagcacttccccttaaaaatcgacttcccgggatttaaccctttcacaatcacattcaattgactcaccacaataatattcaacaatgtatgagcaacaattccaaaaatttcaacacaaagtctaatactctctagcaatccacaaataatccaatcaaacttgtgtagagaaattaaaatttgttacctcaatgaaaatcactctttagtcaacctccattgatgagaaccttgaagctttagggaagaagaaggtgaatagtgattttctgaaatttgggtgaaatatagggattttggagtggatttttagaggaaaagggtgttagatgagagaaataagggattatgatgatttaggatgagagtttatggataattttgaggaaaattggtttgaatggggttagatgaagaaattaggttgaaaagggtggttttcggctggagaagagagggtttgaatgtggggttttgatttgaaatgttagggatttgggatttaaaaaggaaaaactgaccaatctcgccgcggcgacct

SEQ ID NO: 284097 - DNA, 523 bp, Cannabis indica
attttaaaattaattatgttgataattcatttttaattaggtttgactaatataattaacctaatacaatcatttaaataaggtagatgggtcttcacaattggggtagttcgtgtgagagagggttggattcagtatgtcgtacccactactaatgacccccttactctcacacaatgcctaaaggagaggaatttaaccattaaataaataattgttattcaatgaataagcccaatactaattgggcctaaataaaactatcttatgtgatattttattttagcaacctagtctatttaattaataaaaaacttaaatgagcttcttatatgcatctaagctcaaaagcaaacatataggctcacagaggtcaaataatttggatgggccctatcatgcttttgggtttacacaaatgaaagaaattgcaaaacttacccgttacaaattatttataagattcattgacaattggactatgattaaaatcaagtcattggatctgtcaacaagttaatca

SEQ ID NO: 284098 - DNA, 842 bp, Cannabis indica
actctaataataaatttatttacaattttataattacactaatattatttttaatacattattaaataatatttcaaatataaatatttaattttttcaaacaaaaaatttgtaatctttaaaaataaaatacattcaaaatcttaaaaagaccaaaatcttaaatgaaactagcaatacgtggctcggcacgtacattcacctagtattatatatatatatatatgtacacatacatatacaaattaccatcattacaactatataaaattaaatattacgattataaatatattaatggtacttaactagctctacttgtattctagctaaaatgatatgttttgattggtgtatatatatatgataatggtttatatatatatagagatgatttacgaactaactttatgctaatgatctcaacgacatcttgaaagaaaaagcatgaagctaacggatataaaagcttagtaagttgtataactcaatatatataattgcatgcatgtatatatatattgtaaattattttgttaatttcttaattacaactagtgtattaatatatatgtgtacaggtgttctaccttgaagcttgtgaatcagggagtatgtttcagggtcttcttccaagcaatataaatgtttatgcaacgactgcatcaaatgcaactgaggatagttgggctgaatattgtcctaattttgatgctcctcaggagtcgatacctggtttgggagacttgtacagctattcttggctcgaggattgggtatacaaatatatttatatacattattattgtttttatgtatatgtcattttttaattttttact

SEQ ID NO: 284099 - DNA, 893 bp, Cannabis indica
tttatacgcattgtaacgaggaggggaaacttctcctccccaagcttacatccctataaatagtgatgcacattcactaggcaagggatcggtacaaaaagcagttgagctaagaatatacctgttgaccgaggttttcggcaaccaatataataataatatttaagaaagctgtaaggagttaatgcaagagatttttacgtggttggggcattaatgagccttagtccacgagtctgtgtatttatgagagtatttattacagagaatgttcttggtgattttcctctctaattcttatgaaacccagaattctcgacccctgccttaatgagtttggggggtatttatagtgtttttgtggggtgatccctagaaatgaggtacatgtctttttgtaatattctataaaagcacacattcccaatggatacatcataagaaatgcatggtctaatccctaggctttttaggggtttaatggacgtaatcctttatcctttcttgactgatgtgattcctcataaagtagctgtcactaggctcattaatcatagcgtagtagctgcagaaggggggttacgccgttagactttaatacttatggtagtttcaatacgccttctcccatgcggcattaaatgcgaggtgactgttcagataggatttgatacctcccggaggtgcttcgttgtagccttgctctccgggagtatgtgaaacttacatgccttctccgagaggcatgttaaatgctgatccctttgattaaagagacttagttgaattatcccaaagtttagcctcttcagtctacgtgtctcaatccggttggtccacgtattttggacaaaatcaggggcaacaataccctaaatatattatctaagaat

SEQ ID NO: 284100 - DNA, 669 bp, Cannabis indica
ggaacaaaatcatattcctattattatattattatttcccattatcattttggaaggcgagcttaggaagcagtcgattagtaaacatcactacaagctaaggaaaaggccaatctaagatctaagcataaggcttgatgatacatgatcagccattttgattggccatctatgtctcggcagcttggtgagacttcattcaacaacttcacagcagcaagacaatgacaattcgtttcaacacagaagctttgaagatgttgatttatacctgattgcagccccaaccgaatggcctggccaataactccgctggataataaatctcgcactagtagcagcccccacatctcccatcgccgtccctgtaagctgtaactaggggtgtcaaaacggatttcgacacgtcacacgaacacagattaggctcaagaaaattagacgcgggttgaaaatgagtcgacataacttgacacgatccacttacacaaatttgaccgacacgttttttttaaatataataaaataaaaaattaataataataaaaaaattatataaaaatatatacttagtaattcaatggtaagttaaaaattttaaatttaattttctttaacatgaaattaaaaatatttaatttttttaatatttattatatatataacaaa

SEQ ID NO: 284101 - DNA, 567 bp, Cannabis indica
ctatatcgtggtacatatagagcgttctatataactgtgactgctattcaattctaaatctatagtggcgcaaagtggaattaataagttgagaatttacttggtgaattctagatctacttattgaaagctcggttgtataggctcatggtcacgtcactagttgagataatacagcttacaaactcggttaattgattttaattaatcaatgataattctaaaattagactgtgtcttattcatgaattttcactaagtaaaggcttaattgtgaagaaaagaggttttggggtcaattaattaagagactttgtatggtctaattaataaattacataaatgataattttattaagtaattaataataattattaaataaatagttttggcatttagaggattgaatttgtaaatattgtattattaaaaagaagaataagtggttgaaattaagtggcaaaaatctaactagaaactggtccactatagtgtacgaccatgaagtgttttttgcccaatatttttattctttttttaatccatataattcaaccctaagccct

SEQ ID NO: 284102 - DNA, 575 bp, Cannabis indica
cgtttttttttttttgtgtaaaccgatttttataataatatttcaaccataaagcttgtaacttttttctcttggatgatttaagtttcaaatttatcttaatcttcctatattatgtttgttattgttaatttgtttggattactattatttattactattttacatcatgccttagaacgattattaaaatttatatatctttggggattaggatgaaaacagattgtaatttctacaccaaccagtgcatctgctttagcagtatagctctttcattcttttttttttatatatataaataatttatcaaatagtttgattttcttttattaaaatttgtctgttgcattgtattatgttgttttgaatcatactttttttggggggggaatatcaaagtcttcaaacttttctgaactcttaggagggacctgaaagtaggtataacaataaaaattataagcaaaaaattcgaacaactaaataaataattttcaaaaatatgaaaaagacaaacataatctaagcatctagaaaaaaatcagaaaaaaccaaacaacaacattttaaaa

SEQ ID NO: 284103 - DNA, 603 bp, Cannabis indica
tagacaagtgttgtttctatcatgtttttttcttaattggaattggtttttaatttgttcatatttttggatttttaatctttatatttactcttactcatgacagcatactattaacaaccttattacaaccatctgacaaacaactaaattgcatttgtaatcactttatgtagtttatttttccttcttattaatttcaaccttcttccactcatttaattatttaactataatatttgatgttcttttgtatattaatgataataataccaattccctattatcaatatctctccacataaaaaatcacaataaaaaaatgtatgtaacaaccaatcgtaatatgcagtatgtgttttctaaatgttttaatatagttgttttttggttgatgtgtagttgtttccacttctatgctgtaattcttctgcaggtctttttgttatgtcccttttgtccacacttgccacacttgttttgtttctttgtttcccaagctgctgccattcttcttttcctcggccttccagacttgattctctcctttggaggcaacactatgatttcttcaaaaaaatctggaagttcccattctcttac

SEQ ID NO: 284104 - DNA, 1297 bp, Cannabis indica
tatccaaaagatgatatacaacaacagttcaaaatacaattcaaaatacagcagacacaagacacagccagtctaaaacaactcctgtcaactcaacacgcaagctggtggggtcaatatgtacattgctggagaagatcgccatctcatggttgttctaactttgccttgcccttacctgcgccacaaagcacccgtgagtcacatagactcagcaagaaaagtaataaagaaggatacattaaatagctaattatacatttcattatcacaaaatgattaaactataacattcaacagtaggtaatataatcaatcacatgcatagaaacagatatgctcatatatttgtattgcctaatcaagcaagcccgtgtcataatgcaatatcatatataatatcattgcatcacctaatcaggtgagcccgtgccacaacttgacgctaatatatcgcatcgcctaatcagacgatctcgtacctacgctcggtactcatcatatgccactgacgcccgtacctttgcctggtacgtcgccaaatgtattgcatcacctaatcaggtgagcccatatatcgtgtccatagtatcattacattatcattgcctaatcagacaatcgataatttcagaacatgtcatgccatgtggtacattatacttttcttacctcaagttccggatcaggtatgttggccgacctgcttggagaacgatcgataatctcgggccctatgtcataacaatagtaaatcaataagtgtttatcccaaaacaccacttaacactcgcgtaagacaatctaggattttctaccaaactctgtggtataatacactaaaataaaacttatattttggctctaaaatatacaccatattgtagagctcgtcgcaagcttcgaaacggtatatagaacgtccaaaatagacacccgagtgaaaagttatgataaaaatacgatttctgatctcctatgaatttctaaaaactatgaaacacgaaaatctcaattttcgcactcaccgaaacactaccaaaacttatccaaatcactccaaacttcacagggcacatatataccatgaatactatcattcttatgtaacagaagttaaaatcgagcccttaaatggaaaacgccattaacgctcggactaagctttaaaaagttccaaactcgatttctaacccaaaactacttcaatttcaacaagaaaacatcggaactagtcccatgactacccgagaacaatcctataaggtcagaaccttcataactattctaattcaca

SEQ ID NO: 284105 - DNA, 720 bp, Cannabis indica
actagtatggggaccatgtgcctatataaccgagcttccaataagcagatcaagaatttatcaagtaaattctctaactcattaattcctcgttgaaccacgatataaatactctattaattatccattgttacaatcccaataatcaatgatcatctatagatgattacattgcataaggacaaaattactgttacaccctttcaatgtattttatccttaaaacacttagccacctataaataatatttaattgaactaatataatcactaaaatgagcactctatcatttatttctatttagcctagctcgaagaaaatcatcgtttcaattctatgtccgaatagaagctatagattccgtatctatgattagcgctttcacttaattgtactatcatgttcccaaaatgtacgtatcaccggaccaaaaggtaggcttaactaacaaatcaaagaacacaaataacactattgagatcgaacctaaccatgtcaggattaagatcatttgatctaggatcaactaggtgatattgaattgaatagatatttcggtaaatttatcatatctaatccaagttcactatggtctcttccgatgcatactccatacatccaacccaagcttactttaaccaatgctctggaaaggacatatcacttatccaaggtgcaaagtaaactacgttgtaggttatcatatcagttaaaccctg

SEQ ID NO: 284106 - DNA, 558 bp, Cannabis indica
tcttcttgcatccaatagatataaagggttgctacgtgaagtgaaacaatttctttcaaagaactttgagatgaaagacatgggtgaagcatcctatgtcataggcattaagattcatagagatagataccgaggtatcttaggtttatctcaagaagcctacatcaacagagttttagaaagatttcatatgaaagattgttcaccgagcgttgctccaattatgaagggtgataaattaaatttgagccagtgcccaaagaatgattttgaaagagaacaaatgaagaacattccttatgcttctgctgtcggaagcctaatgtatgctcaggtgtgcacaagacccgacattgcttattctgtcggaatgttaggaagatttcagagtaacccggggatagaccactggaaagctgcaaagaaagtaatgaggtatcttcagggtactaaggattacaaactgatgttcaaacgaactgacaatctagaagtagttggctactcagactcagatttcgctggttgcactgattcacgtaaatctacatctggtta

SEQ ID NO: 284107 - DNA, 705 bp, Cannabis indica
tctactttgtagtccgtgaactcgtggagcagctcccggactattgttacatacgcggccattcgctcgccgcgtgtttggtactctcccgatatctgatttacgaccagctgggaatcactatagacttccactcttttggcccctacggctttcgctaacctcagccctgctatcaaggcctcgtattcggcctcattgtttgaagctgagaagtcgaaccgtagggctgcctggagtcgcagtccggtcggggatatcattgccactcctgctccggatccattttcattagaggctccgtccacaaacactctccatgtggggaccgatggtgttggcgcatttgcggttgcctcggcttcattgcattcggtaatgaagtctgccaaggcttggccttttatggagattcggggaacgtagtgtaagtcgaactgacttaactccattgcccacttgaggagccttccggatgcttctggtttttggaggacttgccggagcgggtggttggtcagtaccttgatcggatgtgcttggaaatatggccttaattttcttgaggccatcaggaggcagaaaacagtttctcgatgatggggtaccttgtttccgctcctatcatgcgcttgctaacatagtacacgggatgttgagttttctcttcttcccggactagggcagcgctgaccgcgtgctcgg

SEQ ID NO: 284108 - DNA, 499 bp, Cannabis indica
aattggagctaatttttggagcttgattgtggggattattcttgcttagtcttgaggtattctctacagtttttaattgagtttctaattgattttccttgctgaattttatggtttaatagcatgtatagttgatgtgttcttgtgtatgcatgttgttaagtttggtgtttaatcttggtgaaattgcatgatttggttgggacttatgtttgttgaacttggagtaaaattttagggtattttctaggttgaaaatacatgttttatttggtcttgagctgctggaaaatattggaaagatgttggttttgtagctttagttcaagagcttggatttgatgagttaaagttatgatttgtgtttaattgtgggattttggatgcatgagatatatgtttttaatcctataatatttgctagctgctgtaagtgaattaattgtgattttggttgtgaaaagcaagcttgaattcatggaactcaagcttggtgctt

SEQ ID NO: 284109 - DNA, 548 bp, Cannabis indica
agggcgcatatataccataaatactaccaaccttacgtaatagaaataaaaatcgaccctttaaatgaaaaatgccattaacgttcagactaagccttaaaaagttccaaacttgatttctaactcaaaatcaattcaaattcaacaataaaatatcggaactagtcccatcactacccaagaataattctgtaaggtaactattctgattcacaaaaccgctatacgaaaccaattgtttttaaaattaaaacgaaattaaaccataccttaagctttccctcttcaaggatttgctatcctgctactaccagagcttagatcgctaagttttggattgaaaattgaagaaaatggatataaggggagaaagttttatcgaaggagggagaacgagggtttcgttcgtcgttcgttctgttctgtttcactgataacttaatatatatatatatataaaagttaacttacgttaacttatatatataaataatattataataatataataataataataataataataataaaatatattaataata

SEQ ID NO: 284110 - DNA, 876 bp, Cannabis indica
atcaacgacttatggagccatctatcaacttcactaggtacaaaatcactacttcagaaatatctatacattggagaacaatttgatcgggaagcatgtcagttggaaggaaaaaattagcactttcgagatgaagataagaaggtcctacttccatgtcaagtctcttgatgttgatcaattagagaattggcataggtatctggactttgttgggatgcaaggagatttcgactgggttggttttagttcttttctttttttttttaccatttatttgtttatgaaatgttatcatatgatatctaaatctcttttctattgtcacttaggccgttaaactttacgagaaatgtttgattccttgtgcgaattatcctgagttttggatgcgttacgcagaattcatggaaagaaagggtggaagagagattgcaacctacgctctcaaccgagcaacacaaatttttcttaaggtgtgttctttgaccaaaattatgttcttctagtttaaggaagtagctttttctatagaaatatttctataagttacagtaccgagcataagtttttctgataaaaacctcattttcctaaacgcgaccataacttctgaacaaacctctcaagttcaggatgagtaacattctctgtttagcaaacttcttgggaggtttgcatttgtctcctcaatgtgagtagaaagtagttaggtggttcatatttcaaaatggttcatagaattgtaggtactaattgacacccataaaatgtgttgataaatttttaatggtaaagattttgggaaaattacataaattgctaattttagtaaaaaatttacatttttacgttcaaaggttttttttttttttt

SEQ ID NO: 284111 - DNA, 607 bp, Cannabis indica
aaactcgattcaaccgtcctgaccggaacaatgacattgtccaaaacatgccaactcgacaattttctgtattcaagcatgttggccgacccctcggtatgaggacagtcgacaccttacccatgcaaagcaagcgtaaggcggagtggtacattttgaacaattgcacagaggttgagccgtatatcaagtaagtataaattccataaacacaaacacacaatagtcgacttcatctaaaaaattcttaacttactaagtgcattatattatatagtgagcacaaggagttgcttcaagcaaggggggtaggcaatattgaaaaactgcaagagactgagttccctgaatggttcaaaactcgagtaagtcttgttgcctctcagtagattaatgaactacggttgagcaaccagggtgcagtgtcagatgagttgtatgctatcgctaacccagcgaatacagcaatttattttatccagggtgcatagtgaacggtattaaatttttggtcaaggaaagggatgataaccgcaaaacacaaaatagcggtgtcatggtccccggtgaagatggacaaaattttacggcacacttgaaaaaatta

SEQ ID NO: 284112 - DNA, 572 bp, Cannabis indica
attctttcggaccccacacgggggtccaactcatcctcttcagccacttctggctcagctgactcccggaccattagcacgggcaggtgggttgcgacattgtaacattgtcttgcttccccctggtttcccctcacagttccgattccggcctcccgggtagggaactttaggcacaggtgccgaatcgatgtgactgcgccaaagtctaccaaggccggtcggccgaggatcgcgttgtaggctgtcggacagtccaccactacgaaggtgcagtatttgaatgtgctctggggggtgtctgggcacaaggtgactgggagccttacttttcccattgggataagtgtcgtcccgttaaaccctgtgagctgggacccactgggtgagaggtctcggtccgtcaagcctgtcaggctagcagccggagcagagtgtgaaggagcttgtccattcactctggacgggttgccaaaatgggatgatgctggtgccaaggtttggccctggctatatccgcgggtagcagagaattgtatgccacttgcttgtggagttgcggtcggggtagt

SEQ ID NO: 284113 - DNA, 412 bp, Cannabis indica
agatttttaattttagaaaatgttttatttattccaaactttagtagaaacttgattagtgtctcatgtttgcaaacacaatcttatatattgaatttttcgagtacaaattgttcaatttctcgtaatggatttcaaatatgtgttgctaccatggaacaagggctttatgttttaagaccgaatacacaaatctcactaaatagtgaacttttcaatgtagctaaacctagaaacctcaaaagaaaagagattgataatgatgatcaaacttatctatggcatttacgtttaggtcatataggctttgatagactcaataggctaaccaaaggcggtccattgaaaaatgtcgtcttaggtgaactgccagtatgcgagtcctgcctagaaggaaaaatgactaaacgtt

SEQ ID NO: 284114 - DNA, 475 bp, Cannabis indica
tgggttgtgatggaaacattccttctcaatttgattcgatcagatcaagctataatgctcaaaaggagcagtggaccattgaggagatgactgctattcttgccaaagaagaagaggacatgaaaaaggggagagcaagaagtatctctatggtgaccaatccaaataattttcaaaagagaaagttcactcctaacaactctagtgactaaaggtttcataagaagaaagccaccaatcctaagggagttggacaagcaatctcttcttcaactgttcataagaatgagtttttcaaaggaaagtacaacttttgtcaatgtttcgggcataagaaagctgattatcgaaagctcaaagctcacttagagaagaaagataattgtcttgtgatggtttgtttagaatctaatattattgatgtgccctcaaacacttggtggttagatactggtgctacaattcatgttacgaa

SEQ ID NO: 284115 - DNA, 669 bp, Cannabis indica
aaattaataaaattaattttattctgacaattagatttttgattgaaaattcagattctacacaaaattctactaaaaattggcttttgtttcaatgaaaaacgatttttgaatcaaaagatatgaagaaaataaaattggtgcacaggggtatgcattgcatacccctgcgcgcgcggaatcaaggggacggccgagccacgaggctgcatgcatccttcttgaccgagggagctcagcgggacgcgtcttcagacagcccgtgtctgagtttcctcggtcaagctgtctgaaaccgcgtggaaatgccgagaattcccttcgtgtgtgcaacccgatttcagatattttcattcaacttcaaaaaatcataactaattcataaaaaatccaaattagattttataaaagcctaaatttattattttttgtctactttccagaaaaaataattgcagatcgaaataacaaatatttcagtaacatatgttgcaatttctaaactatcatcaattaagcacataaaccacatgaaaccatccaaatcaacataaatcatcgttttaatttatatttcatgaagaaaatcattaccatggctctgaggctagttgttggaaatattttacaaggatctagatttactaccatgtatgtttcattaacatc

SEQ ID NO: 284116 - DNA, 636 bp, Cannabis indica
tctatacattttttggcattgttacaacatttattaactactagtgttacttcctaattaacgcaaaagtagttaccaaaagtaaagaatccagtatccttagaggagtagacatatagagaagaatttcacaacatcaaggattttgtgattaaggaaatgtaatggtggaggaaaagttgtattgaatacaacctatgagatcctattatagagagtatactacaaactacacttgatctggatatcaaggtgttgagattatttgaaatgcactttttgttttatattagtgcaagtgggagtttgttgggttttgtgccctaaacaaaatggttttcaatataatcagatttactagttaataatgatcagaaatcattttatgttgcatggttcacatgatttatttcacgattataaattctattaggttcaaaacatatgtatttgttcatgattatagtgttgtcagtacagtggaatataatcattattatatgttcaaatgtttgattcccagttttgtcagttcactagatttagactggcatgataatcagagataggtatacttacacctcggataagtggtatgtcctttccagggcactggcaaagtttaccagtatcaga

SEQ ID NO: 284117 - DNA, 1079 bp, Cannabis indica
tggaactgccacatgcaataaagtctgacgacacaacccccaatctgcacctactaggctatgaccaataaagtctagtgacggctactctgtgaggaatcacatcagtcaaaagtgattaaggactaccttcataaaatccctacagcacctagggattagaccatgcattacccatgatatattcattgggaatgtataactttactgatagttacagaaatgcatgtaccttaattctagggatcaccccacaaaaacactataaataccccccaaagctcattaaagaggggtcgagaattctgggttgcataagtgctagaagagtaaaaactcaccaagaacattctctgtattaaatactatcataaatacacagactcgtggactaaggctcattaacgccccaaccacgtaaaaaatctccttcttaatttcttgcagctctctaaattattattattttattggttgccgaaaacctcggtcaacattttggtgctttcattgagagctgaagaaagcgtctgtaagtaaacattgcgttacaacaacacaacaatggtggagactcgaagcacacgtcaacctcgccttcttcaagatgctcaagatccaaatgacgaggacgtggcctcaagagcaaccgtgggttccgaagaagaagaaggaatccctgatgacgactacgagggaaacctcgatgagtacgcctacgacgaaggcagctactcagaattggtactcttaaggcaaaaggctgtcgatcatgaagctgaaatcgcagcccagaaagcgcaaaaccaaaagatgcaagaggtgatgctggccatgcaaaaagccatggaggcagcaggaatccacgtgcatcctaaagccatctctgctgggcttggaaaggaaccagaagaatcctcaccaagtacccaaaagcagaaatctagagaaccaagccctataaggtatcccgctgaagggaaccaaaagaaaaaccctacttctacccccgggaaaaagaaaaaggtgcaggatccgcgaaaggtccgctcagatttcccgaaaaggaaaggtccgca

SEQ ID NO: 284118 - DNA, 618 bp, Cannabis indica
gataagtaaaaaaaatcacaatcctacccgtcagtttatagcaaaaagacgagttacctgaaatttgccgaggagtttgcttagaaagacgcttgtctatccgctcttgctgcttctcagatggttctttgtatactggctcccgttgaagactcgcgttctcgggaatcagctggtgttctcgcaacttcgcagttgtgcacaataatcgccagtcgcgatcttgtaccggaagactcccgagaatttcagctgtctccttcctagtcgcgtcaagagttggtcgagctggtctatctgcgatgacaacaaaaagcgagttagcaaaagatttcagaaagcaaagtaaaaaatatatctaagacaacaaatacgcgacatactgggtctgcgattaaagtcagtcctaatcccaggaaccttaaaaacataaaaccacttcgacttccagtcacccatgttcgataccatcccctcgacaccgtttatttcagaagtcgcccatttactaaagcaatagaagccgttatggagacccacgctctttatgtcgtagaagtaactaaactcctctactgacggagccctatgggcatactccatgtacatcgcgtagaa

SEQ ID NO: 284119 - DNA, 769 bp, Cannabis indica
ttactatggaaatttttgaccttataagattgaattttcttgggtaaaataatttatttgttcattaattataaatttgagatttgttgagataaataccttaaacacggcaaacataacatgaagtatataaatgtagagtttttgaagcaataactagagtcataaaccttaaaacatcaacggttaaaaatagctagttatatatatgaatgaccatagtatgattcttgtgtggaggaaggcggttcagggaaatacgcgttggagtgttcattgaatgagtcagttgttggttgattgtgtgctgactgttgcccctgagatccagtattctgttgacggtttgggcaccgccgataatcatggcctgatgagcgacaaatgcgacaatgtcttgagtttcttgggatctgctccccgttcggtccttcccttggatttcccgtaccctttgttctcacaacttcagggtctttaataatgttggggttgttacgatatcttccaggttgtggcgtctgtccttctggattggaactcatctcaaattcttccttgaacattagagttagccgttcaatctcttcctttgcacgcgtgtacgaatcctctgtttttgctgcatagaaagtgaagttataagttaatgagctgagagatccaaacctagccatctcataaatgtgttgttgttcttgggccggggggttaaaatgtaggtggagatttgtcttcgcggatttgctccatcgcttcatgagaagag

SEQ ID NO: 284120 - DNA, 520 bp, Cannabis indica
gatccaataaaggcagaggccctggaaaaaagaggaggacaagctactagccaatggcctgatccgacgtggacagaagaatgcgaggaggcattcaaaaaacaaaagaacatatggccaaacctccaattctatcaaagccggttcacggagaggacttgttactctacttggccgtctccgagaacgctgtcagcacagccttagtccgggaagaagaaaaagtccaacatcctgtgtactatgtcagcaagcgtatgataggggctgagatacgatacccattgattgaaaagttagttttctgtctcctaatggcatcaagaaagttgagaccctacttccaggctcaccccatcaaggtattaacaaaccattcgcttcggcaagtcctacaagagccggaagcctccgaaagactcctcaaatgggccatggagttaagccaattcgacatacactacataccaagcacttctataaaaggacaagccctagccgactgttgggttttatgccc

SEQ ID NO: 284121 - DNA, 513 bp, Cannabis indica
atatgtaagcgtgttttaataccctgttataggcgacgattttaaaccatcaagaatttcacattagcgactgttttgaaccgtcgcctattatgcccgttttgtcgactgtcgtatggcaacagttacagaaactgacgggaatactttaagcagttgtttaattaaaaacatccgaaaaactatttttgtatagaagttattggtgtcgcgattgtcgttggtagcatgggcggagatccaatcaaggttcgagccaccacgggctcatcaatcagaatgccaaaactgttcgatctccgttgagtaaatattccaacaatgtcaacaggccttgacaatcggtctccagatttcggcatagcttgcctttttactgaaattacgaatattaaaatgttaaaaagattgaaacgaaaaaaaaaaacaataaaacccaaacccatttccaaactaacctagaactcaaatctttcatttgattagaactgagttttgtccatacaaattaat

SEQ ID NO: 284122 - DNA, 596 bp, Cannabis indica
tttttatgacctgacatggcacgactcgtattgtcgtggactttccaaaataccggacactgatggcattggcatgcacatacatttccagctcaattgtcgagcattggtttagtattatctttggaataaaagaacacaaagtaattaacgaagcttttgatattttaattgaccttgaatagcgtaactctattacttatacaaagtaattaattaaagagaatacacaaacaatcatagattgaagttaatctcctcttttgtttagagtatccgtatttcattacaataaaatatgatatttatatatattaagaataacatatgaatattgaatatgatgggttggctttaggcttacatatgaaattttgaatcacagtacatgaaatttcttccttattaattaatgcaactaccattttagtgcatataatttagcataatataaatttccttgggataatcaccctctgttccaagtatttgaagctgcaaaacaacaaacaaacacataaattagctttaagtgaaagaagaaaaaaaccaaaaattattaggggtaagttgaaaaatgcctcttttattcatca

SEQ ID NO: 284123 - DNA, 576 bp, Cannabis indica
gcatacgaccgacaaatgtcaccaattgaaagatgagatagaaagtctcatcgctcgagaccattttaaacagtacgtgaaaagacagggccagggatacaaccaacccagtctgcccaataacccaaacaaccaggggttacaacctatccctatggaaggagaggacatcttggttatttcgggagggatacatatcgcagggaaaagcaataacacctagaaaagatatgtgaaagagataaagaacgagcattcggtcttttccccagaaccttccaagaaggtgaaagccgagaaacctcccattacattcacggaggaagatgagaaaaacgtgagatatcctcacgtcgatccattggtgataaccattcaactcgccaataaaaggatcaagagagtgttaatagacaatgggagctcggtaaatatcctttataaggagactctgaagaaaatggggctcgaaaaagccaaattaaggccttgtatggtgaacctttgtggattcattagagatagcatcgctagccttggcataatcgagctaacattaaccttaggcaaggcacc

SEQ ID NO: 284124 - DNA, 589 bp, Cannabis indica
tatgtttatgtagttttttttcggttgtttatcacaatattattatcgagaagcattttagaaatttcatttttaactagcttttacagtgttgttaatacttttagttgtttatctgtttattgttagttttgttttggttgtttatcattataaaatttttactttttacaaacaactacagtgttttaaatatatttcgtttgtttatctgtttattgtgagttttgtttgggttttttatgataatttcagtattcacaaccattttataacttttattttttacaagttgttacagtgttgtttatgtattttttgaaagctgtttatcttttacgtttatcatactgtaacggtttcataaatgttgtttttggttttgtattggttgtattttggttactacattttatatttgccttgttcttgttgctcagatttgttgcttatgttttattttgtatttctatttttttgcaggtccatgttaggacctcagagaaggttgaaggatttgacttaccaaaaaaaaatccccctaaggtgtcctttttttaaaaaaaattgtttttattatttgttttct

SEQ ID NO: 284125 - DNA, 563 bp, Cannabis indica
ccaattgttaatagatcttataactaatttataacaagtaaattttgtattgttttcatctttgtaaaattagaaacatgatagggtccatccaaataaatttgacctgtgtgagcctatatgtttgcttttgggcttagatgcatatcggaagcccatttatttctagatagataaatggactaagttgctataatgaaaatattacctaatgataattttatttaggccaattagtattcgacttatttaatgaataacaattatttaatcaaaggttaaattcctctcctttgggtcaggtgtgagagttaggggccattagtagtgggtacgacatactgaactcagccttccctcacatgaacaccccaactgtgaaggcacatttgctttatttaaataattgtattaggcttattatactagtttaacctaattaaaattaaattagcaaaataattaattttgaaataaacaaaattaatttttcattagattattttaaaattaatttagaaaaacacacttagtttaatgaaatattctagatagtgatttct

SEQ ID NO: 284126 - DNA, 703 bp, Cannabis indica
tgtctaaaaatccaatacatccaacatcgaatcgaactaataagtattttcatttagtttgaatgaataattaaattttatattgttatacgtaaaatatatatgtatatatataaaaattaatattaaaattttactctttttttcttggattggatggatccaatccaatttaatacatactggacctaaaatattagatggatctgatccgatccaaaaaatactatgtctaaaatattgaataaacccaaattaaaccaataaatatatatgaaatacatctaacggatagaaccgatccaatccaacatccaatggatgttggatcgattggatgactgaaattaattggatcggatcggatggtaaaatctaatctccaatatataattgaattggatctggataggcctaaaaatattagatgtgatccaataaacacgcctaactacaactcacaattttccatatatagtattgggataagttgaaaaatactttttttttttgtattcattaatcaaaaatactcttatattattttttttattaaaatatacacattttttgagtggattgtctaatataccctcactatgtacttaagtctagcatataatttacataacttaagggttctaatggggacatcatccataaaagtgggtatatctaaaaaaatatgaaaatagaggtaaaa

SEQ ID NO: 284127 - DNA, 621 bp, Cannabis indica
gagctatatcgataaagtactcaaacggtttggcatgcaagattgtagaccaggtgatacccttgtcattaaaggagacaaattttgtcttaaataatgccctaaaggaagccttgaaattcaagaaatgtgaaagattccctacgcttcagctgttgggagtataatgtatgctcaagtttgtacgcgtccagatatagcgtacattaatattggagtgttaggcagatacttaagtaatccaagaattgatcgctagaaagcacccaaaaaggttatgagatatttgaagagaacaagagagtacatgctcacatataggaggttagatcactttgaaatcattggatattctgattctaactttgcgggatgccaagatagtaggagatccactttgggcaacatatatctgctaggtggtggagctatatcatggaggagtgcaaaacaaacactcatagcttcatccaccatggcagcagaatttgttgcatgttatgaggcatccaaccatggcatatggctgagaaactttgtcaccaggctgcacattgtgaatggaattgaaagaccacttaagttgtattgtgacaataagtcagctgtatcgtattccaa

SEQ ID NO: 284128 - DNA, 263 bp, Cannabis indica
actactctatcactaagaggttcaaaatttacaatgaagaagaaggagaagaaggtggcgactaggtatagagagaaggcttaggtttttctctaaaggaaacaagatgtgaaagtcactttttcctgaagccatcactatctatttatagcatgccacatagggttaggtttattaaatgataaatcctacaaaggtggccggccatggctagtggatttgggcctcacttttgcaattttgctgttttatcatttctgcat

SEQ ID NO: 284129 - DNA, 531 bp, Cannabis indica
agggcttgaataaatattaagtcaaaactaataaaaataactgataaatgtatttttcaaattttcatcttgaacaaaataaaataatactattgaaaaaaataaaataaaatattgtcaatagtattattttatttttttaataaagttattattttttttattatttgtattggactacttttaaaatgggtttgattagaataagagtaggctcatgaatcatgattaagatattgagtgagagcttttgtgaattgagctttaataaattgaacaaagtgaattaatatatgtatatatctacatgtgactttaaaattgggaaaaattagactctataccctttttatattgtcctcttttatttttacccttttttttttgaagtctatcatttttacctctttttttaaactttgtaccaattttgcccctgtcacttcaagatactctccatgtgactctcttatgttaaagtattttgggtacaatacatctaaaaaaaggtatgtttcaaataaatataaa

SEQ ID NO: 284130 - DNA, 665 bp, Cannabis indica
ctcgatctatggcaggatgctgtgtcaaaaagatcattaccaggtcacttcatgcatatagaaccaaattttgccgatttcgggcttggagaccattatacctcgcaacatacagccgtacaatacgccattgttgtagctcaagtaatagcaacagtacaagcagggcaagcggtgagaaattagggaatgaatttttcaaagaaatgaaacttgtttacttgttttatataatagatagagactgtcttctagcatgatagatgttttatttcttagaagtaaatcaggttgctttaatgtatatgctagttttggaaggaagaaactgagggacttattgttaatcgaatacaatgctgaattttcccttttagtttttcttttggctttctaaacagttcatttgattgatgatgtaatataaactacaaagacaggtagtaattagccattataatttggaataatttttaaatgagctagaaatacataagattaattggataaataaatatggttttttttaatgtattttttaagtttaacaaaatggctaatgtaacaaattaaatatatagtatacaaaagatatattttatagaataaaattatatacctacaataattaaaaaaaaaatgatattattaaaaatatatatatc

SEQ ID NO: 284131 - DNA, 533 bp, Cannabis indica
gggtgagatcatgagatttggactaaagattatttaatattttgggtttaattattagatatatgcattgggtgagatcatgatgatatatagtaataatatgtgtttgcctgtatggtgatgaatgggttaatcgtaaagattgtttaatttgttgggtttaattattgggtttattttttgaaatttgaatgaagaagtgtaaaaaaatttcaaaaattgtagtttgttggagagatatgtaagttaatcgtaaatattatttaattttttgggtttaattattgggtttattttttaaaatttgaatgaagccgtgtaaaaaaatttcaaaaatggtagaatttgttagagagatatgtgggtaagatatttttttaatttaaaaaaaagattgtagccgtgtaaaaaaaattcaaaaatgataggatttgttagagagatatgtgggtaagatattttttttaaacgttaacagtctgttaagttaatcgtgtaaggctaaataaaaaaaaaatcgttaaatcaagaat

SEQ ID NO: 284132 - DNA, 770 bp, Cannabis indica
cttgatcccatttttctgagagcattaatgtttgctaggccaacttgaatttctatggaatctctcatttgtcttgtatgttgagtctttgtgtaaaatttgtgttgttgttttattttttattttttatttattttgtcttgtcattgctcgaggacgagcaagattctaagtttggggtgttgataactctaagatttagagttatttttgatatctttaaacttggattttaagctaaataacagagtaattagtgtctatattatgtaattgtgtttagtttgttgtgtctttataataaatggaagtgtgtgtgttagtaagtgttaaatagacttaagttgttgtttttatgtgtattaagcagaaaaaaatgccaaaataggtatttggaaatgtttgggacaagaaggaaaatgagcagaaaaaggcttattgctgactggcattgctatagcaatcatcgcgtagcaatttgtcagcccagtaagtgtattttggcagaagtccagctggcattaatgaagaaaaaaaggtgctgaggtggcaaaaatgtggacaatgactcaactattatgtggaaaatgaagggcaagtggaccatgacttggatttccaattagggtaaactttggtaccctaattggggggcataagagaaagaaggacattagaaaatggtggttgcaatttagaagaagggagtacatttttcagatctaagtacagaaaaaaaaaataaaaggaagagagtacaaagaatagaa

SEQ ID NO: 284133 - DNA, 939 bp, Cannabis indica
atgcacaaatggatttacaaggggtacgaggagatgtgtgttgcagaatttttcctgctactctatcggaagccgctcaacaatggtatttcaagttggcccctggaaagtttagttcatggaaaggcttctcttcaaaattccatgcacaattctcctcctcacgccaacttccattgtatctaggagaattggtcgaattttagcaaagaccaggcgagcctctctgggcatacatcagcagattcatgacggaagcgaccaaggtttcacgggtaactaaagatagaaagttatctgcgatactagggggcattgaagtcctcggtgaactttggaaggatataaggaagaacgggccggtagactcaatgagtgattttcttgaccgtgctaaaggcttcatcaagctcgaagaagccattcaacgagcagaaggtgagcaaaagcctggcaagtcaaaggctccttctactggaacatccacccaacttccccattacccaaataattcaagctcaagtggtaaacgttccaacaacaaccacaggcaagggaataagaagaaaggaaaattcgccggtaaatccgaacaagctccccaggagaatcatgccaagtacactgcattcactatcttaactaaagatatagaaagtgtttacatggcaactcagtcgttggccccatataagaagtccgggcccatgaaaaaaggtgtcagcaagagggacatgacaaagttttgtcgattccacggagactacggccacgacacttactacctccactggtagatgggcatctacaagttatcgttggaggcccgcacattgctagagatttgggcaaagctcgggagaggtatgcccgaacagcgcagcacgagcaagaggaagttatcttggccgtggaagaaaggaagcccaaagttccacg

SEQ ID NO: 284134 - DNA, 639 bp, Cannabis indica
gtaagccaggggcattttggtaattatgactcgagaagggtaaattgatgaaattaatttaattacgtgcttgatagaactatattattatatagtatgcctatgttgtcttttcaggtgtgttttgacaggtcggcgcggtatagtcacacccgggaatttcggaccgaaccgggttcgggcccgaaatgtaagttggattggttatttggcatttttatttgatatgtaataatctaaaatttatttggcaatattttagtgtgaaatggcattgttgcccttgagaatatgtatgctagttatttagccctaagggcaaaatggtctttttaccttatatgacttaggggagtcctatttacaccccacaaaattataagtacacccattattaaaaaaaatataaacttaaataatttttaaaaattactcttaatattttttttaaaattttttctcacattattttatgttaatttcaatacttattttgattttattttcataattttttctaactcatgtatatattttttttaacttttcctaagaaaatttcatataatttttaagtttaattttttcctcataatatttaaaatataatttattttgtttgataagtatattttttaa

SEQ ID NO: 284135 - DNA, 533 bp, Cannabis indica
ggttggtgatctcttgtgcaaactttgccagacggtcaaattgcctagcatactccgtgacagtgagattgttctgcctcagattcataaactcatcttcttttgcagccagtatggcggcactgtagtacttcctgttgaacacatcaacaaagtccaaccaggtcatagttgttatgttgcgactctgtcttactacttcccaccagatccgtgcatcctttttaagtaggctggcagcacaggatactctttccctatcattgaggtccatatattccaatatggactccactgagcgcaaccattcctcagcttcaagtgagtccgagctcccattgaatattggtggttgttgtttcctgaatcgctcgtacacaggttcaaaacgttgtattggttctggattcaatgcagctggttgaagagctaggtttctaacgggtggattttgattccggcgtaactcctcattctgagctcgtagccttgcaatttcttgagttagctcctcacgtatacgagcgttttct

SEQ ID NO: 284136 - DNA, 561 bp, Cannabis indica
ccatggctctgataccagttcttggaattattttaccaggatctagatttactaacaagtatgtttcattaacaacctaatatgaatttctaaaataataaaataaacacatttaaagtttaagaaaccttacatggattgtaggggaatataatgactccttccgttcagatctctagcccttgattcctttatgtagcagagcattatcaagatctaaacttggatctctttctctccttcttgttgattggattcttcacagtcttacacattataattaagataccacttgatgtgtgtgggcactcacactatcactcaaggtatgaaaatttaaagaagaaaagagagaaaaggtgcttcggctatggtataggaaagatggctgaatttttcttgaaggcaagaaatttcatcatcttttaagtgtgagccatcactatctataggtttaggttaggaataattaggcattataataatggtaaaatatatgcattgtagccggccatgggttggataatgggccccactctgcaattttgccattttgtcatt

SEQ ID NO: 284137 - DNA, 492 bp, Cannabis indica
tatataacagaatttttggttatgagaaattattaggtgactttcttttttaaataaaaaataacaaattattagatgttgccacgtaaagggtcagcatccatgtagttagttaaacctaaatataattaatccacctaaagtgttacaattaataataaatttgtttatattgtttatttttttattaaaaattattttcaaattttgatatttcgaattagttaaattttaaatattattttaaattaaatttgaatgttttgataatttaacccgatgagcattttcattaattgcgaagataaatttaggacgataatatttttttttaataactattacaaagtataatagtcatttttgtttttatttaaatcactattatgctttcaaatttcaatgattatcactacattgaatattattaatttaaaattatgatattaaaaaaaactaaaaaactaaaataaaattaacatacgtgatttg

SEQ ID NO: 284138 - DNA, 552 bp, Cannabis indica
tttgtgaactgcttgtctagattggtctttcggagtctctgaggataaggtatcttcacatgatgatcaatactgactggtggagactgttgttgtggtgcaggactatcagtagtcttcttatctgttgatgttggagttggtgctgtttgatctttaatctcttcatccactggttgtaccatttcaggcccatcatatttcttaccgctcctcagggtaattgccttgcaattttctttaggattaacttcagttgtactaggcaaatttccttgaggacgggttgctacctgagttgctagttgccccatttgagtctgcaaatctttaatggaagatctagtttcagtcataaattgtagcaataaatctgtctgcaaaccagaatttccactagagctttgttgctgagtatactattggttctgtgtctggttctgatttctctgttgatagaacccactgctccgtcggttacctccttggttgaacccatagttgttgttgtttgagaataatttccaatggcttttgcttcatccattggca

SEQ ID NO: 284139 - DNA, 614 bp, Cannabis indica
ccatcacgaaagaactccacagttaagcgtgcttgacttggagcaattttaggatgggtgacctcctgggaagttttcctaaacagtgtgtgagtgaggacaaagcatgctggaaacactcgtgttggtctgtagggtcagttgtcagtccatgaagcggccagagtggcgtactcgtgtataaaagccattcatttcgtgggtgtaagggcccaatgaggcttgaagcggggacgttacaaataatgaaatgtaccaatagccaactacgcatatattttcacctatctatgaatggttgaagaagcgatctctgcacctagctatgaatggaagcccaacatataggaagtagggatgacttagaatagtagaagttataccagaatgggatagtatatgttataaaacccactttttaagaaggatgaaagaatagatctttaaggagcaagtactatcttgttggatattctataagttacacactcctaagttagatggtaagaagtatgaatagtgtatgcaaagactttagagagaagtctgttttagaaatgagtcaggagaggacgataccatcatatagaaaggagtgtagtgtgctgaataga

SEQ ID NO: 284140 - DNA, 658 bp, Cannabis indica
catatctctctaacaaatcctaccatttttgaaatttttttacacggctaaattcaaatttcaaaaaataaacccaataattaaaccaaaaaattaaataatatttacgattaacttacatatctctctaacaaactacaattttttgaaatttttttacactgcttcattcaaatttcaaaaaataaactcaataattaaacccaaaaaattaaacaatctttacgattaacccattcatcacccatacaggcaaacacaacaaaagcctctctctctcaatttcacctactgaaacagaatgcaatcatcagttgttaattctcattgcttttggtaaaatttacacctttaatacttctttgttacttttgttgtgctattttgagtgaaggtggctttataatgagcagatgaaattttaatacttctttgttactttataatcgagactttgagaattgagggttccttctttgtctaatttacacacgctttgcttattcttaattttgtaatatttgtttttccaggtcaaatatgttcttgctgctattattttaagaactggaacaaatgcaacatatattataaccttattattattgtttccaatatgtttttactggacataaaagtttaatttaaatttattatt

SEQ ID NO: 284141 - DNA, 686 bp, Cannabis indica
caatagttaaatgttttcaatataacctcgagacgctagacttcgtccccctaatggatggttattcattgaaagcattgaacaccgtaagatctcatatgataagtgttttgtaaattttcgtctctattagactctcccatacggtgactacttagagataaacttacagaacatgaaacaatggtggaagctcaaaaaataagaataaccttgactctcgcctaccgggacaacgttagattctcattttaatcgaataaaaggtttctaaaatagtatccattttagatgagctaactactctattcaactaatgttatctttggctctcgcctaccgagacgctgcatttcattatgttggaaactttagaaaataataaatatgtttagttttagtatttttgcaaacatatctgattacttgctattttctgatttgtgtatgaatttattgaaccaaatgatttacttctgtttattgatatttgtagtatcaaaaatgtataacctgttgggttttgtgccctaaataaaacccatttcaatataatcagatttacttattaataaagatcataaataacattttatgtttgcatagttcacatgatttatttcatgattatatatatatattgtatgaattctatttaagtccagaacatatgaatttgttaaaga

SEQ ID NO: 284142 - DNA, 671 bp, Cannabis indica
cgccattacagaatctgggggtgccctactcatgtcttaagaaagaaagatggcaaactagaaaagtgaaccgaggtttgcatgtttgttggaaattctaaggagactaggggtggactattttatagtctcaaagaggataaagtgtttgtttccacaaacgccactttctttgaagatgactatattaagaacttcctgccgcaaagcaaagtagtattggaagaaatgctttcagatataactccttctaatgttccatcctcttctactcaagtagaggataatcccactccctcggttgaacctttccaagttgatacaatcgagaattctaccactaatattcatgttcagaagatcacgactcctcgtcgtagtgggagggtttccacaaaaccatcttgttatggcttggattgtgaaatcaatatggtcgttggtgacggtatttaggacgatccattaacctataaacaggttatggcaagtccagaacaggaacaatggccagccgacatggattcaaaaatggattccatgaattagaacaaagtctgggaatatttagacgcacctgatgattatcgtccaattggatgtaagtgggtctacaagaagaaaagaggtgctggaggcgaagtcaaaactttcaaagctaagctggtcgc

SEQ ID NO: 284143 - DNA, 606 bp, Cannabis indica
aggaaagaacatagatttctccaaatgcaagtaaactctgttgtagattatcatatcagtaaaaccctatgtctgataaatctaggaaactttattcacatagtcatgtttactttccaatgtgttgacgacacaataaacaggatcaagtatttgaaaagggtttcagatgaatttatacattatgtacatataatcatgaaataaatcatgtgaaccatgcaacattaaatgttatttctgatctatattaataagtaaatctgattatattgaaatgagttttatttagggcataaaacccaacaataacatatacatacactcagatattcatatcacatattatatacagttcttaccttctttctgaattcaagtgtgctggccgacctgaacggaaatgctcgtgctagatggatgccctaatcactagggatgtccatcaaaccgctaaaactgctcaaaccgcccgcattccaaaaaaatgtagtttgaaattcttctcggtgcggttgcggtttgaactttttcccaaacccgtcagtgcggtgcgatttgcggtttctaattattaaactgcgattcaaaccgcaccgcaccaca

SEQ ID NO: 284144 - DNA, 526 bp, Cannabis indica
atgcagtggatgttctcttcttttggtccatggccgaaccactacctcccctgctgaagcctgatgcaggaggggtaggagccccgccactcactggagtcctagccgactccaacatacatccaactgcaccctcagctcgcagtgccttctccaccattcccgaggccaacctcgccaaccgatcaaactgggtggtatacttagtcacgctcatgttatcctgctgggtcagatgtgcgaactcttttctcttggcacttctaacagcctcattataatacttcacgttgaagagttcctggaacctttcccaggtcatggtggtgacatcatgaatctgagacaccatgtcccaccagactagagcgtcttcttggaactgaaaggtggcacacaccaccctgtcatttccggtgacacccataaagttcagtatcgtggtgatcaccgttagccactgttcggctttcatgacatctggacctcccagaaaaactggaggtgcttgcttccggaacctttc

SEQ ID NO: 284145 - DNA, 507 bp, Cannabis indica
aaggttttacattttgcttggaaagccctttcaggttgtttgcctacacgtactcaacttcatagtaaacatgttcctgtggatttacattgtccgttgtgcaactgtggggaagagtcaatattccatgttttggttcaatgctcctttgctcattcgtgttggctcagatctgcgttaggtgttggtcattctgcagcaaccaatttttttgactggtttatggaagtgttggcagtaggcaatatggggttggttgaaaaagctgtcatggttggttgggtaatttggaaagctcggaatgatatgctttagaatggtaaaagttgtaatgctgctgaggttgtttggctggctcgaaccactcttcgacaatggaagtgtgctcagtctaagcggttggacttggtctccctagcttccaatcgcgctgacgcgagagacctactggtccaagccggctgctggacagttaaaaattaatgtggatggggcggtttttgtaag

SEQ ID NO: 284146 - DNA, 1252 bp, Cannabis indica
ggaggaagccacctgggagctagaatcagagatgagagctcaatatccagagttgttcaggttagatttctgggacgaaatccttttaatgggggaatagttgttaagtttgcgttttcggtgcccggtaacatggaactcggtgtttggctcagtaaaattataacttagtatgttagtattgtgggacggttatttagacattgagaatgtcgggattggacgggaatttagaatttcccaaaataccattttagtacctctttatgttattttagtgtggaggggcaaaatggtctttttgccccatagttattttgtcctttagtggacttagtgttgtgaaaataattgatttattattgttacattggctgaaatgagtaattgaaactctttattttcattttacaaaattggaaaagttagaaaatttggtgaaaagctctctctctctttctctctttctttccctctttcggttttgagcagctgggattggggggaattatttgtgtgttttctagctgaatttagcaaggtttttgtggtctcaactcttggtaagtatcttgctcttttagtttcttgaaattttagaaaaaagttgagtattgcatgctaatgttgatgttgttgctgttgttagttgttattgttgttttgtgatttaaaatgctgaattaagtgagttagataggttgaaatgcatgctagttatccttgttctagtttgagaatttttggttcaaaagctatggtttttcaaagagaaaatgtgaaattggttgctgtgtttgttgcatgagtttgggattgatttctgtagttttattatgcatgattatgtagtttaaatctagttttgaggcttgtaggtgagctttagcaaagtttgagttttgaactcaaatcttggagctcacatggtgatttttgattctgtgctttctgggctgtgttattgctttagaaatgtttagaggggtatttagagtttggaagttttggtgtgatttgggtttgattggatcaagttatggaattttgtgttgttcctgccagtaaccggaattccggttgtgcaactggaattccggatggggttcaggaattcccagaaccggaattccggttgcagaaccggtctgccggttgggtggtttttaggaaccctagaatttctcgtttttatgttatttggggtgttgccatgctttttatggatagggaaacttttagtttctagttt

SEQ ID NO: 284147 - DNA, 647 bp, Cannabis indica
tttttttaacttttttattttttaaatttaaagtttgggtttctaaagtagtttctctggtagtttttacgtgtgttgctacacgatttaagttgcatcgctagttgcaatagagatttctatagaattccgtaaaaaaaaaacaaaaaactgttttaaaatgtaaaaatgaaaaagtatatatatagtaaggaaagagagagattacgggtcgggtatccaagcaggagggcaggtccaaagtctttatagcaaccatagaagagcatctggtgcagggagaaggggaggtcaggcgacagaatatggttggcaatattgatccatgtttggggagtggcagcgccataattacacacgatctcggccagtctaccatggagtgtctcagcaacttcaggggtgatacctagggctatgaagtcagaggccacaacagagtccagggacttgtaattcttacccattattacttctattaaactgtgctctgctattttagaagatagaaagagagagtttgaatattatatatatttatattggattttgggatgggttatttgatctagcaacatgcaccttttttatcaaagacttgctcaataatggattaggctggaatttggtttgggtacgtactcaac

SEQ ID NO: 284148 - DNA, 448 bp, Cannabis indica
ttttttttgttttttttacatttatatgggtttttcttatgccatatttttgtgaaaaaagatgcataataagttttgctggaaaagtcactggaaaaactatcggcgctagaaaagtcaccgccgccggaaagtcaccgaaaaagtcatcgtcctcgaaaaagtcaccgtcgccggaaaaagttactgaaaaagtcactagaagtagatgtctcaaatataaacaaaaatagaaccggttataattgaaatataaccaggtttgtaacacaaagaataaaaataaataaaacaaaataactcaaactaattataattaaattataactgactataactaaaatagaaccagttatataatataatgaatacaaacaagtaacacacaataattcaaaccgattacaaataaaaaataaagtagaaatcagttcctaaaacattgaaa

SEQ ID NO: 284149 - DNA, 514 bp, Cannabis indica
tccttagatgagtaatgcatatagaaaatgatgttgcataatgttttatgaacacagaggaagtaatggtggagaaaccagtagcttaccacagacttacagttcctgtgatttgggtttagtgtacactaaacttgagctggatatcaagacaatgaatagattgaaatgcactacttgttttatgttagtgcaagtgagagtttttttgggattttatgccttaaataaaacctatttcaatgcaatctgatttgccatcaatagaatattaaaagtcatttatgtttacatgtagttttcatgtttatggtttaatgtgtacaatttctgttaaatccagaacatatagttattcacaattatagtgatgtcaacacaatggaaggtaattgtggttatatgcttcaaaagataatgtccattgattcatcaatgcactggatttacacttctgtgataaatcagcgataaaagctttcttaacaccttggataagtgttattttctttcc

SEQ ID NO: 284150 - DNA, 823 bp, Cannabis indica
aacagtcaactcgcagattcggaagatgcattcgttgatgaacttagtaactgccgttcatttattaatgttaacgttgtttagtttaattattataattcaatgtataaaaatggattgacaatgaatgcaatccttgtataactgatcggacacctgctttgtatataaagggggtgatccaccgtgaaatggcacctacgaaactcttgctacagtggactaagcagaccgtgatctgactgaaccactataatcctttgtctcattgttatttctagttttccgttaatcatttctcattcccagtttgagtactcaccactctaggttgaatactcgcacttgttcttcatatagatttctttctgttattaataatatcatataaaattggtgttgcgaaattcactcgacaacattcggcgccgtctgtgggaaacgagaattaaaatattattcatttcaagtaagaataccatcatgggtggaaaccaaacaaacagaggtgctaacaatgggtccatcaacattggaatgatgaacgtaccgttatctggagccagaacaccgcctgtggacgtcgttaatggtggagtagggaggagcaacatcagacctctcaatctgttccctgaaacagttggtcctcaggttggggagacgtccacacaaccagcaaccatgcactttccacctgtcactccggcggtggtatctgagggaatcatccagctcaccactgatcaatatactgcgatccaggaccaactgcgtgcactacaggccgaagtggatggacaaaaccgggcccgacgccccc

SEQ ID NO: 284151 - DNA, 835 bp, Cannabis indica
agaacaaattgtaattttcgtgactaatatctttggtcacggaccttttagttacagcataaaaatgatgatttataattagccacaactttttcacttttaatcacaagttttgttgtgactaaaagtaagattttttatagtttaccctaagagcgtatataccctttcaatgaaaaatttgtctaaacattttagttaattccattgatatctttttttttttagtgtttgtatctatttttaattaacattatatataatatgtgtgtaaagtgtatatattcaataaatgagaaatgccaaaatggcatttatcaatattagtacaacttaatattagatctcacttattttattttaataaatattatacaaaatagctaaccaattataaagtgatacttcatcgtaatactagacactataggtgtctcataacaatgcactttaataaataatctatgactatttttctcttaggtgcttgtcttttataatgtcaatatagtaaacatttttttttctatagttatatttatatatttttttaataactttctatagttatttgtaggatacaaaaatatattttacaatatcatttagactctacaataaactcaacatgatgtaattaattttccttcattatttttcatttatatttaacatgcacataaaatttgctaaaaggtaactctatattttgtattaaattttttttctaaatcacctagaaatatttatttacagaagaacaaacactatatcacatttaatttggtcatgaaaaaaattaaaaatggtaaaaaattaatactagatgtatttt

SEQ ID NO: 284152 - DNA, 497 bp, Cannabis indica
atcacctttaataagactattaaagagtatgacttcgaataaaatgaaaacaaagcctgtgtatacaaatacattaaaggtaatatagtggtattcctagttctttatgttgatgacattttacttattggaaataatgtaaaaagtttatcagatgtgaagaagtggttagccgaaaaattctgaatgaaggattcaggaaaagcaagctatgttctcgagatcaaaatctatagagatagaaagaggagaatattagcactttctcaagcaacttatattaataagatgctagaaagattctcaatggagaattccaagaaaggacagttaccgttcaaacataaaattacgctatgtaaggatcaatgtccaaagacttctcaaggggaataagacattgaaaaagtacccctatgcattagtagttaggagcttgatgtatgcaatattgtgtacaaggcccaacaaatgctacgctgtagggattgttagtc

SEQ ID NO: 284153 - DNA, 1124 bp, Cannabis indica
ccaacattgcacggctttgtttttcttacaaaaatactttttttttgttatttttaatatttttattgtcataatttttccttgtatttttactatattaagtttttagaaatactctcttaaagtttcaaaattaaaaaaatattatatttccgtaaaataaaaaaataactaaaaaaactaataacacctaaacaagatcataaaaataactataaaataaacaaaaaaaaaaaaaacaagctacaaagtaacagaaaaataaacaaagtatcgacctagttgcaatatgcaaaaacaaatattaactcctcagcatgttttcgtattactaaaatttttttcctatttagttttgacaacttaatgatcttttagtacctttttcgtgaaatttgtttgttataacttcatacttttaacactttctttttaatactttcaaaaaaaaaaaaaaaactcttacttttttaaaatgacaatttactttaaaaattaaataaatgttacattaatactaaaaatagtaaaatcttataattacaaaatgggatatataattaaaataacaaaaaattaactagataataatataattttgatatgttaatatctactaatacatattgtctcactaaaaacaaaaacaaaaaaaacttaaaccttactatttaaaaaaaaaaaatgtagccaaaaaataacttaatatagtaggttattaataatattttttaaaattgggattgtacacttttttttttcttcttttaatcttttaaatatcaaaaaatagtttcttaaataatcgtatagttttcttctttggttcttcatacacaaaataatttttttctttaataatttcatttattttaggaatgatgaaggaataaaaagaatcaaagaaaagaagaaaaaaaaaattaaattgtcatgtcatcaagtaataaggttaaaacaaagaaatattaaattttaaagttgacttaataatcataaataccaaccattagatttgatgtaatggttaataataaaatactcatacatgagtaatactcattaaaactatacccatatatatattaatagaagaggttttaatggttacatcaaatatgtaa

SEQ ID NO: 284154 - DNA, 563 bp, Cannabis indica
tcggtccagatctaggtccagcatttcgatctcagttttggacttggtctgagtctaggttcgtatccggatccctatctaggtcaaagtttgtgtttcggatcgtgtcccatatttaggtccaggtccgggtctcagttccattttgggtacacgattgtgtgcgggcccgagttccagtcttagtttgggtgtgtggctaggtctgtgttcggttctacatctaggcccggtcatggtcacggtccttgtcttgttctagggtcctggttcgacgattcttcttcaggttcaaattttttgtcctatgtctaggtctgggttcgggttaggttcttcgtctgggttttcgtcctagtttgagtcccaaattaagacaccgactactggtctgttccaggccctgttacctaaatcccgagtcaagatttggatcactgtcacgggtctcggccttgttctggctcaggtcccaggtcccatttcagagtttgggtacgggatcgagattggggtgcagttctaggtcccgacccaagttctgtgtccctagtctggttcca

SEQ ID NO: 284155 - DNA, 500 bp, Cannabis indica
cctgtcacttcaagatactcttcatgtgattctcttatgtaagggtattttgggtacaatacatataaaaagaggtatgtttcaaataaatataaaattagaggtaaatttgattaattgatgaataaaagaggcatttttcaacttacccctatatatatagtaagtatatgtatggataattgggttgggctccaaagggtattaactttgggaaacttacaaaaatactgtttttttaccaaatgttttcaaaaatactgtgacacggcaaactttacatttttactgtccaagcccatttttatttcttttatactgtccaagcccaatatatttacttttatattgtaaacagtaacaaaacacaaaacggcacctctccttcgtggttggggacggacaaatcaacaccagaatcatagaaacatcaggaaagaaccataaaatctggcaaagagaaaaaattacttaatcaacaacaaattactgttttgtag

SEQ ID NO: 284156 - DNA, 579 bp, Cannabis indica
aaaataatttccaacattaataagttagggaatttactcggtaattctagttcgccttattggaagctcggtcgtataggcccaaggtccccatactagttgagacctactgcttgtaagactcagatacttgattttaattaatcaattataattctaaaattagactatgtctagtttataaattttcactaagcaagagctaatttgtgaagaaaagagattttaggtcttatttattaattgaaagactttattaagtctaattaataattatattaaatgacaattttatttgataattaaaatcaaattaattttaattattaaataattaattttggcatttaaatggttagaattggaaaaatagcatttttgagaaaatgaagggaaaattgtcaaaattggaaaaatacccaagtggggcccactaacctatggccggccacttatatggattttccactttatattttcattattttaatgcctaataattcctaacctaaacctagtggttacatataaataaatagcgatggctcacacttaagttgatgaaatttcttgccttca

SEQ ID NO: 284157 - DNA, 526 bp, Cannabis indica
ggggctcctacccctcctgcatcaggttttagcatgggaggtagtggttcggccatggatcataaaaggaaagcatccactgcaaccggtggctcaggtcagaagaggaggttccgggggaactagggtcgaggcagtcgccagggtagttctgaggcccgatacatttatccagagtgccccaattataaaaggcaccatttgggggagtgtagaggccaaaggtgctttcagtgtggcatgacagggcattacaagatggattgccctcaactcagaaccgaagcaccaaaggctccaacgaaacccactccagcaagggtgtttgccattactcaagctgatgtagaagcctgtccttcagtagtaacaggtcagctctcggtcaacaacttttacttatttgtactatttgactctggggacacacattcttatgtggcagcaataatctttagtaaatgggatagaccgcatgatagttacgaatcagggtttggaaccctatcacctggcagagagttag

SEQ ID NO: 284158 - DNA, 690 bp, Cannabis indica
tctagagaatgaaagaaagatgaatgaaaaccaaagtgctttgctcactcaattagtagaggaaaatatggaattcaatgaacaaatttcaaacaatgttcttcctccacaaattgagataataccatcaccctctaccccaatctcttgcaaactcgatggggatgatgctattactatttggagtgacaatatttctcatcctgaaattcttccaacccttccaaatgtcattccaaatgaaaacaagtgttatcatactgatgtgatagacacagttgtggaggaaatttgtaaaattttctcaagcaaccaagcataccatttcctccatgattttgagaacaaatactttctttatcctgaaaatgtcaccaatgcatcaattcttgagacgaaggataaaagaaagttcatttttgatactggatagtacaaacatatagttggtagacttacctgaggagatcacttctgtctaccaatgactaatcaggttttatctttatgtttttagtaagtttatttaagttattttatctttttttattttctatgtttgttttgggttactgttatcaggttatctccactctcactccgtgcatattgtcgtcaatcaggtgtactcttttccctatcttttttcatttcatattttttgtgacattgaggacactgtctaatttt

SEQ ID NO: 284159 - DNA, 524 bp, Cannabis indica
tgtaaagcctgtaaaagaaaatccttaatgtcacttctatgataagtcaagtaaaactatttaaatcttgaagatttccaaatagactttgctcttgggcaaccaataagggcatgagagactgattcagtgctgtgcccacaaattgagcaatttgggtgaggaagactccttttaaggaaaagattgagagcacatggcaaaatatggtggaaggctctctaaataaaatgtttaatcttggggggaacagaaagagaccagagggttttccaccaatgaaggtacgggttaggattggaagaggagggaacctcaacggattcaagagagcaggcaagatggtaagcagatttgactgttaaaatgcctgaggagtggaaaccccaaataagagaatctggagatgcagggtcaatggggattgtgaggatatggtcaacttggtaagaagggaagtaatgctgaagctttcggatgttccaagttgaatcatcatttatgaaaaaagagacaaaagcttg

SEQ ID NO: 284160 - DNA, 566 bp, Cannabis indica
aaaaccttaggaggggctttaatcttccacagcatcttccaaacatcatcctccatggaggagttccaactaccattgaccgactgtaagtgattataggaacttttgacagtgaaaaaaccagttggatccttattccaaaaccaactatcactcgcaagattaacactcaaaggcacctatttgatgagctcaacatcacggggatcaaacaagtcctcaataagttccaagtcccattgtctactatctggcttcatgagttgagacactttacaattagccagtgccggatgagtagataccacacacaggttggcctcagacaaaagccaaggtgtgttaagcaccgcagtagatgaaccgaatcctattctcctacgggcactgtcccttagcagcgcttgtgactcaaggacactgcgccatataaagctcggattgccatctaacccggcctccaagaatgaacagttaggaaaatatcgagccttatatatccgacccacaagggaatcttggtacagaagcaaccgccaaccttgcttacccaacagagatagatt

SEQ ID NO: 284161 - DNA, 417 bp, Cannabis indica
tattcaatcaagatgagaatccagcgttgtcccgtttaggcgagagtcaaggccattctatcttatgagcttcaaccgttgtttcatacttttgtgagtcttactcttagcagccaccgttagggtggacgttactaagaataaaacacttacaaataatacttatccttcgagattctatggtgttaaattgctaataaacgttcatccattagggatgattactcactaaaataagaactatgtataaccaacaatggagatcgaatatccttacaataaagctcattatttaaagtgtattttcatctaatatttattttaatctatttattttatatgtatatttatttaattaaaattactaatttagataaatctaaataaaattttaatttaatatttataaaattatac

SEQ ID NO: 284162 - DNA, 466 bp, Cannabis indica
acgagatttatattgatcataagagtctcaaatactttttcacccagaaagatttgaacatgaggcagaggaggtggctggaactggttaaagactacgactgtgaaattctgtatcaccccgggaaagccaatgttgtggctgatgctttgagtagaagaggtcccgggcaggtttacaccacagttttgatagcccctcaactagtctctgagatggttagttcagggattgagtttgtagttggaaagttgcacaacttaacacttcaatctaatctgttagagagaatcagaaaagctcaactagaagatcatgagctagtgaatgttcgagatgaggtaatggctggtcggcctagagacttttcagtctcgaataatggaatattgttgtataaagctcgagtttgtgttcctggtgtggatgagcttaagaaagagattcttgatgaagctcacaccac

SEQ ID NO: 284163 - DNA, 571 bp, Cannabis indica
gtataataaatttttaaatgttattaaattatttttttataacaagaagaactaagtatgagtttttctattcgagtttgaggttatttcgttttctgagggagcttgactttattttttttgattctaattttgttttttagtaaatgtacccattataaaaaaaaaaatagcaggaatttagccatttttttaaaaaattacattcaatttatttcactttttattttaaaaatttaaataaaaaaactaataattaagtataataattttaaattaaagttataagtgtaataaaattttaattatgaaattatacgtgtataattttaaattataaagagttttgctataaaatttttaataatttaaagggaaaaaattgttaaaaagatccttatttaataataaattacaaaaaattaattaataattataattaatttaattttaaaatataattaattttcattaaaattttataaggaaataaattactaagtgactattaggttataagttaattattatttatttttatttaatttttaaattaatcacaaccattcaa

SEQ ID NO: 284164 - DNA, 559 bp, Cannabis indica
cagtttcgttaaattccttttacttttttgagtaatttttgtttccacattatatttacctaattcttcattagtcagtcaaatgatcaatcaaagatacttaatttgctaatcaattgctctacccaagccaaacaaatacattttattcatgtagctgtacaaaaactcttttggaattgattccattataactttgatttgggattcaaactgttgaattgtataaagattaagacaaaattttacaatgttttgtgttataaatagtattaattatgtggatgtccaaatcttttatttattaccattaatgtaatcaacattccctttttcttagttttcctttctcttagtttcttaatatttgactcttgtatgtgtataaataggagatcacctattggaataaaacactcagaaaattctcatctcttctctattttctttctctaaattataatattacataatactaatatttcataacacgttatcagcacgagcctctaaccaaggtataacaatatttttgttatgtgatctcgaattgcttcaa

SEQ ID NO: 284165 - DNA, 871 bp, Cannabis indica
ccaaagtcgtatagggtggcctatacgtcattgtggccaggaaatgtgtgaggaataagtcgacgaagttttcccacgtcgatatcgatgcctcaggtaattgggtgaaccaatcatgggcattctcctcgagtgttgccgcaagaatgcgacacttcgcaagttgcggtacctggtccacttccattatagtattgaacttttctaagtaatctaacgggttagaagtacctttatatttgagggattcggataaacgaaacccttttggaagttgggcctgccgccctgatcgcccgtatggggatcatggagcgtctcagtgttatgtgggccgcgggagcgtgccctaaaaactgcgttgaggtgatcacgcagatcacctcggtgtacacgataacgtcctccctgctgtgtctgtacagagccagacctcgtatacctgctcggagtgcggccatgcgaggatgaagaggccgattctgcgtcgttatctcgagatggacgactgcgaggattgcggcgctcaggatcctcgtcgatttgtgcgctctggttaggaaaccttgcagattgatctcttgacgtcgggtgattcaagtccagagcttcagggtcagttcttcgttccctgcgtacacggttagtttgacgtctggaaactgttacctgagggttttcgttgcgaatggcaggaactcgaggagggcgtcgagctcgactctgtccatctacctcggcttgtagtgctcgcagttgatcctgaattgcagcatattgatcggtcgtgagctggaccattccttcggacactaccgccggggtgacggggggaaaatgcatggttgctggtggtgtggacgtgtctccg

SEQ ID NO: 284166 - DNA, 111 bp, Cannabis indica
tagatatttactaatttcaaattcaaattacaccaatatcatgaattaaattttaaaaaatattaaattaagcatgaaaaatcgaagaaaaacgaaaaaattgcgagctgt

SEQ ID NO: 284167 - DNA, 716 bp, Cannabis indica
atattttttttggttttttaattttttttctggtgtaactctatttagttataacctctcaataagaatataatttacttggttctaattgtattcttaaatagaggttctactgtatataaaattacacaaatatattaacatgacatattagatattgataccactggaattagttagcaattctttttaaactttgattattacccaatcacttcaatcctcataaattacctattaggcatctttaataaaactttaaaatgttaaatttgtgaagatttagcgttaaatctattctaacctaactctaaaatctatcttgcatagagtattgtctatagtaccttatcaaatttaataaggcactataggtgacactaaaacttatattttttatttattaattactttttttcctatataatattatagctttcaaatatatctattctatataaagtgtgcttatataactaaatttttggtttatgagaaattcatggatgactttttatttatatttaataaaataataaaataataattaaaaaaaaaaaaaaaaaaataaaacaaatcccattaatatttgaactgatatttgatgctaattatttatacgctttaatattatttattttttttcatttacacccatattagaaattctaaatttatgttgcttcaatattgactctctgtactcaattatttgt

SEQ ID NO: 284168 - DNA, 813 bp, Cannabis indica
tccttttatagtgtttcaactagggcttaggtttgaattatatggattaacaaagaataaaattttatgcaaaattacacactaaggccagccagttggtggagcactctctagttacaactttgccgctttatttcactcatttattcttctttcaataatacaatattttctaatttcaattttataaatgtcaaaactatttatttaatacttataattaattatcaaataaaattgtcatttatagtatttattaactagaccatacaaagtctcttaattaaaaaattaactcgaaaacctcttttcttcacaattaagcccttggttagtgaaaattcataaataagacatagtctaattttagaattttaattggttaattaaaattaattaactgagtctgcaagcagtattatctcaactattgaggggaacatgggcttatataaccaagcttccaagaagtagatctataatttaccaagtaaattccctaacgtattaattcctccttgcaccactataaattcgaaattatactctcaattatatagaacactctacatgtaccaagatatagctacgttatgattatccatttttacagtcaaaatagtcaaagatcctcaatagatgatctacatcgaatagggataaatttactgttctaccattcaatgtattttatccttaaaacacttagctaccaataaatgatatttcagtaaactaatataattattgaaatgaggcctcaatcatttatctctattaagccaagctcgaaggaattatcatttcacttct

SEQ ID NO: 284169 - DNA, 249 bp, Cannabis indica
tagaaataaatgatagagcgctcacttttagtgatcatattagttcactataaatatcatttataggtgggcaagtgttttaaggataaaatatattgaagggtgtagcggtaattttatccctatgcaatgtagatgatctatagaggatcattgattataaaccatactacaaaagactcgggatcccgattatagaatcatttacaaaaaaagtttaactgtttaaccattacataaaaataaaag

SEQ ID NO: 284170 - DNA, 694 bp, Cannabis indica
tgaattgttttgggccacactaaagtccaaattaagttttattggtatatttaaaaagaaaaataaaaaacacttcttgtgtgaaaaccattatataaaaatggctgctctactttcaatttttatttatatttattaattaaaaagaaaattatattttttaaaatatatatatatataaatagtaattaataatggtgactctgtcatacacaaataaattaattaattttcaaatgggtttttgcctcatactcattcaagcccatcaatattgactcaaagagattttagagagagatttcaaagcaaatactcatcactaataagactaaagagtcacctctttagattacatgttagtaaaaagctaagctacaagatctccttaatatgattttggttcccaataatgataataataaagagtatataacaaaaaattaattaaagaaatgtagaaaaaagacttttttaacaaaatataataaaaaattatatatgtctaaaaaacaattagtcacacccaccatatatatctttattagaaactttgtttcattacataagacttacctcatatgagattgagtgacactataatataattttggggtagattttctataaaagcaaagtaatttttcttttttttcattcattagtgtgataaagatatcattatactttgtcc

SEQ ID NO: 284171 - DNA, 635 bp, Cannabis indica
agaagccattcagcgagcagaaggggagcaaaagccgagcaaaacgaaggttgcttctaccggaacgtccgcccaacttccccattattccagcaattcaagtggaaagcgttcaggcaacaaccacaagcaaggaaacgggaagaagggaaagttcaccgaaaaacccagacagactccccgtgatcacgccaaacacactacattcactatcttaactgaagatatagaaagtgtgtacataacaactcagtcgttaattccgtacaagaagcccgggcccatgaaaaaagataccagcaaaagggacatgacaaaattttgtcggttccatggagactacggccacgacaccaacgaatgctacaacttgaagcgggaaatagaacttctgatcaagaaaaacaacccgcacttacagaagtatgtcaaggccaaccaaggtcagaataaccaggatctgatgcctccgccaatagatggacacttgcaagtcatcattggaggcccgcacatcgctggagacacgggcaaagctcgagaaagatatgcccgaacagctcaatacgagcaagaagaagtcatcctggccgtggaagagaggaagcccaaagttccacgcacaggagagccaa

SEQ ID NO: 284172 - DNA, 563 bp, Cannabis indica
gaaaaatgagtacaaatttcagaaaccgaattcaatactggaggcattcgtcagagggttttaaacattctctttttctctattttcttctcttttcttaagttaatatgtgtgattttgctataataaacatgaataactaaacacttaattaagatctagatggatattgtttgacattgttttatggttttaatatgattttattttccctcaatttctatgtattctatttcattcgtacttaattactttaaattgcctgatcacctattaactgtctataattttgatgcgagatttgagaagtgagtgtcaattatgcaatagtgaaataaaactgaatttcgatataggacgagagtacctgtatgatttagatagcttatagggtttctgcgtttaatgtctgttgcatgtttaatttatcattgaggtttatatatctaagaagattataaattaccttagtaaacttgctattgcatagaaatttgaaatatgaagataatcatattaggccatagtcaatagatacaattgaaatcgaaagtcctaacttt

SEQ ID NO: 284173 - DNA, 838 bp, Cannabis indica
ctagacccagatcggggtccagacctagacacaaacctggacacagactcggacccgaactcaaacccacaccttgaatcagacccaaagctagacccggacccggacgcaaactcaaacccagactaggatcagaaccaaagacttagacccagaactgaatccagactcagatctggattggaacttgggactcggacccgacctagaccaagacccaggacgcgaacccacacccggagcctgatctggacctagactgaaatccagacccgaaccaaaactcagaccaggactcgaactccgatccgaactcaaacccaaacgcgaactaagaattgcaaatggaactagaaccgaactaggactaggaccaggaccaggacctaaacccaaacccgatcccagatcaaaacccagatagagacctaaacccgaaccgagactaggacttgaacccgaacctagaccgggacccaaacccacacaataaccaggacctggaccaagaatcaggatagggacctgggaaaaagaactaggaccaagacctagtacctgacccagacacgaacttgaaccttggacccagctcgtgacccggcaccagaatggaaccacacaaggacccgagattgggttccggatctcgagcccgggcttggacaatacccgtagtcagtgtttggatttgggacccagccctggacctgaaccctaacgaggacccgaaaccacacccggacctaaacccagtcccaaacccaaaactggacctgaacccgtaccgtgtgacccaaaattggaaccaaaaccggaagttgactgggactggaac

SEQ ID NO: 284174 - DNA, 748 bp, Cannabis indica
ttgatcagtaagtaactatattagtctattatacaataatatttttttagccaatagattattgctacttaagtttaataatatatatctctcactttctaaatatacataatcatatatatacatgatttttttttatcaaaacattcatatatcatttatatatttgttgtacaaaattaataatatatatttcaataaataattttaatgagttgtatattattttttgaatttataagaagatgaatgtacaataattatagtttgggataaaagattttgtttattataatattttgatatatagttagttcaaatagtattttttttcttatattgatttttgataatatttggtagtctttaatattggtgatgacaacaactttaaatgtagcatcgattacaatacaataatagcaaaattaaacgatttataagtgaggtgtggtgataataatgatttgaactgttttcactttttaatttttaattgagaatcaaaatttaaaaaaatatatatttttagaaatttttttaaaactaatttttattaattaattattttaggactttcgattttaaacctagaccttgggtacctagattcgaaccactgcttttctgtatcctagactcagacttgaatctaacttaaataaatttaaaaataaaaattatagatatattttgtttcttattttaaatttaaaaacaaaagtaagtatagaaataatttcgtgta

SEQ ID NO: 284175 - DNA, 573 bp, Cannabis indica
cttatatccattgtaacgagaggggaaagacatcctctccaagcttatagccctataaatagtgatgcttgttcactaggcaaaaggtcgcaaacagtttagtcgagactatacactaaaaaaattatctaagaatacatatttagagatactgttgtaagtgctataagaaaaggaacctttcttcttgttcttaagtcaatacaaataacgagaatcaggctattaccgaactgctcggggctgaacctctataaaattctcgtgtctttatattgatcattatatattgattgctataaatcacttatcgcttactaaatcagactcgttgtcgttggctaaaagcgaggtcaacacattttaaaataaatataataaatattaattataaaaaacatattcttaattttatatacactagatgaaagttacatggcgagccacgtaaatattagttttatttaaattctattgaattatgtttaagaattcggtaactaattgtaaattattttttaaagttacttggcgagccacgttttcatcaattaaagtaccatcactacaaaa

SEQ ID NO: 284176 - DNA, 470 bp, Cannabis indica
gaagaagatgaatagtgatttttgaaatttgggtgaggtttagggatttaggattggatttttagaggaaaagagtgtttgatgaaggggatgataatttagaaagatttgggatgaagatttaaggttagatttgagagaaaagggcttttgagtgggattagatgaaaaaaatagggtggaggagaagtattttcggtgtggaggttagggttgagaatgaggggatttgatttttgaattatggaaattggcctttaaatcccgtgtttcccatctcgtcgcggctagaaatgggctcgccgcggcgagataggcccaaaaaattgacattctgtaaggaccttttagccgcggccatgtatgccctcgccgcggccagatgaccaggaaaaattggtcattctataaggaccttttggccgcggcggcctacatctagccgcggccactgggtcgtactttttttt

SEQ ID NO: 284177 - DNA, 805 bp, Cannabis indica
ccccaattattcaactagaattatagagaataaatgaaaaaccatgttcaaaattcttgacattagctatcgatgaaccataaaacaaggtgtcaaaagacaccgaaaaagaaactagaataacttgttcaaccaaatccaaaaaggactagaagtcaaacatggatgtaaaaaaaaatagtaaaatacacaccctcttaaacatagaaaaaggaaaataacaaaccaaagaagattgaaggaaaaaccaaacaccaccaccgatgattttaggacaccgtcacaattatcaggaacagaccatccaccaacaccaaccccacaccagatctagtcgatctcgatcccaacaaccatgaaacagagcctcccaaaagtactaaagacgaatgacaccgatccttatttagaatccatcttcaaacaccctaacaataaccccccaccacaaccaaacccataaagataaaggatctgacaagccttggccataaaggaagaaaactaccactgatggcaactgactcaaaccctagggtcttaaaaccctagggagaaaataaatatgcaattctttttaagtatgagtttattaattttggtcattgttatgtttgatatgattaactctaaccatggttacatttttttgtgactattcaatggtcacattaaaaaatataattatgatatttataaattatatttttgtacttattataacaagttactataagtaaaaatttatttttaaacttaaattaattataaacttaaaataaattagatttttgtattaaatatt

SEQ ID NO: 284178 - DNA, 523 bp, Cannabis indica
tctgggtcgtgcgggtggctgtgggttcgaggggtcgtgcgagtggcgctgggttcgtctgggtcgtctgggtcgaggggtcgtgcgggtggcactgggttcgtctgggtcgaggggtcgtgcgggtggtgctgggttcgtctgggtcgtctgggtcgaggggtcgtgcgggtgtgggttcgtgagtttgggagagggaaagaagagagagaatgtagttagagggaatgtgggaagtttgaaatgagaggggtatttttggaagaaaagagaaagattggtatattttttcaatgtgttataattaggtataatttaacaccattagacatttttaagcataaaatgtcaaatttcccatatatatatactcatgtgacttatatattttaataatcattttgttttttttaatctatattatctatatattataaatgcctatatgtttttattcctacatctctattcttagatttatatatatatatatatatatatatatatatggaactacttttta

SEQ ID NO: 284179 - DNA, 520 bp, Cannabis indica
aaaaataatatataaaaaaactttaaatgtaagttttttacaaaaattattattgcatgtaattatctttgggaaatttgacaatacatgcttaaaaatagcatgtgttgttttaatatgctagccaaaaaatagttcaaaaaataacctccaattaagattaatcccaataataccctccccatttcaaattaccactctctctctaactctctcttttctctctctctctgtctctcgttctcacgcaacccaaacgacacccaccctcccctaaccggaccaccacctcaagtcaccggaccaccaacgacaacccaccaagcctgctacgaaaccccacccaccccaacaaaaccaccacctccagacgaaatcgcgaaatcgcgaaacccaccacctccagacgacatcgcgacatcgcgaaaactttgaagaccaaatcgtggaagcccgttacatatcgtgaaacacagagagacgagcaccagaccattggagacgatatcgtgaaacccca

SEQ ID NO: 284180 - DNA, 711 bp, Cannabis indica
gctggtctatctgcgagaacaaggaaaagcgagttagcataaaatctcaaaataaatcagaaaatgcctaagttaagaaacacgcgacatactaggtctgcgattaaagtcagttctaatcccagggactttatagacgtagaaccacttcgatttccagtcccccatgttcgacaccattccttctactccattgatctcagaagtcgcccatttgctataacagtagaagccgttatgaatacctacgctttttatgtcgtagaaatagttgaactcttctactgagggagccctatgaacatactccatatacatcgcatagaaggccagggcagtgcgataactgtttggagttagttgaaaaggcgatacatcgtatcgcctgagaatagctgcgatgaaaggatggaaggggatcgataccccacatcgaaggataggtattgagactaccacatcctctgtgggaataatcgcaggattggtaaacgggagatgcgccctctgggacggtttaggtcgctgaaacgcaagtcgcagtagatttaacctcacaaaggtagtgaaatctgatttggtaaccctcaaaatcagatcttcacatgcgaagggctcgttcagctgagtgtcgtcaaccgagtctgtcccgctcccttccgcctcttcttcatcttcgcctgactcacgagctggggccgtccaatcatc

SEQ ID NO: 284181 - DNA, 806 bp, Cannabis indica
cacatttacgcaaaactagaaactcgaactggagtatatacaaactactaaagaaccaagacttcgaaaacttgagatgggtcaaaccttgtcgaactggactagaacctgaatagcaagctcgggacttagtgtaccattttgaaccatctcatccaaagtctcagtgagacacatcccgatcgtggacctcctataaagctcgaatgtcgccattattcttcgttaaagcacacgatctgccatgaaacacacaaaagaagttgatgaactcaataacgttccaatcctatcaaaattttccacgaatttgtcgaaattagaacgaaaagaaaaaaaaaacagaattgcaagaggaagaaaacaaaagactcacaaatgaaattgaggtaaagaattgtagttagaaattaggtagctacgttttgaggaaaagactcacaaaatcttcttaacgttcgcttcgaaatatgatgtttattattttttggagcggagaaaatttggggctttttataccctagcttttgtagctctgggtatatatagcagcgaaggatcaggagtcttgacataaatgacttttatacccctcacgggctaatcgccgtagaattagaaggcccaaataattcccatcaaggtccaaccttattgaggcccatcaacattttgccgtgattcccaaatatgaaaacttacaaaaatactgaaatttgggttaatttttacaaaaatactgtcatacggaaatttttcaaaaatactgtgtttttataaaacaccactagaacacaaaatagaac

SEQ ID NO: 284182 - DNA, 390 bp, Cannabis indica
gatacggaatctatagcttttattcagacatagaagtgaagcgatgatttcctttgagcttgctaaaatagagataaatggttgagtactcatttcagtggtgatattagttcactgaaatatcatttattggtagctaagtgttttaaggataaaatacattgaagggtgtaacggtaaattaatccctatgcaatgtaaatcatctatagaggatcattgatttatgggattataataatggataactaataacatatctatatcgtggaacatatagaggattctatataactgagagtgcaattccaagttctatagtggttcaatgaggaaataatgagttagagaatttacttggtaaattctagatctgcttattgggagctc

SEQ ID NO: 284183 - DNA, 619 bp, Cannabis indica
aaagattaaatgctagaaaagaaaaacttaacaatattgtacaaaaatatgaacaagagagatttagacaatgcaaactcccaaagactttctgagggagtcaaagcgacttgaatctagggccttggtgaaaatatcagctaattgtttttcagtatcaacatattctaattgcaaagatttattttcaacaagttccctgataaagtgatgccttatatcaatgtgctttgttctagaatgttgaacaggatttttggaaatatttatggcactagtgttatcacaaaagatagttaaaacacccaattcaaatccataatcaatcaacatttgttttaaccataacagttgagtacaacaactgccagcagcaatgtactcagcttcggctgtggacaaagaaatggaattttgtttcttgctatgccaagatactagattatttccaagaaagaaacaacctccacttgtgctctttcgatcatcagcattgcctgcccaatctgcatcactaaaacaagcaaggttagaattagtatctttagaataccaaattccataatcaagagtactattaacatatcgaataatcctttttacagctgatacatgagat

SEQ ID NO: 284184 - DNA, 433 bp, Cannabis indica
agtggaacgaactgcacggcggtttacaggctcctaaaccataacaatcacaacactagataagtgatacgctaaatcacttcccggggacttaaactagaaactaaaagtttccctatcgataaaaagcatggcaataccctaaacaacataaaaacgagaaaaactagggttcctaaaaaccccccaaccgacagaccggttctgcaaccggaattccggttctgggaattcctgaaccccatccagaattccggttgcacatccggaattccggttcctcgcaggaatcattcaaaaattcataactccctaaaatcaaatccaatccaaaccaaaccttcgagacctgttctatataccctaaagaacataaccaaagcaatagaaccaagcttcaagcatagaaaacatttcaccattggaggttcaa

SEQ ID NO: 284185 - DNA, 609 bp, Cannabis indica
gaggggtaggagccctgccaaccactgaagtcgtagcagactcagtcatgcatccaactgcgccctcagctcgcagtgccttttccaccatttcagcataggtggttttgtcgtcggtagtaatcattaggtcatgtctaatcttcacattcaatccatccagatacttttcctttttactaaaatcggttggcacaatacccgaggccaacctcgccaaccgatcaaactgcgttgtgtactcagtaacgctcatattttctttctgggtcaggtgggtaaattcttttctcttggcacttctgacgacctcattgtagtacttggcattgaaaagttcctggaacttttcccaggtcatcgttgtgacatcgtgtatcatggacaccatgtcccaccacaacgcatcttcttggaactgaaaagtggcacagaccaccctatcattcccggtgacgcccataaaattcaatatcttggtgatcactgttagccactgctcggctttcataacatccggacctcccagaaaaaccggaggtgcctgcttaaggaacctttcatacagaggttccatcccattcactgcaactataggttcggcctgga

SEQ ID NO: 284186 - DNA, 811 bp, Cannabis indica
ctaaatttagacctgaactcggacccaaactagaaccccaaccgggacacctgaccccggaccctgatcgtggacctcgaactgaaattggaatcggacccagttccaaaccaaaacaggaactagactcagaccctagcacagacctcagacctggaccccgaaccgaaatcgaaactagactcataccccaaaccggaaccaaatctggaccccgaaccagaattggacctgtaatgaccgcatatttaaacatgagaattagtagaaaatcaataatttgattattatttatgattatatgtgctttagtagaaaataagattgttgacgcagaaatctgcccaactcgctcgtatgtataaacgagatgaagtttagaagtaattaagtaaaataaagagcacacacaagaatttatagtagttcactccctgtgtcacgacacaattagagctacatccacttcaagtttttattctcacgaaaaatgattacaagaaaaatagctaagtttgaaagttctaatttttagagagaaactagaaagatgctttaaccttatgtgtacttttatgaatgtgaaagacgaactagatgaactctccttttataaggaaggatgtcctattataataataaaatataaaaaaaaaaaaataataaagctattttcgaccgttgatgatgatctaacagtgaaattgattctagaggtctgtcatcaatttccagagcttgagttgcatctgtgggacccactctaactaagttgtagttgaaattcgtactctcttgaggcaaaaatttg

SEQ ID NO: 284187 - DNA, 600 bp, Cannabis indica
tccctaagacacccgtcgaactatggaatggttgtacacctagtttacgccattataggatttgcgggtgccctgctcatgtgttgagaaagaaagaaggaaaactggaatcgagaactgaagtttgcatgtttctcggaaattctaaagagactaggggtggactattttatagttacaaagataagaaagtgtttggctctacaaatgctactttagttgtagaaaactatattaaagactacaaaccaaaaagtaaagttgtgttagaggaaatcctttcagatataactcattccaatgttccatcatcttccactccagaagaggataatcccactccctcactcgaaacaactgagagaactaccactaaagttgacgttcagaagatcactgctcctcgtcgtagtgggagggtttctactaaacaatatcgttatgtcttggatggtgaaataaatatggtcgttggtgactgtaacaccctaaataattaggcacgctacccaaaaattcttatgaaaccctaatcccctaatcgagattactaaccaaaatagcgcagaatttaaacttttatattaaacagaatgaaaa

SEQ ID NO: 284188 - DNA, 512 bp, Cannabis indica
aacatccatgattaattcagaaacaaaaacaaacataaagaagaatttaagggtaaaagaaagaaactagaaggtgatatcgctccgggtcttcaagatagcttcctctccacttgcatccactattaggtctatttctgcttaattctgaccttcagtgtcgtattccttatatagggatgagtagtgtgcctccaattgagagaaaaatcaaaattaggtcaaaaccacgacgtccgtaccaagtcgcgactagcccttaagctggtcgcgactacaggcaaacctcgaaaatcagaggttctgccaaatctcgaagtcgcgaccagagtcgcgacctggaaaaagggtcgcgacctggctctcatgaagtcgcgactactgtagcttctggagccgaattttccaatttttttccagtttatcccagtttttcgccatttgactgaatttgaactttaacactccgggaacctgaaataatgaaaatcaagcgtaaaactgctccaaaa

SEQ ID NO: 284189 - DNA, 546 bp, Cannabis indica
ttaccaaaagtgacttctccacattgcataggccgaatgttagtcaaaaagtccttgtcacctgtcatatgtctagaacaaccactgtcaaaataccacatttgagatgcagcacttttattagaaaaaccagctagacaatttttcttaacccatatttgtttcaaacctttatgtttcttttgagatttttccaaattaccaaaataatttgttttaaacaaatttttcaacgtgaaacatttaggtctgatatgtccttttctaccacaaaaatgacaggtaggaacaaatctttttacctgagatcttactcttttcgtaaatcctggagattttgcgacaacagaaacagcttctgctacaacaggctgtgaaactgttgcagcagacttcacatttgtagcctcaggaagattcgttggaacactagatttcacaaacttcgtgattccagaacttcccatcccatttgatccaatgccagcaaaacctctttgacctgcattctgagctttttcaaaaatagaagatccagggttaagc

SEQ ID NO: 284190 - DNA, 737 bp, Cannabis indica
ccacttgaaagtactcaggtcgggtagaccacattaaagtactactgaacattcgcttctaagtgaatggcctcttgggcggactacgcgcaaaggcttcagaaacaaagtactcaggtcgggtagaccactttaaagtacagtttcttatttgttttatgtcatgttaagctaaaagatcagattagatcactagctctgatgtaagttactacggtaacaaatacattttcgatcaataaatgaataaagatagtatttccaattctattgagtcgaaaaaatcagcatgattataatttacctaaagtgcgtacaaaaggtttagtcgaacccaaaacaccgaacagaaaagcaatatatttgcgaaagacaagtgaccaagagtcatacgtctgctcggtcacttggggggcacctatacctgtacaaagcatttggtaaacataaaacaatcacaattgcacgacaattataaacagagaatgaaattcattaaggatgacaaaagcacgtagtaccgggattaaaagctgcccggtcagcccgttgtccaaaaaatgaaaaataattccaagtttaaagaccgcttggtcggtcacgatgtcttaaaggccttgaggccacatataatatatatatatatatataaacaggagataaaaagagaagtgtttaaacagctggagtcccaggctcttggttcggttcttctgagccaactggagcaggaggat

SEQ ID NO: 284191 - DNA, 519 bp, Cannabis indica
tcaattaggtgatgttaagtgcaatacatgtatgtttaattttttttaattaagtaatatatattttttaatttttaaatggggtttgagattttgatcttcaaagaaaaaaaaaaattagctattgctacattggagtgtcatttggatatgattatatattcgtatttttaaaatttttaaatttttttgaattaggtaacgtatctgatgatgcatatattgtaatttactatattcttaaccaaaactcacataataaaatttgagtgtgtatatatagattgaattcgtaagtttgatataaatattttttattcctaaactttacaaaaaatatggtgtgaatcggtttactataactaaaatggaaagcaatcaattcattagtacaaccatttcaatttaaaatataaaataaattataataaagttaaaaatatttataatattttaaatttaaatttctttatataaaatatttacatatttttttttaattttaattcaaagttaaac

SEQ ID NO: 284192 - DNA, 574 bp, Cannabis indica
gggtctcgatgtttgaatgtcgacgagtctgggctcgtggtctatggtggccgcgtttgtaatttttttttggttcagatttttaattttttttctagatgtgttagatttgtatttaactgatctggaatttttgtggatgtataagttgaactttgttataaaaggttgtattttagattttttcagtattgaactttgttaaatctttaactgggttttaattttttttttcagatacagtttctaatccattccttaaaaagaaatataataaaaaaattatataattttaatatatatttttaattagaattgatttaatctgtcaaaattatataaaaaaatatatatatataaaaaaataaataaatggagggtttagtatcattatatgtaaaataaattaatattatttatcatatataaaatttgaactaaatcaaattaaatattatttttttttagaaaaatatttaatatagtggcactttgtgtgtcactatatctccaaaaatattaataaaaaagaaaaaaaaaaagatatagtgacacttcatgtgtgtggctgtta

SEQ ID NO: 284193 - DNA, 738 bp, Cannabis indica
gactaaagaaaaaattggaaagaagcgacaaaaccatcggtctattaggccaaccatcgggaaaattcgactacatagtcaaatactctgcaccaaagagctacaatcagcctatgccagaacctaccggatgggattcagacgatgcttcacaagattcacagcctaagatagttttgccttgttacaaacgacaagcaaaatggatgaagaagcatggagaaaaatttccaacaccagctgttcaacaatcagttcaatcacttcctgacgcaaacatgatcacctccagcccatccattgattatgatgaacattttcctcctctcaagaggtttgaaaaaactgaagatcagggcaccacttcccaccatccaaaaatacacaatcctacgacaaggaatgctgatggaactttacaaaaggtctcagcagccgaagaagtattaaattggcaaacagaaaatatgatcgcccaaaaccacgtcttaaaacgggtagaaaaacacatcacccgcacagagacaatcgtcaaacaacaatcacaagatacgatcattgaaaagttgacgaacaagattcaacagacgcatgacgaactcatggccatcataaaatcaaactctgttccaatgtcattattcttggctaaagaagcagaaatgaaagccctcaaaacccagtatgaatctctaaaaaagcaattttttcaacgagaatcataccctacggggcctc

SEQ ID NO: 284194 - DNA, 502 bp, Cannabis indica
cactgcaataggcctgacggaccgagacctctcacccagcggttcccaactcacagggtttaacggaacgacgcttatcccaatgggaaaagtgagacttcccgtcaccttgtgcccggacaccccccaaagcacattcaaatactgcacttttgtggtggtagactgcccaaccgcttacaacgcgatcctcggccgaccggccctggtagattttggcgcagtcacatccattcggcacctgtgcttaaagttccctacccaggaagctggaatagggacggtgagaggaaatcagggggaggcaaggcaatgttacaatgttgcaacccacctgcccgtactgatggtccgggaaaccattgagccagaaatggctgaagaagatgagttggatccccgagtggggtccgaaaaaattgtagaaccaatggaggatgtcgaggaaatatcagtgtgcgacctcgactccaccaaagtactccggctgggaaagagccta

SEQ ID NO: 284195 - DNA, 624 bp, Cannabis indica
tctagcttcggctgttgggagtctaatgtatgctcaagtttgtacgcgtccggatatagcgtacattgttggagtgttaggcagatacttaagcaatccaggaattgatcactggaaagcagccaaaaaggttatgagatatttgaagagaacaagagagtacatgctcacatataggaggtcagatcactttgagatcattggatactctgactctgactttgcgggatgccaagatagtaggagatctacttcgggctacatatatctgttaggtggtggagctatatcatggaggagtgcaaaacaaacactcatagcttcatccaccatggcagcagaatttgttgcatgttatgaggcatccaaccatggtatatggctgaggaactttgtcactgggctgcgcattgtggatggaattgaaagaccacttaagttgtattgtgacaataagtcagctgtattgtattccaacaacaataggagctcgacgaagtcaaaacacattgacatcaagttccttgttgtaaaagaaagggtacaaagtggacagatttgtatagaacacttaggtacaaactccatgattgcagacccccttactaagggtttgccacccaa

SEQ ID NO: 284196 - DNA, 275 bp, Cannabis indica
ttccttaatcacaaaatcattgatgatgtgaaattcctctttatctggtagagttagagactccggatcggtttttacacttctccaaaatcactgctccactcccagagtaatcaccatctcatcagtagactttctagcactaaggcaagtctagaaacctaatttggtgtagtctaagagtattaaaataccacccttatcaactaacatatagttcctcttcatgatcttaagatttacttgattgtcttccaatgttgctttcctagatt

SEQ ID NO: 284197 - DNA, 203 bp, Cannabis indica
aaatatgcacatagtggccgtccatgataggataatgggccccatataattgattaactaaaatcaaataactgtgtcttacaagcagtatggtctcaactagtatggggagcatggcctatataacagagcttccaataagcaaaccaagaatttaccaagtaaatccgctgacttattaatttcttgttgcatccacgcat

SEQ ID NO: 284198 - DNA, 154 bp, Cannabis indica
taaccctagtggaatgctataaatagatagtgaaggcttcaagaaaataacagacttttcttctgacttttcattcagaaaaaactgagcctttctctctccctatctttggccgaacccactctctcttttcttcttaccttaaatttcgaaa

SEQ ID NO: 284199 - DNA, 723 bp, Cannabis indica
cagttcatcaagatccagttcctccgtttctcatttcttcaatggaggttactttagacataaatctcctaggtagaactccaaggactttacgaaccagctttgcattagaataagtctttcccaaagcataagattcatttgatatgtcacacaatttagcatggaactcagccaccgtttcttcttcctccattgataaatcttcaaacgcttttgccaaagcacgaagacgggatttctttacagcatccgttccttcatttttaattcgtagtttttcccaagcctctttggccatctcacagtttgcaatgaccttcaattgatttgtggacactgcattgaacaaagcatgcatggccttcgaattaaaattggccctctccatctcatctggagtccacaagctcgtaggttttggtttggtgacaccgttatccatcatcgttgggcatgtccaaccatcttctatggccatccaaactctttcattcaccgccctcaagaatgctcgcattttggttttccagtatgggtaattagcaccttccagcattgggggtcgtgatgtggaccctccttctctgaacatctccattcctgtactaacaggaaaaacaaacaaagatagagagcagtatactcccagagtcgtgtctggagagggggttagttccaactgggtgttgcagaaagaaaaaatgcagaaaaatcaagaat

SEQ ID NO: 284200 - DNA, 178 bp, Cannabis indica
cactccaatcatacatcattacaacctgttttcttacatccctaagccactgagactgtaagaaaaatgaccaatttcataagcaatttaacatttattcaatcctaccttaacaaaaatgtattcaattacaactcatcacataataacactcttgatcgttccacaacttcataac

SEQ ID NO: 284201 - DNA, 837 bp, Cannabis indica
ttcattatacactactacaaaattgggtttttccaatagtttataattgtcttttatactatttgccaacggttcctaaaaccgttggctatgtgggtgtcataaaaatgtggaactttaaaagacgttttataactgttgggaaaagtcaatttaaatgacgttttacaactattagaaaaagtcacattaaatgactatttataactgttggcaaaaatattatttaaattaaatttaatttctttttaatatatatttttaaaatattaaatatatataattaatttttataaaaaaataatattaattaaaataaatgaaattaatatatttctaactttaaatatcataattcattacaaaatttattttaaaaaaaaatatatcataattcattaaaattataccaaaatcaaagattattacacacagattattacacaaaatcaaagatacaattctgaaaaaaaaaaataaagataaaacaagggagaaatcagataataggctatagccgccgtggtgagcacctccgatttcgatccaacgagttgtgcacctccgatcctggagtaagagcaaaattgatgaacgcagtgagcaccgaagaagctttcgcctcagaccagaacgatgtcaggcaaacaactcgcacaaatctccttcaaatctgagaaaaaaaaatttaaaaaacgcatcaaaaaatcgaaagatgaagtacaatcgttcgaatctatcaaaaaaaaaaaacatagtaaaactggaacagttcgtttgatgtagagaaatggccatcatacctttgaaccactagcgccggctgtggccgacttt

SEQ ID NO: 284202 - DNA, 513 bp, Cannabis indica
actgctcggctttcatgacatcctgatctcccagaaaaaccggaggtgcttgcttccggaacctttcacaaaagggttccattctatttctagctaccactatttcggcctgagcaacaggggcaggtgccacaggaacttctggcaccgacaccgcaggagcaccctgctgcctcaatctctgaatctcattatcttgctcctctattctggcttgcatttcagcaaacctagtttcccaattctgggcttcctgattggcttgggcagcctgtggcgggttatcatcaccccgaccacgggccctgcccctgggacctctaccatggcccctaacattcgggggaaactgagctccttgaaactgatttgacccgaccgagttgccctgactcctggtgttccgcctggcatccatctagtctgaacagcctgcgaaacaaagagttggcacatcaggtcatgatcaacaagagcttactaatgccgcttaatttggaaattaaaaacatg

SEQ ID NO: 284203 - DNA, 703 bp, Cannabis indica
gtagtaatctgcactgtatcttcaaacagatggctgagactattgtccgccatagcactgcacttagatgttactcacacagtatagagactttaggatcaaatcgaaaagtccacagcctaacagtcaataacactaggctataggtaaaaacttccatgaagttatactctcgaacagagagaatattttttatatcagcctttaggatcaatcgaaaagtcctatatattttggatcaatcgaaaagtcgtaggtaaattaattatgagtggtatgctatatgtgtccgagcttataaatagagtcatcaacatactttcactctttcactcaaaaaggtaaaactagcactaggcctcattatatccctctcttgttcatactgcgctacatattcttagttttcttcttaaacctctctgtctagcaccaactacatatatagtcacatcatttcaaaaccattaattatttgttctctctagatcaaatcctcaccatacactattatatttctctcatatatatatatatatatctttcatcgactttaccatcactatttttatattcaagttttagtgctcaactagatctcattggaagctaattaaggtatagcattttatgatttgagttgtagtagattcgaaggttaaggtttcgtgtatatatatatattatatatactattataata

SEQ ID NO: 284204 - DNA, 798 bp, Cannabis indica
atccatataatttagctctaagctctagttgaaaaactataaaaggaacataatgctcacactcatccatttgatgccttcaaccaaatcaaacctagttttctatgtcagacaactagtaggtgagagagttctttccatagtgatttcacctccttcattgttcttcaccatattcgaaccttgagtgatagagtgtcatgcccacacatagcaagtcaagtactcaatcaatgtgagtaagacagtggtaaccagacccgaaggagagaaagagatccaggctcaaatcttgataatactatgcgataaaaaggaacagggttagagatccaagtggaaggagtcattatattcagctacaactaatgtaagattttctaatctcttatgtgtttaatttcatttttttagagatattcatatttaggatgttaattcaacatacttgttagttgttatcccaatttttgcactctgacgtggcatcacatgatggtgacacgtggaattgactccaagtatctgctcgcaagatatagtctgaacaggatacctcatatgcatgctcaaagccaagcgattagcaatccgcacggagtgatcaacacttagcgaattcaggtttcgcatcgtgagtcatcaaagaaatccttataacttggggatcagattgcagagatatggcaagctgtccaaatcccacgatcagtgtattctgcatttactatgcaatcttctgcttatatccattgtgacgagaagggaaatacttctcctccaagctcatagccctat

SEQ ID NO: 284205 - DNA, 567 bp, Cannabis indica
gctcccatttcgctcgccgctactacgggaatcgcttttgctttcttttcctctggctactaagtatgtttcagtttcgccaggttgtctcttgcctgcccatggattcagtcagcagttacgaaagggtttaacctattcgggaatctccggatcttccgctttatttttcaaactccccgaagtcattttcgtcgcttattacgcccttcctcgtctctgggtgcctaggtatccaccgtaagccttttcctcgtttgaaccttcgcctttaactttaaggctatgccatcccctaaggtgctactaaaatggaaggatcttatcttatcaacgtccatgaatgaataaaatctagcatagatcgaactgccgaaatcggaaaaatagggtgctaatcatatagctttgtatcggctaagttcaacgagttggagataagcggactcgaaccgctgacatccgccacagggtaaaccactgcctctcaggccccccgactgattctaccatagaggccaacgatagacaataactcccccccgaacacagcttacaactttcatc

SEQ ID NO: 284206 - DNA, 467 bp, Cannabis indica
agagtctcatgtggtttggggttgttttggtcgagatatgaaattttgacccattcctgcactgaaccggaattccggttcagggaggcctgtaggaaccggtctaccggttggcttccaggaattttcccagaaccggaattccagttgaggaactggtctactatttttgtgttatttatgttattgccatgttatttatcgatagggaaacttctagttttgagtttaagtccccgggaagtgatttagcgtgtcacttatcagtgttgtgattattatgatttaggagcctgtaattcgccgagtagattgttccactcaggttgaccgacacacgtaaattcagaatcgaggtaagattagtataatgtcatgcatatgcttatatatgtttagcgtacatgtcagttgccatcagattaatatattagacatatgttaggcaaattttatatagccgtcag

SEQ ID NO: 284207 - DNA, 538 bp, Cannabis indica
ccccattagtgttttgtcttttgtgacttattatttgaaaataaatgtttatttatttgtttatttggctgaaatgggttatatgctaggtgtctttattcatttttcattttacaaaaaaaatcataagtttaaaaaagagaaaattttcaaaactctctcaagctctctctctctcttttcggccaaggcttgggctgctagggctggggtttttctgctcaaatcttgtgattttcatctcctctttgtgtaatccaagtcaaggtttgatcatctataacttctctttgtgttttcttgtgttttaagaaagtatggtatgatgcatgcatgaatttgtggctgttgttactgctgtgttttattgttaatttctgtaatgtaagcatgatgatttgaggttaattaagctattagaaatgcatgtaaattaccttgtttcaagtttggaatttctagctcaaaaatgtgatttttgaagaaattgttgtgaatctgttgctgtgttgttgttaatgtttttaattgttttcag

SEQ ID NO: 284208 - DNA, 692 bp, Cannabis indica
acagtataaaagttaaaatgaccgtgcaacagtacaaataaaaaaaaaatgaaaaaggcagtaaaaatacctaagtttatctcttagttgcagataaatacctaacttatttttttggcggtaaaaataccttctgttagggtcttggaacttctgtaggtacctggacgttaagtgacaagtcagtacctacatggcacgttatgattggtccaagtggatttatttttatttttattttaaataatcatttaaagattaaaaattaaaagaaaatgttttttatacaaaaaaattaaaaataaataaagaaatattaatacttaaaatctaactaaaataataataaaaaagattgattttgtatccctttattattctgatgaatcccaactccagctccggcattgtctagatgaagtcgagctctggcaccgacgatcctcttcttcactttgtctgtgtcgttagattcaccaaaagaaataataaacaacatttcagatctgagattttctacctccttcttcaaacaacctttcaaatctgaaaaaaaaaacctgcaaatggttttattattgtccaaactatttttctttcacaaatcttctacaaggtcgaagtaattttttgcaaatgattttatctatatatgatttagtttggtcatcatcctctattgagtggttagc

SEQ ID NO: 284209 - DNA, 704 bp, Cannabis indica
cacatgagcccaagagtgtgagataagaaccataccatcaacaactccctggtcagcactgccctgtacatcatcaaccccaagagcgtaggcttgagcggatgactttgctttgcctttccccttccctgactaggatagcttgtacttgcaccagaccctccactttgattgtaccctccaccttgattgatcccatgttatatcaagttacttttgctgtgtccaagttagagggtggtgcagcagattggtgggagaccttgtccaggacaatggaaactgatgggatgacttggcgagaatttgaggaagttttcagggaacaatattttagtccatctcacaggagggctcttattggagtatttgatggtctaagacaaggggatatgactgtgaatgaattttacatgaagtttgtagagctatcctcttatgcatatcctggtgttgttgatcaacccttggtgattgaacagttcatgcgtcgtttgaggcctgcgatacgtggtccaatagcccctttgacctttaacaacctgactgagtgtgtgacagcagccttgcgaactgaggctcatgtagaggggaatgagaagaagaacacaagcagaggaagaggaaatgaccgaaagatgaccaagaagaatcaaggacagtggtcccaaggacaacaatttagtgggggtagcactagtagt

SEQ ID NO: 284210 - DNA, 1039 bp, Cannabis indica
agatataagattgaattgttgagggaattgattgaagaatacaaatggaatttatttgagagaatattgtatatgtatgctatggtgtgatttgagctaaattaaccttatttatctacctttcaccctagccttacattataagcatataaagtcatattgatctttagattgtgtgtaattacattagtggagaatggtttgataattaagcttatggagtagatttttgttgaaatacacatttattttgagacaaacattgattgttgacatgcatgaattaatttgaatgttagtagtatgatgatttgattgcacacacacacacacaaattgaagtttaaaaagttaattatcttgagttgaaattctaatgattgaagtagtttggatttttcttggacttataagtggatgtactaatttttgaaaactaaaattatttttcataaagaccgtatttgtttaagtatcattcattaacttactcgaggacgagcaagagtcaagtgtgggggaatttgatgagtccatatttatcttataaatatgattaatttatttattaatattcttaaattgattctttaaattattgattagtgtgattttaatttattagattattttaaatactattcatccatttagagtcttttggagggattttaacatattttggtggaaaataatgaaagtcggcgagctcgattatacaaggcggaacttaattgcaaattcggacgaacttaaaagcagaattggacttggagctcaacatgaaagttttagatctcgttcttagctttctagaacatcttgaatcgtccaattccgagtaatattaagaaagttatggccaaaatactatcagtcgtcgcagtaggaaatttctaaaaaaaagatagcgaaaataaagataaattttcaagaagagttgcgatttttatcttttgtttaaaagatgagttatctttatccgagatatttcctaatactattataaatagaattctaattctaagaggatttatct

SEQ ID NO: 284211 - DNA, 627 bp, Cannabis indica
aaaagtttagacaaatacctttttactgtttcggatctgggttttgtgtaggggtgtcgcgagtttggggtttcacgatatcgtctccggtggtctggtgctcgtctctctgtgtttcacgatatgtaacgggcttccacgatttggtcttcaaagttttcgcgatgtcgcgatgtcgtctggaggtggtgggtttcgcgatttcgcgatttcgtctggaggtggtggttttgttggggtcgggtggggtttcgtagcaggcttggtgggttgtcgttggtggtccggtgacttgaggtggtggtccggttaggggagggtgggtgtcgtttgggttgcgtgagaacgagagacagagagagagagaaaagagagagttagagagagagtggtaatttgaaatggggagggtattattgggattaatcttaattggaggttattttttgaactattttttggctagcatattaaaacaacacatgctatttttaagcatgtattgtcaaatttcccttttcaaaatagcaaaggattcctgaaaatggtcatctaccggaatccttatatccaaattctaaattaccgcattctgaactacaagtggcttgatcctttacaaagaag

SEQ ID NO: 284212 - DNA, 580 bp, Cannabis indica
tggcctacagtctgatagactcttcgtatcagtacagtagcttgccgactacgatcttcgatttctgcatggtgagcccttaatgcctccatctctttgtccctccactcggcgaacatacgcctttgttcctcaaacgcagggtttactgcggcacgtaattcctcctgaacatgatgcagggtattgctgtgaccctgcatgagtccgagcacagcgcagaggttttgcaattcggttgtgtctccgatggtcgtctgggcgctgatgctgatgcctggtggaatagtcgtgttatgaacaccctagttgtgtgcggaatcgttattcccagtctcttgcacaccattcgcagtttcagtaacaagagttgtccccccattcaccacgcttcccgtctgtccaagattgacagtgggtggaacccttgaactccctgggtcctgcaatgtcggatctagcgtctgtgagcttgctgggtcagacaggcctctacaattttgtaccatcgtgtcgaatattgaaaagagcgatctgtgattctgctctcaataaaagcaccaaaatgttgacttcgctt

SEQ ID NO: 284213 - DNA, 511 bp, Cannabis indica
atatatagtacttgtggatgtgattgtgttgtgtagtcttgtacaaaaattaaaaaataataattaatacaaactggtacggctaaagatggggtgatataatcccaatataaatctaattttttcaatgcattaaaaaacgtaagttcaacaaacccaaccaactattaaattttcctaggaagacgtaatttgaaccaaccaaatgatcggttttgttatggtttggttgattgtggttagaaaaattatgtatttaaataagtgaaatgttgttcccatccctaaacaacaacaatggccacataaacttgtcacatgtagcaaaaaatatcctgatattatgtccaaataaacatgtgtggccaaatgaataggaaattaaattatgatgtttacaaataatgaaaactcaatattattattaaataggattttaatattccattaaaatattattcattggaataaatattacaataatttttttaagattacattaacgtattaa

SEQ ID NO: 284214 - DNA, 556 bp, Cannabis indica
gcacactgataattcctcgacatcctccattggtccacaattctttcggaccccacacgggggtctaactcatcttcttcagccacttctggctcaatggattcccggaccatcagtacgggcaggtgggttgcgacattgtaacattgccttgcttccccctggtttcctctcaccgtcccgatcccagcatcctgggtagggaagtgccgaatggatgtgactgcgccaaaatctaccaaggccggccggccaaggatcgcattgtaagcagttggacagtccaccaccacgaaggtgcagtatttaaatgtgctctgggggtgtccgggcacaaggtgactgggagccttacttttcccattgggataagtgtcgtcccattaaaccctgtgagttgggacccactgggcgagaggtctgagtctgtcaagcctattgcggtgaaggcctccttgaagagtaggttcacggaacttccattgtcaattaagactctggccaccactttatttgcgatgggggtctctatgaccaatgggtcatgatgagggaa

SEQ ID NO: 284215 - DNA, 664 bp, Cannabis indica
tgagtcatccaccgggagatcgttcgtagtcatctcttcaaacgagttagccagttggctagttcgagcgtcttcctcggccctcatccgcagcaattcttcatagtcagcaatgtactggggtatgtcccaagactcggccttgttgtctcgatactccatcgccatctttccgcgacactggatctcagcctccagtccaatttcgactaaccgaccttccaacatgtccacacgagcttgggcagtagcaagatcagccaaggcagacttcaaacgattagaatcttgctccttagcatcaagttgagttcgtaactcttctctgacacggtcaagctctttcttgcagctctttagctccttaatctccccgcgcaaagtatcacgctcagtcctcatgtccttcatttgctccttcatgttcttaatcttatccaaggcgtacataagtccttgcataccctgtcatgcaatataaagtaccataatagtcagacacaataatatcgcgagtttgtccacacataaattgtaacatgggaatgcatgcatacctgaaaggagcgagagatggacaactccatggaagctatttctccgatgttctcaaaacgagctcgatcctctggaaataatagcttactggcctcaccaaggtgta

SEQ ID NO: 284216 - DNA, 844 bp, Cannabis indica
atgcacaatcacataaatatatatatacatatacagtatattgttattagtaattaaccccaaataataattaattacccattaaaaacagttgaaatatatatatatatatatataaaaaacatttgtgggtgtttatagttataacttaattacaataatgaaaaatataaattatataagagaattgttgaaagtattatttgtgcctagtactcttatcggtgtcatatttctattagtgtaattaagtatcaaattctatataacttaaaaaaataacttttaagcaatattgttaattaatcgtgaaacgctacttataaaaagtgctggacaccactagtacttattatataataataactaacttaccggccaatcatcattacggtggattgaggattggtccctggagacatattaaaagtcgaaccatcaacaactcgaagtgaattagttccaataaccttaaattcaccatccacaacttttcccaccaaacaccccccatgataatgccaaaaggttgtaacaaaacttcgacaatagtcttcaatggatgaatcatttgattggttggttggcaaaagtggccctaagaacataaaatccctaacaccattaagatcagtgtacttaaattgatccatagatttagtcttcaacaactcgccaaacttcttcgttgcgctaacgcaacgagctaggtcaaccgagttagagaagtagttgaacttaacatgtggcgcgactttgacatcagtggccgacgctagccaaagagcacccgtggacaaaggcccaacaactttttccgcaaagacggctagagttaattgtg

SEQ ID NO: 284217 - DNA, 649 bp, Cannabis indica
tgaccggttggtgacccagaaccggactccggttggaaccggtttgccggttgggggagtttttggaaccctagtttttcccatttttgagatttttagggtatttccatgttatttatcgatagggaaacttttagtttcaagttgaagtctccggaaggtgatttagcgagtcactcatttatgttataattaatgtgattagggcatccatctagcacgagactttccgttcaggtcggccagcacacttgaatttggaaagaaggtaagaactgtatataatgtgtgatatgaatatctgagtgtatgtatatgttatgtgtatatgcatgcttaaaatattaattgcactaccaacacttatacggttatagtatagagtgtattagtatagtgaatgttatgtgagagtaccgtgataccagcataagtatagagaggtactgggagtacgtggtatatcactcaggggtactcagggtatgaacaaaccctaccaacactcgtacattgaggtacgtagtgtatgtggtatagtggctataccctagtatggaacgtttgtactcatctgttaaggcttgtaaataggtgtatgggcgcctaagtacaagtcggaaattatatgatatgttatatgcttttc

SEQ ID NO: 284218 - DNA, 724 bp, Cannabis indica
tatttaatgatgatatctaactgatacgtcaaatttataaaaatatatatatataatagaattttgccacaaaataaaaataaaaaaattaaagtgtataaaattaaaatataataggccacactacaaaaaacagttacatttagtgacaattttttagtcacaacataatttttttataactaaatgtaatttttagtcacaataaaaagttactcataactaaaacatatcactaatttaattttagtcacaataagtattgtaattaaaaatacatttagtcataataaattgtaatttatatttttagtcagagaccttttaatcaatacaataatgataatttataataaatcacaaattttatctttaattacaagttttgttttattgtaattaaaagtaaaatttatataaaaaaaaccctatttattataagaataagaatattaatattaaccgaacatcacagctaaagtaaactgacgtggctagctacactttattatataactagtaaacattccgcgcttcgcggcggatatataaaatattttaaattatattataaaaaaaattatgtattttaattaataataatcacttagtaaaattatattgaaattttaactttacaattaaaaaatttgtggcataaatacttaaaatattaaatttgttgctaataaataccggaattcgaaaaatagtagcataaatc

SEQ ID NO: 284219 - DNA, 771 bp, Cannabis indica
gacgaagcttcagatttgctcaatcctcaccatgatgctttagtcatttctttattcatttcgaattgttttactaaacgtatactgatcgataacggtagctctgctaacatcttatttttgaatgctcttagggagatggggatcgacgaggccaccatcatccgcaaatccacagtattggttgggttcagtggagagcagaaacactcagtcggcgaggtcacactccacgtttatgcagaaggagtcaacctacagacgaagttcattgtagttgactctccatcagcttataatgcaatcttgggccgaccgtggatccattccatgaaagctgtgccatccacataccaccaagtgatcaggttcccaaccaagtggggagtgaaagaaatatggggagcccaaaaaactgctcgagattgttatcaaaactcgctaaaagagaaatcggcaacattatagcaactacagcagtctagtccaacctttgcaccggatgaacctagtatggaagacctagatgacgtgtgcattagcaaggagttcccagaccataaagtccagattggaacaaagcttacacctgagtttcgagccaggctgatcgaattcttaatcaaacgccatcactgctttgcatggtcccatgaggacatgacaggtattgattctaacattattgttcacaagttgcaggttgaccctgattacccaccggtccgacaaaaaagacgtaaatttgcacccgatcgcaacaaggtgata

SEQ ID NO: 284220 - DNA, 626 bp, Cannabis indica
tggtcatagtcaagcaaagaccaggcgatctctccgagcctacatcagcatattcatgatggaggtgactaaggtttcataagtaactgaagatggaaagttgtccgtgatactgggaggcattgaagtcctgggtgaactttggaaggacataaggaagaacagtctggtagactcgatgagtgattttctcgaccgtgcttaaggcttcatcaaacttgaagaggctatttagcgagcagaaggtgagcaaaagcctggcaagtcaaaagctccttccactggaacgtccgcccaactcccccattacccaaataattcaagctcaaacggtaaacgttccaacaacaacaatagacaacagaatgggaagaagggaaagttcaccggcgaaaccgaacaaggtccctgggagaatcaagccaagtacattgcatttaccatcttgacttagtatatagaaagtgtttacatggccactcagtcataagccccgtacaagaagccagcgcccatgaaaaaggatgtcagcaagagagacatgaccaagttttgtcagtttcatggcgactacggccacgactccaatgaatgcaacaatatgaagtgggaaattaaattcctga

SEQ ID NO: 284221 - DNA, 339 bp, Cannabis indica
atggattgattatatatattgaaagcatatacctgatatcagttcctccatgatcatcacgaagatgtttggtgacattatgcttgacccaatctttggcattgtcataatcagaagccatctttttaagcatgtcatttgggattccaagcataacctcaataccagacccatacaatgagctcactgtccaatcatctgcgtcgaaaagcttcactttgttaatcccattgtcttttagaagattcaccactatgtttggatgcaatgggtgagatgccattgttccccaatttactcctatattgctctctccattctcaaatttcatcattaata

SEQ ID NO: 284222 - DNA, 987 bp, Cannabis indica
caaaatagtgtagattggatgagcatccttacgacatgctacgaaattggttagataaaaatctgtacttgtgcagatttggattggattgaaaaatttaaaatttgcatttgtgcggattggatgttaattgatatgtaaaagtaaccaattctatctaattcacatatatttagataatttttttttaagaaaattatatatacaattaatattttaatgtaaaaaaaattgtcatttaaaattctaatacatatataaatatatttcaaaacttaaaagatcaaatatattttccattcttaatttcttatatatatatatatatattttctttctttgaatttgttattttttattttatttatattaatttgttgttgaagacattttgaacttaagaggtagttccaggacgttgatctcgggagtaaagggtgacttgcgtgcttggtccagctcgagatcaatgagtttttggccggccaggccttggaacatatttttttagttcatccaattgtgtttgcacagatggatgaaaggtttagcctcttggtgacttgtgtcatgtcaggatctcttagggctgggtcctagatgtggagacctagttgagtggccggttgaacgtattgttcgtcaagcctcttcttctgtttaaatcattcctgagatcatgagctgtacccaatctattgaatactgaagcactaggtggccttagtgattgactaggttggccggtgggttggccagaactgtcacttgggtagattattaggtataattccacctaaagagcggtcagatagggtttggccgtctaccgcttggccgtctaccgcttggcctacaggtgggacctatgactggggattagacggttgaccattatgagtctgggcaataagcccagcataattttttctgtgctgcctagtgaaattgtaatgaccgctttagtaatttggattagtaaaggca

SEQ ID NO: 284223 - DNA, 635 bp, Cannabis indica
ctgaataaaggttgagtttgcattttattctcattttatccaagttagaaaaaattagaaaatttaaggaaaactcaagctctctccctctctctttttggccatccttgagcagcaaggaagtggatgttttcttggtgattcaagctctttttggcaagatttagtgttcacaagttgttggtatgatttctatagctttcttttaagtttcttggaatttttttagaagaaaatgatgatttgcatgcttgatttggttgtgttgctgctattagtttttgatgacgtttacagaagtttattcatgattatttgagtagaatagagctacttgtgatgcatgttagtggtgttatttaaagttatggaatttttactcaaaactatggtttttcaaagtgaaattgtgaaattggttgctgtagagattgttgatacttgctgttgttttcagaggttattatatgcatgattatgtagtcttaatcaagttttgatgcatgttagtgatgtttaaccaagtttgagttttgaactcaaagcttggagctttaatggcatttttagtatctgtgttttctgggtggttttgatgctttagaaatattctttggggtatttagaacaggtct

SEQ ID NO: 284224 - DNA, 682 bp, Cannabis indica
ctagggtatttcgaaattgaagagaagaaaagagaagaagagtggcggcaatggttttactctgaaaggaataagatgcatgtctctcagtttcctgaaaccatcactttctatttatagaataccacatagggttagggttgaattatatgcattaaattaatgaaaatataaatagtaaaatacttgcagagtggccggccatgatatggataatgggcatcactttgcgattctgctattttgtcatttctgcatctcattttctcaaaaaacgccaattttccaattcaaccatttaaatgccaattctaattatttaatatctaaaaattaattattaaataaaattgtcatttaatatatttattaatttagacatataatgtaaagaccgcttagtttaatttggaaattaggagttaattaagatttaattatgaaaattaattattgatatttaaataattatttatgttgttatatttgaattctgaatgcaattttatgtcgtgtagtgaaatttaataattttgttattttcggttcccgtacaacatggaacgcagtgtatggctcagtagaatcataatttagtattttagtatagcgttgcagtttatttagacattgggaatgtcgggattggttgggaatttcgaatttcccaaattacccttag

SEQ ID NO: 284225 - DNA, 775 bp, Cannabis indica
attttacctattcccaacaacccttcccaactgccacggtgcatgtcagacacgtgtatcatcgataagctatcgacataacgtcgacatagtatcgacaaaatagtatgcggtttcattaaatccgcatgttgtcgacatagcatcgacatagtatcgatattatgtcgacaaatacaccatttcatgcatttctcctgtacagttacacatttaatggccattaaatttttctacattcccaacatgtataatgctctgtaaaagcaaatccctttctaattcataagtgctcttgtcttctacttctctcttacacttcaaaattaaaggcaaatttctcttaagttctaaatatggcgcctagaaagaacaagggcaaattcccaatcttaactcctgaagagctcaagcaggagcctgatgttggcataattactcctcaaatgcagaaagttctggacaccgatagagctttcgaaaaagaacgaaatcagaacgagttaaggttgatacaacttgaagcacaatttagcaaaattggtgtatggccggctccaccaccagggttccccgaaggatgccgtcgttgcaaattaggcatcttaaacggtaaaccggtgaagcctggaactttatgcaagtattgcaagtctcacccacaagccaaacaattttaataatttgttattttatggcttgtggcgagttttatttaatgtttgtttgtttggtttttttttttttttgaacttttattttatgttattttaat

SEQ ID NO: 284226 - DNA, 175 bp, Cannabis indica
cttctccttgtctgtgatccttcacagtctttcaatctatgattgaggtaccacttgctgtgtgtgggcactactctatcactgagggtttcgaaattatgaagaggaaaagagagagggttaagttcggctatagagagagagggaaggctcagtttttgaaaaaaataatttt

SEQ ID NO: 284227 - DNA, 677 bp, Cannabis indica
tttgtctggattatgcataatgcatatttgaaactagaatgaactctttattgaactattttatgagattagccatattattgtgaaatttgaagagcataggaaaacaaccattctcctcaggatcggaaggattttgctataatttgaattaaatggtattatttggctctactttcacatgcaaataaagtgaaaaaaaaacctgctaggtttatgatgaaatatcattgcttttcgttttggtgcaaaatttgaagtcaattgatgttgaaagtgatggtaatagattttcttttttttttttattttacttttctaaggaggcgattaaaagaaaggtgggtcattactgagaataaattaacgaataacgagtagcgaagtggaggagtcgtgaaagggaaaaaaaaagtaaaaataactgctcctaatgactaatgagtggggtcgtaattttagtatgcgggtagtaggtttcgaatatatccatacttgagtccaagttcggggtaaatagatactgtatatattaagtttaaaatctaaactgtataataaaaaaatagatacttaacttgtcaattcttattattatacacctatattctactatgtttatttttttaattgtaaatttttgttagtattttttttttaattttttatttttagtt

SEQ ID NO: 284228 - DNA, 692 bp, Cannabis indica
agacagaaacaaacatccgctaaaataatagactgaagagcaaggggaacatcgctctcagtaaaacgacgacctgaccaataacaagcaccacgtgccatacagtgcgcaactttgttagcagaccgtttaacatgaccaatagaaatattacttaaagaagatataagaaattgacaatcttgaacaactaaactaaaaatagaaggcatagagaccgaactaagtatagcatgaacaaccaaaatacaatccgtctctaaaatgacatttgacttgttattcctctttatccaactaagtgactcttggacacttagaatttctgcaattttaggtcagcaattgaccaaagaaatagttaaaaacgcctcaattattcgaccatcacaactgcgtgctacaaaaccagtaccgatctcattggtgtcttcaaaaaccgccccatccacattaatttttaattgtccagcaatcagtttggaccagtgttctcttgcgtcaatgcgattggaagccagagaaactgaatcgagccgcttagcttgagcacacgtccattgtcgaagagtggtacgaaccagccaaacaacatcagcagcactacagcttttaccattccaaagcatatcatttcgagccttccaaattgcccaaccaaccatgacagcttcttcaaccaaccccatatt

SEQ ID NO: 284229 - DNA, 602 bp, Cannabis indica
agcctgatctggacctagactacaatcaggacccgaacccaaactcaaaccaggactcgaactccgaccagaactcaaacccaaactcgaactctaaatcgcaaatggaacaagaaccgaagtagcactaggactaggaccaggacaaggatttaagtcaaaacccgagcccagatcaaaaccaagacagagacctaaacccgaactgagactaggacttgaacccgaacctagaccggacctaaacccacacaataactgggaccttgacccagaatcaggatagggaccttggaaacagaactacgacatggacctattacccgacaaagactagaaatggaaccagactcggacccgagattgggttccggatctggacccagaacttggataaaacctgtagtcggtgtctggatttgggacccagaccaagacccgaaccctgacgaggaccagaacccacacccggacctgaacttagtcccaaacccaaaagttgacccgaacccgtaccttgtgaccctaaattggaaccaaaaaaagaagttgaccgggaccggaactaggactaggactttgaatcataactgaaattggac

SEQ ID NO: 284230 - DNA, 720 bp, Cannabis indica
atattgaactttgattagatattaaaatttaccgtaatatctattcaattcaatatcacctgttgatcctagatcaaatgatcttaatcctgatatggttaggttcgatctcaagagtattatacatgttctttgatttgttagttaagcctacttttgggtcagggtgatacgtacattttgggaacatgatagtataattgagtgggagcgctaacataaatatggagtctataacttctataggaatttagaagtgaaacgatgatatccttcgagcttggctaaacagagataaatggtggagatctcatttcacttcgctgaaatatcatttatacggagctaagtgttttaaggataaaatacattgaaggtgtaacggtaacttagtgcctattcaatgtagatcatctattagagggtcattgatcaaattaggattataacaatggataactaatgacgtatctatatcgtggaacatatagagcgttctatatgactgagagtgcaattccaagttctaagtgtggattcaataaggaattaataagttagggaatttacttggtaaattcggttcgacttattggaagctcggttatataggcccatggtccccatactagttgagaccatactgcttgtaagactcagttaattgattttgattaatcaattataattctaaagttagactatgtctactttatgaat

SEQ ID NO: 284231 - DNA, 273 bp, Cannabis indica
aacaacatgataccatccaaataacatacaaaggttcgaaattattcaaggctaaagaagagggtgatttttctctgaaggaaacaagatgtgaagtgttatattttctgaagccttcactatctatttatagatgaaaatatcagaggaaaaaacctacaaaagtggccggccattacaatatggatttgggcctcactttttgcaattttacagttttatcatttctgcatctcattttctcaaaaacgccaattttcaaattcaaccatt

SEQ ID NO: 284232 - DNA, 528 bp, Cannabis indica
aataaataaatattaaagaagttaacaaatttttaaatctgaccataataggaaatatttaaaattggaaacattccaaaatagaaatatttaaaaattggaaaaattccaaattgaaaatatttaaaattggaaacatttcaatttagaaatatttaaaattggaaaaatgaattttgggaaacaatcccatgaaaaaattggatttttggggaaaaaccccaaaaatcgcaattttgggaaactgctgcccaggaggctgcatgcagcagcccaggaggctgccagcagccccttacgcgcgcggaggaggggctcacgccgaggatcttcggcgcctgcagcatgcctgaccgagaaaactcggtcagctgcagggtgcgcacgggcggaggtgcagggtgcacacgggctggatgcacagcccacgcgtgcgattgagcacccatgcatacccgaaattcgatttttccaaaaatcataactttttcgtttttcatcggaatcgagttccgtaaaaacgaaaat

SEQ ID NO: 284233 - DNA, 822 bp, Cannabis indica
ataatttctttgaaataactttatacatatacaattatgagttccatgaaggttgatatagataagtttgatggttcaggtgattatcgtatttggaggaagaagattagggctctattggctcaacacaagctgttgaaggttcttaaagatccggtggaatggtcaagtgatacgaccaaagaccagcaagaagagttgctggaaacagcaaccggattgatcattttcaacctctctgatgctataatcagattggttgacaaggaagatacacccgccaagatttggaacaagttggaagagcaatttcaaaagaaatctttgatcaacaagatttacttgaaagagagaatctttggttttaaaatgagtccatctaaatctctagaacaaaacttggatgagtttttgagattacacattgagttagcaaactcgggggaaaatgaggccttaagtgatgagaatcaagcaattataattctcaattcactaccggaatcctacagggaggttaagacagccattaagtatgggagaactgagatcactcttgaagaagtaatctcagctttgaaatcgaaagatttggaaatgaaggttgaaagaccggggcatactaatggggatgttaacctaagtaggggaaggcctggacaaaagaaaccatggcataataagggtagaagcactagtagaggttcaagcactagtaggggttcacacaagggcagcaatcatcatcacaaagggaggtcaaattcaaagggtcctaaagatccaaatgggtgctaccattgtggaaagttagggcatttc

SEQ ID NO: 284234 - DNA, 763 bp, Cannabis indica
ccaaaccaattcaaaggtggaaaaggtcctgttttgtgtgtggcaaacttggacactatgctaaggattgtaagcatagaaaagactttaagggacccaaagtaaatgctatcgaggaggatatcattgctactcttagtgaggtgaattccgtgcaagggaaagtgaagggatggtggtatgatacatgtgccaccgttcatgtcacatatgacaaatcattgttcaagacctttgaagagtcaaagggtaaccatgagatccaaatgggcaatgaggtcaaatcaaaggtactaggcaaaggtaccattgatgtgtttttcacctccggtaagaaagtcacattggtgaatgtgctttatgtgcccgacatgaatagaaacttgattagtggtgacttacttggaaagcccggcattaaggccgtttatgaatccggtaagctcatacttaccaagtctaatgtatttttgggcaaggggtactcttgtgagggaatggtgaaattgtgcaccaatgatgtaacttttaatgttagcaataataaagcttctagttccacttatatgattgagcatgattctttatttttgtggcatcttagattagctcatattggtttttctactatgaaaagagttaaaaaatgtggcatgattgattgtgatataaggaattatggtaaatgtgaaacttgtgtaaaagcaaagatgattaaaaaaccttttccaaatgttgtgagaaattcaaaattgttagattt

SEQ ID NO: 284235 - DNA, 734 bp, Cannabis indica
tggatgtggtggaatatatgaagccaacttactagtagatcaagaagcaaaaactaaatgaaccacaaattatgggatagaacgaaaggttctagggtgaccatgatagcggtcaaagtgagtataagaaatggcgaccttatcctgagtgttcaagatgcaaaaaggcgccatttgagccaatgtagagccatatctttttttttatggggtagtgggtcatctgaaaagaacctacacgtagttaagaaagacttatgttaaaggagaaaagtgtacgggtcttgcccaagtgctggttatgactcaaggggacagggatatcggtccttcggccgactcaagttagaatttatgggcaatattataattgctattgatattaaacattatacatttagttagagacatcaagaaatctgaatgaactgtgcatgtatgttatttagtggtaacccatttaacagggtagacagattagaaggatgacaatatgagttaaattgttaatattccctagtggaatatagaaaatgagtagttaatggaggcatcgatctaattgattcaaataacaaaatcttttgtttagaagtgatctagcgttaccaaaggtgggacaatttatgagtattgtctggaatcctagatgaattaaaggtgacgattgtgtagtaattttgagattatgtaggagtgggactacctatgttagcaagaagtatctttttttt

SEQ ID NO: 284236 - DNA, 580 bp, Cannabis indica
gcgaggaatcaatgtataaactgacacttagtatattagcgaaaaatcatacatcgctaaatgcaaatagcgaggcaccagagaaagtaatacgtatcaaccgtaaaagtccttagcttgcaataagcaaactaagtgaaaaagacggatcagctcaaagaacaagtaagcgaggtgaccatcttgctatgggaagacttcctatagcttcatccagctaacgggagcgaggcttacaaccccggtgagttagaagaattctttctaaataaccgtgatcgacacaagacatacatcgtcgacctcagaaggaagaatggtcccaactcactattgtgatcactataatcaagtttctgtcgagatatctccagattcaacaattaaagacgtgtttaatacacgatatttttgacccagtaaaagcgggaaaatcatagctatacgattttcaaatcataaactgcatttacactatataatatgtaatcaaattccacaattttagggatggttgcagtaaacatattctggtaaactttgtaattaattgcccactacgtaattataaatagtggca

SEQ ID NO: 284237 - DNA, 621 bp, Cannabis indica
agttatgctcgttggagcttgtccaactgtgaggggtaggcggatttgtcctaggggcgcaactccttgaccggagaaaccatagacgggctgaaggcatggagttaaatccttgagctggagccccatcttctcgtaggcagtcttgaacaaaatatttgaagaagccccattatcaatcatggttctggacaccattttgtttgctatctggacttccacgaccagcgggtcgttgtgcggaaatcttatctggacagcatcttcgtcgttgaatgttatggttggctctcctgctcgtggaactttgggcttcctttcttccacggccaggatgacttcttcttgctcgtactgagctgtgcgggcatatcgttcccgagctttgcccgtgtctccagcgatgtgcgggcctccaatgatgacttgcaagtgtccatctattggcggaggcatcagatcctggttgttctgaccttggttggccttgacatacttctgtaggtgcgggttgttcttcttgatcagaagttctatctcccgcttcaggttgtagcattcgttggtgtcgtggccgtagtctccatggaaccgacaaaattttgtcatgtccctcttgct

SEQ ID NO: 284238 - DNA, 541 bp, Cannabis indica
tttggtgccattttttttctctttttttttttttctaagaaaaattgggcagcacctccccttaaatttcctctatcccaaaaatacaaaattcactcaatcaatgttcctaaccacttaataccacaatacaataataataaaccaatatcatcaatatttttacaccacacacaattatatcactcaaaatctcaaaataattaatcaaattcttgaaagaatgaagaaagtgatacttacaaacccgaaaacgctttactccacctccattgttgaatgttcttgaaagcttgaggttgagggtgacaacaatggtgatttttttggatttgggtattctttggtgtgggttttgatgatatgtgtagattgttgagtgaaattgggtttttgattagattgggtttaagaaatttgagaaaagatgaaaagattgaagattgaagatgaaaaattgaatttttgagaggaaaatagggtagggtcggctgagaggatttgaaatttgaatttggtttgtgtagggttgaatgagggg

SEQ ID NO: 284239 - DNA, 758 bp, Cannabis indica
gggtgttacaatttggtatcagagctgccaggttgtcttctaaagatcgtcacgacatgtacaatcatcgtcagcgatcaactcgtctcacggtttagtaagcctttattgctttagtagtttattttatagtatgtgtttaagaaaggcctaataggaagcattttagtagactgatagctgaataggcgcatggtttaaatttccaaaataagcggtaattagtaagttgttcttgatcgtgatctgaccagactagctcttggttacgtagggtgttctaatagaatggacgccaagcaaaacaccaggagtcagggtaattcggtcggatctagtggtggtaagggagctcagattcccctaaatgtttggggctaaggcagaggccctagaggcagggcacgcgattggggtgatgttaacccgccacaggtttcctaggaatgggaaaataggtttgcggcaatgcaagctagaatcaacgagcaagaggaagaaatcagacacttgaggcagcatggtgctcctaccatgcctactctagaaatgcaagtagctcctatccctactgtacaagcaagccagttgctgcagtgaaccgaatggaaccactgtcgaaaggttttgcaagcaggaacctacagtctttctgggaggtcccgatgtgatgaaagacgaacatagttgacaatatacagaattttgaattcatgagcgtcactggtaaatgatagagtggcctgtgctacattcca

SEQ ID NO: 284240 - DNA, 756 bp, Cannabis indica
aaagggctagggtgaggtggctacagctggtgataagaacacaaaatttttccataaacaggccacccttaggaggaaaactaatactataaaatatcttaaagacaatgagggtcgtgtggttaatactcaagaggaaatagctaacttggttgtttctcacttttctgacctctttagtacccagggttgtagtgtggatgctgctgctgcaatttttgatgttttgggtcctggattggaaaattctgatgttgaatttcttgcccaggattttactgctgatgaagtaaaaaaggctgttttccaattgtctggggataaagcagtgggtttagatggtttcaatgcttatttttatcaaaagaattgggctgttcttggtagtgattttactcatgctattttagattgtcttaataatgatattgatttttctaaaataaattctactcttattgttctgattcctaaaaaacagcatgctaataagctaggtgattttaggcctattagtctttgtactacttttataaagttttatctaagattatatctaatagacttaaaaggattttggataaaatcatttctcctttccaaagtgcttttatttcaggtcgtgtcatttttgataatatattattgctaatgaactagtacatgctattaataataggaaatctggtaaaaaaggatgggctgctttaaacttgacatggctaaggcctttgatagggttgaatgggatttttt

SEQ ID NO: 284241 - DNA, 621 bp, Cannabis indica
ggtgggtacaaaagaaacaacccttagaatcctgttgttgtttcttttgaactggacccttagcagcttcattctcaaatttccttttcttgcccttatccttaggggtagtggccaaatgagcactttcggttttgtcctttttcaacctttcttcctcttgcacacaatgagaaataagctcgttgagagtccatttctccttttgacagttgtaactaattttaaattggttaaactgtggaggaagcgttaacaaaaccatgagtacaagtacatcatctgaaagctcaatcttaagtgtccttaatcttgagacaatatgatgcatttccataatgtactcccttacatttccttgacccttatacttcatgttcattaaagaaccaagaagtgttgtcatttcaaccttatcgtttttagcaaaacgttcctcaatttgttcaaggaaattcttagccatagtaaccccttcggattctgtgccccaaaaggcttctggaatgctgtgtttcataatcattagactcatgcgatttgaacgatcccacctctcaaattcccttttatcatcatgggaactttccttagtgagaggtgcaggttgttcattcctta

SEQ ID NO: 284242 - DNA, 856 bp, Cannabis indica
atcaaagtgtccatccattgtctttctttcaacatgttataaaccccaaaaggcttatgagcaatttatattctcatagaatttcatatctctaccatgatcattataacaaaaataatgagagtggggcttgaagttttcaagagaaataccaaagggcctctttcttttctgaggaagaacatgacttggagagacaacgggtctttttcctttgtccttctttggaaaatctttagggacaggaactcgttctgtagcgacaggatatcagcttcaggttcttcactttcagatccagaattatcaacagaaggttgatctttaggcacaaattcttcacttgaatcggacaagccctctaaatcatgatcctcctcagttccttcttcaagtttagaatttctccttgagatttttagcctttgaagatgaagacaccacctttttcccttcggagacatttttgggcagaccacttcgggcttttgaggagtggataccatagaccttgttcgagaactcacagtgggcaaagtcactatagctttctcgacctttggagcatcattcgaagaagaagactttgacaatgtgtgatcggatgaatgagattcatcatgatcaccaaacccaggtgttggagtagcaatcggagaagaaatgactggaggagaggcgaacaaggcaacactaaaagacacataaggcaccaatcaacacttaagagcaaatatagtgtctaagaaaataatgaaacaaaacaagaaaaataacaagaatttttaacaaagctcaaatgacagaatcggttcaattttttttttatttatttaaaagacagaaaaataaataa

SEQ ID NO: 284243 - DNA, 479 bp, Cannabis indica
aactatttagttacttttgatgtgaataaaatattaactttcactacaacattaagcaccaatagcggtgggcccctcggccgctattggtccaccaagtggccgctaaagggcattagcggcggacctcagccgctattggtccgccgctaatgcttggccgctattaaaggtattagcggccaaaaaaggggtccgccgctaatgcccttcagataaaaaaaaatacatatatatttatatataaataaataattttaaataattaattatttatataaatatttaataaataaaatctaattaatataattataacaatttaataaaatttattaataatttaaaattgtctccaaagtaattaactttaacatattaatcctaataaaatattgtctcaaaattaaactaaattattacaaaacataaataaattattcattaacatcttcattcaggtctctaattatgaagtc

SEQ ID NO: 284244 - DNA, 686 bp, Cannabis indica
tccagtagtgcatattttgcctagtagcaaagtacacacgttcttgggagtccgttaactccgtgtactgggtatattggggagtatacccccttttctgtcgcttttcctccgtccgggtgctgcctttggaggaccttttactcctcgagccctgggaaggaccggctagactggctgtcggagcggagtgcgagggggcttgtccatttatccctgagggatttccaaaatgggacgatgcgggggccagggcctggccttggctatatccgggagtggcagaaaactgtatgccgctcatcggtggagctgctgctggcacagtgcctgagagctgggctccgggcacatatcctgctaccccggtgggataatatcctccataggccactatttgggcctcttcaaggttaatgtatttttggactctcttctggaagtcctgaaggtttgaagctccttcttgttgtagttcgttccagaatggagtccctgtacggatgcctgcttggagaagggcaagctgttgtccgtcatctactttcttggttttagaggcttcctcccagaacctcttgatgaaattcttgagtgtctccgtaggcagctgcttgatgttagtcaaggcgctgacctccagattgactttccttgtagcgcaaactgtctccggaagctggttt

SEQ ID NO: 284245 - DNA, 155 bp, Cannabis indica
ttatctctgttaagccaagctcaaagaaatcatcatttcacttctatgtcattatagaagctatagattctgtatctatgattagcgctgtgtaagtaaacttttatcgctgattatcacgtcagtgtaaatctaatgcactgataaatcatgag

SEQ ID NO: 284246 - DNA, 719 bp, Cannabis indica
agggcactggccacaggacactggagaagagctcagctcttttgcttctgaggctgtcctgagtcctcagctccgcggctagagcggccctggactctaagtttgcttggtgagtttcctctaaggatctcaccttggcaaccatctcgtccaaggcttccctggcctcccggagctcccgcttggcctttgcagtggcctcaccttccgccctcagctcctcttgatgcttggcctccagcctgtctctctgcagggcctcatcccggatcatggccccccgcctgggcttccctccgcttagcctcctcctcattggccttggcagcagcctcccggcgctcagcagcttcctggtaaagcaacctctccgcagtgagatcctgaaggaccttcctgacttcgttcatgtccccaaagtcagacagaacgaagccatggttgattatgttcttggaaaggcggccagcttcagcagcaagctaaacaatgcaagtgtaagaaagaatctccaaaaagaataaggggaaaaataaaatcacgaagcacttaccacagtgagggagtggctgagatcctggacttggaagatggatttcagggaggcgcaagtagcgaaccgcttaggcgcgcaccgggtaagctgagacgcaaactcgccagtcatctctacggcgaagggagccaaggtgggcccaaggaagcgacggaaccagtcc

SEQ ID NO: 284247 - DNA, 526 bp, Cannabis indica
gcaactaaatgtggagaatgtgcacatagtctgtgaatttccagaggtctttccagaagatttaccgggactacctccagatagagaggtggagttcgtcattgaattagccatagggactaatccaatttcaaaggctccatacagaatggcacctaatgagttaaaagagcttaaaatacaactacatgagctcttagacaaagggttcattagaccgagttactcaccttggggtacgccggtactcttcgtcaagaagaaagatggaagtatgaggatgtgggtggactaccgtgagctcaacaaggcggccatcaagaataagtaccctctgctaaggattgacgatctctttgatcaattgcaaggctcggttgtgttctcaaagatagatctaagatctgggtatcactagctgaaggtccggaaggaagacatacccaagacagcattcagaacacgatatggacactataagttcttagtattgtctttcggactaactaactgttgggttttatgc

SEQ ID NO: 284248 - DNA, 548 bp, Cannabis indica
gtattgaaccatttacaccgaaataatgtcactgaatacacaccacaaaaagtgaacatcatcacatcttctagggttccataataattgaacccttctgttcccgccacagagacaccgctattttgagtagtacgcttcttatcacgttcaactaccatgtaaagaacaccattcactacaaccccttcataatatgttactaagtgatctgacccacatgctaaagctagcaactcttcaccattctccaatgatccaagcttgtaaaaatcatatatctaaatgaacaaaattatattagaatgactcataattaatcatgatcattttcaaatcataattgagagtctcatatcaccttcttatgaaaccatcgctggaaatgttttttgtgtaaaaggttatgatctccatactgaagttttatctcttctaagtgttcaatgtaagtcatataacatcattacgttaaatgttaaataagactatgtagaataagagtaaatatagattaataaaggaaaaacttactctaaatatggtct

SEQ ID NO: 284249 - DNA, 555 bp, Cannabis indica
tagtgggatcgtgtgtatgccatatcaacgaaaattgatccctgagttatagggattgagctgatgactcatgatgtgaaagttgaattcgctaagtgttggtttccctgcgcgggtggctgaataccctgctctgggcatgccagcgaggcatcctgctcggcctatcattccagagcagatgttccaagttgacaccacgtgtcaccattcttgtgatgtcacgtcagagtgcaaaaattgggataacatttgccccccaagtctgtacgggacttctgaagttgcgtgtagacttcatccgagctgattctgcctttggatggggacacgtgccgagcgtgaccgttcgagactcgatgtgaagctgactgggtgtcccttcggtttttggctaataaatgctcacacaattaatatttcgaaatctgactttctctttccacggccaacggttgcactcgattacttttgatttcccatattcatttttaaggcgggaagttgaggcgtttgaggtttctttgagacaattacctctcttcgtgacttgcc

SEQ ID NO: 284250 - DNA, 804 bp, Cannabis indica
cattttggaccctctgttttacaaaagttaccaattggaccctgtgttttgttaaatgacaaaatggaccctgtattttctaaaatagtacaaataggaccctgaattgattttttgtcaaaataaagtttaattataatccgatctaaaagtgctatgacaaaactgtttacattttttgtatctgttcgtattaagcattgtcttcaagttggttgtattaaaaaaaaaaagttgtcaaaaattaagctcagggtcctatttttactattttagaaaatacagggtccattttgtcatttaacaaaacacagggtccaatctgtaacttttgcaaaacacagggtccaaaatggtatttacccttatttttatcactttagaaaaatatttataatttaaactttttttaatctttattatgctaatttattaaacttttatatacatgcaaaagtttagaagatattttacatgtttttgaaaaaaattaaaataatttattatgttaaaaataaatttaaatatgtatataatgtatttattatttttttatattcttacaatatttgattattttgaaactatatgtttttcaatattataatttattatttagaattttgtgaaaattagtggaatacttactatacaattataatttctcaaataccaaaaataatttctctaattataacctttctttttggcacataataacataactaatgtttttaatatacaatacattttagttatcatattaactttcttcatatatataaaaaagaaaattaaaaaaaa

SEQ ID NO: 284251 - DNA, 605 bp, Cannabis indica
tgattttgaatacgtgtaggcacacgtgtaaatgtgattcgtgaaggcgtcagtcttgaacttgtggttgacgttcataataatgtggtggtagcatgcaccgtggtgtgcatcagggaacacgatctcaaaagcacgaacaatgctttgatgcctatccaaaaaaaaggctaagttctcaacatcaccaatcgtttctttcaattttctcatgaaataggtcaaggaattgtggttttcactatcaactatagcaaaagctatcggaaagatatggctccttgcatccagtgccgctacacacaacatttgcccaccatacctaatcttcaagaaagacccatcaacgcatacaactggttgacaaaacctaaaccctcgaatacaaggacccagagagaagaaacaatacttgaagcgaccatcttctaccacaaaatccgtgatggtacctggatttctcaactgtagcatgtgcaagtaactaggcaatttcgagtacgaatctttaggtgtaccccgagctaggtgtagtcccttctctctgcacctccatgccttttcataactcatttggatcctgtaatccttgtgcatactttttc

SEQ ID NO: 284252 - DNA, 548 bp, Cannabis indica
ttcggccgtcgcgactggatttggcagtgagaaattctgttttctcaattttgttttggccataacttttgactcgggactccgtttgggatgttctttatatcgttggaaagctcgttccgagctctatttgattatctatgttttgaatgccatgtttatattttgtgaaagtgaaattggggattaaccctatttgtgaaatcccggattgtgtgactaggattaccggcacctgatcaggagcacccaggggtttggaatctctgttattgcgggacaacaggtaagacagtagtttgcacgtagagtatgcgcggtggcgcttatgttgaatatgatatatgtgagtaattgcaaccaggattagggttattaccctaacatgagcggtttaatagcctagggttattaccctagtgatatatgttgtgtaatactatgccatgtcggatatatctatatattggaattatgaattatgcgcttaaggcataattaaactagactcggtaagctagtaccttgagtttaattttaatgcggtc

SEQ ID NO: 284253 - DNA, 626 bp, Cannabis indica
catcggtggagctgctgctggcacagtgcccgagggctgggctccgggcacatatcccgctatcccggtgggataatatcctccataggccactatttgggcctcttcaaggttaatgtatttttggactctcttctggaagtcctgaaggtttgcagctccttcttgttgtagttcgttccagaatggagtccctgtacggatgcctgcttggaggagggcaagctgttgtccgtcatctactttcttggtttttgaggcttcctcccggaacctctttatgtaattctttagtgtctccgtaggcagctgcttgatgttagtcaaggcgctgacctccagattgacttttcttgcggcgacaaactgtctccggaagttggtctgtaacttattccagcagcccacggatcctggctccaatttcttgaaccactcctccgcggacccgcttagagtaagcgggaagcacagacacttagcgtcattgctgactctcatgaccgtcatgacccggttgaaccgtgacaggtgatcacttggatcagagttcccggtataagctgccatttcgggcatcttaaagttcttggggagctctgcttccaggatgtgcttggcacatg

SEQ ID NO: 284254 - DNA, 595 bp, Cannabis indica
atctccgcggcaaagggagccaaggtgggcccaaggaagcgacggaaccagtccgatagggggtccaagttaaggtcccacggatcctggtactccgggttgttgatactcgcctctacctcaacccgcaaaaccctcctaagggcttccacctcggcatacccccgggagtactcgtccatggcatagttatgcttggctatccgaagctcttgcctcacctcatcccccgggaccggagttagcacgatgttgggaggagcaggattttcttccatgggggaaaccccgccgtcaagaccatgggcaggagtgtcggctctccgaggcttcttgggctcgtcctgggcaatcatcttgcccttgcgcttacgaatcagagccacctcaggctcctcttcgccttcttcagcctcctccggaagggcccggagctctcccgcaccctcggcgacttcctcagagaagccccactgctttccttggccttctcccggaagcacctcctcgtcgtccactaaatcaatagtgtcagggggagcgctagaagagaccttcagggaaggggctatgggggaagaggtaaaggccggag

SEQ ID NO: 284255 - DNA, 526 bp, Cannabis indica
aaaagggaaagttttgtcgaaggaggaagaacgaaggttcgttcgttctttcgttaaattgttttctgatataacataatatataacttatataatatatataaactttcatcatcagcgtgaaagttaaaaaaatttaataataataataataataataataatataatattaataaaaactttattattaatagttatcttattattacttagtcactaagaaatctctatttttaggatatttggccaactttgagtaccccaaaataccccgatatttctaaatcaacttatctcaataatctcattaatatttctaactaaaactattgtgacatttttggcctctgatcgggtctctagggtcgccaaacttaaaaatatttttattccacgtataactcatattatatccacgtatttcaaataaatctccgtaattacgcttatatatccacttattgagtctccagggtcgtcgaacttgaaaatatttttattccacatatagctcatattacatt

SEQ ID NO: 284256 - DNA, 846 bp, Cannabis indica
atatataatagtaacttactatattagttggtatataaaattttattatagttggaaatttgtttttttagtaaattaagtagaaaagaaattaaaatgttacttttgattttagttatcttttttgataatggtaaaaaaaaaatatgattctcatatgttaaaacgatcttcttaaaaaataaataatgatagtataatttttaagctcaaataattactagtgagattaaaaaattattttaaacttttttttagaagagaataagaagagagaattcttttttttcttaatattaaaaaaactataaatattttatgtttcatatttaataaataaaaaagagagaacaaaacaaaaaaacaaaaaggaagaactaaacaattagcctatttgcattgatatatgggctgctcgtttttggcatatttatgtatacacatgtttcaaaaaaattaagatggatcggtattattgcttaaataaaaagaaaaaatggtaatttataagattaattattaaatttaggtactgtcagcgtaattttctctattacataagggaattttcatcgtaattgagggtatgtatagtttactttttatgacataaataataacacaatagggttatgggtttttttttatattttttttactatttatattgggcttttttatgtccatattttgtaaaaaaatagaaatcccacatttgtaaaaaaattactggaaaaatcacggccgccggaaaagtcgccggaacgtcaccggaaaagtcaacggaaaaatcaacgtcactggaaaagtcactcgaaaagtcaccaaagtaaatgtctcatatat

SEQ ID NO: 284257 - DNA, 890 bp, Cannabis indica
agccagtatataaagaaccatctgagaagcagcaagagcggatagacaagcgtctttctaagcaaactcctcggcaaatttcaggtaactcgtctttttgctataaactgacgggtaggattgtgattttttacttatctgtcatttatgcttgtagacatgacttttttgaagtctgcccctgtcctgaagatcaaacaaaagggtggaacaccggcgacttcgccggtcgttgcccagaagaggaagagcgatgtgatggcttcgcttgtcgcagactcttccaagaagttggccaagactactcaggataaggggaagaaagtcgtcatcgaccctccagttcgtgctcgcgacttcctggccatgcaggaaaaattcctgactgagatcccttacgaggatctcgttgctcgatctactgaactggccgcgcaatccatggctttgttcataaaagccgcggctactccttcgaaggaagccgactcgctgaagaggcagaacgcccattttcaagaaaatataaagaagctgaagcaggatgtggcgaggatggagaaagagcttgaggagctgaacaaggccaaggagaaggagctcgaggaactcagcagggcgaaagaacaggcggagctcgaggtcaagaagtcgcagacaacgatcgttgagatggctcgcgacttggaggctgagaaagagaatgggaagaaacagtacgatcaggctgtgtctgattatatctataccactctttccaaagtccccgacttcgacttctcgcttcttggagctgaagctgctgagatggctgaggcctttcgcgccatgtcgcctacccagactcaaggtgggggaggcaaccttctggacgaggtcgagggcgtaca

SEQ ID NO: 284258 - DNA, 451 bp, Cannabis indica
ttgcaattttgtcattttgtcatttttccatccaattttttcaaaaacgctaattttccaatttaaccacttaaattccaattccaattatttaataactaaaaaattaattattaaataatattatttaaaaaaaaaaaaaagaggagaggtcgatgtcttagactgaccaccctctgctatatattcagtccctcacttatggcggaggaaaaccgcttaaaacaaattaagggagagtttaaaaagcagaaaactaaaaaaaaaaagcaaaaaaataaaagaagttacagttcataaacaaaattataagaggactatccactctctgctcaaatctagaatagagaggtcttcaaagtgctttgttctgaaaattaaataatattgtcattttcaatgatacctctatagatgactctacattggctaggataaaaattaccgttac

SEQ ID NO: 284259 - DNA, 626 bp, Cannabis indica
tgcaagtcattattggaggtccggacatagctggagatttaggcaaagcccggaagaggtatgcctgaatagtacaacatgagcaagaagaagtagtcctagccgtagaagaaaggaagccaaagatcccacgggcagggagccaccataacatttaatgatgaagatgctgtcaagatcacgtatttcgagaaaagagtggggctccagcttaaagatttaacccctatctccagcccgtgtatggtttctctggccaaggagtcgcacctctagggcaaatttgcctaaccctcactgttgggcaagctctgacgagcataactataatggcacaatttttggtattggacgttccatcaacctttaacatcttgttaggtcgacaagctttgtatgacttaaaggctgttacgtcgatatttcattcatgccttaaagttcccaacaaagaatggggtagtgtgtctaagaggaaaccagcaagttgctcgggaatgttataaccttgccatacccaagtctaaaaaggaagtatcctctagccagagttcgaacaaggggaaaaacatttctaaatagggagcttcccaaggtggggatgaagatgtggatcctcgacttgg

SEQ ID NO: 284260 - DNA, 624 bp, Cannabis indica
ttagttttgatcaccctaatggtggcgactgtataagacttacaaacgtatgaaacaatggtggaagctcatgaaataggaatgaccttgactctcgcctaaacgggacaacgtcggattctcttttcgattgaataaatggttgctagaatatttattattttagatgagctgacaactctattcaatggatgatagctttgactctcgcctaaacgggacactgatatcagtttgttgaaaacctggaaaataatttagaattgtattttttagtattttctctagtcattcctacttgctatgtgctaataatttatgaataagattttgtgttaaaccataattgattccgatttattattttgtagtatcctaaattgccatgtcaaatcccatgttgtcactgttgattgaaaataagctaaatgcatctaacttccctaaattgtgagagaacattaatattgctctcataggtgaaagtgccctgtttgtgttgactgagccgtctcctaaacagctaggtgacaatgcaaccaaagctgttaaagagaagttcgagcgttggcagaatgctaacaacaaagctcgatacttcacgctttctagcatggttgacac

SEQ ID NO: 284261 - DNA, 779 bp, Cannabis indica
cctttggcatccttctcctccttcatcggaagaagaactactcgcagagaagtcctctcatcctgaagactgtttacctcagcagataagatctcgatggtctcctcaaaatggttagcagcctcgagatcctttgtcagcacagagatcttcttctcagcagcgaacaacttcttgttggcctcgcccaactccaaccgaacagctccggcttccgccctggcttcttcagcttccttcttggccaagtccgcctccgccttcaaggtgtcggacagagccgctctcttggaagcaacagacttagcccgggagtaagtgtaggccaacttcagaccggcctgcacagaggaaaaaatttagcttattgagctaagtgtggaaagttaaagggaagtatcaaaaaagacttaccagccagttgctcactgacctcaagaaccagccggttcatttagtgggccagcatctccttgccctttttggcctctagaagcactggaaaaggtggagttggtgcctacacccgttcatgatcactcctgactagttcagacccagccgttggtggtccagactccttggacttggcagacttgggggtagaggggtttgcagcggtcagctcctcagaaagatcaatgacctctccgtaaggtctcttttcctttgaagaggacccctcaccgcccttggacatcttggccagaggagaggcgctagatcttccgcccattctcttcctcagagcatcgatcatctgccgagacatgtctgca

SEQ ID NO: 284262 - DNA, 942 bp, Cannabis indica
agtaacatttttattttttatttttcgaaataatgaaataattctactaatttgtacaaagccaacaaatcaaaacgatcaatacaaaattcaaaagtaaaagacagggggaagacttgagcactaaactttaacagtatccaaaaaatgagcaatacaagcaagcaagtgggctaatccattaaaggaccgcttacaatgagaaagagaaatactagagaaagcggaccaaacatttctaatatccttaataatagcaccaaattcagtggaacatgtttctttactcaatgtaacttgtgttaagaatattttacaaagatttagatttactaacaaatatgttgaattaacatcctaaatatgaattctctaaaattatgaaaaataaacacataagtgtttaagaaaccttacattgggtgcaacggaatataattttgcgacttttttcaaccacttatgcttctttcaataatactatattttccacttcaatcctataaataccaaaactatttatttaataataattattaattatcaaataaaattatcatttatataatttattaaatagaccatacaaagtctcttaataaaaagttgaccccaaaacctcttttcttcacaattaagtcattgcttaatgaaaattcataaataagacatagtctaattttagaattataattgattaattaaaataaattaattacgtccgcaagaagtattatctaaactagtgaggggaccatgggcctatataaccgagcttttaataaattaattacgtcaccaagtaaattttgtaacttattaattccgccatcgagccactatagatttggaattgaatagtactataagttgtatagaatgatgtatatgtaccacaatatggatacgttatgattatccattgttacaatcctaatagtc

SEQ ID NO: 284263 - DNA, 181 bp, Cannabis indica
ttgtaaagtaaagagattctaggtttatttattaattcatagactttcaaagtgaggcccattatccatatcatggccagcaactgtgcaaagtattttaccatttatatttttttacattactttaatgtccatacaattcaaaccaaaccctagaggaatgcgtataaatagatagtga

SEQ ID NO: 284264 - DNA, 589 bp, Cannabis indica
aagaaaaaaatatagaaccatggacatatattgttaataacgaccatgacaaactattcttagtgtgtgttttcctccttgtaattttattttttgagttgattttgacaactattgaatttttattagtgtgattatgagattaattctaaaattttattttttgagttgattttgacaactattgaatttttattagtgtgattatgagattaattctaataatattagtgtgattatgaggggatgtggtacttttatccaattcaaaagaaaatagtcaaacaagctctacaagtttaattaaatctagatgtaaattttaaaattgtaatttttattccatttaaaaaaaatgaaatttgattgaaatcagagtacaactatttttgtcaccattttgtggaaaatcgataggtgaaagatatcttcaaaaaattctttttaccaccgtgcaaagaaaatattttattgcaaatgaacatgtttcatacgtaaaaaatcatgattataatagaataattagcttttttagtccctgtatttatgacactatattatgatgccccttaatttataagtgtagtta

SEQ ID NO: 284265 - DNA, 548 bp, Cannabis indica
tagttttagtcacaacaagtattgtgactaaaaacaaatattagtcacaagaaattgtaatttttgtgactaataccttttgccacggaccttttagtcacaacataggaataaaaatttataattagtcacaactttttcacttttagtcacaagctttgttgtgactaaaagtaagaatttttgtagtgtataatttgagatataatttagttacctcccaaatttagttgtaaacatcttagttatattatagtaaaactaaaaatatgggaaaattccataaagatataaaattatagaaaataactaatatatttcatccacgtttataaacctaaattcaaaattaccatattcttttgggacaatatatatccatgggcctaaattcaaatggtcacccgtataacaggaatctggtaatggaacctcaagtggaaatgtaattgcccggcccatattaaatacctgattgaaaattgaaagggattatttaacaaatacacaaaaacaacaaaaatcttacaaaaatatgatttcacgaa

SEQ ID NO: 284266 - DNA, 850 bp, Cannabis indica
taccttaacttgaatcttctttgattcaggtagcaacactacaattccagcaacaaattccttcccttgctggttctttggggtgcacgaaggagagaggaagagagaggtgcaacttgagacttctagactaattcttttcactaatccctttactcctcaaataaaaattaataataccatgataaaaagccagccatatatcccactagaagccaaaataagggtttaggaaaagaaaagacctaattacccctttaacaaaatagattagttaccaccactcaagggctaaatggtcatttctaaacccgctaattcaacacttaacaaaacaccccgaacaaataacatacatcaaaatatatacaatatgactctctaaaggcccaacgtcgctgtccacagcttccgaacacaatcacagaaaatgagaaattacataaatagcataataaatatatatgaactcaaataaattcccataatcatattattattaataataataaaatctcatacataaaccctaattatttaataattcaaagtattagtcatatgcggtctttacatataatttgttaccatataaaaattattctaatattctcctactttgttagtatttaaattaatttaccacttaaaacccaacgattatccttgctatataacaaacatatgaattatggtgatatgttcttattatatggcgagtatcatcctccatgtattacaatatattaattatataataatatactttatgtgacaatgtacttaagcgaacaaacactaaaccttatgtttattctagttctcttacgataattttctcagatgaaat

SEQ ID NO: 284267 - DNA, 477 bp, Cannabis indica
taaaaataggaagaactagggttcccaatttttccccaaccggcagaccggttctacaaccgaaattccggttctggaaaattcctggaagccccaactggtagaccggttgctaaaggcttccctgaaccggaattccagttcagtgcaggaaacttcaaaatttcatttctcactcaaatcaaccccaaacttcatgcaaccttccagacctgttctaaataccccaagtaacataacccaagcaatgaaaccaagcttcaaacacagaaacacatttcaccattagaggttcaagattgagttcaaaaactcaaaacttgactaaccccccaaacagccactaaatcatgcataattcaacctatttcaacataatttaaccacagaaaacaccactcaacaataacaacaactaaagcaacgaaaaatcatcatattaccttgaaaaccatagttttgagttaaaattccata

SEQ ID NO: 284268 - DNA, 593 bp, Cannabis indica
cgtatgaaaaatgcaaagcatggtagaaaaataaaagtatgcagcattgaggagagactaaggaaatatatccatgatatccaacaattcaacatgcaaaggcaacatataaaattaggcagcaacataaaaggaatgagcggaaaatatcatcatcgagcagaacactaggccacagaaaactcttaaatctctcaatgtcaaactaacaaacacataaatgacatggcatacaagttttaaaacacaaaagacaacacacaattagcacaatacaaactaaaaacgacacataacagaaaaatattaaatagcttaggtattaggaaactccctctactcggagtcctcgtggggctcctccggattcgaagctgatgacccagcccacgggtcgagaacttgctgagggaacggcggaaacttgggctcaaatcgtggcgtcaccatcttgaatgttaggcatttttctttctttttttttttttttttaatttgcacactaccccaacacaacaaattccctctctttttgtcttctttacaactgtccagcaccacacccctaattccaacaatacactactctagca

SEQ ID NO: 284269 - DNA, 545 bp, Cannabis indica
aacaacataatctacaaacacagccatataaataacataataaatacaaataaatagtctgaaaatagttgcaaatttctgaaaaataaaacataacaagagacataacaataacatagaattacaagagcactacctaaaacggacttacaacaaaataaaccacacaaagtaactaaaacctagttacattgtctacttatctaccttctcctcactatcagtggcatcatcatcactgccattatcatttttttcttttgagtcagaatcttcatcggcttgaccatccttctcttcaccttcactaccctccccttcgtcatcacccataacattctcttcttcattttcatcagtttcttcagattcatttaaatcaaaatctgcttcatcaccacctccatcatcatcattggaagagtcactgcctttttcctatattgaaattacaaattaaattagtataaaacaacttaaaaaaaaccgaaaaacaactattgaaaaactaaaataccttggcataggaatcggcaaaaacagta

SEQ ID NO: 284270 - DNA, 1083 bp, Cannabis indica
aataagagttataggttaacatggacatagtgtggtataagttaactttttagaaactaagattaaaagtcgtcatgtctaaatgtaagttcatgtgatttatttactatatctactaataagcaaagtttagaaagaaaaaataaaataataattaaccaaaatttatgaaagaaaaaaaaaagaagaataacaacacaaataatgattaatatcatatgtatactcgtatagttttttacataataactattatgtatttactaataaacaaataaaaaagggtaataaaattgaaaaaagatgataaaaaatgttaaaaagacttaaaaaaatattttaaaaggaaaatggagtaactggtacaaaaacataacacacaacttcaaatatgaaccaaaaaaaatataaattactatgataatcttatttagtttgaagaaaataacaaaaaaagaatgactatggaacttaaatagtgtgtaattagtaacaaaaaaaacttaaaaagttatgtataattaaaaaaaaaagttaaaattataatgaaagtgattaaggatatgtacatattaagagtgtctctaatagagagctaaaaatgtcatgtatatagattttgggtaaaagtttacaatttactgttacacggaattttttacaaaaatactgtctttttataaaacgaccgtaaaacgacaaaacaaaataattaaaataacaatagaacaactaaaaaacaatcgtaaaactatagtgaaaatttaatacaatacacagtgtaaaacttacctacaattaaaaaaaaaaaaatcaaaatttcagtactcctgtgattatgaaagtgaaaataataaaaactttgcttaattggagggcgcctacaattacagagaattactaataattctaattttaaacataatttgtttgatattatttttcagtattttatattagggtgctagtacgttgttactagccaaaggataatacctttggctagttattcttagaaattttgttatttttttacttttttagtattgctgagagctagagttatgaagtgtgtgttaattt

SEQ ID NO: 284271 - DNA, 640 bp, Cannabis indica
attttgagatgaaagatcttggtgaggcttcatatgtacttgggatacagatccttcgggatagaactaaaggtattcttcggttgtctcagagaacttacattgatcggattttgaaaagattcaatatgcatacttgttcacctggaaaggcgccaatagtgaaaggtgataaattctcaaagggccaatgtccacaaaatgacaaagagagagatgaaatgaaagtggttccttatgcgtcagttgtgggtagcctgatgtacgctcaagtatgcacacgtcctgacattgcttttgttgttggcgtgttgggtagatacttgagtgatcctggacttagccattggaaagcggctaagaaggtcatgcggtatcttcagggtaccaagaatcatgtgttgacctatcggcgagctgacactcttgatatagttgggtttagtgacgccgattatgcaggatgcgtggatgataagaaatctacatcaggctacatttttatgatggctggaggagctatttcgtggaaaagtgtcaaacagacactcacagcatcctcaacaatggaggcagagtatatggcgtgttatgaggctacatgtcaagcaatatggctgcggaacttcatttcagcatt

SEQ ID NO: 284272 - DNA, 346 bp, Cannabis indica
ggtttaccatttattttttcattattttattgccatacaattctaacctaaaacctagatggcattctataaatagaaagtattggcttcaggaaactatgacttgcacattgtttctttcagagaaaaacctagccttctattctattgattgccgcccctctcttcttcttcttcttctcttgaatttcgaaccttgagtgatagagtagtgcccacacaaacaaaggggaacctcaatcatagtgtgtaagactgtaaagaatccaaacaacaagaaggagaatcaacatcaaaggaaggagagaaagagatccaaattgagatcttgataatgctctgctac

SEQ ID NO: 284273 - DNA, 515 bp, Cannabis indica
aaggttactaaatttaaaaaaaaaactgaaaagaaatggaaaataaaaggaaaaagaagaaaaaaagaaagggaaatgatggatggttgattgattgatagtggtcacacacatgtttgatgcatgggaagagtgtgcatgtggtaaaatagtaataaaataaagatgaaggatataaatgtttagtttaccgtgtagtggtatttaggtaataaagttatcattttatatttttgatgtaaaaatttctaattattttgaccattttatttttcaattaatttaaatatggtaaattggtaatattatttaagttaaataaagtgccaaaaataaaagggtctaacaacttaagttaatttctcaagtcaatttgatgaatcgtagtctaaagaagttcccgagagcctaaatcttagttttcgtgtgctcaagatgacattatgtcaacctgggtgttgatgcttacttgggcacctcccaagtagtgttttgtccagacttggtttcggagc

SEQ ID NO: 284274 - DNA, 755 bp, Cannabis indica
tagtggtgatcgacacttcctcccatacaacatttcatagggtgccatccctattgtagattgatagctattgttgtacgagaactccattagtggcaaatagttactccagttacttgggaaatccaacgcacaagctcgtagcatgtcttctagtatttgaatagttcgttccgattgtccatcagtttgaggatggaatgctgtactcaacttcagttttgtgcccaaagcactttgcacactttcccaaaacttagaggtaaaaactgaacctctatcagatacaatggtctttgggactccgtgtagccttacaatttcttttacatacagttcagcatattgctctgcattgtaattagtgcgcacaggcagaaaatgtgctgatttagtgagtctgtcgataatcacccagatagaatcctgttgtttgctgttcttcggtaaccctgtcacaaaatccatagcaatatcttcccatttccactcaggaatatcaagagattgcaacagccctgcaggtctctggtgttcggccttaacttgctggcaggtaagacattttgctacaaattctgctatatcatttttcatacccggccaccaatacctacctttcagatcattgtacattttggttgatcctgggtgtaaagaatagggtgtagtgtgcgcctcttgtaagatttttgattgcaactccgctttcttaggtacacacacccttgccttgtatagtagaataccctctt

SEQ ID NO: 284275 - DNA, 598 bp, Cannabis indica
ctacatgttccaaatatagatacactatgaattatccatcgtttcaatccaaatagtcaaagatcctctatagattatttacattgagtagagacaaatttaccgttctacccctcaatgtattttatccataaaacacttagctttctataaataatatttcagtaaactaatataattactgaaataagagctcttccatttatgtttgttaagccaagctcaaaggaaattatcatttcacttctatataaatataaaagctatagattccatatctatgattagcgctcccactcaattgcactaccatattctcaagatgtaagtattggatcgatccattgcttagctctaacaaacaagtcaaggaatacaaataatatagttaagtcatagcctaaccatctcaggattaagatctattaatctaagatcaactaagtgatattgacttagaaagatataacgataagtttatgatatcttttctactatcaatatcggtccagtccgatgtttattccatacatctgatgctagtatactttactaatgccttggaaaggacattccacttatataagtgtaagtaaac

SEQ ID NO: 284276 - DNA, 503 bp, Cannabis indica
cactcacaatcgtatcaatcaaatcaacaaagtaacaattatcacttgccttcgggtaagttatcgcctttaacacattaaaaaccacttcttctccttggactctgagctttagttcacccttctgaacatcaatcaaagcttggccagttgccaagaatggtctcccaagtatgattgggacattactatcttcctccatatccagacaataaagtcagctggaaagatgaacttgtcaactttgactaacacatcctcaatgactcctctaggatgagctagtgatcggtccgccaattgtagagttaccgtggttggattttcttctcccaactgcaatcttctaaaaacagacagaggcatcaaattaatgctggctcccaagtcacaaagtgcatttattccttcaattctcccaatggtacaaggaatagtgaaactccccggatctctgagtttggagggagtttcttttgcagaatagcgctgcactcttcagt

SEQ ID NO: 284277 - DNA, 652 bp, Cannabis indica
gaagggtacactaaaaagaaactcgaagatgccaaaggaaactggccagaagaactcccggaagttctatggtcataccgtacaacagaaaaaacagcaacaggtcagacaccatttgcaatggcatacgtttatgaagctatgctgcccgtcgaactcgagccaccttccccagaagattgacgtacgatcatggtaccaatcacatactccttacagaatcacttgatgaaatcgaagaaaaacgagcaactacaaacttaaagttaatagctcatcaacaaaaagtagctcagtatttcaacaaacaagtgaaggctcagaaattcttcgtgggagatatggtcttacgaagggtattcctaaacaccaaagatagcacgtcaggtgtactagggcctaactgggaaggaccataccaagtggtcgaagttctcgactccggagcatacaaattaggtaagtatgacgaaaaaatgcaactcgttctagtaccacgatactggaatggagaacatttaaggaaatactaccaataaagtaccaggtcgggtagaccactttaagtgcacaaggtcggcatgaccacttaaaagtactcaggtcgggttgaccattaaaaagtactaatgaacattcgcttctaagtgaa

SEQ ID NO: 284278 - DNA, 817 bp, Cannabis indica
ctcttgctctatttctctaatatttttcaaattttaaacatacccctgtcgcttgttttaatttaacctcaatactttttgtttaggttatcaatttaaccttatttatgttgcaagtttttatttatttttatgcttttcccatattttcaatactggaagccttgggttgaagctggttactgagaagaagagtcaaatttgataaatagtacttaagagtgaattagaatgatgcaaactagtttgtttatatttgtggtgaatgttaattattatgtgggaggactttgtttaaatgagggatacattgtgttggctattttcaaagaatttttattttaagtaatgctctgtgcaggaagacgccgttaaagttcttcgtggatggtggatttttgaactcgtggttgcaagaaggctgaggcttggtgttagatgggcaaaagagatttagaccttttcttttttatctttgcatttttcatagaaatgtatatttgtaattgctttgaaatatgtaattacatttagttaattaaaattattattattatatttaattttatttgtataattaatataaaatattatttataatatataaaatttaaattaaattaaattaaatattattttttttagtaaaaatatttaatacagtgatactttttgtgtgtcactatatctccaaaaatattaataaaaaagaaaaaaaaaaaaagaatatagtgacacttcatgcgtgtggttgttacatttttagtctgacaaaacctgacactatacgcctatagtgacacgcagaaaatgaatg

SEQ ID NO: 284279 - DNA, 278 bp, Cannabis indica
ttttctcttgtcattcctacttgctatgtgctaataaattttgaataagattttgtgttaaaccataattgatttctatttattattttgtagtatcctgtattggcatgtcaaatcccatgttatcactgttgactttgctctcataggtgaaagtgccctgtttgtgttaactgagccgtctcctgaacagccgggtgacaatgcaactaaagctgttaaagagaagttcgagcattggcagaatgctaacaacaaagctcgatacttcatgcttt

SEQ ID NO: 284280 - DNA, 611 bp, Cannabis indica
gtatgtatgtgttatgtgatgccatgctataaatgttaattgtttatgtaaatatgtatgaggtaaatagatgagttagggtttaaggcaataagtgcgtaagtgtggtatcggtgcttaactcgctgggttgttgattacaggggtactagtaatggaccctccgcaatcatccagaccacagggcgagcaagtagagcccggggctacccgaaccgatccaccagcaccgcctccacctccgcaaaatccgggggataatgcggaggctgttaatgctaatcctcctgctgactggcagcagatgtttcatgaaatgcggagtgtcatacttcgtcaagaagaagagttgcaacgtttgaggcaacaagctgtcccagctaatcaagggttaccaccagctcctgtgccagtggtgggtaaccaagggtatgttatgccgcaccgggactctgtgttcgagcggtttgtgaagctgcaacctccagtttttctgggaggtattgacattattaaggccgatcagtggatgagcactgttacccgtatcctcgataatatgggggtgacgggaactgagagggtaaattgtgcggcctttatgtttcaag

SEQ ID NO: 284281 - DNA, 548 bp, Cannabis indica
aaagtacccatttcctcgtaagtgatacgcccaggaaaatgctcagccaaggggagaatgagttctggagccatctacaaatacaaacagaaagattataaatcgcatatatagaaatcgcacagaaatcgcataacagccactgaataacatactatatcgcacaaactcgcacacaaatcgcacattaatcgcactaccagaaataatttaattctgtttcctggctagcaacatttttgaatataaatcgcacacaatcgcacaagacatcgacaaaaatcgcacaaatagaacaattgcagacacagtagtcataaatcgcacaaactcgcacaagacatcgagaaaaatcgcacaaattcaacaattgcagatacagtagtcatttatcgcacataatcgcacaaaaatcgcacacacaatcccacaacgaaatagaccttaaattgtatcactcatcgcacacatatcgcatacacatcgcacaatgtcgcacaaaatcaaaaaacccccaaaatctatctccctaaactcagtttcttccc

SEQ ID NO: 284282 - DNA, 665 bp, Cannabis indica
attttctaattataatatattttagttcatttattttaattactaatttaataaaaaaaattattgatttaagttggtccaaaattaattaaaaaataattaattttcaactttaatctatttttcaaaaattcaaaattttctacatttaaataaaaaatgcaatttcgaattctgtaaaaaaaatgattaataaaataaaaataaaatatattttgaaaattattcaaatttaagttgttctgaaattaaaattttcaacttaaaataattttctatttaattaaatattctgaaaataataatatttaagcatcaagaattaaaataataatattctgaggccagttgttaaaatatattttaccaggatctagatttactacgatgtatgttgtttaacatcctaaaatatgaatttctaaaaacaatgaaataaacacatataaaagtttaagaaaaccttacattgggtgcagcggaatataatgactccttccgttcaaaatctctagcccttgattcctttctgtagcagagcattatcaagatctgaaacctggatctctttctctccttcttgaacccgattctccttcttgtttatttggtattcttctacagtcttacacactatgattgagatacacttgatgtgtgtgggc

SEQ ID NO: 284283 - DNA, 803 bp, Cannabis indica
ctaactgttaatgtcattgtggtggtgtgaacaggtggtgctctggcaagtgtgacttcaggacttcaatcccatataacaccatcagctgcatgtgatttcaggatttttattgtaaatttttaatttaatttattattgattcataaagagaatgcagagacacaagaagtaacatactatattattaatgtattttaatcttatacaatttaatctatttaataatataagaaatcgctaactaattacaatgcggtaaatctattttaaagtgacaaactttaatactagtgaatattacatacttttatcattttgttttgtattctctttaataaacattaaaaaaaatgaagaaaaaaatcagttaattattttattatattaaatatattcttgtcttttttcaataaaaaataaataacgtatttctttctatttaaaaaaaataagtgtatagtactagtaattaaaaataatatatatgttttcttcaaagaaaaaagaaagcatcttcgataaacccacaaattgccaatttccactatatttctaaattctaagtaacagaaaaaaaaaatgaaaagagaaaaaactagcagtgaaagagtgtcaaagtttcttttctttttttttaaaattaaattgcctctttaaattatattttttggagttacatcaatctcatgaccccctactctctatatctctatataaccacttgaaggtgttaaaaagagaaattctctatcataaaaaaccgcatatgataagagaaaagaagaaattatctttctttg

SEQ ID NO: 284284 - DNA, 464 bp, Cannabis indica
attatattaaatatattcttgtcttttttcaataaaaaataaataacgtgtttctttctatttaaaaaaaaagtgcatagtactagtaattaaaaataatatatatattttcaaaaaaaaaaataatatatatgttttcttcaaagaaaaaagaaagcaatcttcaataaacccacaaattgccaatttccactatattctaagtaacagaagaaaaaaaaatgaaaagagaaaactgcagtgaaaagtgtcaaaagtttcttttcttttcttttttttttttttaaaatttaaattgcctctttaaaatttatattttttttctctatcataaaaaaccgcatatgataagagaaaagaagaaattatctttctttggaatcaaatttaaggtggtgtttgattaagaggaatgaaaatataaaaatagaaatggaattagaaattagaataggaatgaaata

SEQ ID NO: 284285 - DNA, 652 bp, Cannabis indica
atgcacacggctgtccaaagagcccagggtgatctagaaaatgtgcaacaacaactacaacaagatccgcttgatattgagatgattgatagagaattggctgcgagaactaagctaatccgagtgcagcaagactattcaacatttctgcaacagaaggctaaggtcacttggatccaaaatggagatttgaatactgcaattttccatgcaagtatcaagcaaagagcaagacataatcagattttctccattgaaaaccagctgggttctaggatcattgaccccaatctgatctcaacagcatttgttgattactataaggagttgctgggaacaagcatggctaacagaaggcctgtcctcaagaagatagttagcaggggtgcagttttgtctacacaacaagctgaagatctgatgttgaattttactaaagatgaagttaaagctgctctctttgacattccaggaaacaaggcccctggtccagatggttctcgagctttttcttccaagattgctgggagatagtggagatgacatatttcaggcagtgacttcttttctggaatcaggtaatcttcttaaagagatcaatgctacaatcttgacattagtccccaaaatgaaatgtcctaacacagttaaa

SEQ ID NO: 284286 - DNA, 1050 bp, Cannabis indica
gattctactgttctaccttgcgtaatcacaatagcataataggtacagtgtccatcaatgtgggccacgctgatgttagtgatgcaagttggtggcccaagctagagactattcagagtaattatttgtaacacatgtattaatatttagttaacatacgaataattggattttattaaattgtaatgacgttaatttcatttttgacatttcatttaaaaaaatacaaaaacaacattagtaaagtgtttttttttttgagataaaatggtgacattttattagcaaattgaatcaaccattacaatgtttaaaagatcatccggagcagtactctcggtgaacatacgaactgagtgaaaacaagaactgcgagccatataatgggcagccttgttagcagaacgtttaacaaactgaatctgaacagattttaaagaaacaagcaactctttgcactcttgaatcaccacgccaaagggagagcgtagaggaaccgaagaatgtaaagcttgaacagccacaagacagtctgtttcaagctgtacatcatgccactgcttgtctttgatccagctaagagcctccttgatgccaatcgcctccaccactgcagcatctaaatagcccggttcactacaagaacgagcttcaataagatggccatgacaattgcgagccaccaacccagtcccaaaccaaccttctgcctcaaagatagctccgtctacgttgaccttaatcttatcagtaaccggtttagaccaatgctcacttccttcattttcacccgaagccaaaaataaaggacccttctttctcaattgagcatttttccattgattaaggttgactctagcagacagaatgacatccgaagctgaagtgctcttgcctttccaagtgaacgcattacgtgcattccaaatggcccaacaaatcatgaccgcttcctctcttatttcggtactagagggcaagacagatgactcaaaccaatttgagaacttaccccccaacaagacattcgcacttaaggatgatctatgc

SEQ ID NO: 284287 - DNA, 842 bp, Cannabis indica
ggcgtgaggaagagaactgtgcatggaattccgaagagaaggttttccatgaactaaactttcctggagccaacttgaaataccattgctgggcggcctctgacagagttacggggaagattctgcaacatacgtctcctcgcaccccttgtagatccatttgcatctcgaaatacttgatatgagatagaggatcttctctcctagtgttcatcttccacgttggcatcttgaatttgtgaggtagtggcaggaggttgatttccgatgagaagggagtttcgcgtgcacggtctaactcaagatcattgttacgctgccaggccatgccatgaaacatattctttagttcgtcaagctaggcctgcacggctgggctgacttcattggcattctggtcgggttgggctacgtcagcgtctttctgagcggggaattaagtatgggccttggactgcacattcgtcgtagtattctgcttgtttgttccccttcttctgtttaggtcgtcccttaggtcacggggtgttcccaacctttcgaacacagaagaacctgactgccttagcgattggttggcttggttggcaggtggaatggctccattattttgcgtggatccatcgagcatgactcctcctgatgaattcccggacaaggtctgtcctcctacctcttggcccacgagtggaattcgtgaccggggattggacggctgaccgttgtttgtccgggaagcattcactgttgggtcatcctcgatttctccaaggggaatgacgatcggcgcctgctggcctacagtctatggctcttcgtatcagcacagtagcttgccgact

SEQ ID NO: 284288 - DNA, 583 bp, Cannabis indica
ttttaaaatattcgtgctccaatactccaactcgtagaaaatactttttttcctccaattacaagtttctgcaactcttctacgtttcacgcccccaaaattttcatgatgtccgggaatttggggttcgagagcattaacttgtgataatatctcttcacaagtaaatcgtcttggaggaggtcttctttcaactttaccatcaaatcgagtatcccttctcattgcatggttacttggcaagaaccttcgatgaccaacatatgatgtcttcccgatcactcgaatggacgtcgtgtcttcattacaagtagggcaagctttataaccttgaccactccacccagacaagctactacgagcaggaaaatcattcactgtccacaaaagcgcagcacgcatggtgaacatcgagttggtcgaactatctctcgttggtaccccattattccacaactcctttaattcatccaccaaaggtcttaaaaatatatccatgtctttacctggagattttgcaccaggaattagggtagatagcaaaaaataattatctttcatacataaccaaggtggtagatta

SEQ ID NO: 284289 - DNA, 744 bp, Cannabis indica
taaggtccagtccaatgtatactccatacattcgaaactagtatactttaccaatgtcctggaaagaacataacacttactccaagtgtaagtacacatcatcgctgattatcacattagtgtaaatccaaaacactgatgaaacagggacttagtcttttgattcatattatcacaatcacattccactgtgttgacgatactgtaattgtgaataaacatatgatctggacttaactgattttgtgtgtaaatgtaataaacatattaaaccattagcatgtaaaattcatgcaaacataaatcacttcaaatttcttatattgataactaatcagattgtaaagggttttatttagggcacaaaacccaacattacttccatacactgcagtaacataacaactatctttgtccccaatctttctaattttgtaatgaacgaactgaacatcttccacaagaatctcaacattcacatagctagctttccattataacatgattctataagaaataatagggctggagtagaaattccagctcctaaagttattttccatcacatctaacaccctatcatgatttattttggtttcaaaagagccaagaaccaaccttgtttattttacagacctctagaagcacttactgcttctcctcttattaaaccccctaatgttccatcccattaaaactaacactgtccattaactggctaagttttagttgtttccccaaatc

SEQ ID NO: 284290 - DNA, 701 bp, Cannabis indica
gcggacgattagggtgtcaacactcacaataacccgcctaccgcgccgatcgcgaccactgggatcaccgtcccagcaaatctcgccgcagtagttgcgactcccgcagtcgcagcagccccgactcctatgattggagggattgaccaaagtatgcttctgcaagctttgaaaatgctcgagcagcaacgaaagcccatatacaagttgcatggtacctcgcccttcactacagaagtgcgacaacccaacttcccaagggatttcatctatccgaatccctaaagtataaaggtacttctaaccctatagattatcttgaaaaattcaatactataatggaggtggatcaggtaccacaacttgcaaaatgccgcattcttgcggcaacactcgaggagaacgcccacgattggtttacccaattgcctgaggcatcaatatcgacatgggaaaccttcgtcgacttattcctcacacatttccaggctacgatgacctataggccgccttatacgactttggccaacatcaagcaagaacccggtgagtctttacaagactattttaaacggtttaatgcagaggtaacaaaagtcgagaaggctcccgagtcttcgcttattgtatgctgataacaggtattttggccgaggaccgacttctggaaggagttacaagcttgaaggccagaatcctta

SEQ ID NO: 284291 - DNA, 594 bp, Cannabis indica
aaataaatattcagtaattagtttaacttgtgtaatttaaaactaatatttgttaaacatacaaaacaatagtggaacaacccaaaaacaacattaaaaaaccatgacaaccccaatattaatggttttaatgtttttgcttcatctaaacgaatttaatggttgttttctgcctgttctggtgttgttgtagtagttttgtctgcgggtgtggaaaaagaagatctcgtttttatttttgatgtttacagtataaaagaaaaaaaaagtctcaaggcagtataaaagttatttttgccgtgtagcagtatttttgtaaagagtaagtcaaaatccagtatttgtaagttttctttttttttttcttatctttttctttagatccaaagagcaattaaagatatttataaccataattaaaaatattttttagttaaaaacataattattaataagttgtcagatccaaagaacaatttgtctgactcaaccatgtgttcttttaaatccatttaacaaggcaaagatctgagttgttccctgtttttcactcaaaactttagcataattaataataattataatcacatatag

SEQ ID NO: 284292 - DNA, 456 bp, Cannabis indica
gttcggcgattcttgttcaggttctaatttttggtcccaagtctaagtttgggttcgggtttggttcatcgtctgggttctgctcctagtctgagtcccagatctaaacattgactactggtctattccaggacccgttttccgaatcccgagtctagatctagatcactgtcacgggtctcagtgttgttctagttcaggtcccaggtcccgtttttgagtttgggtttaggtttgagaatggggtgcggttctaggtcccgaccctggttctgtctacctagtttgattccacgtttgggtttaagttcaggttcaggttcgggtgctgagtccaggtttgggttgggatccgggtccagctcccgattagggtctacttttgatttggagtccaggtcctggtctggttacggtttgggatttaggtccaatttcagttatgattcaaagtcc

SEQ ID NO: 284293 - DNA, 568 bp, Cannabis indica
gattttattcatgatgtcaattctttgcttgagtctaccccactaatggactgaaaaatggaaagccaaaattgaaccatgtattccattagagcatgttgagtcaactcctgaaccaccaaagttagatcttaaacctttgcccgacactttgaaatatgcatttctaggagagtctaacacttatcccgttatcattgcatctgatttagatgaaaaacaagaaacaaagttgttagatatccttagaaaacataaaaaggccataggttggaccatgggagacattaagggaattagcccagctgtgtgcatgcatagaattcatttagaagaaaatgctaagccctcccgagaaagtcaaagaagattaaatccaaacatgaaagaggtagtaagagatgatgtaattaaaatgttagatgtagggatcatttaccctatttctgacagtccatgggttagtcctgttcaagttgttccaaaaaagtctgggatcactgttgttaaaaatgaacaaaatgagttaatccctactagagtccaaactgggtggagagtgtgtata

SEQ ID NO: 284294 - DNA, 487 bp, Cannabis indica
ttatttcaagaaagtggattagatcagtaataattagaattgaagatagagaattaaacgctgatctcgtggagttaccattggccgaattcgatattatacttggtatggactttttgtccaaatactctgctagtattgattgtaaacggaaaatggtgacttttgaaccggaaaatgaggaaccttttgtttttgttggttcggttcaaggttctcgtgtccctagaatctcagcactgaaagctagggatttattacgaaatggatgtgttggatttctagcagtggtagtagattccagtaaacctgtgttacttgggcctgaagaagttaaagtggttaaggaattcttggatgtgtttccagaggaattgcctggattaccacctcagcgggaaatagattttattattgatttaattcctggagcagaacctgtttcaaaggcaccctaccgaatggcacctgctgaattacaagaact

SEQ ID NO: 284295 - DNA, 525 bp, Cannabis indica
tggcatccccattgcagaagagtaacacatcatctgcaaatgcaagatgatttagtgatatggctgcacatctgtcatgatagtggaagtcttctttgtctcctattctcctcattattcgagtaaggtattccattcccaacacgaataaaagaggagacattggatccccctgcctaaggcctctttttgactcaaaatatccatgcaaagtaccattaaacatcagagaaaactgaggagttctcacacaattcatgaccagattaatgaacttagatggaaataagagaccctgcaacatttcctcaatgaaatcccattctatagtgtcatatgccttctgcagatctaacttgataatacaagaaggcttattattcttcctcccatagtgtctcagcaaatcctggcaaatcattatattatgtcctatgaatctccctttaatgaaacctccttgattcaaggagactaaattagggagaatgagtttgattctagagcacaaaagctttgttgcaa

SEQ ID NO: 284296 - DNA, 495 bp, Cannabis indica
agaggactgtgtgggttgtaagagatgtgaatccgcctgcccgacggatttcttgagtgttcgagtttatttgtggcatgaaacaactcgaagcatgggtctagcttattaatacgttcaaaaaagccctactggcttgaatacaatcttttttttttttttttactttttactttacgtacgaaaacccgaaaacccggcgtcctaaaactaaaaaattaaataatttttttttagttttttttaggaaacggggtttttaaccgggttttttacgttacgttacttttttacttttttcggttccggtaaccgtaaggttagttactttcgtttttttaccgtttttaacctagtaagttaaattttttaccttttttccggttttaacgggttaaacgtaaatttaagtttaggttttttaccgtttttaacctaaattttagtttcggggttccccgggtttaaccctttttaactttttttccttttttc

SEQ ID NO: 284297 - DNA, 519 bp, Cannabis indica
aaatgaaatgtaaaatgaaaatgcatgaaaccttatttaaagggaatagcttccaaggcaagaaactaagtttcttcttcttctccctttcgtgtgaaccaagaccagccagcaagaggattgaaagctcaccatttcacttgaattgaagcagcttgtagaacctaagtccaacctagaaacaatcaaggtaagttctcaacaatttttggattgaaaatcctagttttgagttagttttgaagtagggttttacttctttgttactgtaggacttaaactaggtttggggtgtgtttagggtaggtttttgagcatgatgggaatggttttaagtggtctccatggctgcttgaattggttttggtttgttgaaaccaaagttgagttttcttcactttgaagtgtgatttctgaacatattgttgatttctagtgttttccactcaggtcggcccgtactcttgatttctgaaccaaggtaagaaaagcggtaagcaccgtatgtggttaaagatt

SEQ ID NO: 284298 - DNA, 593 bp, Cannabis indica
gagccagagcctcctcgttcaaaaactgcttctgcagcaaaggcctctgctgctgccaaaggcaagcagcccatggaagatcctccatctggtaatatcccttcctctatctctggctgtccaactttttactatcgagacaatgagcgtgactggaatctttatgcaactcgtaagtttgaaagtgagaggaattatgatttgcatgcccatcgtgtttatggtattgtaaagttcattcaatttcatcaatgggaaaacactcttactggtttcattggattcattgctaacattattaaagagttttatgctaatcttactgatgatttccttgatgagaactctagactgtatagaagagtgtatgttaggggtcactggttctcattttctgaaaaggacattgctcaggctctgcaattgcctgagaatgtatccaatgctgtgatgtccatggatcgtgacttgatgcactctgaactcactggtgctcgttcagaattgaaaccaggggagagtcttcgaattactcacctcacttttgctcatgcttcccttatgcggtttgcactaagcaattgggttccaaa

SEQ ID NO: 284299 - DNA, 706 bp, Cannabis indica
gaaacgaaagtatttacatagcctttgtgacatttagattattgcttaatgctgatttcatgttagtttaattaagagattaattagagagcatgagatttagaacctagaagatctgaaaagagctaggttaattcataatctgtcattcacttcaagagaaggatagcaattagacattaacattggtaacttaacaacaggattcgtctccctattttcttatcttgattaatcttcctttgttatttttaattttctgaattgtcttatttaattcataaaaagtattcttttaccagatagaatcaatagtataatttagtagtaattagtccaattccctgtggttcgacctcacctgtgtgagtttactacttgattgcgtatacttgcgtagtgattaataatttagcaacagcaggtggggatacttttaccgacgcacatttgcgcccgcataagtattaaataaaacacgtggattttgatctggcaagtggggatacttttaccggtcgcaattgtgcgccggtaaaagttgtaaatgaaaggcacgttttgacttaggtcaaatttttaaaaggacttttaccggtgcatccaattgcgccgataaaagtgtatatatgaaccagaggcacgaagcccccccttctcttcccccactttttccactttttttcattttcctgaaactaaaaaa

SEQ ID NO: 284300 - DNA, 307 bp, Cannabis indica
agagacgtaataatttatagtagctccactccctatatcacgatagtaattgagctacgtctacttcgagttttatttctcacgacaaaaaataactaagtctgggaactctaatttctaaagagagaaactaaggagagatgctctgatcttatgggcacttttctgaacttgaaaaatgagctagtggagctctccttttatagggaatgaggtcctattaaaataagtaaaatattccaaaaaaatatgaaaaaatacatttaggctagtttttatcatatatgatgatctaacggtgaaattg

SEQ ID NO: 284301 - DNA, 627 bp, Cannabis indica
gcaggtggtacggacagcatgcgtggaagggggggaattgctgagaaaactcggcgcaaggctccctatgcatgattttcgcgcgcgtgggaagggtgttcaccaccccaattttttccgattttcaaaaattcataactaactcaaataaaatcgaaatcgagttctataaaaaagtaaattgcttaattttttctataccatccaataaaaataattccagaaacaaaaaatcaattattttttagagaatttcacaaacatcaatcaaacatcaatatgacacacaaaataacatgataccatccaaatcacatacaaatcgttttaaatccaaatttcttgcaagcaaatcaattaccatggctctggtgccagttgttggaattaatttaccaggaacatagatctgctcaagtatgttgataaacaacctaaatatgaacttctaaaacgaatataagtaaacacatataaagtatgagaaacgttacattgagtgcagcggaataatatgtctccttccactcagatctctaacccttgattcctttctattgcagagtataatcaagatctgagctggaatgtcttctttgttgactctgaattcttcacagtcttcct

SEQ ID NO: 284302 - DNA, 544 bp, Cannabis indica
aaggttttactgaatcgaaatttatctatgtcaaaaattagtatttctacgctgtttgttgtaaatcgtttttcatattttctatataagttgtctcagtaaaattcaaatatctctctgaataatgatctgattctagcgatcttggtaccgttgaaaagataattcaattttctaaatgttttatgaagaaaccattcactaattattgattattctaagtcaaaattattgttttattgctgtagttcgaaatccatttgtttcaggatttctagaaaactgtttcggtataatatctatatctcttacgttataactccgattttaaagattttagtgtcattagaaagggaattcgattttctaaaacttttatgaagagagtattctctgatttggaatatttcagtatcaaaactttggatttccgatgtctactgtgattcgttactccatattccttctcagaaatagtttcagtaaaactatcataactccctcagttttaatccatttttagtgatctttatatcattggaaa

SEQ ID NO: 284303 - DNA, 373 bp, Cannabis indica
tttgattagttagttaagcctaccttttggtttgggtgaaattttgggaacatggtagtacaattgagtgggagcgctaatcatagatatggaatcgatagcttctatctggacatagaagtaaaacgatgatatccttcgagcttggctaaacagagataaatggttgagtactcatttcaatgattatgttagttcactgaaatatcttttataggttgctaagagttttaaggataaaatacattgaagtgtataacggtaaattaatccctatgcaatgtaaatcatctatagaggatcattgattattgggataataataatggataattaatagtgtatctatatcatggaacatatagagtgttct

SEQ ID NO: 284304 - DNA, 569 bp, Cannabis indica
catttttcatgcttggccactagaacatggccttgaggtcttgatacatcttcgttgaccctggatgaactaagtaaggagttgtatgagactcattcataatctctcttttgataccttcatccataggcacacaaacatgattcatatattgtaatattcccgtttcatccactgtaaagtcattagtcttcccaaccgaaaccctatctcgggatttcactaactttggatcttacaattgtgcttctctgattcgttctaaaagagtcgattgcagggtaatattaggcaactgccctacaaccaactcaattttagctctggtcatctcatttgctaactgctgggagatttgtttcacagtatttatctgactctgcccctttctactcaaggcatcggcaatacgttggccttaccagggtgataaaggatctcacaatcataatccttcaccagatctagccagcgtctttgtctcatattcaggtctctctaggtaaagaagtatttcagacttttatgatcagtgtatatctcacatttctcgccatataggtaatgcc

SEQ ID NO: 284305 - DNA, 650 bp, Cannabis indica
gaaaatctaatccgattgggccacctctatgagtggatcaagaataggctgcctcacctcaatccggccgagccgacgggggttgtgcctcagggaacaccggggggtgtagcaggagtattggctccagttgctcccgcgggcgatgcccaacacatccccggtctgccgcccagacccaacaggaggtagccatgatctccggaggtccccatattggaggaactacccgcaaggataggtacgcgggggccgtgaagcacaatgaggtttgggaggttactcaactcccagcccagaggccccggctgatggaccaacccatcaccttcacggaagaagatgccaagatggtgcgcttccctcaccatgatccgctggttatcgagacccccacgataataaggtggtggccagagtcatgatcgacaacggaagctccgtgaatctgctcttcaaggaggccttcactgcaataggcctgacggaccgagacctctcacccagtggttcccaactcacagagtttaatggaacgacgcttatcccaatgggaaaagtaagacttccagtcaccttgtgtccggacacccccagagcacattcaagtactgcacttttgtggtggtggactgcccgaccgcttataa

SEQ ID NO: 284306 - DNA, 122 bp, Cannabis indica
tagggtgtaacggtaatataatccatttacagtgtagattaagtcagtgaatttagattataaattcttgatctgcttattggaagctcgattatatagacccatggtcccccgcactagtt

SEQ ID NO: 284307 - DNA, 627 bp, Cannabis indica
atatctcaaatatgtcatgtacatgtgttgtgtttttgtttttgtttttgcatttattgtcttttagcttcaaaattcaaatgataacttatatatataatttcttctatatacctttatacatttgtcactatagtgtatatatttaatggcagtataaatacttaaaatttaagtttgtaaacagttatattaatttaatatttttttaataacataaataactaatattaataaaagtgtaatttttaacaaagttcgtcggtgtaaattctattagtgtcttcaaaaagaaaaaaaataaagcctaaattctaaattattagatcttaataggaacatttagtatgcgttattatttttaaatattcttttaataaattttaaatgaaattttaattaacaaaacttgagaaaattacaatttatattaatgaaaatttacaccgcttaaaaaatcatttaatttataccgattacaaatataaaacttagagtaatttgcgacataaatgcttaagtttaacttaaaagagttatatttttaaaactctatgagtatctggtcgctaaatgtcaagtcattatccacgtgttattttttattggtatatttaaattaatttt

SEQ ID NO: 284308 - DNA, 547 bp, Cannabis indica
tgtgagtagatctaagatccaggtaaaataatttccaacagtggattggggttgaattggttgagatatggaatttttagtgtttcctacactgaaccggaattccggttcagagtggcctgtaggaaccggaattctggttggtttcttgggtttctcccagaaccggaatttcgattgtagaaccagtctaccggttggggaaaatttgggaaccctagttcttcccatttttgtgttatttagggtattgccatgttatatatcgataggaaaatttctagtttcgagtttaagtccccggtaagtgatttaccgtgtcacttatcagtgttgtgattattatgatttaggagcctgtaattcgccgagcagatcgttccactcaggttgaccggcacacctgaattcggaatcgaggtaagattagcataatgttatgcatatgcttatacatgtttaacgtacatgtcagttgccatcagattaacatattagatatttgttaggcaaattttatgtagccgtcagattagcatatcagggc

SEQ ID NO: 284309 - DNA, 519 bp, Cannabis indica
atcgagattggggtgcggttctaggtccggacccttgttctgtgtccctagtctagttccatgtttgggtctgagttcaggtttgggttcgggtcctgagtccaggtttgggttcggatccaggtccggctcccagttcgggtctatgtcttatttggagtcccggacctggtccggttacggttctagatctaggtccaatttcagttatggttccaagtccaagtcctagttccagtcccaggcaacttccagttttggttccaattttgggtgacagggtacgggttcgggtccacttttgggtttgggattgggttcaggtccgagtcagggttcgggtccttgtcagggtttgagtccagggctgggtcccaaatctagacaccgactataggttttgtccaagcccttggtccaaatctggatcccaatctctggtcccagtctggtttcattttttgtgccgtgtcacgaacatggtcctaggttcaagttcgagagggtcgggtactatgt

SEQ ID NO: 284310 - DNA, 813 bp, Cannabis indica
cgcatcttttgctcggatctctccgggagctatccttgtacaatggttgtggtctccggtagtgtgtattttgcctagtagcaaagtacacacgctcttgggagtccaacagctccgtgtattgggtgtactggggagtgtacccccttttctggcgcttctcccccgtccgggtgctgcccttggaggaccttttactcctcgagccctgggaagggcctgccaggctagcagtcggagcagagtgcgaaggagtttgtccattcattccggacgggttgccgaaatgggatgacgctggcgccaaggcctggccctgactgtatccgggggtggcagagaattgtatgccgcttgtttgtggagttgcggtcggggcagtacccgagggcgatactccgggcatgtaccctgctatcccggtgggatagtatcctccataagccactatttgggcttcttcgaggttgatatatttttggactctcttcttgaaccattcctccacgaacccacttagagtaagtgggaagcacagacatttggcgtcattgctgactctcatgaccgtcatgacacggttgaaccgtgataagtggtcgctaggatcggagttcccggtataagctgccatttcgggcatcttgaagttcttagggagttccgcctccaggatgtgcttagcacatggctcccggtcctcgctatctgagtcggagtcgtcccctttctgtcttcgggagactcgggcaatgtcttttcgaagtatggcgagttccgccataattccttcatttaacgtacccgtggaga

SEQ ID NO: 284311 - DNA, 644 bp, Cannabis indica
cctgatgaacaactctttagtgtgagggaaagcctgatggtaccgtggtatgctgattatgtcaacttcttggcggcaaaaataactcctccttagctttcacgtcaacaactaaagaagttcttttctgaggtgaaacattattattgggaagagccaatcctcgacaagcactgcgctgatcagataattagaagatgtgtgcctgaacaggagatgtattctatcctaaatcattgtcatgatttgccatggggaggacatttcagtgggaccagaactgctactaaggtgttgcagagtggattcttttggccaacactatttaaagatgctagtacctttgtgaaggcatgtgattgctgtcaacgtacaggtaatatctcaaggtggaacgaaatgcctttaacaggaatcttggaagtggaattgtttgatgtgtggggaatagacttcgtgggtccgtttccttcatcttttagcaatcagtacatcttattggctgtggactatgtgtctaaatgggttgaagttgcagctacaccacagaataatggtaaaacagttctctgcttcttacaaaagaacatcttcactcgatttggtacttcccgagcaatcataagcgatgaagggagtcactt

SEQ ID NO: 284312 - DNA, 565 bp, Cannabis indica
aggtcccatcccatttctgattttgggttcgagattgaaactaggctgcggttctaggtccggaccctggttctctgtcatactctggttccatgtttgggtctgagttcatgtttgggttcgggtcgcgagtccaggtttgggtttggatccgggtccgattcctaattcgggtctaggtctgattcggagtccgggtcctggttcggttacggtttaagatctaggtccaatttcagttatgtttccaagtccaagtcctagttccactcccggtcaacttccggttttggttcctatttttggtcaatgggtacgggctctggtccacttttgtgtttgggactggattcaggtctgagtgagggttcgggtccttgtcagggttcgggtccagggttgggacccaaatccaaacaccgactacaggttttttccaagccctgggtcagaatctggatcccaatctcgagtcccagtctagttccatttcttgtgccgggtcacgagctgggtcctagtttcaagttcggtttgggtcgcgtactatgtctcggttctagtt

SEQ ID NO: 284313 - DNA, 803 bp, Cannabis indica
aaattactccccctttttgtttatctataagggccaaagacaaaaagaaatgaaaatatagaaatatgtccacaaaaacaaaaagaaagaaaacttatgccccataaagcttgatcaatgaggacagctgctgggacatctcttgctgaacctcctccatggcagcaaatcgattggagcagcaagaggagcatttgaggggacttgttcggattccaccaattttttgagatgtcgtaggttctttgttctcaccattttgatctgaaaaggaagatgaacagaaacacacaagaaacaggaaagagggttcgggtaggtggtgagttaaatgacaaagattggtttatataagcttcgaagcaagacaagaaaaggaaaccaatttttaaaatttaaatggtaaccgccagcccatgaacacataaaaggaaaccgcccactcctcaactcctttcccctttttttataaaaaaaaaaataaaaggaaactagaattgccaacaatttttccaaaaataaatcaatctttcaagaataaaggcacattaccatataaagattaatctttacttggaaaaatatcaaaataaatcaaagaagaatgaatgttgatacttaccatttatgcacaagatttccttaacccatgaagcaagtcacacgcctccctccttttttttttttttttttattttttagaaaataaaatacaatgtgtacaataaatatatgtgattcgaatcaagcaaagaaatcaaatatcattgacaattgacaaaataaaatacatgttatgcttt

SEQ ID NO: 284314 - DNA, 672 bp, Cannabis indica
ttttgggtctaggccaattcttcactacttcaatcttccctggatccaccataatcccgtcttttccaactatatgccccaggaaagacacttgcgatagccaaaactcacactttttgaacttcgcataaagtttatgatctctgagtcactgcagaaccatttggagatgctgttcgtgttctgcttctgaccgagagtacaaaagaatatcgtcgataaatacaattacaaagttatcgaggaaatccttgaataccctattcatgagatccataaaagctgctggtgcatttgttaacccaaatgacatgaccgggaactcattatgaccatacctggttcggaaggctgtcttcggaatatcctcttcccaaattctcaactgatgatatccaaatctcaagtcaatcttagagaataccatcttgccctgaagttgatcaaacagatcgtcaattctaggcaaaggatatttatttctaatagttaacttattcagctcccgataattaatacacatccgaagagttccatcatttttctttacaaacagaaccggagctccccaaggtgacacactaggccgtgtgaaccctagatccaacatcccttggagttgtatctttagttcttttatttcggcagctgccattcggtagggtgcttttg

SEQ ID NO: 284315 - DNA, 717 bp, Cannabis indica
acctccaactaagtaattgacaatgtctgcataccatggtacccgtgtttgttctaccactagcagctgctcatctgggaatgagtcttgaatttgcaattctccctctgagtggctgctgtgattgttagtttccaacctagagagatgatccgctactttgttttctgtcccttttctgtctcgaatttccaagtcaaactcttgtagcaacaaaacccaacgaataagcctcggtttagaatctttcttggttatcaaatacttgattgccgaatggtcagtatacacaaccaccttggttcccacaagatacgatctgaatttctcaaaggcaaaaaccaccgctagcaactctttctcagtagtggtgtagttaatttgggcatcaacaagagttttgcttgcataataaatggaatgaaagatcttattcttccgctgcccaagaacagccccaacggcaaaatcacttgcatcacacatgagttcaaagggcaatgaccaatcgggtgctacaatcacgggggccgtaacaagagctgtcttcaacttcaaaaatgcttcattacattcagcggtaaactcaaatggtctattttgttctagcaagttacacaagggtttggacaccttagaaaagtctttaatgaagcgcctatagaaacccgcgtgtccaaggaagcttcttatgcctttcaccgtggtaggggctgg

SEQ ID NO: 284316 - DNA, 601 bp, Cannabis indica
tgtaatgttgtttaaaatgcctgtgtctgattgtctttcgctcactatacctctctgccatctccgaatataaagtccccataagtaggtctcggtggggattcccatcgatatcaaaatagtactatgtaataaaataattaaaaaattatattaatttacaaataaggatataaaataattacaaccatgaataattaaaaatcactcactcttattcgattgagcacttgatccttatattgttggggtacatcagaaaaatttaaatgatgacctgggcacaacatggttacttgctggcccataaatcgaacataagcgcttgctttagtgccaacaactttgccagtttcaagatccacctcaaccgctaagggcttaccagcttctctcctttttttttttaaggttagtgtttgctgcaagcccacgacactttctgaccggaggtggaactttatttattcgatttttaacgcattataatatttcttttagcattatttattgttttatatatataatatataaatttctttaaataatatgcataatttctaatggttttttgtaataattttatataaaactagaaagc

SEQ ID NO: 284317 - DNA, 558 bp, Cannabis indica
aatacacacttaattaatttacaacaacccactaaagccataaaacacaagagatgtaacacccgtatttaaaaacttactaaacaaaaattaatcttattataatataattatataaccttataggtcgagatcctgagatttaaaatatagttgaaaattagattttctatatataaagtttcgtaatatatttttttttacaaaaaactggcaaccatacaatatgactccaaaatgttgaaagaccgaaaccctccaggctgcactgccgcgatatgtacaatcactgccaagctccaactcactgttcctctagcttagctttgcccttaactacataaggtagcaaactgatgagtcgacagactcagtaagatatgcataacatatataaagataatgctaaactgactttatgtttaagctgtcctgagctcaacaaccgagctcaacagatggttaagaacgttctcaacggttagtgctattgaccatgatatcacccactaccagtactatcattgcactgcgagaccgacactatgttcgtactgc

SEQ ID NO: 284318 - DNA, 460 bp, Cannabis indica
gtcccattttctgatgagtttgggttcaggatcgagactgggtgcggttctaggtcccgaccctggttctatgtccctagtctggttccatgtttgggtctgaattcaggttcgggtcgggtcccgagtccaagattgggttgggatccgggttcggctcctaattcaggtctaggctagatttggagtacgggtccaggtctggttacggttctagatctacgtcaaatttcaattatgattccaagtccaaatccttgttctagtcccgattaacttccggttttgtttccaattttgggattgggttcaagttcgggtgtgggttcgggtcgttgttagtgttcgagtccttgtctgggtctcaaatccaggcggtgccgggtcacgagctgggtcctaggtccaagttcgcgcctgagtcggttactaggtcctgatcctagttctgtttcccagg

SEQ ID NO: 284319 - DNA, 480 bp, Cannabis indica
aggtttgctgaaatgcaagcccggatagagtaactagacttagagattcagagattgaggcagcagggtgctcttgcagttcctgtgccagtagttccagtggcacctgcccctgctgctcaggccgaattagtggtggcggccaatagattggaacctttgtatgaacggttccggaagcaagcacctccggtctttctgggaggtccagatgtgatgaaggccgaacagtggctaacggtgatcaccaaaatcctgaattttatgagtgtcaccggtaatgacagagtggtgtgtgccactttccagttccaggaagacgctcttgtctggtgggacatggtgtctcagattcacgacgtcaccaccatgacctgggaaaggttccaggaactcttcaacgcccaatattataatgaggcggtcagaagtgccaagaggaaagagtttgctcacctgacccagcgtgagaatatgagc

SEQ ID NO: 284320 - DNA, 526 bp, Cannabis indica
actatatgttagtcgataagggtgtatttaatactcttagactacacaaaatcagatttcaagacttgccttagtgcttgaaagtctactgataaaatggtgataactctggggggtggaatagtgattttggagaagtgtaaaaacctatctgaagtctctaagtctaccagagagagactgaatgttaaagttgcaaggaaagatacttattcagtctaaggaaagttctatacatttttggcattgttccaacatttcttaattactagtgttacttcctgactaacacaaaagtagttgccaatagtaaagaatccagtattcctagaagagttcacatatagagaggaatttcacaaaatcaagtattttgtgattaaggaaatgtaatggtggagaaaaggttgtgttcattcaacctgtcagatcctattacggagagtatactacatactacacttgatttgtatatagaggtgttgagattatttgaaatgcacttttgttttatattagtgcaagt

SEQ ID NO: 284321 - DNA, 692 bp, Cannabis indica
atatttttgctcacatactcagaccctagacccagaaccaaacccgaacctagaccctagacccaaacccggaacccgacctagaccctagacaccagacgcagatgtggatatgtgttggaaatattttaccaggatctagatttactaccatgtatgtttcattaacatcctaatatgaattctaaaacaatgaaataaacacatataaagtttaggaaaccttacattgggtgcagcggaatataatgactccttccgttcagatctctagcccttgattcctttctgtagcagagcatcaccaagatctgaacctggatctctttctctccttcctttgatgctgattctccttcttgttggttgattctccacagtcttacacactatgattgagataccacttgatgtgtgtgggcactcactcattcactcaaggatttcgaaatttagagaagaaaagagaagggaagtggttcggcctatagagaaaagaataggaggctcaaatttcatctgacaaagttaacaaaagttaagtgtgaatgagagccatcactatctatttataggtaaccacctaggtttaagttagaattatttggcattaaaataatgaaaaaataaatgataaaagcctaaagagtggccggccatgggctttggataatgggcctcacttatgtcaa

SEQ ID NO: 284322 - DNA, 664 bp, Cannabis indica
tcttggaagagtctgcgacaagcgaagccatcacatcgctcttcctcttctgggcaacgaccggcgaagtcgtcgctgttccaccctttggtttgatcttcaggacaggggcagacttcagaaaagtcatatctgcgaacatgaatgaaagataagtaaaaatcacaatcctacccgtcagtttataacaaaagacgagttacctgaaatttgtcgaggagtttgcttagaaagacgcttgtctattcgctcttgctgcttctcggatggttctttgtatactggctcccgttgaagacttgcgttctcgggaatcagctgatgttctcgcaacttcgcagttgtacacaataatcgccagtcgcgatcttgtaccggaaggctcccgagaatttcagctgtctccttgctagtcgcgtcaagagtcggtcgagctggtctatctgcgataacaacaaaaagcgagtaagcaaaagatttcaaaagcaaagtaaaaaatgtctaagtcaaaaaatacgcgacatactgggtctgcgattaaagtcagtcctaatcccaggaaccttaaagacgtaaaaccacttcgacttccagtcacccatgttcgacaccatcccctcaacaccgtttatttcagaagtcgcccatttgctaaagcagtaga

SEQ ID NO: 284323 - DNA, 605 bp, Cannabis indica
aagtaaacaactatccatcattcaaaacttacaagaaatttctccaagcaaccgcattatcgttcggctcgggggtgacatccttctttacgggttcatttccccctttccttttgcgtttcccagccatgtatgatgaacctaaccaaattaaagataaacaaatttaaacgataaggactacatatttcagcaaatacactatataaaaaaaataattgaccaaaacacaatgaaaatcgtgcattgtaatcacctaaaatcacatcaaatcaacttaaccattcggcattgaaaaaattcagatttcaaacacacatttcatgcttcttgcatgttacacattaaagtacattaaaatgatgtgaaactctttcaactaaatgattccaatacttaaaaattatacgaaacaaaaagcattcccagaattcagacttcaaacacaccatgcacatcagataaaaacatatgatgtttgacacacaaaaaagtttgcttccaagcaattgatgaactactccaaagaatctaaaccttgcacaaccaaacaatgaacaaaaaaacttaaccaataactgccatacacaataatgaacagaacc

SEQ ID NO: 284324 - DNA, 559 bp, Cannabis indica
actctatataatattgacttttatacacttaaatatataaatatttaatattttagtataaattaaaatttaatataatattatataaaaatataatatatatatatatatttatataatctaattcattataatacaataccacttactataacaaaccaaacaagttcatgtcttaatcaagatcttgcaatacaaaatttatccacccatccgaccgcagtacatgtattcgcagaacctacttcactacggatgaatatttaagatattcaaactcaactaacatgcattgataattaattatataataagaaaaagttagttaaagtatatacctataattgcaagcccaaatacgctacacacaaaattatgccgaacccctataatataaagaaatacaacgaaattacaaaattaattatttcataacttataactagttataaaaaattgtaacaagttacttagttactaaattatacatacatatatataatcaattatatctcacactattatctcaaaaaaataaaattatatcacacactaattc

SEQ ID NO: 284325 - DNA, 540 bp, Cannabis indica
ttattaatgttatatgttggctgaaatgaataagtggaattctttattttcatttttacaaagtttcaaaaattagaaagttagaaaaaatcaaggaaaagctctctctttttcctctctattttcggccctttgaggcagcaagaaaagtggatttttctcttgtgattcaagtgattttcagcaagttagagtgattctagttgaggtaattcttgtctagcttctttacttttgttttcttgaatttttgatgaaaaatggtgtaatgcatgcttagtttaggttgttgttgttgctgtgattttgtagttgatttcagaggtttaagcatgattatttgagttgaattgagctgctagtaatgcatgattagtggtgttgcttaaagttatggtttttctattcaaaagcttaagttttcaaagtgaaagttgtgaaattggtggctgtagttattgcatgagttagggtttggtttctgcagttttaatatgcttgaatatgaggttttaatcagggtttgatgcatgatatgtt

SEQ ID NO: 284326 - DNA, 723 bp, Cannabis indica
cttttgggtaccttttaaacatcatcttttggctcttttaaaactctattcactatttactacttttttttttttttttgtaaattagaagtcacattttttccttcattttttcaaattctttaatctcttcatttgtttgagaagtgataccgttaactttctattataatttttcagttaatcttcatactagaaaatacacgtgattatattttttttttaaaaaaaaattcatgatggtgttcgttatgcttataacatcattcttgtaaatttttaaaagattttaaataatttaccgtgtcaaaaatagatttaatttttttttaaacacgcgtggtaaattagaatattaaaaactctatttttagtattctaaactaatcaaaaaaatttaccatttacaggaatgatactataactataactataacaaatacctatgaaataaaattaaaaaaaatattccaatatataatttcggacatagagattaactaaaatattatgattaacattcctctttccacatttagaaagttctaaaaaaaatcttcataatttagaaactaaaataaaataattttttttaatttatatcgtactaaatatcataataatactaataaaaattattaaatgttataggctgattctacaatgcactcccttaaaatagatgtattgatcaaccttttacttgtttcgacattcagaaaa

SEQ ID NO: 284327 - DNA, 386 bp, Cannabis indica
cctcacttcctcatttcacaccttgctgaacacgaagagaaaacacccacccacaacacgaccccaaacccaacgaaaaaaccctcgccaaccaccactaaaacaacctcattcgtccctctatttacttaactcacttttacccctatttttgtcttaaaatcttctattttctatacctaaacctatactgtaaaaaagtttaggtttttttcccctctatataccaaaccaaacctattataaagaaaggtggtgggtataactccggccaccgattttagcggagaaaacgttgagtctcaacgtccattaaggtataaatatgctttctattcattttatttatgtacattggtattatttcgtttttgtaatttttttta

SEQ ID NO: 284328 - DNA, 621 bp, Cannabis indica
ttttaaaaaaaaaatttaatattaaaatataccaataagaatatattactacttatagtgattaagatcgcttccctcctcccaccctcctaattaaacttgtttgctttgagatatttagccatgaatcttttcatattttcttttctttccaatctcaatctctttttgttttccttatatcatataaggaaattatcttgaaatttgtgagaatatattctcgctttttctgatccttatctacttttgatttatataaaaacaaaataatgcttaatttttatctgatgaacgataacacaatattacttattacatatttttgtttattctgttttatccgcttaataaatatatggacaataacaacatgtacattttcattgataattaaaaaaatggttacatgcatatattttatatagaagacctacctatatatattatgtaagtatagatagcaaagcaatggtttgacataaagtacgatatataaaagtatacttgtttgactcgaatattagacacgtaaacttcaaacatagacttacagatttatatatatacacacgcacgcacgaggcaactaatttttaattagatttgaaaaaaaaaaaa

SEQ ID NO: 284329 - DNA, 540 bp, Cannabis indica
tttctactgagccaaacaccgagatccaaaataccgggcaccggaaatgcaaaatatgaaaactactacatgacataaaaatgcatttctgaattccataaataacagcataataaattatttaaatagctataaataattttcataattaatcataattaactgctaatttccaaattaaactaagcgggctttacaattgtaatacaatacaagggccaacaaagagattaaataaatgttacaacaatatatatacactatatacactactacaaaaataggttttcccgatgtttttaaatagtcgtttaaagtattcccgtcggtttctataaccgtcgcatataagaccgtcgtaaaacgggcagaataggcgacggttactgggtataggtgacggtttataaccgtgccttatactataggccacggtttaaaaccgtcgcctatacctattataggcgacagttttaaactgtcgggaatgtaaaaaaaagaaataaaaatatagatttttctgccattaatggaagaaaa

SEQ ID NO: 284330 - DNA, 513 bp, Cannabis indica
ttcaatttctagtgccgggtcacgaggtgggtcctaggttcaagctcgggtctcagtcgggtactaggtccccgacctagttctgtttcccaggtccctctcttgattttgaatctaggtctcgattgttgtgtgtgtttaagacagggtctatgttcgggtttgagtcccagtctcagttcgggtttaggtctctatcttggttttgatctaggttcgggtttgggtttaggtcctggtcctggttctagtcctagtttgatgctagttccatttgcaattcttagttcgcattcgggttttagttcggatcggagttcgagtcctggtctgagttttggttcatgtttggatttcagtctagggccagattaggctccaggtgtgggttcacgtccttggtctaggtctaggtcgggtccgagtcccaagttccaatccagatctgagtctagattcagttctgggtctaagtctttggttctgatcctggtctgggttcgagtttgcgtc

SEQ ID NO: 284331 - DNA, 606 bp, Cannabis indica
ttactaaatagaaaataacactaaaactaattaaagttaagcaaaatagacacattttcattactctcctcacaatattctagtttaaaagcataaaaattaactctataacatagagttatcagtaaccacgatggttacaataaaaatgtaaccactgaaacctcttccatatttatatatataaagaaaagtactaaagaaaatgaggtgacatcctataatattttaatctattttaaaagaaatttagtaaatttaattcattttacatatttgtagatgttgagatatatgacttagtaagttttttttattatgtgtaaaaatcccacatggattaagaactacattataaatatacttctatactataaacaaagtattcttatattcatttaatttgtccaaaaatatatatgtgattgataacttgattttgctcaattaattataatttaactttttatcattattattttaggtcatcaaatcaaatttatatatttatataatatatctatatatttataagccaaaaaaattgagttagcaatctattatttttttttttttttctatattttttatttatttctcttctaa

SEQ ID NO: 284332 - DNA, 696 bp, Cannabis indica
cctagacctgggacccaaaattagaacctgaataagaatcgccaaaccaggatcctagaaaaagatctaggatcgtgacctggacccggacccaaacctagaaacgaacatagacgtagcctcagaccgaaactaggactggaactcgatcccggacccggtcgtgtacctagaccggaattgagacccagacatggacctaaatctgggacctgatccctaacacagacttggacctagataaggatccagatacgaacctggactcggaccaagacccagaatgggatcgaaatgctggacctagatcttgaccgagatcctgacccagacccaaacttggacccgcactcgggaccccaacttggacctagacccagatcggggtctagacctggacacaaacccggacacagactcagactcgaactcaaacccacacctagaatcatacccaaagctagacctggaaccagacccaaactcgaacccagactaggatcagaacaaaggacttagaccacaaactgaatccacactcagatcgggattggaacttgggactcggacccaacctagaccaagacccaggacacgaacccacacccggtgcctaatctggacctagacttaaatctggacccaaacccaaactcagaacaagactcgaactccgacccgaactcaaacccaaac

SEQ ID NO: 284333 - DNA, 695 bp, Cannabis indica
acattcaatctaccccaaaaaaaatatgtcaaaaaccttgaaagtaagagatgcaggtaaataatggcatggttatgatttcaaaccttttctcatacctcaagtatgataaaacaaatgtgttcatgcacttaaatcaattagatgacaagagttgagactttttggtaagtttttcaaaaatttaagcaaaaacaacatatgtaccaaaaattagttttatgcatcctttttgaaaaattctttttgtatcagcttaaacatgattaatatgaagtgtacaagctggaaaaatagaaaaagcttcaaaaatgagagattttggcaagttttactcgttttggtcatataaggtcattttaagcaacttacttactaaaaattgattttatgcaaaattttcatgcaaaatcttttttgacagctgatatatgataaaacaaacatgctcaaacaagaaaatcagaaaaaagtcaaaaatcctaacttttcggtaagcttttcgatttgcttaaaaactagaaatctaccaaaaatgagttctatgcaaccaaattgaaaaattctttttccagtaggtcaaaaatatcaaatgtgaggtgtacaaacttacggaattgaaaaataatgaaaattgagcacgtttggagaaaaacactcttttaggtcttaaaaagtcaaaattatgcaagata

SEQ ID NO: 284334 - DNA, 716 bp, Cannabis indica
ctgatgtgccaactcttggtttcgcaggctgttcaaactagatggacgccaggcggaacaccaggagtcagggaaactcagtcgggtcaaatcagggtcaaggagctcagtttcccttgaatgttaggggctgtggtagaggtcccaggggcagggctcgtggtcgtggtgatgttaacccaccacaagcttcccaggcagcccaagccaatcagaaagcccagaattgggaaattaggtttgctgaaatgcaagccagaatagaggagcaagataacgagattcagagattgagacagtagggcgctcctgcagtgcctgtgccagaagttccagtggcacctgcccctgttgtccaggccaagttagtagtagcggggaatataatggaacccttgtatgaaaggttccgaaagcaggcacgtccagtttttctgggaggtccggacgtcatgaaagccaagcagtggctaacggtgattacaaagatattgaactttatgggtgtcactgggaatgacagggtggtgtgtgccacctttcagtttcaggaggacgctttagtctagtgggacatggtgtcccagattcatgatgttacaattatgacctgggaaaggtttcaggaactcttcaacgcaaagtactataatgaggccattagaagtaccaagaggaaagagttcacccacctgacctagaaggagaatatgagt

SEQ ID NO: 284335 - DNA, 719 bp, Cannabis indica
aaaataataatccttcatatggtctccccaaccgggtcgagggcatcctaaacctatggagacgctcatcgaaccctataggcctaagactggcatattcgccaacggaaggaacgtaatgtactgctaaaggagacttaccagagccggaagtactggcatcaggagccccagtgttcggcacctgaacccaaggctttggcctgggagccctcctctcagctgagtccccaatgcgaaggggcttcccagcgatcgcctggcttctcctctcgaccaggctccccacgcgaagtggcctcccggatgttgcatgggccttggaataagccttctcctgggccttccggtagagatattcctggtacttcttctcggcggtggcaatgagttcatctcggaaggtcttctccgcggcgggcaccctcacatttggacagataaccttagaaaggttagagtcctccactgattggtgcggcaggataagcttggccttccggaaattctccgtcgtgactaggcccccgacgtcaagttccgcccggtcgtaagtcgcaaagacctgggccctccggagaaagacctgagtaggcgcggtccgctcataggggggaatcctgacccactctgtgagaagctccgggtgctccatgttggaaattattttaccaggatcttagatctactcacaagtatgtttattaacatcctaaata

SEQ ID NO: 284336 - DNA, 559 bp, Cannabis indica
tcctaagttctaatcccgatctgagtctggattcagttctgggtttaagtccttggttttgatcctggtctgggttcgagttttggtccgggtccgggtctagttttgcgtctaattctaggtgtgggtttgagttcgggtcggagtttgtgtccgtgtttgtgtccaggtcttgaccccgatctaggtctaggttcgggtccaggtctaagttcgggtcccgaatgcaggtccaagtttgggtcttggtcagcatctcggtaaagatctaggtctagcatttcgatcccaatctgggtctttgtccgagtccaagttcgtatccgaatccctatctaggtccaagtctgtgttggggatcgggtcccagatttaggtccaagtccgggtctatgttccgctctagttacacgaccctgtctgggcccgagttctagtctcagtttgggtctgaggctaggtctgtgttcggttctaggtctgggtccgggtcctggtaacggtcctagtctttttatgggttctggtcctagtctgagtcccacatctagacaccgac

SEQ ID NO: 284337 - DNA, 875 bp, Cannabis indica
cttctccatctagcaataaattcattgacagattcatctggtctttgcttagtttcagctaagtcactaagagtgacttctcttattgagcttacaaactgagcaatgaaggctctttgcatgtcatcccatgtgattatcgatcctggtggtaattgcgtataccaagtgaatgccacccctttaagcaattgtacgaattgtcttatgagtaatggatctgactgagcagattcaccacatgctgagacaaagtacgccagatgttctttgggggacccatttatcccatcaaacttttcaaattgtaagtttatgtaatttgggggatatggaacataatcataatgagacgggtatggtttatgatatccaagaataggcatgtttgttgtttcataacattctcggatgctttccatgattagtgctttcaattcctgatgaggtattgaagttgatggtgtaggctcttttgaacaaggttgcattggcaaagttattgacacttgcccctgttccacttgtttttgcttacttaaactagcttgtttagctaattgtgttgtaagatattcaacttcagcgtctttctccgccaactttctttgcaactcttcaatttgttcttccaaactcatcgttccaataacaaacactgacatactgttagattcaatgttgttacatctcactgacttccttgggaaagtcttctcatgatttgtagatggaacattgcgatatgagtcactggaacatttaatgaagcttttggattgaactgctaagaaactggggcacttataagctaaacattttcgtacaggatgtagttttgagcatactacttgtctcatgtactgttttggctt

SEQ ID NO: 284338 - DNA, 544 bp, Cannabis indica
atatgcatcaggcatcttaaatccttcaaggatcttcatgtaaatatcactatttagtgatccatataaataagctgtgactacatccattaatcgcatatcgagtttttcactcacagccaggctaaccaaatatcttaatgttattgcatccaccacaggagaatatgtctcctcataatcaatacctggcctttgagaaaaaccttgagctacaagtcttgctttgtatctcacaacttcatttttctcatttcttttacgtaaacatacccatttgtatccaacgggtttcacaccttcaggtgtttggactataggtccaaatactttgcgtttagcaagtgaattcaattctgcttgaattgcttctttccattttggccaatcttttctattttgacattctttgatagatttaggttcaagatcctcgttttcattcataatttctagcgctacattataagcaaaaatattgtcgacaattacttcgagtcggttccattcttttcctgtattgacataatttattgagatctca

SEQ ID NO: 284339 - DNA, 589 bp, Cannabis indica
gaatggaatatcgatgtgacagcctttaagtcatacaaagctggtcggcctagcatgacgttaaaggctgaaggaacatctaatatcagaaattgtgccataatagtcatgctcgtcggagcttgcccaacagtgaggggtaggcaaatttgtcctagaggtgcaactccttggccggagaaaccatatacaggcaagagacagggggttagatctttaagctagagccccatattttcataggcagttttgaataagatgttggaagaggctctaatatcaatcatggttctggccaccatcttgttagctatctggacctccacaaccaaagggtcattgtgcggaaatcaaattttgacagcatcttcatcgttgaaagttatggtaggccctcctgcccgtgaaatttaaggcttcctttcttctacggccaggatcacttcttcttgctcgtgctgtgctgttcgggcatacctctcctaagctttgccagaatctcccgctaagtgcgagcctccaatgatgacttgaagatgtctgtctaccggtggaggtgcaagtcttggttattatcgttcctctgatt

SEQ ID NO: 284340 - DNA, 760 bp, Cannabis indica
ttatgagtaccgagtccaacctgattatgccttgagctcataatccctaaatctcatttcaattaacatggcatggcatttttacaaatatatcactagtgtaataaccctaggctattataccgttcctattagggtaataaccctaatcccggttactaaacattcatgcatatcattctcaatataagcaccactgcgcatactctacgtgctaattactgtcttacctgacgcaatagtagagattccaaatccccgggtgctcctgaccaggtgccggtaatcctagtcacaataccgggatttacacaaatagggttaatccctaaatccacttccacaaaaatataaaattggcatccaaatcacagataatcacatagagctctaaaaaagctttccaacggtataaagaacgtcccaaacggagtcccaagtcaaaagttatggccaaaacaaaatcaggaaaaacatattttctcactgccaaacccagtcgcgacggccaaaaatcccgtcgcgacgactgggttcagaacacccaaaaatcccatttttaaggcctaaaaatgcccaaattcaaacctaacttcacctaagtcatacacaataaaaattcatgctaaaccaagctgtttccaggcattagttccacagaatatatgctcaaaataaccaattcataatcatacacaaagcatgctacacaaccatacatagcacaaaatctcaaaagttttgacacttcaaacattaa

SEQ ID NO: 284341 - DNA, 589 bp, Cannabis indica
acgcgatacctgtgatcgaaaaactagtttttttcctcctaaaggcctcgagaaagctgagaccttacttacaagctcacccaatcaaagtgttaaccaaacatccgctccgacaagtcctacaaaagctaaaggcatctgggagacttctcaaatgggccatggagctaagccaatttgatctacactacattcctcccacttccataaaagggcaggcgctggcaaacttcatcacggagtgccatgaagcagaagctaacgccaacatacccacaccgccagtcccagcgtggaaagtatttatggatggcgtctccaacgagaatgggtccggagtaggggtagcgatgatatccccgaacagacttcgactccaggcagccctacggtttgaattcacagcttctaacaacgaagccgagtatgaagccctgatagcaggactgagattagcaaaagccgtgggggccgaaagagtgtaagtctagagcgattcacaactggtagtaaaccaggtgtcgggagaatatcagacgtgcggagaaaagatggctgcatatgtggcaatagtccgggaactgctcca

SEQ ID NO: 284342 - DNA, 514 bp, Cannabis indica
gtcgaactattgtctacataaagtcgagctagcttggtaagcttgtaatccgtcctgattggaataaaatgagcagacttagttaaacgatcaacaatcacccaaacagcgtcatgcttcaaaggtgtcaatggcaacctagtaacaaagtccattgtaatcttgtcccacttccattctggtataggcaaaggttgaagtaaacctgagggtctctaatgctcagcctttacttgctgacatactatacacttagctacaaagctagccacatctcttttcataccttcccaccaatattgtctctttaaatcttcgtacatcttcgtacttccaggacgtacaacaaatttggatctatgggcctcaatcaaaatggtctccctaagatcagggatatctgcaataactagccttcccatatggtatagatacccttcactattagcttttcatcttgccactgacattgcttaacttgttgaagtagtactggtgtagccactaagttaga

SEQ ID NO: 284343 - DNA, 858 bp, Cannabis indica
tagtgggatgggaatgcattattggtgaaaattttgtggccatgatctattcaaagctagttttgtaagtattttaagactttaacctcgggagaaaacaaatctattatgatttatgactttatgttttctaaactcttggatgctaataatttcttacaaaaaccttaaaattgcatcttaggctgtcaatattattatattttgaaattgtaattaattgtttgatgtagatgaaaggaaagaagaaagtttcaagagatcatttggctccaccgactcagccaccgataaacccaaaggggcctaataaacagtctgtcaaacggtacattccccctgcaaagacacaattattgtctggactttcagagattgtgaagaattggcctgctaagaaatcaaagagatactatattaaaccggaagtgttcggaggagaaggccaagagtgttggatcagcgctgacgaggtggaagatgtgtgcgagctccatatgattggaaatactgttatgtctctttggtgcaggtataatagttaataactaagttaatatctaagttaaaaattatatatacaactgtttattaataatctgttttaatttagttatttgcaagaacacacacttaatcttggtgggttgaggaatacatatgcatttaataatcctgcttcagtatcaactgaagctggtaaactcaaacaacgttcagagaatctatgtcagcgaatgatgggtatgcaacctgaacaatggttgatatgtccgtggaattcagggtaagtatgtttttatattaataaatgtaacaaactaatggatcgattagtgagttgactgaattaacatg

SEQ ID NO: 284344 - DNA, 789 bp, Cannabis indica
cttgctttaaaccatataaagcctttttcaatttgtaaacatggttagggtatttatgattttgaaaaccgggtggttgagagacataaacctcttccataatgtacccatttaagaatgcgctttttacatccatttgatacaagataaaattcttgtggcatgcaaaagctaacaacattctaatggactcaagtcttgctaccggggcaaaggtttcctcataatcaattccttcttcttgattgtaaccttgggccactaatctagccttgttacgcacaatgaccccatgctcatctaccttatttctatagacccattttgttccaatcaccgattgatgtgacggtcttggaactaactcccaaacattatttcttataaattgatttatttcttcttgcatagctagaagccaaaattcatcaacttcggcctctttaaaattctttggttcaatttgagaaataaaagcaatgaaattacacaagtttctaagggagtttctagtagtgacaccttgagaaggatcacctagaatttggtctataggatgagcacttttgaatttccactcatgtggaaggttagagttcataccttggctttcatttaccttttccacgggtggttcctctttgggagtttgtgaaggagcattggaagtctctccaatttcgagattttgaacctcatctcccaaacctacaacatcatcatctaaacttttgcttgtaggcgggttagtctcatcaaaagcaacatgaatagattcttcaacaacat

SEQ ID NO: 284345 - DNA, 426 bp, Cannabis indica
ttttttataaaaataattatataaaacactattttttttgtaaaaaaaaattatattttttacgttttacacatgtttttttttacaatttttacggttttttttatagaaacaatacgaaaataaaaaaaaaatactacataaaagcaacatgaaaaataacatctaaataatataaaaataacaacaaaaaataacatgcaaataacaaaaaatcaacaataaattaataggagtacagcataaaaagaccgtattttctgtaaataaaatcgtaaaaatatttaaaattccgtgaaatcgtatttttataatttttttattttgtatgtgtatttgtgaaataatctttttttttttagatttttttttccttttatttttacattacccttattttttcagttttttttttttaaaaaaaaa

SEQ ID NO: 284346 - DNA, 529 bp, Cannabis indica
attctgggtttcataagaactagaagaggaaaaatccaccaagaacactctctgtaataaatactatcataaatgcacagactcgtggactaaggctcattaacgccccaaccacgtaaaaatccctctcttaattccttatagctctcttaattattattattatattggttgccgagaacctcggtcaacattttggtactttcattgagagctgaaggaagcgtctgaaggtagacactacattacaacaaaacaaaaatggtggagactcgaagcacacgtcaacctcgtcctcttcaagatgctcaagatccaaatgatgaggacgtggcctcaagagcagatgtggactctgaagaagaaggaacccctgatgacgaatacgaaggaaacttcgatgaatacgcctacgacaaaggcagctacttagagttggtactcttaaggcagaaggctgccgaccatgaggctgaaatcgcagcccaaaaagagcaaaaccaaaaaatgcaagaggtgatgctggcca

SEQ ID NO: 284347 - DNA, 742 bp, Cannabis indica
gcgtatgttccacaaccatacgctcctgaggatgaggtacaaccacaaacttatgctgaggagtttatttccctcaacgaccaaggtatcctgtacaatttcgatgaccatgcggcccttaatcagcaagtacatctctgctctgacaacatcgacaacattgtggcccgagggtatttgtacgagcatgttggtataatcaaagttcactgccaggactacgatgattcacatgcccggattatggtttcggaaatcctgcaagaggacgctgaaatcccagtcccaattgaagagtgcagatatgttagggacgtataccagatgttccttccttggcctaaacacttaattctaacaaccgaggtaacttctcttataaattaattattaatgattagtggagtttgaatatcttcaatattcatccgtagtgaagtaggttctgcgaatatatgtgctgcggtgggatggatgaacaaactactgttatatatgtgttatttgtcgttatacagccatgtttaaaatttttggggtcattcaattacaaccgttatgctgccgaaatttcggtagaatttggataaaatttgatatattatgttctgttttgtttagggtccactcgctcaaccgccctcaagacgtgatgcgtcaaaggggaaagctccgatgctttctccacaaggccgtggtgcacgggaagatgacttgttcacggaagagaagatggcgttga

SEQ ID NO: 284348 - DNA, 557 bp, Cannabis indica
cgtgacagtgatcaagatcttaactctggattcaggtaaaggggcctagaacagaccagtagtcggtgtctagatctgtgactcagactaggaccggaacccagacgaagaaccaaacccgaacccatacctagacttgggacccaaaattagaacctgaacaagaatcgccgaaccaggaccctagaacaagactaggaccgttaccaggacacggacctaaacctagaatcgaacacagacctagcctcagacccaaactaagactggaactagggcctggacacggtcgtgtacccagaccggaattgagacccggacctggacctaaatctaggacccgatcccaatcacagacttggacctagatagggatccggatacgaacctggacacgaaccaagacccagactgggatcgaaatgcttgacctagatctggaccgagatccttacccagacccaaacttggacctgcactcgagacccgaacttggaccaggacccgaccctagacctagatcggggtccagacctggacacaaacccggacacaga

SEQ ID NO: 284349 - DNA, 684 bp, Cannabis indica
aggacagggagaaaattctaactaaaccaattttcataaaaataaccaagctaattatggtgatggttatgaaagtgttgatagtggtgaagtatacattgttgcatcatcttttaaagatgattggattttagattcaggttgtacttttcatatgactaatgacaagagttatatgtttgattatagggaatctaaaggaggaaaagtaatccttggaaacaatcagacttgtgagattaaaggctcgggatctatcagatttaaaatgtatgatgggatagtaagaaccctaacagcagtgaggtatgtgcctaatctttctagaaatttaatttctattagtgtgcttgatgatttgggtgttgtgagtaaggtagaggcaggtcatatgaagcttagtagaggagcattaacaatcatgaaaggaatcaaaaatggtggactttactacctacaaggctctcctatttcaagctgtaacattacaactcacaacgacaaagaagaagagatagctactctatggcacagaagattagggcatataagtgagcgaggcttgcaactcatgagtgagcaacaactgttgggtaaggataaagtgagtaaactagacttttgtgaacattgcatacttggaaagcatcacagattaaagttcacagcaggtactcacaactc

SEQ ID NO: 284350 - DNA, 1352 bp, Cannabis indica
gttgatcgagatcttcaaagtggcgccagaatcatggcggacttggtttgatcaaattgacctcccaagtagagctttaatcgctgtccattcactttgaaagtattaggactttcaccttttagttccactgctccgtagggaaacactttgatcaccgtaaatggccctgaccaccttgactttaatttaccaggaaacaactttagtcttgagttgaagagtagaacttgttgaccaggttgaaactcctttctgactagatttcggtcatgccatctcttagttctttccttgtaaatcttggcgttttcataagcttcatttcgaaattcttccaactcatccaactgtagtagtcttttctgcccagcagcttttaagtccatgtttagagttctcattgcccaataagctttgtgttctaactccaccggtaaatgacacgcctttccaaacaccaaccgatatggtgacatcccgattggcgttttgaacgctgttctgtaggcccacaatgcgtcatccaactttcttgaccaatctttccttgatctctgcaccgttttctccagaatcatctttatttcccggttagaaatctcagcttggccattactttgcggatgataggggagggcagttctatgacgaacaccatattttgaaaggagtgcttcgaactgtttgttgcagaagtgactcccttcatcgcttatgatcgctcggggagtaccaaaccgtgtgaatatattcttctgaaggaaccgaagaactgtttttccatcattagctggtgttgctgcagcttctacccattttgatacgtaatccacagctagtaaaatgtatagattgctaaacgatgaaggaaaaggacccataaagtctatcccccatacatcaaacaactctacttccaagattcctgtcaaaggcatttcgtttctccttgagatgtttcctgtacgctgacaacgatcacatgccttcacaaaagtactagcatctttgaaaagtgttggccaaaagaatccgctttgcaacaccttggcagctgttctagttccactgaagtgtcccccacatggtagagcatgacagtgattaagaatagagtacatctcctcttcaggcacacaccttcttattatctgatctgcacagtgcttgtagaggattggctcttcccagtagtaatgtttcacctcagaaaagaatttctttagttgttgtcgagatagctcaggaggagtgatattggcagccaagaagttaacataatcagcataccatggtaccatcagactttccctcacactaaagagttgttcatcgggaaattgttcatt

SEQ ID NO: 284351 - DNA, 720 bp, Cannabis indica
ttgttggatatttcattagttgccgattcgatttatttttagttgaacgattcaaaaatgcctcgctaacgaacaattcgcaaaccggtttccaagtctcggtattcaagtagtcaggggggaatttgagaactgtgtcccaatcttctggttttttgtaatgttgtttgaaatgcttgtgtctgagtgtctttcgctcactataccgctccgccatcaccgaatataaagtccccataagtaggtctcgatggggattcccatcgatatcaaagtagtactatgtaataaaataatttaaaattatgttaatttataaatgaggacataaaattattacaacctttaataattaaaaatcactcactctaattcgattgagcacttgatccttgtattgttggggtacatcagaaaaatttagatgaccacccgggcacaacatgcttacttgttggccaagaaatcgaacataattgcttgcttcagtgccaacaactttgcctgtttcaagatctacctccaccggtaagggcttaccagcttctctcctttttttttcgagattagcgtttgcggcaaccccacgaccctttctgaccggaggtggaactatatatattcgagggaaaaataattttattagtaaatcatacattcactatttatattcagaacaatgttagatttgaaaaaaatatgaaaacctgcttcgcagga

SEQ ID NO: 284352 - DNA, 654 bp, Cannabis indica
ccttaacggaattcttgaagaaaccatctggaacaaaaggtttgatgaaatcatcatgacgtatggctttcttcagaatgaagatgaaccttgtgtttaccaacttaagaaaaaccaagtggtagtcttcctggtcctttatgttgatgacattttgattattggcaacaatatcaagaaaatgactgacatcaaggaatgacttgacactcaattcgaaatgaaagatttgggtgaagctgcctatgttctcggtattcagattattagaaaccggaagaacagatcccttgctctctctcaaacaacttacatagataaagttttagagagattctcaatgacaaacaccaaaggggcacaaattccttctagattttgtatctgtctatctaaggaacagtgtcccactgatcctcaagagatagaggacatgagaagggttccttatgcttcagcagttgggagtctaatgtatgcaatgttatgcactagacgtgacatttgttatgcagtgtgaagtgttagcaggtatcagacaaatccaggcaggaacattggaatgttgttaagcatatcttgaagtacttgaaaagtacaaggcaattcgtgttagtctacaagggtggtgctttaaatcccgtaggctatacc

SEQ ID NO: 284353 - DNA, 600 bp, Cannabis indica
taacaatcacaacactaataagtgatacgctaaatcacttcccgaagacttaaactagaaactaaaagtttccctatcgataaaaagcatggcaataccccaaataacataaaaacgagaaaatctagggttcctgaaaaatttcccaaccggcagaccggttgcacaaccagaattccggttctggaaatttcaaaaccccatccggaattccggttcctcgcagatttcaaccaaaaattcataacttgctcaaatccaaaccaattcaaacaaaaccttccagacctgctatatagaccctaaggaacatttctaaagcataaaaaccgagcttcatgcaaacaaaccaaaatcaccattaaagcatcaagctttgagttccaaactcaaacttgattaaacaacactaacatgcatcaaaccttgattaaaattacatattcatgcatattaaaactgcagaaacagaactcaaacacaatcaaactttacagcagctattttcacattttcactttgaaaaaccatagttttgagtataaaattccaagcttgaatcaaagcaactaacatgcatcaaactagctctaatctact

SEQ ID NO: 284354 - DNA, 515 bp, Cannabis indica
gggtggtgccgtcagactttaatacatatggcagtttcaatacacctcctcccatgcggcattaaatgcgagatgactgttcagataggatctgacacctcccggagatgctttgctgcagtcttgctctccgggagtatgtgagacttacatgccttttccaggaggcatgtctaaggttgatccctgcgcttaagaagacttagctgaattatataaacgccaaaccctttctacctacgtgtcatcatccggttggtccacgcattttggacaaaaccaggggcaacatttacccccaagccttgtttggtgatgaagtgaacaaggcttgcttaggtgcctccggttgccttatcagcttcctggcacgtgctttgggcgcgtggggatatattaaagaccattactgtagttatttgctttttgcaggcgtcgattcgtttcttgcccattaattgatacggcgcatgaaatgggtgtcagatgggcactcaaacgttttctaccgcctt

SEQ ID NO: 284355 - DNA, 429 bp, Cannabis indica
ttttttggaaaatacattcaacctatttaaataaaaacaaactaaataattaagtgtaaataaaccctaaaccctaaaagattcttatttagtaataaattacaaaattaattaataattataattaatttaattttaaaatataattaattttaattaaaattttataaggaaataaattattaggtaactatcaggttataagttaattattatttattttccaaattaatcacaatcatttaatactaatccagtaactaaaataatgtaaccatgatggttatatatttaatatagccattgaaacccatcctaattttaaattatgcaatcttaatgggtattatccataaatgagtaaaattagaaaattttgagtttttatgcttaatttttttttatctaattaaaaaaatctttaatttt

SEQ ID NO: 284356 - DNA, 587 bp, Cannabis indica
attttgttgaagacataagtgctcaaattccgatcattttgggtagaccatttttagccacatcaaatgcaatcatcaactgtcgtaatggtgttcttaaattatcatttggaaatatgactgttgagttgaatgtttttaatgttgctaataaatctgttgattgcgatgatgtatatgaggtaaattttattgattctgtcacacaagatttcatgctaaacaaagataattcttttgaaaattgtgtaagtcattttggtatgaattttgaaagttcttttgatagtgtaaattctttgttagagtctacaccattgataaacacagaagagtggaacaccaaagttgagtcaattgaaccctttcgccaattagaatcacagtcactccctgaaccaccaaagttagatctaaaggttttacctgaagatctaaaatatgcattcctaggagagtcagaaaccttccctgttatcatcgcatctgcgttagacaagaaacaagaagagaaattggtacaagttcttaagagtcacaaagaagccatagggtggaccatggctgacatcaaaggaattagtcct

SEQ ID NO: 284357 - DNA, 677 bp, Cannabis indica
ggccttcatctcactaagcctcgatcttttgaattaacagcctactgtgatgccgattgggcatcagatcccgatgataggaaatcaacctcttgttttgctatcttccttgggtcaaatttagttgcttggaagagcaagaagcagcagactatttctcggtccagcacagaagctgagtaccgtagtgttgcaaatgtaacagctgaacttacctggatgcattacttgttttctgagctgaatattcgaatgccacggcctccaaccgtgtggtgtgacaatttgagtactgtcagggccggcccaaacattttgggggccttgtgcgaaattttaaaattgggcccttaaaaaaaaaagccatgtacattaaaactacaattctattagtagctttttttttaaaaaaaaaaaattgctttataaattttcaattatttttttatttatttatgtataaataataggaaaaaagaaaaaaaaaaggaccttttttttaaaaaaaaaaatagtgggccttagaaaaatgtgggccttgtgcaatggcccaagctgcccaatgattgggccgtccctaagtactgtgatgctcacacaaaacccggttctacatgctagaactaaacatattgagcttgatctatattttgtcagagagaaagtgatggacaaaa

SEQ ID NO: 284358 - DNA, 931 bp, Cannabis indica
aggatctttcaattctaagtttgaggggggctgtcaagacaaactcatgacagttatttcagttagttgttactaactgttttctgttacagtcagcttgattgtttctctttctttctgttgtaaccaattcttgttgtgatcatcttcagctactgtattgtctatataagcttgtatcgattcattcatcaatgagattctcttttcaatcttcaatctctctttctctgtctttctctgcctttctctcttttcttctccttctctgttttctggtatggctaatagattcaataggtgttagacaagatattaagtctgtaattagttaagttttatgtttatgtacaactttatttaatgtacataacttagttggattattaggcttgtatataaaagcatttgctctgttgttaattagttaagaaatattatgctctctcatgatttcacttacatacaaatattctataatattaagtaatgttttctttaacaactatttattattagttgttagactatcaataatatcaatacgaggttaattaattaagtggatggtaagcaacatagttgggggattattttttttaataaaaaaattgggactaataatttcgttggatgacaagacaaagaaacaagaatgataaatcagacggtggacaatccaatgtgaatgagatcaagtgttccaacgttgggagctgacatagatttatacctcactcccaccactttcctcctttcgttgttgttaggccttcttatctcaaatcttagaggttcatgcataaaccccaaaccaaaccccactccttttcttaacccaaattgccataataactaaataatatgatctgtaccatgtcatgaaatgtcgtgtgaggaatctaccaaaaaaaaaaaaacgaataatata

SEQ ID NO: 284359 - DNA, 548 bp, Cannabis indica
tgtttgtgaattttcgtgaaaaataattgaaattttgtttctggaattatttttattggatagtatggaaaaaattaagtaatttccttttttacagaactcaatttagatttaatttgaattagttatgattttttgaagattcgaaaaaaatcaggggtgatgcactcacttacgcgcgcggacgagggtgacaccctcggacaacacgcgttcagacagtgctcgaccgagcacctgtcctgcaaaccctcccatgcgccgaggtttctcggcagtgcaacccttagcgcgcgcggacagtatgctcagcatactgttcgtacaactcgcattgttttcgtttttattcgatttttcatgctatttcatggatttaacttccgattttttgtgtagttttgtatttagacatttattattcctatttcaattctaaatatcataataaaataaataaaaatttttttaatttaatttcatgatattagtgtaatttgaatttgaaaatagtaaatatctatctttttggcttaattatctatctt

SEQ ID NO: 284360 - DNA, 610 bp, Cannabis indica
ttctgtttcccaggtccctatcctgattctgggtccaagtatcgtttattgtgtgggtttgggtcctggtctaggttcgggttcgagtcctagtctcagttcgggtttaggtctctgtctggggattgatctgagttcgggtttgggtttaggtcctggtcctggtcctagtcgtagtttggttctatttccatttgctattctgagttcgagtttgggtttgagttcgggtcggagttcgagtccttgtctgagtttggcttcgggtcgtgatttcagtctaggttcaaatcaggctctcggtgtggtttcgcgtcctgggtcttggtctaagtcgggtccgagtcccaagttccaatcccgatcttagtttggattcagttctgggtctaagtcctttgtacttatcctagtctgagttcgagttgggtccgggtccgggtcttgcttttgctttaattctaggtgtgggtgtttgagttcgggtctgagtctgtgtctgagtttgtgtccaggtctggaccccgatctggttctatgttcgggtcctgagtgcgggtccaagtttgggtctatgttaggatctcggtccagatctaggtccagcatt

SEQ ID NO: 284361 - DNA, 506 bp, Cannabis indica
ggatacttatcaaacaccacaacaagcaattattaaatatcaaccaaagcaccacaagcaatataaaatacacaaatcaagaataaaagtgagacaccaagatttttacgtggaaacccaatgcgggaaaaaaccacgggaccgtagtccgctcaaatcatccactatcaccaaagttcaataatgggattacaaagttcttctctagaaaaactagaggctcacaacaacatcaagattaaacaatcttggatcaccaatacaatcatcaacatcatctcaaaagatggatacacaaaagaaaaaaggtttgggtctcactaagtgggtattgtagaagagcaccttagagaggacaatcgccaaatcggaaccggtagatttgaagagcaccttgcaaggattcaccacccaaaatttgagctaaaatggatgagaatcaaccacttgatcttcaaagtaaaatggcaaaactcttttctctctctagctttctttctcttctt

SEQ ID NO: 284362 - DNA, 1105 bp, Cannabis indica
cttaccaagctagctcgactttatgtagacaatatagttcgactacatggagtgccttcaagcattgtttctgatagagatcctcgatttacatcaaggttttggaaggccttgcagcaagccttagggactgaacttcacttgagtactgcccatcatccacagacagatggacagtctgagaggaccatacagactttggaagacatgcttcgctcttgtgttttggattttggaggtagttggggagaacatttgtcactagtggaattcacatacaacaacagctaccaagctagtataggcatggctccttatgaggccttatatgggagaccatgcagatcgccattgtgttgggcagaaccagatgagcatgtcaccattggaccccagattatcactagtaccactgaaaagattaagggaatccaagaaagacttaaggttgttcagagtcgtcaaaaaagctatgccgatctccatcgacgggaagttgagtttaatgttggtgattatgtcttcttgaaagttactcctatgcgtggcgtaacgagatttggagtgaagggtaagctagccccgaggtatattggaccttttgaggttatcgagaggattggggaggtcgcttatcgattaaacttaccaggacagttgggacatgttcataatgtgttccatgtgtctatgttgaggaagtatactccagatccgtcacatgttattgagtatgaggctatccctcttcaggaagatgtgacttatgaagagcaacctgtcaaaatcttggcaagagagctaaaagtgttaaggaacagagagattccagtagtcaaggtcttatggaggaaccacagagaagacgaggctacttgggagttagagtccgagatgtatatgaagtatcctcacttgtttaattttcaacttgaggttgtactttaaaatttcgggacgaaatttctttaaggaggggagaatgtaaagactcggtttgaccgagtcaaatgtatatatatatataaaataataattaaataataatatatatatgtatgtaaaaaaaaaattattttgaatatatacagaacctctcgtcccc

SEQ ID NO: 284363 - DNA, 528 bp, Cannabis indica
aataaccctaggctattagaccgttcctattagggtaataaccctaattctggttactaaacattcatgcatatcattctcaatataagtgccattgcgcatactctacgtgctaatcactatcttacctgttgtccagcaaaggtagagattccaaatccccgggtgctcctgaacaggttccggtaatgctagtcacacaattcaggattttaacaaataggattaacccctgatttcacattcataaaatatattcatggcatttaaaatacagataatcacatagaacccaaaatgagctttccaacagtataaagaactcccaaaacggagtctcgagtcaaaagttatggccaaaacaaaattcagcatttctcaatgaactccaaccggaattccggttggagcagccctgaaccaaccggaattccgattgtctgggtagagagcacgaaaattttcaatctttaaacctccaaaacttactcaaatcttccccaaacactaccaaactttccagagcat

SEQ ID NO: 284364 - DNA, 543 bp, Cannabis indica
tcttacgataccttctaggccctataacatttaacgaaacccttagtccaccgataaactcaatatatttattactcttactgtacaacaagtttagcctagaatttgactcataaaacgtttgaattagaagtcctactgttcacaaagtttttagttaatcgaaagacctttctaacggtataaagatcatcaaaatcagagttataacctaggagttatgcatgttttcgtaaaacagtttctttaaaatcatggatcatgccaatttctgaatacagcccaaaaataaaagttttaaaaatagttacaccccgatctagacaatacttccttcataaaaaatgtagctattttcctaagctttaaaacgagataaagatcttttaaaatggatcaaaagtgagagagatattgaatttttactgaagacactttttctgaaacaaaacttaaaacgaaatatcctaaccgagtaaagatactgacttttgactggtaagaactccgaattagggaaaggtttcttcaaagaaaatatgg

SEQ ID NO: 284365 - DNA, 501 bp, Cannabis indica
ttatcccccccccaaacttgcttaaaggctttgttgagggtgaaagtagttaaagataacgaattcagctcagttaaatggtgaatttttttttagaataggctaaggctcaactttcggtatactaggataagacatttttggtaggcttgaaaggctcaatcgatccaaagaaaacttgcctaaatcattttccaaacaaaaagcattaaggattttgcttcaagagagtatgtgaaactaatgctattccatgtcaagtcaatcattccagaatccaaatagaacacaactgatatccgtaaaaaaaaaaatgtttaaatctacatgaacaaccttctaatacacatccaatttaattcaaaaagttatgagtcaagcacacagttaagattttaatccattgaataagtgaataatagtggttcaatcaatcttcaacttagctatcaacaaacgacactaaaaaaaactaactaaaacgaaacaaaaagaactgaa

SEQ ID NO: 284366 - DNA, 631 bp, Cannabis indica
ctcagcaagaaaagtaataaagaaggatacattaaatagctaattatacatttcattatcacaaaatgattaaactataacattcaacagtaggtaatataatcaatcacatgcatagaaacagatatgctcatatatttgtattgcctaatcaagcaagcccgtgtcataatgcaatatcatatataatatcattgcatcacctaatcaggtgagcccgtgccacaacttgacgctaatatatcgcatcgcctaatcagacgatctcgtacctacgctcggtactcatcatatgccactgacgcccgtacctttgcctggtacgtcgccaaatgtattgcatcacctaatcaggtgagcccatatatcgtgtccatagtatcattacattatcattgcctaatcagacaatcgataatttcagaacatgtcatgccatgtggtacattatacttttcttacctcaagttccggatcaggtatgttggccgacctgcttggagaacgatcgataatctcgggccctatgtcataacaatagtaaatcaataagtgtttatcccaaaacaccacttaacactcgcgtaagacaatctaggattttctaccaaactctgtggtataatacact

SEQ ID NO: 284367 - DNA, 512 bp, Cannabis indica
aaagagttttatgctaatcttactgatgatttccttgatgagaactctagactgtatagaagagtgtatgttaggggtcactggttctcattttctgaaaaggacattgctcaggctctgcaattgcctgagaatgtttccaatgctgtgatgtccatggatcgtgacttgatgcactctgaactcactggagctcgttcagaattgaaaccaggggagagtcttcgaattactcacctcacttttgctcatgcttcccttatgcggtttgcactaagcaattgggttccaaattcgaacaagaccgtggtgtctcaagaagtggctacactcctataccgcatcacctctggaacttccattgatctagcctctcatattctcaaccagatttctccttccgaagaggtaaaaagccaaccttcaaacttgtatttccaaatctaatctataaggttttatcttctcagaagaatgtggcccaagcacatgaaacactggaacctcccatc

SEQ ID NO: 284368 - DNA, 614 bp, Cannabis indica
taaaggtaaaggcggagtgcagtacgcagtggtagcagtcgactactttactaagtggactgaaccgaaccacttgcaactatcacatcaaagaaggttcaagactttatagtgaagaacatcatatgccggttcggactaccgtacaaaatagtctcggacaatggcaaacagttcgacagccaatctttcactgatttctgtgcgaaccatggtatcatcaaaagtttctccgcagtggcacatcctcaagcaaacggtcaagttgaagcagtcaacaaaaccttgaaggatacactaaagaagaaactcgaagatgccaaaggaaactggccagaagaactccccgaagttctatggtcataccgtacaacggaaaaaacagcaaccggtcagacaccatttgcaatggcgtacggttatgaagctatgctgcccgtcgaactcgagccaccttcccacagaagattgacgtacgatcaaggtaccaatcacatactccttgcagaatcacttgatgaaatcgaagaaaaacgagcaactgcaaacttaaagttgatagctcatcaacaaaaagtagctcggtatttcaacaaacaagtgaaagctcagaa

SEQ ID NO: 284369 - DNA, 594 bp, Cannabis indica
atttaaaattccgtgaaactgtatttttgtgcatttgtgaaattaaccctaaatagaatttggtatataattcggctagcaagaatattcttgctctttccctattagtgttttttatttgagtttttcgagatttttaacgagaccaaatattctctaaaaagccttataagaaatcatcaattcacaagcaataaaaactataattttctcttcaaatggttttattattattattttttttaaataagtcatttttattgtgatgtgtcaaaaagggaacaaaatggaagactttatacaaaaagaaatgttaaatcgcactcgtggttgattaatacttttataaggtgtaatattattagttgcaatttaaaatcaaatcttacttatttattttaataaaaattataaaaatcgaagcaattatagtgggtcacctcgtaataatgcaagtcatttgaaaattgaaaaacccaataataaaaacccaaacttttctacaaaattagtggaagtcaattcatggaactaaaaaacatagtataatttacaaccacacatttatatcatcattttgcaatctaccattga

SEQ ID NO: 284370 - DNA, 808 bp, Cannabis indica
caaaatttttagtctataatccatatacaccacatttatagcactctattagagatgcactaagactgccaaagatccaatgtaacaacggatttataactatctaaagggaaggagaaaaaagtttagacaataaagttataacgtcctcaatcagcaaaccaaaaaaattaaaatttcagcttgtaacactatcagttaaccccctaatataatgtcccaaattttatctacaccccaaaaaatataaatacacttccataatttttttaaagaaaacttacataaactaaccattttattacaagttcacaacttctatttctttttggtactctctttatgtgaaatttgtcaaattaataatatgaaatattcaaatttacaaaataacctcacttaatctactctatgtgaccatgatagtcacacagtataaatctatggtcgttttgcgaccatattggtcgcacagtataattcatggtcatttctgcaaccatacaaagttattttgatataaattttcttatcaagttattttgctaataaatttttttacaaaagctatgtttcaaaaaaattctcttcttatttagcaaggtactacactttaaactagggattatttcacaaatacacaaaaaaaaatatataaaaatacgattgtacaacattttaaacatttttacatttttatgattttatttgcagaaaatacgatttttttaatgtaatctttatgttgtacacttgttaatttgttgttgattttttgttatttatatgttattttttgtctgttttt

SEQ ID NO: 284371 - DNA, 571 bp, Cannabis indica
accaatttctaccaactatcaaattgatgaagcctattggatgttggaagacatggcggagtacaatgagtggtgttgtaattgtccaaacaatgaccatgtttgggaggacaactacaacaatttggagccaaattttgacacttacactcaaggaccaaatgatgagaaattgaaggattttcaagagttcaacatagaagaagatcttcatcaaatggttcaaccaagctcacttgaggcattgatgatggagttcatggcgaaaaatgatgccttaattcaaagccaagcttcatccttgaagaaattggagaatcaatttgagcttttggtcaatgagttgtatgctaaaccccatgaaactttgggtattgatatggaaaattcaagggaggaagaagaaaatgaaaatgtcattttgaggagtggtgatgagttggagatacttggggaaaattttgagcaattacaagagctcacttcaatccaaagtagtgaaataaaagataaggaagcaagcattccaagttggtcaacatttattgctgctcataatgctgtagcatta

SEQ ID NO: 284372 - DNA, 556 bp, Cannabis indica
ttctatataagttgtctcagtaaaacttgaatatctctctgaatacttatccgattccagcggtcttgatatcattgaaaagctgattcaatgacctataatttttatgaagaaacctcttacaaattcggaatctttctatgtccaaaatcagtatttgtatacagtttgtcgtgaattatttttctcatatttcctgaaaaagttgtctcagtaaaattggaatatctttttcaattctagcccgtttttaataatctatatatcattttaaagcttagaaaattatctacattttcccttcagagagttttctctaatttggagttttccttggtcgaaaattatcgttttgttgctgtagtctaaagttcgtttgctttaggatttctaaaaaactgtttcggtaaaactatgataactccctcagttttaatccatttttagtgatctttattaatcattagaaagataatttaattgcctataatttgtatgaagacaactttcactgaattagtgtagttgtggtcaaaaaatgtgatctttcagctgt

SEQ ID NO: 284373 - DNA, 566 bp, Cannabis indica
aaaaaaaaaaattataaccggttttatgaggtattatgtgttatgaagtattttattatgaaactagttttgtctttaatttatattttagtgttttaggaactgatttcttctttgtttgtaattgtaatcggtttgagttattgcgtgttacttgtttgtattcattatgttatataactggttctattttagttataaccagtttgagttctttcgtgttatttgtttttattcaatataacactgttatagaaccaattctattttaattataactggtttgagttattttatgtcatttatatttatttattatgttacagaaccgggttatatttaaataataaccaatttgagttattattttttattcatataaccggttatatttttagttatatatgagacattgactttggtgacttttccagcgacgttgactttttcgttgacgttgactttccggcatgttgacttttccggcaatttttccagtgccggtgacttttccggcaaaacatattgttgttttacaaatatgagatttctacttttttttttac

SEQ ID NO: 284374 - DNA, 579 bp, Cannabis indica
taggttagacaagaacttgggttgattggtatcagagccagctatttctattagaaatattgatccttagggttcttgcaagatttgttgtactgaaattcattgatgctacaattcttgatttttctacatttttcctttttgcaacacccagttggaactaaccccctctctagacacgactctgggaatatactactctctatctttgttttgtttttccttgttcgtacaggaatggagatgttcagagaaggatagtccacatcacgacccccaatgctggaaggtgccaattatccatactagaaaaccaaaatgcgagcattcttgacggcggtgaatgaaagagtttggatggccatagaagatggttggacttgcccaacagtgatggataatggtgtcaccaaacgaaaacctatgtgcttgtggactccagatgagatggagagggccaatttcaattcaaaggccatgcatgctctgttcaatgcaatgtccaaaatcaattgaaggtcattgcgaactgtgagatggccaaagaggcttcagaaaaaactacaaattaaaaaatga

SEQ ID NO: 284375 - DNA, 861 bp, Cannabis indica
tggtatctcggtgcaactctatgtacacctcaccgataccttgatatgttattctgacggcaactaacatgtacgctaaacatgtatgaacatatgcatatcattatactaatcttacctcaattccaaattcaggtgtgccggccaacctgagtggaacaactgctcgacgaattacaggctcctaaatcacatcgataaccacgaggataagtgataagctaaatcacaatcgagacttaggttttaaaccaaaaacctatctactgcaactcaatatggcaataccctaaactagcagggaattaaccaaccagaaacatgaaactaacgcaaatcaacaagctaaattttttgagaactctgctgcaaaaatcggttacccgattttacaagtacctgtaaaaccggttagccggttttatccagaaaacccaaacaattccaaaccctaaccaaatcgattccaaacttaaccaaactttccagacctacataatataccccaataaaccatttccaattaataaaacaactacccaagctcagaagctaaaatcaccattaaagcttcaagtttgagttctaaaactcaaacttgcttaaccctactaacagccactaaaacaagctaattcaacatatctaaacataatcaagctccaaaaaataaccataaacaataacagcaactacagcaacataaaaccaaaatcaatgcaaaaactctaaacttaaaactcaagaactaaggaggcagttgctagagacttaccttgagtttggaacacccaaagcttgctgaaaatactagcattgctgaaaaaaaaattagaaccctagctggttttatgaggttcg

SEQ ID NO: 284376 - DNA, 503 bp, Cannabis indica
tttgcatatttattgtaaaacccactgtgtatttccaaacagctttgaatctttttaattaatgcatcaaaattagtattttataaaaaaacccactaaatattggggcgttacacttggacctcgatactaaagggctttttcctagcaccttagtaaaccagatagttttaaggagggtagattgccaaaagaggcatgagttatggtttttgattaatgaaaacctgtgagattttctctccaagagtttgcaattgtatctggattgtacactgatggtggcccgaaacctgaagaaatggagcttgtttcttctaagaacaagttaaaagaaaagtacttcaagaacatgatgtctattaaagtaacagatgttgtcaatgctctagatagcatatctagagaagcaaagactagagacagagtgaagttgtgctttatctatttactcagtgcatttctaataatgccaagtccttcttcggttatagatcttgaat

SEQ ID NO: 284377 - DNA, 1008 bp, Cannabis indica
atgcctgaaaataagacaaatctaaaaagaaacagattagcaataagcacgaaaaattaaccaaagtagaatttaatctaattttttataatatcaatttttaaacaatttctcgacacagcggcaaaaacttgttacgaaaattatgaacaatacgtaagtgcacgtaatcaagtagtaaactcacacaagtgaggtcgaaccacaaggaattgaactgaataccactaaattagacttatgattctatttggtagataaataattttgatagattttaaaataaagaaaaacaagaaaattaaagaaagcaataaaggtgtttaatcaaggatgaaaaattagggaaaagaatcctgttgatttaattacccaattgttaatgctaattactattctctttctcaatgtgaatgacagattataaaaattaacctaactcttttcagatcttttaggtcctaaatcacatgttatctaatcatctctgagatagattaacatataatcagcattaagcaataatctaaatgtcacaaaggctatgcaaatactttcgtttcacatcaaaacctagtttatccaattttagcattcccaattctcacttttcagattttgaattgggatcataaagcatgtacaaggtgatcaatcttaaacatgtaattaaacacaaatttggataaattcacaatcaagaaaggagaaatagcaattatcattaactaaaaataatttcaatcaacattcatcatctccccaaataggagtttagttcataaaatccataataacatccataatcaaaactaaaacagaaattaacatagaaattaagagtttaagaaagaactagttggtgattgcattccggatcgccacaattgcttcctttgcctccttctttcacttttgggtccaatttctgcctcctttccttctaaaacagccccttaaatagaaattagggttgctacctttgaaaaagtcaaaaactgcccaaaa

SEQ ID NO: 284378 - DNA, 565 bp, Cannabis indica
gacgtaagacatacattatcgacctcggaaagaagaatggtcccagctcgctattgggatcactataatcaagtttctgtcgagacatctccagatttagcaattaaggacgtgtttaatacacgatattcttgacccagtaaaagtgggaaacaatctcgaaaaagagacgaaaattacagccatacgattttcaaaatcatacaccgcatttacatttcgtgatatgtaatcagatcccacgattttagggataatggctataaacatattctggtcagctttgtaattaactgccactatgcaattataaatagtggcaaacaatctcgaaaaagagacgaaaaaactcttatgaaagaggccctgaaaaaatactcagaaatctgaatagatagactcgtggactatgcagaattttaactgaaaaaccatgtaaaaaaccctgtgttcatatattatttttctatatctttattttttctgtgttgaattatcatcgtgaggctcaaatttggttaacgaaatatgcgttaacactagcctatttctctctctctctctc

SEQ ID NO: 284379 - DNA, 641 bp, Cannabis indica
tattcaaggatttcctcgatatctgtgtaattgtgtttatcgacgacatccttgtgtactctcaatcagaagaggagcacgagttacatcttcagatggttctgcaacggcttcgggaacacaagctttatgccaaattcaagaaatgtgaattttggctatctcaggtgtctttcttagggcacattgttagcaaagatgggatcaaggtggatccagggaaaatagaatccgtcagggattggccaagaccgaagacagtgacagaaattagaagctttttgggtttagccgggtattatcgtcggttcgtggaagggttttctaagatctcaacacccttaactgaacctacaaagaagaattagcggtttgtgtggtcagataaatgcgaagctagttttcaagagctgaaacagagattgattacggctccagtgttagctctgccttctgacaaagaaaagtttgtggtttattgcgatgcatccagacagggtctggggtgtgtactgaggcaagccgaccgggttatcgcttatgcctcccgtcagttaaaggattatgaacagcgatacctgactcatgacctagaattggctgctgtaacaccctaactagcataggcgtattacgtgatt

SEQ ID NO: 284380 - DNA, 805 bp, Cannabis indica
gtctatgtgaataagaataatttttttagtgttttttattataaaacaaataaaatagaccaactcaatatattactaaaaaagattaagaaattagaagtttgtgtctttttttaatattactaaaaaataatatatattatatattataattttttaaaatatctttatatattaaaagtgcctatctaacggcaattcttggtttaacgatgttattttgtttcctccgttaactttaacagaatattcccaattaatttatattatttttttaacaaaaatttattcaaaaaaaatgacattccgttaacctaacacattcgattagacttattagctcctaaaatataaattaaaccctaactcaactcttcaaccatgaactacaactcaactccctcaatcgtttccgtcatttctgggactgtcgatctttttggcttcattctcgctatcgactctatattatttctcagtattcatcatcctaaaaatcgcagccattctttttaaaattttatctaaatttttcaatctaacaatttttgaatgctttttctttttggtttgatgagcagaggagaaaactgacgaacaagagcctctcaaggaggaagaggtgaaaactgttgatcaagaggcttcgaaggttgaaacagagaaagagaaagagaaggctgtagttgtggtcaccgaggttgcttctgtggatgacgatggcgctaagactgtggaagcaatcgaagaatccatcgtatccgtaacccctgccccagtcgacgaggcaagctcatcagcaaaa

SEQ ID NO: 284381 - DNA, 507 bp, Cannabis indica
gctatataaatctccgtaattaacaaattacgcttatttacttatagcaaaaatttatattttatgctgaaataaattagtaggatcataatcccacttattacctgattaacccataatataaatataaaccctaattatttaccattaggcttatcgggatattacaactatcccctccttataaaaatttcgtcctcgaaatttatttaaacaattagggatattacccctatatttatgattctaactctcaaattgatatttctatcttgctatttttctacagcactttcttaactagtggaattgtctcatttcatagtattttcttttcgggttccaaaaacctagacaagatgttttttttatatatatatataataaatttgtctaaaatttaacatcgtcacaacttagaatatcggtcgagtctgatacatattttctcatcatggagacacgaaacacattatctactccagacaacgtaggagttaaggctag

SEQ ID NO: 284382 - DNA, 454 bp, Cannabis indica
taaaaattcaatggtaaaaaccccaaaaattcagattaaacatcataaacttcaaagctccaacttaagcaaaatcaccaagaacttcaagctcaagaacttgaacttgaacaattaatttcaaagttcaataacagaataaaaacacaataaaattccttttaaattctgtctaaacctaacccaacatcaattcaaaagatccaagtacaaacatgctcaaatcaacaagaaaacactaacatgcatctcaagaccatcccaacctatttcatgcttttcaaccataaaatcacagcagcaaattcattaaatttcagcaatagaaaaactacctcaagcttcaacacaatgatcaagccacaactcctcaaacaattcttcaatttcaagcttgaataccaagcaaatcaccaatttttcaaccaaatacaaagagatagagagagagaga

SEQ ID NO: 284383 - DNA, 693 bp, Cannabis indica
ccatcctttttctttacaaacagaaccggagctccccaaggtgacacactaggccgtgtgaaccctaaatctaacatcccttggagttgtatcttcagttcttttaattcagcaggtgccattcgatagggtgcttttgaaacagattctgctccaggaattaaatcaatgataaaatctatctcccgctgaggtggtaacccaggtaattcctcaggaaacacatccaggaattcctttaccactttaacctcttcaggtccaggaacacaggtttactggaatctattacaactgctaggaatcccacacacccattgtgtaataaatctctagctttcaacgctgaaattcttagaacacgagaaccttgaaccgaaccaacaaagacaaatggttcctcattctccggttgaaaagttaccattttttgtttataatcaatactagcagagtatctggatgggaagtccattctgagtataatatcgaactcggccaatggtaactccacaagattagcgctcaattctctatcttcaattctaattaacactgatctaagccactttcttgaaataatcaattccccattaggcaaaagggttccaaatcccactctcaaaaacatcactaggtctatcaagctaattaagaactctcgatgacacataagatcgagtagcacccgaa

SEQ ID NO: 284384 - DNA, 797 bp, Cannabis indica
agaacgcaagtcttcaaagggagccagtatacaaagaaccgtctgagagacaacaagagcggatagacaaacgcctctccaagcaaacttctcgaccagtctcaggtaatttatctcttgttataaactgacgccttgagttttatttatacttatcttttatttatcctcgcagagatgacttttttgaagtccgcgcccgtccttaaaatcaagccgaagagtggaacagcgacgacatcgcccgttgtcgcccagaagaggaagagcgatgtggtggctactcttgccgcagattcttccaagaagctggccaagaccacgcaggacaaggggaagaaagtcctgatcgagccaactgtccgagctcgcgacttcctggctatgcaggagaagttcgtgggcgaggagttcatatccaaggcggagaagatcccttctgaggagcttgttccgcgttctgtggagttggcttcgcagtcgatgaccctgttcctgaaagctgttgccgctggttcgaaggaagctgactcgctgaagaggcacaatgcccagcttcaggagaacatgaagaggctgaagcaagaggcggctagaaaggataaagagcttgaagaaatttgcaaggctaaggagcaggctgagctcgaggccaagaactctcgggcgaagatcgaggagatgactcgcgacttggaggtcgagaaagagaatgggaagaaacaatatgatcaggcagtttctgattatatttacaccactctttccaaagtcccagacttcgacttctcgatcct

SEQ ID NO: 284385 - DNA, 713 bp, Cannabis indica
tactaatcttacctcaattccgaattcaggtgtgctggtcaacctgagtggaacgaactgtacggcgatttacaggctcctaaaccataacaatcacaacactattaagtgatacgctaaatcacttcccggggacttaaactagaaactaaaagttttcctatcgataaaaagcatgggaataccccaaataacataaaaacgagaaaaactagggttccagaaaattccccaaccggcagaccggttctgtaatcggaattccggttatgggaattcctgaaccccacccagaattccggttgcacaaccgaaattccggttcctcgcaggaatcgtgcaaaattccaaaactcaaccaaatcaaatccaaatcaaaccaaaccttccagacctgctatttagaccttaaggaacatttctaaagcaaaagaaccaagcttcaataacagaaactcaattaaccattggaggttcaagattgagttcaaaaactcaaaacttgactatacctccaaacagctactaaatcaaacataactcaacctatttcaacataatttaacaccagaaaacactactcaaaatagcagcaaccacaacaacgatcatcaacaatttcttaaaaaaaccatagcttttgtaccaaaaattcacaaactaaaaaaaagtaacaagcatgcattacaacctatctaatccattcaattcaa

SEQ ID NO: 284386 - DNA, 608 bp, Cannabis indica
agatcctggtaaaataaattttcaacagatttcgagttagaaatcgagtttgaaactttttaaaccttagtctaaatgttaatggtattttccatgtaagggcttgattttttttttctgttatgcaaagatggtaatatttatggtatatatgcgccctgtgaagtttcgagtgatttggataagttttggtagtgtttcggtgagtgcaaaaattgagattttcgtatttcatagtttttagaaatttctagaagattagaaatcgtatttttgtcataactttttactcgggtgtctgttttggacattctatgtagtgtttcgaagcttgcaacaagctctacaatatggtatatattttagagccaaaatataagttttaatttagtgtatttatactgtggggtttggtaaaaaaccctagattatcttatgtgaatattaagcagtgttttgggataaacagttattggtttactgttgttgtgacatagggcggagattatcggggatagttctccacttgggttgactgaagtgtatgaagctggattaaaggcaagaaaagtatattgtactacatagtacgttatatgtaatacaat

SEQ ID NO: 284387 - DNA, 463 bp, Cannabis indica
aggctactaacatgcttcctaacaggctttacttaaatcatactattaaaataagctactaaaggaataaaagcttactgaaccgtggaacgagctaactgctgatgatgattgtgcatgttgcgactatcttcgaagataacctggggactctaataccaaattgtaacaccctaactagcataggcgtgttaacgtgattttaaatatattgtgccgctcgttgctaatcaacgaggttaatggaaatcgtgattgattaaaatttgcttatttaattaaaacttatagtgttacatacaaaatatttcgggatcccgtttaaaaaatactttacaaaagtttgctattcatttacaaaatatttgtcgcccagcgactaacaacaaaagccctgatgtcccgaggatcgtacgcttcagacctaaccgcctcgacaatgtacaatctgttgggttttatg

SEQ ID NO: 284388 - DNA, 615 bp, Cannabis indica
tgttaaggatagaatatagtaagctaaaaaaaatacaaaaatattgggataatatactaattattatacaaaacataacttaaaaaattataaaaataatactaatatactagaaaaatacaaacccatattataaaatttaaatgtataaaaatattaaattacataaaaattaaaatattacacattattttattattcaataaactaattattatacaaaacataacttaaaaaattataaaaataataataatatactagaaaaatacaaacccatattataaaatttaaatgtataaaaatattaaattacataaaaattaaaatattacacattattttattattcaatatactaattattatataaaacataacttaaaaaattataaaaatgatactaaaatactagaatacaaacacatattataaaatataaaatattaataaaaaaatacctaatatacaaacacttagagcaatgtaaatttgtatttatttaactttttaatttaattttatttatgctttaatttaatttaattaataatacaaaaataaatttagatttttaataaatgtaaaaaaaatatataaattaaagctgaaaaa

SEQ ID NO: 284389 - DNA, 744 bp, Cannabis indica
gattagtgtagcggatagtctccttgttatcagatgacctaagtgacggcggaggactcgctagcaggatgcaaagatccgatccccactggaactcgacctatcccaatatccctcgctacacactctcacccagcttcatggtcacactgataactgttcactgtcttgctatctgaacttgaagattctgtttgtgttccgtgaactcaataaccacttatttgaaatgctatagcgggtgcgggaccaagacaaagaaagtgcttctatcgaggtcttgaagagccttgtgttgaagtaagtacaccggtaacgtatataagatcaatgggttctttcctcaactaagaagaaaattagtcagataagtgagactaatttcaagaagcgagacaggatcgtaggatagattcaggctatccgacatcgaatcatctagttgcttgttgttttctttttgaaatcgagattgggttggtgttcagtgtaccgtgggtacaagatcgaaaagagactgggacgatccaccatcgtttctggagggtaagaggcagtcctactcccatcaaattcaaaggctgggtgaccggtcttgggttgtgtggccccgcacaggtttcggcacccccgggggtcggtgagtaggttccgtatccctcgtgccgtctagtcggtacgttctcttccgtgagaaagacctctcgtgtccggcctcgcaatcgtgcctgcggacacttgcag

SEQ ID NO: 284390 - DNA, 1355 bp, Cannabis indica
atcactacaattgtggtgaggcttgactaaatcaaagcaagcatcatcactgttatttttctaagcgaatttgtatgtgaatcactgagcacattgacagccaaaattaaattctcaccacaaaaatttcttatgttagtggtacctatactatacgggactacatagcttaatataatgaataccaaaattattgaaaactaatatgtcaaaaagcgccactaatatgtaaattaaaatcagtttctacattcaaacttgttaggtaataccgtagtagggtatataatgtgtaatataaatttataattaaattattattttggactaattttaaataacaaaatgtatacatatgataaatgggttgataacggttttggcattttgacctttattgagtttatgcaagcaaaagacaaagctctaatctagaatatgaatgtttcacttcgagtactggctcatattttatttatttcctttgaaggaagtactgtctcatatctagtactatttccttgcaccttgggatctcaaaacataccctttaatcctgaccgtccaattgaacagcgaaggttgctcccttgaatacacgtgctgcctatcttttcttctctttttttaaccttttgcttccctgcatggaattctcctccaactacaacacaaacaagagagagaaatagagtagagagagagaaaaaaacaaggaaggggggcaaagataaaagagtagaatgagtcacggtttcagcttcgattgttcttcacaggctcgttcatcgccatcattagcgactcattcttcaaaactttgatttttcatttttgtatgaacccatatatttttcttttatttctttatcttcgagtacatccattttgtgggggctaagagtacttgggaatggaattttgagggtcccttttgtgtgggtcggatctcgtacttaacaaaaactgtcacatctgaacacttggatcctcatttgatcatctcattttgccagaaagcaaggaacttcatgatccattcaccagtttatcgatctggctgtctttgagtttcctctgcttattcacaccatttaggtatttacagctggtaaaaagatcatggaatgtagcactctaccagacttcaggtaaggaatcgtttttgtttttgtttatttttctgtactgggtatctctggttgtgagtgctaacattacatcaatcatcaaagcaacaacaaaagaaaaaaagaaaattctaagcagagagtagtccacgatgaaagtgaaactatttcaatgttttatgtggtgacaattcaccgtctagaacaaaaaagaagcaaagagtt

SEQ ID NO: 284391 - DNA, 565 bp, Cannabis indica
aatactttttgaatttgcatcaataataaaaacacatacacattcaaacataataattggtaatagataaaataaagaactgaagctcaactcataaattgcaatataattgaaaaagatattttattatgaacaaaaaaaattgcaatatttatgagaaccaaacagggaattaagatcccaaacttgaaatccaaattgtttgaaaaactaaacaattaattcaaatgaaagagcttcttctttattatagacaatctccatccaccatccagctttctaatccaactcgtttagacagcacccgagttcaagaagctttagcttgtttctttgcaagatacttaggacattgggatttccaatggcctttctcattgcagtagaaacattttcctttttgtgtattgccagaagctccagcatttttgttcctagctgcattcgcagcttgagctcgcttcttggcatttttccacttcttcttatgatgggatttggaagtagaagcaacaagtgcttcatgattacttgtattattaccatttccagaattctgaggttt

SEQ ID NO: 284392 - DNA, 394 bp, Cannabis indica
atcaaataatataaatattatttttttttttaaaaaaaaaaaaaataatgtcgtgtctacagtgcacagcatatataccgtgcactgtagcattaatctcaaaatgctgtgttgaatggtgactccttggaacaaaaaggaacgacatttatataaaatgccgcttccttggagaagctcttacaactagagcaccattactagtatagtttcaattataagtatccaaagacctcactattatatattcttaaaaatgggttaaggatcaccattactagagcaaaagcaccacttcaaatgatactactactaaaaaaaaccttcaatgttcattaaacctagacatatagaaaaagttattttgattaaaagactatactaattttttttt

SEQ ID NO: 284393 - DNA, 732 bp, Cannabis indica
aactccatcgcccattttaacaatctccccgatgcttctggtttcgctagaacttgtcttaaggggtagttcgtcaaaacttcaatgctgtgagcctggaaataaggtcgcaattttcttgatgatattatcaaggcgaaagccaacttctccatttggggataacgcgtctcggcatccagtaatcgcttactgacataatacaccgggtattggcgtccttggtcctcgcgtattagtaccgaactaatcgcatattctgaaacggctaaatagatggataggacttcaccggtcaatggctttgacaagatcggaggttgccccaagtgtatttttaaagcttgaaaggcctgctcgcacttttcggtccaatggaactttttgttgcctttcaaaatctgaaaaaactccttgcacttatcagaagatctggatataaagcggtttaaagctgcgactttacctgtgaggctttgaacctcctttggcttggttggtgatggcatttccaccaatgccctgatcttcgcgggattggcttctattcctcgctgattaaccatgaacccaaggaatttcccagagccaactccaaagacgcatttcagtggatttaaacgcatcttataccgtcgtaatatatcaaacatggtctgtaagtgggcaatatgatccttcgcatgttgagattttacgagcatatcgtcaacatatacctccatggttttt

SEQ ID NO: 284394 - DNA, 531 bp, Cannabis indica
aagcagccatagtttatctatgtgatagtgaattaattggggagaaaggaaataagagattttccttgtgaactaacctagaaattgattatcattcttcatctctccctctctttctttcgaatcgccaaacccagcaagaaggtgggtgttctttgctgtaatttgtagattctagcaaggttcttaacactttgaatcaaggtaaatctccctagcttttctatttgaattttacttaaactttgaattgagctttatggatttagacttaaattaggagttgtgtgtgtgtttagtttgggttcttagtctgaggttagataatggtagtctttgttgttttaagctgaattagttggctattttggtgtttggttggaaattggagttcaagagcttaggttggagctctaatggtggtttgggattttggttgaattgttgagttctgttgtttgggtttggtttagtatattgtttgcaggtattctagaagttttgggaggatttgggattgatttgaattaa

SEQ ID NO: 284395 - DNA, 542 bp, Cannabis indica
acaaactcccacttgcactaacataaaacaagttgtgctttacaatcaatctgtggtcttgatcttcagatcaagtgtagtatatttgaatccacccaaatttctggaaccaggttcataaaacattatgaaacatccttaactatatgctttactcatcaagggatactgaaatccttactgcttattaagtacatctgaacaaacagaagacatatctctcatattttaaaatttggaactgagataatacagtgtagaattttcttcagtagaataactttctggtaatttcgaatttacaaagtttatgtatatcttctctggtggagcttgaattattatagatgggtttttacactcttctagaataactcctccaccctcagagtaaccaccatctcaaaatcttaatgagttggtgtagatattaggattactaatatatagttccttaatatctaacatataggtcactttcataaatctttcttgactgtcccctaatgttcctcatttgattacatctcagatagctccca

SEQ ID NO: 284396 - DNA, 881 bp, Cannabis indica
aaaaaaacccaacaatatactgtgttaagttttcactggtgctctactggtattttttagttattctactgttgttttgagttgttctgttttgtgttttactgtgtttttatattttactgtgttttataaaacacagtatattataaaaacacagtatatttgaaaaaattttcgtgtgacagtatttttgtaaaaattaactaaaatttcagtatttttgtaagtttccctaataaacaactttagacactttcattgtcttaaaaaagggaaatttacatcatttactaactttttcatttttctttcaaatatactgtgacacggcaaagttaacttttttacttgtttttattttttttgttttatttcgacagtatactgtccttgattcttagttctaatttgtatatataaaaagtttactaagaattgattgatgactctcatgtcactttcatttcattgtctagtattttttttttttaatttaaaattttgaaattgattgatgactctcatgtcactttcatttcatgtctaaatttttttgtttatttaaattttaaatttaatttcaactcacaatttttacttaatttaaaagtgggcacaatccacgtgattcctattcccaagaatttatatatgtttattatttctctctctatctctttttgtgggttaaaatctatagaaaattgcttgagattggtgtttaagataaagaccatcaacaaagactttacataaaacccttctccccactcttcactatttcaaaaacttacaatagctcactcatttcattcattttttttacttgggttttgagagagaaaagcaaaaagaacaatacaggaggaagaagaagaaca

SEQ ID NO: 284397 - DNA, 691 bp, Cannabis indica
atatatacaaaaaattaaagataaaataatgatacaaatactttctaattatacactacaattaaattaaatgtgattcccactcaaaatatacagtaaacattatacattttctctgagttttttattcaatttgtgcggaaatataatattttgtcaaaaagatttttatgagaaaaaaattaaaaaaaaaaaacgaaaaataagaaaaatagtataaggtaaatgattaccttaagaaggtaactagttaccataaactatttttccatattttttaaatttttttatttaattttaaatttttctcgtaaaatattttttgaaaaagaaactatcttttgtaaattttgcccaaaatataaaaacatagaaataaaaaaatctctaaatatataatcagtgatcataatgatcaatttgttgagccaattctatggtgagtttgttggcacgatcatcatggcctcctgcaaatgtatacactcgaaatgcaaactcgaaagccctccaaagcaatttactatttgatttcattctttcgcttgttcttttattctcttcacccaccttattataagcttctctcctctcctacaaatgaaatatctaattatactacaaaacaaatcaaagtttattttattttctttttcgacttgggaatattagtaaaaacctaagtaaccaa

SEQ ID NO: 284398 - DNA, 644 bp, Cannabis indica
taggattagaatctgttcttaggtttgtttaaagcttggataggtttgagtttgctgaatataagggctgcttaacttggaaatgagttgaatgaagttttatgagttctagttcacttgggaatacaattttgagtaaatggatgagttgtggtgttttgatgcattggttatgttgtgtttatgatattatattgatttggagcagttggacaggtttggtttagttttggttcgagtttggaggagaaaactcttggttgcaatcctgccagaaccggtcgaccggttggttctggtgtagcagaaccagtcgaccggtttgcttacaggggaaaattttcagtttttgttagggccgatttcaaagctcggggtgatttccgtgtctggtatagattgtttggaagttgtaaaacctattttggagctaatagaagttaatgttcactggttatgggaagtagggttattcgcgaatttatggattaaggtatttattgaatgttattgtcgtgacataggactcgggattgtcaagctttgtttatccacttaggctggcatgcacgcttaatctttggactcaggtaagaaaagtactatatatcgtttgtagttaacgattataattgtgatagtct

SEQ ID NO: 284399 - DNA, 578 bp, Cannabis indica
taattctaaaattagactatctctattttatgaattttcactatgttatggcttgattgtgaagaaataggattttagggttaatttattaattaagagactttgtggagtctaattaataaatattataaataaaaattttatttgataattattttaattattaaataaatagttttggcatttataggggaaaagtgcaaaaagtggtatttgtgaaaaatagataaatcgttgtgaaaatggcaaagatctaactagtgtagggcccatatcatgaccggccacttaagggaatttttgctctatgtttatcattttttttattccaaataaattaaccctaaccctaggtgaaattagtgtaaaaggaaagctatggtctcattatccaactaatgcttctagagctaaaaacctagttttctctctaggtttatgagacttcttcctttcttcttctaatttttgaaattttatagctttcttcacaaatcaaattcaagcctttagtgattgagtgcatgcccacacataacaagtgagtcctcaatcatagtgtgtaagactgtgaagaa

SEQ ID NO: 284400 - DNA, 666 bp, Cannabis indica
cgacgactcaaggcaacgggatgcctcctgttcgagagcctcccccgcaaccgcctgctgcggttcctgcagcccctgcggtgccagctgagcaacatgttgctggtaaccgcatggagcctttatatgagaggttcagaaagcaagcacctccagtatttctgggaggtcctgatgttcttaaggctgaacagtggttgactgttattgaaaaaatactgaattttatgggagtggtcggaaatgatagggtggcatgtgccacatttcaatttcaagaggatgccctgatttggtgggaaatggtatccctcaccagagatgtgaccagaatgacctgggaagagttccgggaattattcaacgccaaatattacaatgaggcggtccgcagtgcaaagcggaaggaatttgttgagttggtacaaggtgagggtatgtcagtgactgaatatacaaccaagtttgatcgcttggccaagttagcctccggaatcgtaccaacagacttcagtaagaaagaaaagtatttggctgggctgaatgccaagatcaggcatgacctggttattacaacaaatgataccacaacttatgcagaaatggttgataaggctcttcgagctgaaggagcagttaaatttttacaagaaacccgagagtctt

SEQ ID NO: 284401 - DNA, 501 bp, Cannabis indica
caacaatcaaaaattcatatcttgctcaaatcaactccaaatcacttcaaaccttccagacctactccatatgacccaaataacatttctaaggcatcaaatctacccagaatgcacagaaatgaaaaacaccattaaagctcaagctttgagttctaaactcaaacttgagcaaacctagctaacatgcaatcaaaccaacataaaactacttaatcatgcataattaagcctctgaaaacaactataaacttcaataacatcacagcaacagattataaccaactctctttgaaaaccatagttttagcatagaaaattcataactttgctcaacctaactatcatgcttcacaacatctcaaattaactcaaataaacaaactttaaacctcagaaatcaacaacaaaaacacagcagcaacaacctcaaaaatcatgcatgcatcatattattttcatcatttttttccaagaaacaaaggagaaaagctagagaga

SEQ ID NO: 284402 - DNA, 575 bp, Cannabis indica
atacatttggtggttcctggatgcaatgagtaaggagtagtatgagcttcttccagaatttcctttttaagttcattgatatcagggacacacactcgtgctttaaacaatagcattccactttcagagattgaaaagtctttagctttgtttgctaagacatcttctcgaattttaaccaattcaggatcttccatttgagccactatgattctttccaacaagtctgactgaagtgtcaaattaaataatctctcagtcaccaactcaatgtttgccctagtcatctctgaggctaactgaggagaaatcatgaccatgttggatatctgattcgacccctttctgcttagggcatctgccaccacatttgcttttccagggtgatacaggatttcacagtcatagtcttttaccaactataaccaccttctttgtctcatattcagatccttctgagtgaagaaatacttgagacttttgtggtcagtatagatctcacacctttcaccatataagtaatgtcgccaaattttcaaggcgaacaccactgctgcaagttctaggtcgtgagt

SEQ ID NO: 284403 - DNA, 640 bp, Cannabis indica
acaactaacgaggattaggctattactgaactgctcagggctgaacctctataaaatttctgtgtcttcttattgctttactacatattcttattacgacatatcgtttatcgcttatcaaaaagactcattgtcgttggctaaaagcgaagtcaacattttggtgctttcattgagagaagaatcacagatcgctctttcgacacgatggtgcaaactcgtagaggcctgtctgacctagcaaactcacagacactggatccgatgttgcaggacctagggagttcgagggttccacctgctgtcaatcctggacagacgggaagcgtgttgaatgatggaacaactcctgttactgaaactgcgcatagtgtgcaaaagatcggaaacaacggtttggcacacagccaggacgttcataacatgactgttccaccaagcatcaacgcccagacgaccatcggagatgcaactgaattgcaaaacctctgcactgcgcttggactcatgcagggtcacaacaataccctgcatcacgatctggaggaattacgtgccgcagtaaacctcgcgtttgatgaacagaggcatatgttcgctgagtggagggacaaagtgatggaggcattaagggctcacc

SEQ ID NO: 284404 - DNA, 607 bp, Cannabis indica
attgtcgccacttcagaaggttgcaaaaattaactctcctagatcaacagtcaaccaaaaatttgagcttaactcatgtacaacatcttcatcatcttcatcctgctcaatgtcccaaatttgccggtggtttacattctcgactattttccaatgtctaccgtaaaatacttgcttagcttgggtagcaagtataaatgggtcatctttgtaccattcaccactaacattgatactaatgatgttattctcaatgattgttttcttcctttgtggattggtattgaaccatttacaccaaaataatgtcactgcatacacaccacaaaaagtgaacatcatcacatcttctaaggttccataataattgaatccttctattcccgccacggagacaccgctattttgagtagtacgcttcttatcacgttcaactaccatgtaacgaacaccattcactacaaccccttcataatatgttactaagtgatctgacccacatgctaatgctagcaactcttcaccattctccaatgatccaagcttgtgtaaatcatatatctaaatgaacaaaattatcttagaatgactcataattaatcatgat

SEQ ID NO: 284405 - DNA, 561 bp, Cannabis indica
ccaaacactctaggtcgcgctgctttgatatgtacaacttcatccgagctgaggtccactcctgttcagctttcccctttcctttacctacacatggaagcagaactgtgagtcaacagactcagtaagaaaagcatataacatatcatataacttctgacttgtattttaggcgcccatacacctatttacaaggctcaacagatgagtaagaacgttccataccagggtacagccactataccacatacactacatacctgactgtgcgagtgttggtagggtttgtttcacaccctgagtaccacagagtaatataccacactcactcagtacctttccgtacttgtgttggtatcactgtaatgtactctccattatcattcactataccaatgcactatataccttaactgtacaagtattggtagtgccactaacaatttaaacatgcatatacacataacatatacatacactcagatattgatatcacacattatattcagttcttaccttctttccagattcaagtgtgctggccgacctgaacggaaagtc

SEQ ID NO: 284406 - DNA, 691 bp, Cannabis indica
atataaaagatcgttgaactgcatattattcttaactttttctgcacccctatcagatcaaaagatctttctattaaacaaattcttaataattgttttagaattaacaattattcataaacatagaaaagtaattctaagtgtttatgtagtattaactctttgaaaagttaaacaaattcttaataattgttttagaatttgtatcaataataaaaacacatacacatacaattattaaaacatataaatataattggtattggttaagataaagtaaatgaagctcaattcataaattgcaagttatctccaaaatagaaaactttattataaaatcttccaaaattaaaagaaattgtttgcaacaaaaaaaattgaataaaatcccgaactaatacttgaaatccaaattgttctgaaactgaaataattaattcaaaataaataaaaaacgagcttcatcttcatcttggacgagctccaccccttgtccaactttccgtttcaactcgctaagatagcatccgagttcaagcagcttgggctgtaataagaagaaaaacaaataaacatggttagtaggtccagaattaataatgcaaatggataataattcactaaaactcatcagtttataggaaaagaaataccttatttctttggaagaagtttaggacattggggtttc

SEQ ID NO: 284407 - DNA, 785 bp, Cannabis indica
tgttctacagtgaaagttgggagctcgtaaagagcatgaatggcagctgtggaagcaggcactctaacccccctaactcttactttgtcatcctctctttcaggccagttggctaaaaattctaaagctagagtttggttactacgctcagtgacatccacgaacttagtccactgcctatttaaaatttgatctctaatagacgcaaatgcaggaggaatgtttgcagtttgactcaggttaacaatgtctatccctctatcttcaatgaatgccctatctttcaatttcaaaaaccgctcttgagcatccatgttggtaaacctcactctatcaagattagagcgacccctaggtgggttggatgatgaagctcccccttcttcactcactcttgacctttttggacccatgtcacccaaatttcctaactttcaagatttttttaaaatttcggcagcacttccccttaaaaatccacttcccgggaattaattccctcacaatcaaacccaattctactcacacaaacaattttgaacaatgtatatagcaaaaatcccaaatatccaacaaactatccaaaactatccaacaattcacaaattcttcaataaaaattggatagggagtcttagaatcaatacctcaatgagaatcctcctttaatcatcctccattgtagaaagcttgaagttcttgagaaagaagaagatgaataagggtttttgaaattttgggtgaggttttagggatttgggattgattttgagtgggaatgagtg

SEQ ID NO: 284408 - DNA, 950 bp, Cannabis indica
tttcataacaagaaaaaacacaaggtgtaagaacaaggagtgaagtcaaacacaagataaagatacaatacagaaagagagagttgttagagtgagaaatggagcgagatatctgagaaagagagggttgggattgggaaattatattgagcaacattgttgattatgttggctcgggttagtgagttaatgagggttgagggattacaccatggatgacttgctgtgattatttccttgtagctcctgagattgatatctcttattctcattatcaataaagattggtgacaatactttcaaactagagtatgaccaagttcacattgaacttaggatccagtataaatctatgtattattgtgtctaacaaccatttagattcatctgtattatatctttttggtttatgtgttcgctggttttttgttcttgatttatttgttttgatttaacttttgtttgtttaagtgtgatcttaaagctagaattacagaggttaatttctatgtatcagaaataaattttcctacagaggagttttttttttttttttgaaatatccgaaagaggagattgcaacttcaaatctccttctccaatataaataatgaaaataaaaaacaccaagattgttaattttccttttactagaagaaaattacgtgcaagacacgtatatttagttttatgttatgtgttctataattcaattaagaaaaaataatcatataatttaaaatgatttaaaaactaattttaattagtgtgtggggttatttgaaaatcaatagtgaaaagtcaaatttaaaatttgcagaaagagaagaggagaatggagattagcttgaaatatatttaaaaaataataatgctacacacttactatggacacttaactcgagtcggtaataataaaattataaagaataagggtagcaggcatataa

SEQ ID NO: 284409 - DNA, 553 bp, Cannabis indica
aacattgctgcttgggtccccaagtcgaggatccacatcttcatccccgccttgggaagttccctacttagaaatgttttttttcttgtccctgctctggctagaggatacttcctttttagccttacccacaacaaggttataacattcctaagcaatctcctggtttcctctcagacaccctaccgcattctttgttggaaacttcaggcatgaatggaatatcgatgtaacagcctttaagtcatacaaggctagtcgtcctagcatgacgttaaaggctgatggaacgtccaataccagaaattgtgccattatagttatgctcgtcaaagcttgcccaatagtgaggggtaggcgaatttgccctagaggtgcgactcctttgccggagaaaccatatacgggcagaagacagggggttagaacttagatctttgagttggagtcccatcttttcatatgtggtcttgaataagatgttggaagaggctccattatctatcatagttctggccaccatcttgttggctatctgggcctccacgaccaa

SEQ ID NO: 284410 - DNA, 542 bp, Cannabis indica
gaaattgaaaattctaaaactggtaacatattcaaagtcaatggacaacggttgaaaccatttttagaattaataccacctgaagtggaggaaacactccttcacgatccgatttaccaaggttagtgaattctttcactactggtcctatctttaattgttttctttaacttcagtattttagtttattttttgtcatttattttttagaaaatcaacatctatcactgtgcatattctctgttttttttttcggttctcatctcatgttcttatcatatacatatttagacattgaggacactgtctcattttagttgggggtactgagtatattcttgcgttaagttcgataaatttcttacttttttgaaaattttgagtcaaattctgctgctaattatgtgaataaataaatattgtgttagactagtttatactatatttagttacttagatagtaattccagtaaaaattgcacaaaccaaaaatatgatttgattgtttttaacacatttaattgagaaaaatcttaagttaa

SEQ ID NO: 284411 - DNA, 533 bp, Cannabis indica
ggcctttacttaattttttaaaggacatttactaacttagtttctaaatttagggccattttgtatcttaaccctatgctaatttggtttaataagcccaaataaaagtctcacaaaatattcatatgtaaataatatttggttcaatatgtgaattttgtgttatatttaccaaactatcatataataatgttatagtgagatttctctcacctagaaactcgagacaagactcctatttagaggacacgtattttcagatttccaatggaagctgaaatgtccatgagagactcctcgaagtttgaacctcgccaggataaagccagcgagtacgaccaaagtcggatcgcataactgtaactcgcattatgcaggatgggaggatggatccaactcgcatgtgtcgggacatatgcgagtatcctctctatacttctgcgaaagcgtagaggccaactctctatgatgcgatttggtcccaacgacccaatagccttgataaaccggtatagactcgcatgtctaggttc

SEQ ID NO: 284412 - DNA, 500 bp, Cannabis indica
catccgatgatccaccagaaccaccagaacgatcagaatcatcacgatctccatcatcagagacattttccattttcttcttatcagcagctacctttacagaatgcgaaggagaaattgaggaacgagttttaaccattttttaggtttacagatgataataacaaggcaataaacgaaaatgatgcactcaaactctcttgctaacacgaaaataaaccaccccaagaagaagaaaccctaacccatatactctgtataaaacgaaaacagagaaacgaaagctcaaaatgaatatttataaaacaaactttccatttatacaaacacttaaaaaaccataaaaatggtaaaatacaatataaaaataaaaaaaaaataaatgattacaatcctctaaaaccgtccataatttgaattacacatgcaaaaaaagtggcgcgtgaacagttgaacactgcaaaatggaagacgtgcaggacgtgatgtgatgacgtcat

SEQ ID NO: 284413 - DNA, 831 bp, Cannabis indica
gcaatacttgcataatgttccaggcttcaccggtttaccgttaaagatgcctagtttgcaacgacggcatccttcggggaaccctggtggtggagccggccatacaccagttttgcaaaaatgtgcttcaagttgcctgaacctgaactcgttcccacatcgttctctttcgaaagctctttgggcgtcaaaaactttctgcatttcaggagtaattatgccaacatcctcctgcttcagctcttcaggagttaagatggggaatttgcctttgttctttcttggcgccatatttagaacttaagaataagagaaatttttaagagtaagagagaagtagaagacaagagcacttatgaataagaaagggatttgcttttatagagcagtaaacatgttgggaatgtaggaaaatttaatggtcattaaatgtgtaactgtacaggtaaaacgcatgaaatggtgtatttgtcgactgaatatcgatactatgtcgatatgatgtcgacaacatgccaatttagtggcacggctaacttatttgtcgatacaatgtcgacgtcatgtcgatagcttgtcgataggacacgtgtctgacatgcaacgtggcagttgggaagggttgttgggaacgtaggtaaaatttattaacattaaatgtgtaaccgtaaaatatgaaacgcatgcactgtgtgtttgtcgattgaatgtcgatactatgtcgattgtttgtcgacataggaatggatttattaccattgtacacgcgtctgacatgcaaattcctttgggagaatatgtcgatatgatgtcgatggtgtgtcgattata

SEQ ID NO: 284414 - DNA, 272 bp, Cannabis indica
ttttaaattttattccattccatttctatgcgcattcccattcctattcctatatttttattccacccaaccaaacgcctccaaggtttggcaatttatttttaactaaacctaaagccaacatctaacacaaacatatacaaaaaatgcaactagtttgataataatatttttaaatcaggttattattaaattttaatttaataaaaattaagtcaaggtatattttgtacaatttaaaaataaaaatttaaattagttatttaacaaaa

SEQ ID NO: 284415 - DNA, 714 bp, Cannabis indica
attatagaatttaaatataaacttttgacacgtggcaattctaagaactacaaatataggtgttaaattggatacctactgactaatgagaatatcgagcttgggaactattgttataattttttgagattaaagactaagttgcattaaagtgattgttttgaggatttatgccgcaaattaatatgtgatatgtttgagaacaactaactgttaaaatgaggaacgacagacttacaagaatctcgaatatggatactattgccactatttttcaatgttagagacttatctacatcaaaatgaaatttttagagacttttaccacaatttttatttttacaattataaaaatcttgactagagaaaaaaatgtataaaaatgggtgggattacacccaacatttcaaaatacataataaaaggaccaagtgaaagagacattagttgaacatttgttctattgaaaaaaaaaaaaaaaaacattagtttggtgatttagcataatgtatgaaataatcaaataaaaacaacatatattattgagattgacaatctgaaaatcaagtgtttgattaattgaacatggataattgacccatacgtttgatattgattcaaggtatatacccacgatgcctcagctcgccgtgttcaacaatcgcatctatgttgttcgaaaaaaaaaacaatcacatttatgttagcttacaa

SEQ ID NO: 284416 - DNA, 634 bp, Cannabis indica
gatggttaggatgttgcgaggcgctctggaaccactttcattttggttttctcctttgtcatccgcttggggatgaccttcctcgcccttcttatatttgtcaaactttcctctccgaatcagctcctcgatttcatcctgcaagacccaacattctaagttagtatgaccaatgtctttgtggtacttacagaattttttggggtctcttctgtcgcgatttccctggatggggggcggcttcttgaagactccgtttctttcttcgattgcgtagatatggtctcgggggactgcgagttcagtatagttgacgaaacgaggtccacccttccttttcagcaaggattccttctttggaggagacttggccaacttcagacttcgctgtctccgcgggctacgtctccttaggcttcggcccctagagttcttccctcggcgactgcaagatcgtgaacgcggtattggtgattggcgtttgtctttttccttctctaattctgccaaagaattctcgattctcttgtaaggttcggccatggcgaagaattcgacaaaggattcgggccttcgagcttgtaactccttccaaaagtcggtcctcagcaagatacctgttatcagcatgcaa

SEQ ID NO: 284417 - DNA, 238 bp, Cannabis indica
ccaggatgcgagtggctccagaacacctcgcaacatcctgactataattggaggacctcctatcgcaggggactcccgcaaatcaaaagaacgacagagaagccaaggagaagccgcttaccaatgggaataatcttagtgagcggcccgagaagctgtttaagaaagaatgcgacgacatcacctttatggagagtgatgcgagatgggtccatcacccgcattctgatgcactagt

SEQ ID NO: 284418 - DNA, 677 bp, Cannabis indica
tatttagcttacattgtagttcatgtaatttatagaagacatgtggtctgtttgaatgacatcggtttgttgatgatatattggatcgttatgtgtagggcaacattcttaataattatgctacgtaactataataacggaattgtagctttatggaggaaattaagttaaaaaaaaaaataacattcaatgaaagaatgggaacaattaaagagaagtttgcataagttcttctaccctactccttgttgtttgttatttttgtattgtataatgtgttctcaagtggcatataaggatgttcataagagaagagtttttttttatataaaattacgagcatgttattgcaaaatttatgtatttaaagcacgtatatgtaagtattgtgatggagtatgtttgttatttaagtaatatataaaggaataacaatacttaaattaggctgtatatgttatatgtgttgtagtttgaccaataagataaaagttaagtacatatttgttgggtccataaggtagataaggaggtcatgtaataagtggtgacaaacatgaagtccctcgtgtatttggtagttaaatttcgaggacgaaatttctttaaggagggtagaatgtaatacccggtaaaaatatacatatattttaaattttatttgttatacaatttgt

SEQ ID NO: 284419 - DNA, 90 bp, Cannabis indica
tcatctatatagaggatcattgatcaaattaggattataacaatggataactaatgacgtgtaatcaattataattactcaaattagact

SEQ ID NO: 284420 - DNA, 475 bp, Cannabis indica
tccgggtgtgggttcgggtccttgtcagggttcaggtccaagactgggtcccaaatcaagtataacgggttttgtccaagccctggctccagattcggatctcaatctcgggtcccaatgtggttccatttctggcgtcgtgtcacgagctaggtcataggttcaagttcgcgtctgggtcgggtactaggtcctggtcctagttctatttcccagctccctatccttattctgggtcaaggtcattgttattgtgtgggtttgggtcccgttctaggttcaggtttgagtcctagtctcggctcgggtttaggtctctatctgggttttgatctgggttcgggtttgggcataggtcttggtcctggtcctagtccgagttcggttctagttccatttgcaattttgagttcgagtttgggtttgagttcgggtcgaagttcgagtcctgttctgagtttgtgttcgggtccgg

SEQ ID NO: 284421 - DNA, 437 bp, Cannabis indica
aaattttatcacatttattttgggtttcataaatttggttttgatttagtaatggttctcataatcttcacattttttttcttcattttgagatttgtttatctctgattgcatagcaatattgtaactttttctagtgttaatgtataatgatgatgtatatgttagtatactaataatttatctctaatttgattatagtgtttgtatggtgttatggaagaatttatctatctctattgtgatttgtaattaacttgtaaattaatttaagtttttattttaataaaatacaatttttgtctatctttatgtgtaatttataaattttacatttagttaattaaaattattattgttataattaatatatttatataattaatataaattattatttataatataaaaaatttgaattaaattaaattaaatat

SEQ ID NO: 284422 - DNA, 984 bp, Cannabis indica
tttctatgtgtttatttctctcttgttttctgttttcactcactaactttttctgtttcttttgcatgaacttggaacactgagatttggagctgaagcttccagatctggaaatctgggttcgagttttctggtatctctcaactgagagatctggtatggctctagtgctcttttatacttgtagattagggttgatcacagatctggaagttagttacaatttcggttgtaactaacaaccagatcttgatccactagaggcgaagccacataggatctgtttttgtattctgttgtattttatttgtattttcacttcatcttgtaaaactgtaataataaatattacagtgagatctaatttaacaatttccaccttagatctcttctgtaatgtttattattatagtgcttcgtcttcaagggtcttagctcatagtggtaatggtcatccaccattaccaacccctaacaagtccaagcagtgcttgaacttggttaagggtagcaccttagtaccgatatcagaaggattctcttcagtgggaactttctctatctgtacaaccttctgtgtcactttatctcgtataaagtgatacttgatttccacatgtttggttctgtcgtgaaagacaggattcttacacaagtggatacaactctggctgtctgaatagattgtaggttcttcatctaggagtttaagttcatctagtagtcctttaagccaaatggcttctttaatagcctctgtaacagctacatactcagattctgttgtagataatgctacaacaggctgcagttgtactttccagctgatacaatttccccatagtgtaaagaaataggcagaggtagattttctactatctctgtcacctgcatagtctgcatcactgtacccagtgatcattctactattgtcccttctcttgtagtttaatcccacttctgtagatcccaataagtatctta

SEQ ID NO: 284423 - DNA, 508 bp, Cannabis indica
ttgttaatccaacatacatgatagtaaatagatcctggtaaaataatttccaacaaatatatatatttgttcatgattatcgtgtcgtcagcacagtaaaatataatcatgattatatgttcaaaagtttaattcccatgatttgccagtttactggatttagactgacatgataatcgacgataaggtataattacaccttgaataagtgttatgtcatttccagggcattggaaaaatttaccagtattgaatgtatggagtatacattggaagggaccgatattgatctttgataagatatcataaatttactttcatatctttttaagtccatatcaatggttgatcttaggtttatggatcttaatcctgatatggttaggttcaacttagatgaattatttatgttcttcaagttgttcatggatgctaaccaatggttctgacagatatttatatcttaggaacatggtagttcaattgagtgggagtgctaaacatagat

SEQ ID NO: 284424 - DNA, 830 bp, Cannabis indica
aaggcccttcacataagtcaccattttgaaatccctatcatccccagctgattgagaacctgaggacataagctccattggagtgctcccgacatcagcagacccgaaatcaacaaatggagatttcaaggccggagcacgcttcctcttatccaacagaggtgtatcagagacagtgtcctcagtttcttcatcagtatgaagggcatctgacttttcaccaacaacatctggattgggtgcggggacctaaaaaagaaagaatgcattaaaacagttgcaaaacatactagaaactaatgagcaaccaaaaagaaacctagttttcttgaaaacaattaaaagtaaacttacatggattttaccaacagcctccaagccagccaacacaacttgatcatcatctatttcaagctggctcaacccatcaaagaaatcgtcccccttcaatcgagactcatcgccctttggcttctcaacatccttaacatttttatcactccctccaacagcctcagatggattcacatcagcagggggaacagcagtaacaaccttgtcagcatcatcagcatccccaccaaccttgtcagcatcatcagacttctttgaagatgacccactctcaaaggattgcttcgctacaccacggtcatcaatagactcatcgagaaataaaccgtcaagttgaagcttctgcctctgttcattagtaggacacatgtttttgatcttcaactgaacagcataatcaaccataatatgaaaaatattaaaacaattgaaaaaactaaaaattaacaacataaaaaaaactgaaaagaaacagt

SEQ ID NO: 284425 - DNA, 882 bp, Cannabis indica
gatgccattttggccgaacttgccggggttcacactcctgaggctcctcctccctttacttcttccccgatggcccccctctaaagacttcttccagtgctcctcccgacactattgacttagtggatgacgaggaggtgctgccgggagaaggtcaagaaaagcaatgaggctttcctgaggaagttgaagaaggtgcaggagggctccgggctcttcctgaggaagctgaagaaggtgaagaagagcaagaaattgctctaattcgcaaacgtaaaggcaaaatgattgcccaggaggagcccaagcggcctcggagagctgatactccggcccacggtctcgatggtggggtctctcccatggaagaacatactgcccctcccaatattatgctgactccggttcctggagatgaggcgagacaggagcttcggatagctaaacacaactacgccatggacgaatactcctgggggtatgctgaggtggaagcccttaggaagatcttgcgggttgagatgcaaaacaccatcaacaacccagaatagcagaatctgtgggacttaaatttggaccccatgtcggactggttcggtcgcttccttgggcccaccttagctccatttgctgcggagatgactggcgagtttgcatcccagcttacccggtgtgcacctaagcggttcgctgcttgtgcatccttgaactccatctaccaaggaacaagcctcaaagaaggcaaaaagagctgagcttctttctcccgtttcctgcagccggtgcaacaagcgttttgacgatggcgtcttcatggcttggtctaccaacgaccagaacatgaagcttaccttctactccaaacttgaggagatgatcgcc

SEQ ID NO: 284426 - DNA, 571 bp, Cannabis indica
agtagtgttttcttttgttttttaggattgggaatctaagaacacccgatcagaatactaccattctagagtagtaacttctggttataaccaatatccttatccatgtgaagcaaaagtccaaactacaacttcatgtaattgtggctctcactggagagtttgtcatgttgtataaaatgttgatggaacgtcctaattggttacacgtgtcaaaaatgcaataaagatagagactactttacttctagggtggtccttgataatatatattatgtatataaagaatctaaatgaatgttgactatcatgttgtacacgtgtaagatcatctgcctacgtggcaccgaaaggcttatctaaaggacacctatctcattttattttaaaatatagttgaagtttcttatattgttattgctcaaatagatgtttacaattatacaactttcatacatatcatgggttcagaaactttgattgaagtaatattggctatattccttcctccagtgggtgttttcctccgctttggttgtgcgtagtagctgaagaaattcttcagagtttc

SEQ ID NO: 284427 - DNA, 675 bp, Cannabis indica
aacggcctaatcaatgcgaggaggaaggcgaggaccaatacacgcctcaaacatggcgtcaagtttcttcttcttctcccgaaatttggcaatcatctcctcaggtttggggtagaagtcaagcttgatgctctggctatttgttgaccaggccatgtagacaccatcatcgaagcgcttgatacaacgcttgcaggaaacaggggagaggagctcatctcttttagccttctttaaggcttgatctcggaagtacttgagctccttcatctccacggctaagttagcgctggactccaagtccgcctggtgcatttcctctaaggacctcaccttggcagccatctggtctatggcctccctggcctcccgaagctcgcgcttggccttggaagtggcttcgccctccaccctcagcgcctcccggtgccttgcctctagcctatccctccgcaggacctcctctcggagcatcgcctccgcctgggcttccctctgtctaacctcctcctcgagcttcgccttaacaagagcctccctttgctcagcctcctcctggatcgcccgcctttcagcagacaagtcccgcaggatcctcacgacctcgtccatgcccccaaattcggacaggcaaagccgtgattactatggtcttggaaaggcggctggtctctg

SEQ ID NO: 284428 - DNA, 729 bp, Cannabis indica
caagcttaaatcaagataaaattaatctaaataagaaaaagataggttagacaagaacttggggcttacaatgcgtattaatatctcttcagatcatgaggcatattttatgatgatgtggttgatttagcatgagtgaaataaaagaaagttttgggatcacgttaataatcctttggttgttaaggagaagatgagtgtcattctctttgagattcaagaggtcgttaaaggggtgatcttactctatcgagaaagttcactcactttgagtatatcttgaagcgaagaggttaatggtggtcatggaagtgtggcgagaaggctggggatccatcacctgtgacatgctacgtcctaaccttagaagccttctaatcaaggtttctttaagcttaatatggatggtgatgttagtttggacagttgtgctttgggttgagggtggtgattcgagacgctgagagtcgagtggttcgggtcttcacaaagttgatggcgggaagcttctctccatattcagctgaattatatgcttgttttgaagctctctattgggaatgcaaccaaagtcccacattggctagaaatgggaagaattatgggtatataaggatagacgctactccattagtatgaggccttttgggaaggtgcccaaaaataaaattgcgagggcttaggcccaaagcgaacaatatcatactaatgtgggagtcaaggtgaggt

SEQ ID NO: 284429 - DNA, 496 bp, Cannabis indica
tttgtattttctgctggtttttcttctaaccacgcctatttttgttctatgtagacatgtctcggcagatgcttgatgctctaatgaagaggatgggcagaagctctagcgcctcccctccggccaagaagcttaagggcggagaggggtcctcggagaaaagaccttctagagaggttattgacctttccgaggagctgactgctgcaaatccttctactcccaaatctgccaagtctaaggagtctggaccaccaacaactgggtctgaactagtcaggaggatccctgagcgggtgcaggcaccaactccacccgtgcccatgctgtcagaggccaaggagggcaaggagatgttggcccactacatgaaccggctggttcccgaggtcagtgagcaactggctggtgctaataacgactcatctctagatgtgttggtgggtggagtcttgaaggagctcaccagggttagtcttttttgatacttcccttt

SEQ ID NO: 284430 - DNA, 753 bp, Cannabis indica
gagaataatataccatagatttttcattaataataaaacacaaacacatacaaacatgataaatatataaatataattggtattggcatacacaagttaaagaaaaatgaagctcgatttcataaatgcaattcataatggaaatttcttaaagagaaaactttattaataatctcaaaattgtcataatgaattgtctgcagtaatatgaaatagggaataaaatcccaaaccaataattgaaactaaattgttcataaactaaaacaattaattcaaaaattaaagaagatttcaagcttcatcttcacttggacaatttccaccattttgtccaaccatccgactcaactcgctaggatagcaatacaagtttaagcatctggagctgaattaataacccaagggcataataattctctaaaacacatgagtttatagcatagatagaaacaccttgtttctttgctagaaacttaggacgctggggtttctagtggcccttttcgttgcaatagaagcactttcctttttgctttgaattgggattagcagcctttttcttattcattgtgttaacagctttaagaggcttcttgctattcttccacttcttctttttgctgggtttcgaagcagagacaatgtttgcctcagccttggtcgtaccattagcagtgccagaactaggagctttagttcctcctttctgttgtcctccaaaaaaatttttaaatgtctgaaggttgttga

SEQ ID NO: 284431 - DNA, 822 bp, Cannabis indica
aaacagtacttgaacctgttgtcctctgtgaccatgtctgtaatagtaccttcattcttctgttctagcatgtaaaagtaaccaggtaactaactacaagttgctgctggcgtacccctcgcatacataagtgccttctctcggcacctccaagcatattcctttgtatgtctttagctttgtacttagtttcatctgattcgaacttgttcttaataaggtggccaacaacccacagtgttgcttgccggttatcagcatgtctagaatccaggctacatgtgtgtttgttgtggaatatagtcccctcaaacatgtcacaatgtgccctcttcctccccctcactctctatttgcaatttgaatccctgcaagttgcataaaaaacatcggtccaagacttcttcaccatgaactcaaaattcattttcaatgcaaaccttcccactacatttttcaattcactcttatttgtgtacaacttgccaacgtgtatttcccttgaatgtgtaccagtaagagaagttgtataaacattattttcctctatgtcttcccttgtccacacaatagttttgaattttgtgcaaacttcaaaattagatgctacagtactacgaggaggacctggccggctcctactggtgcctagtgtttggtgattttcactactagtggttcttctttcttgctctttcctctgctcccttggatgtggtggaggtagttctaacctcaaagaaggtacctctataacttcatcaacttgcaactctgcatcaccatcctcattcaaatctactataggatcattgttgtaaa

SEQ ID NO: 284432 - DNA, 599 bp, Cannabis indica
gagggttaccagcgcgagtagcaagaactcgaggggggcgtcgggcccggttttgacaatctacttcggcctgtagcgcgcgcagttgatcctgaatcgcagtatattgatcgtggtgagttggatgattccctcggataccactgccggagtgacagggggaaaatgcatggttgctggtggtgtggatgtgtccccgacttgagggtcagtcgtttctgggaacaagttgagaggtctgatattgcctctcccaactccgccgttaatgacgtccacaggtggcattccagttccagataacggtacgttcatcgtcccaatgttgatggacccgttgttagctcctccgtttgtgtgatttccagccatgatggtattttttctttgaaatgaataaaatcttagtcgtttcccacagacggcgccaaatgttgtcgagtgaatttcgcaacaccaattatgtaatattattagtaacaagaagaaatttacgtggaaagacaaatgcgagtattcaacctagagtggcgagtactcgactgggaatgagaaataatcaacgaaagctggaaaataataataagacagagaattat

SEQ ID NO: 284433 - DNA, 1140 bp, Cannabis indica
gatggaacaactcctattactgatactgcgctggtgtgcaagagaccggaaataacggttccacacatagccaggatgttcataacatgactgttccaccaggcatcaacgcccagacaaccatcggagatgcaaccgaattgcaaaatctccgtgctgcgcttggactcatgcagggccacaacaataccctgtatcacgatcaggaggagttatgtgccgcagtaaacctctcgtttgacaaacagaggcgtatgttcgtcgagtggagagataaagagatggaggcattaagggctcaccatacagaaatcaaagatcgtagtcggcaagctactgtgctgatacgaagagcttatcagactgtagcccagcaggcgccgaacgtcattcccctaggagaaactgaagatgacccaacggtgaatgcttcccagacaaacaacggtcagccgtccaatccccggtcacgagttccactcgtgggccaagaggtaggcggacagaccttgtccgggaattcatcgggaggagtcatgctcgatggatccacacaaaataatggatccattccacctgccaaccaagcgaaccaatcgctaaggcagccaggttcttctgtgttcgaaaggttgggaacaccccgtgacctaagggacaatctaaatagaagaaggggagcagacgagcagaatactacaactaatgtgcagtccagagcccatactcaaattcccgctcagaaagacgctgacgtagcccaacccgaccagaatgccaatgtagtcagcacagccgtacaggcccagcttgacgaactgaagagtatatttcatggcatggccgggcagcgtaataatgatcttgagttggactgcgcacgcggaactcctttctcgccagaaatcaaactcctgccactacctcacaaattcaagatgccaacgtggaagatgtacactgggagagaagatcctctctctcatctcaagtatttcgagatgcagatggatttacaaggagtgcgaggagacgtatattgcagaatcttcctcgcaactctgtcggaggccgcacaataatggtatttcaagttggctccaagaaagtttagttcatggaaaactttctcttcggaat

SEQ ID NO: 284434 - DNA, 519 bp, Cannabis indica
aggccagggcaccaagaggagctgagggcggagggcgaagctgctgctaaggctaggcgtgagcttcgggaggctagggaagctttggatgaaatgactgccaaagtgaagccttagaggaaattcaccaagcaaacctggagtccagggccatcctggccgtggagctgaaggagctcaaggacttcaaagaccaagccttgaagaaggcaaagaaagatgagctcctttctcccacttcctgcagccggtgcgtcaagcgtttcgacgatggcgtctacatggcctggtctacaaatgaccagaatatcaagcttaacttctatcccaaacccgcggagatgattgcaaaattccgggagaagaagaagaagcttgatgccatgctggaggcgcgcattggtcctcgccttcctcctcgtatcgactaggccactctgagttccacccagtacaaccaagatttcactctcttttttctcttttttttatttacagctaattatcttgtatttaaga

SEQ ID NO: 284435 - DNA, 730 bp, Cannabis indica
tggcagtgagccatcttttttctgattttgttttggccataacttttgactcgggactctgttttggacgttctttatatcgttggaaagctcgttccgagctctttatgattatctgtattttgaatgccaactttatattttgtgaaagtgaaattagggattaaccctatttgtgaaatccggggttgtgtgactaggattaccggcacctgatcaggagcacccggggattcggaatctccttctattgctggacaacaggtaagacagtgattagcacgtagagtatgcgcagtggcgcttatattaagaatgatatgcatgaatgtttagtaaccgggattagggttattaccctaataggaacggtctaatagcctagggttattaccctagtgatatatgtgtataatgccatgccatgttaattgaaatgaaatttagggattatgcgctcaaggcataatcaggttggactcggtacacataaccgagatgaaccatttctaaggccttaatgtatttagacgtgtgagagcaacacgtgggtctacgtcacgtagatttaattagatgtgtgagcgcaacacataggtctacgccacgtagacataaatgggcatgttaatatagtgatcaggtctgtgctatacagacatatgtaaatgagcatattatgtttattatgatttatactgtcttgctgggcttggctcacgggtgctct

SEQ ID NO: 284436 - DNA, 116 bp, Cannabis indica
aaaaataaatggtaaaacacactaagtgtggccggccatggattgtggattgggcccactttgcaattttgccagtttgtcatttttccatcccatattctcaaaaatgcaaataa

SEQ ID NO: 284437 - DNA, 380 bp, Cannabis indica
caaaacatagacaagatatttttcccatataataaatttgtctgaacttgaacatcatcacaactcagaatatgggtccagtctaatacatattttctcagcatagagacatgaaacacattatatactccagacaacacaggagttaaggctagctgataggctacctagcctaattacctcagtaaacaagtatctaatatttctcttgtaccacacttaataaggtacctaacctgtggtacatttaattatcactttaaaataaaaacctcatcagggaagagattattttaagataatctatcctttattaaatatgctcacaacatgtttctaatatttcattgatcttctcaggttacccacctttcaagaat

SEQ ID NO: 284438 - DNA, 601 bp, Cannabis indica
tgataccaactgtcacgggctcaccttttcaggcagcggaacacccgtgcggtaccttgacttctctaagccaaggtcagccttccaaccatccgagtaacaattggctcatttttcgtactgtgtgcctcgtgcacactttcgtctctcgaacaactctcgcagagtcatactcgcaagcatccatgagtgcatccatacatcgtggctctctagccaagatactcgcactgtccatagttcccactatgataaggcaaatcccaacaccgacgctcaccttgtcactcgtgaccaaggtagtatgtgtggcaagatgccaatacgaagccgacgtgccaacgcttctatcatgccccattcgatactgtacgaaaagtctcccttgtcgcccaaggactctcatacgtccatggactaatcctcaaggcttcatgcctccacgcatgttggcaggccctcgagacaagccactaaactagcagcatacgttagacctctgtctctttccaacatggtacatccatcccatgcgtgtatgcaaactagcccacaaatgactacccgtgtcatctcgtgttgagactcgtggccaaggcac

SEQ ID NO: 284439 - DNA, 536 bp, Cannabis indica
ggtttactcatcacacaaggagcaggttcaagaaaaataggcgtatgatcggaggatgagaaatcaaaatttgacaaacgagcctcattaaaaatagttagccaagactgagtagcaaaagctttgtctaaccttatttcgatgtggttttgagtcccttttccacgttcccaagtgtacttatgaccacgcagctgaagttcacacaatcggcaatcatggagagcagtgttgaaaccgtggatcaaagattgaggataaggacgaccgcccttcttatcatcatgcgtggtgatgttgttgaaatctccaaggatacaccatggtaatggtgaagaatcggcaagctcacgaagaagattccaagttgtatgtcttctcgaacggtttggctcaccatagaacccagtaagacgccaatgaacaaagccaggaacatgaatctctaaatcaatatggtgggccgaaaacttaagcaaatgagcatcagttgcaactttccataaaaaaagcaataccaccttttctaccttggg

SEQ ID NO: 284440 - DNA, 510 bp, Cannabis indica
gatttttacaataaagtagtcccttttataggacgaaaatgacacctacaagacctttggacttcaacattaacacacctaagacctttggtctttccaataaaagcatactaaataagactcttggtcttcataatgaaagctccataatgaagaccttttgactccactcttgtaactcccacacaaaagaacttgacacataaaattaaataaaacgtgacacatataatgaagcttcaaaattcagtccactttgatgagtatgaccaatctttgttctccttccgtgttgaccacggtctcttcttgatttaagactttgtgtactaggctgttaagctcttccttgaatctcttagctcgtgccctagtcactggacccactggaattggacttgatacttggtccttgatgtcctcatcacgcaatacccgaccccgcgaacattcctaaattatttttttagcacccttaaaatataaaatacaaacaaatacatttataaa

SEQ ID NO: 284441 - DNA, 387 bp, Cannabis indica
aaaaaatccaaattaggttctataaaatcctagatttattaatttttcgtctactttccagaaaaaatatttgagtaacatatgttgctatttctaaactatcatcatataagcacataaaccacatgaaaccatccaaatcaacatataacatcgttttaattcatatttcatgaaagtaaatcattaccatggctctgataccagttgttggatatattttaccaggatctagatttactaacaagtatgtttcattaaaatcctaatatgaattctaaaagcactcactcattcactcaagggattcgaaatttagagaataaaagaagatggaagtggtttcggctatagagaataggaggctcaatttcatctgacaaagtt

SEQ ID NO: 284442 - DNA, 442 bp, Cannabis indica
ggggagagactcatgcatgaagcttaggcagagactcgtgctgataaacgtataataaaaataatataaaatagaaaagaagaagataatgatgatgaagagataaagagaaattgaataagtaatttatcagtttatttattccaagtggggtgaatccctatttacataaaagtattgattaaaggaatgggaaactaaattaatatgtaaataaaggaaaatacaatcaagcattaatgatgataattaatatgatgatttggacatccataaataatatttcataataatatatatatattattaaataaataacattattttttattagaaaatatttgatttaagtaatatttacatgaaaaatataataatattcaatattattgttgattatatttagtttaataattttaattttattaataattttttattt

SEQ ID NO: 284443 - DNA, 543 bp, Cannabis indica
tgcctagcggggaattggttatctctaataggcacattagatctatgccggttaggatcgaggatagggagtttagcgctgaccttatagaactggaattaactaaatttgacattatactggggatggattttctgtccaagtattcggccagtatagattgtaagcgaaaaatggcgacttttcagccagaaggggaagatccatctgtctatgttggatcagttcaggggtctcggatcccggttatttctgtattgagggctagagatttactacacagtggatgtgtaggatttttagcagtggttattgactcgagtagaccccaagcagttgggcctaggcaatcagggtggtaagagactttcttgacgtgtttcccgaggaattgccgggattgtcgccgcaacgagaaattgattttgtaattgatctagcacttggagtcgaaccggcttctaaagctccatatataatggctccagcagaactcaaggagcttaagttacaacttcaggggatgcttgacattgggtttat

SEQ ID NO: 284444 - DNA, 546 bp, Cannabis indica
aattcctagattcctcaacttaattttaaatctaaaaaaaaatattcaaattcaagttgattaaaaaaaaattagttttaaataactaatttacaacttaaataggaatattaaatgaaatattaaaattaagttcagaagaatctaattagttataattctacatttaattaaatacaagaaaaatacatatagtttatcttgaattaattcattaaactaagtgtgcttttttaaattaatttcaaaaaatttaaatgaaaaattaatttcatatattttaaaattaattatgttgctaataaattttattaggtgaaaatagtttaattaacttggtacaattattcaaattaggcaaataggccttcacagttggggttgttcatgtgagggagggctgggttcagtatgtcgtacccactgccatggccccctaactctcacacaacgcctaaaagagaggaatttaaccttaaaatgaaccactgttattaatctaataggtccaaatactaattgggcctaaataaaatctatcatggt

SEQ ID NO: 284445 - DNA, 512 bp, Cannabis indica
attttttgtgcctagataaaatttggatgtcatgtgtatatgtcacaacattttaaactttataaaattaaataaagaaatgaaatataaactatatatatctgtacttttttttttccttaacataaacatttattaaaaaagacaaagaccaaccaaaaacacaaggtctatatgagatatgttcttctgttttaaatgggatttttttttttattttaaagattgaaaattattcaaagatatatatatataaatatatatatatatttattagatagatattacgtgtaaagtcacatatgttaattttattttagtttttttaatatcataattttaaaattaataatattcaatgtaatgataatcattgaaatttgaaagcataatagtgatttaaataaaaacaaaattactattatacgttgaaatagtaattaaaaaaattattattcatcctaaatttatcttcagaattaatgaaaatgcttatctggttaaactatcaa

SEQ ID NO: 284446 - DNA, 453 bp, Cannabis indica
cacaacaaattgagtaaagacgaataacatataatacctcataaaccggttataattaaaatttagctttgggatgcatcgcgattcaaaaagttggttaagcttaatccttctaactcgtaggtcacttaagcgttgattaatttcttgcctctttttggagaacttttctgttatagatatttcttcatccttacgagatgtgctgtcccgtactaaatcaattaccttattcaagaagatggtatgaccattatcatcagccgtaagtatttctttttggccatttgcgtcttcctcttatgagttgtcttccaattttctcttaccttttctgtcctggactggattctcttgatcgatttctacttttatttatttgatgttgctcaccacttcaatctgccgattttcaacaattttttttttgattgattggtttgtaagatgagt

SEQ ID NO: 284447 - DNA, 573 bp, Cannabis indica
ttcatagtatatattcactcactcacgtgagtatattaattatgtataaaaagtatgtgatgcatgacccaatgtttgctatgcatgacaaatttattagaggagagagggatgcccatgttaagaatttaattctttgtccaagacccaaggttttaccaaaacaataaattatataaagtgattttgtttctgcaaagaatatgaccgtttttattttattttttatttatattttaatgtcattcaaaggctattcaattcttgcatgcatcactttgttcttattgtgtttaaagtaaagcaaaaagttatatagtacataaagttgtaggttatattagctaaaatgagaatatatagtactcttgataagaccacacactagtgatccattaggtgaaacgtactaacctaatataataataattataataaatataataataataataataataataataatttatgtaaatttttttttgtaaccaacaacataacacattaatattataataagaatccatgatattaattatacattacaacatattaactcaaactactgat

SEQ ID NO: 284448 - DNA, 807 bp, Cannabis indica
ctttcttgtgtggtcttggccagcttcttggaagagtctgcgacaagtgtagccatcgcatcgctcttcctcttttgggcgacaaccggcgaagtcgtcgttgttccacccttcggtttgatcttcaggacaggggcagacttcagaaaagtcatatctgcgaacataaatgaaagataagtataagtcaaaccctacctgtcagtttataacaagagatgaattacctgaaatttgtcgaggagtttgcttagaaagacgcttgtctattcgctcttgctgcttctcggatggttctttgtatactggctccctttgaagacttgcgttctcaggaatcagctgatgttctcgcaacttcgcagttgtacacagtaatcgccagtcgcgatcttgtactggaaggctcccgaggatttcagctgtctccttgctagtcgcgtcaagggtcggtcgaactggtctatctgcgataacaacaaagagcgagtaagcaaaagatctcaaaagtaaaaaaaatgtctaagtcaagaaatacgcgacatactaggtctgcgattaaagtcagtcctaatcccaggaactttaaagacataaaaccacttcgatttccaatcccccatgttcgacaccattccttcaactccgttgatttcagaagtcgcccatttgctaaagcagtagaagccattatgaagacctacgctttttatgtcgtagaaatagctgaactcttctactgagggagccctatggacatactccatgtacatcgcatagaaggctagggcagtgcggtagctgttg

SEQ ID NO: 284449 - DNA, 729 bp, Cannabis indica
aagctcttccaacatctcgacccccaatagaaattggaattgtaaagctgcccggatctttcaatttgggtggaattttacttttcaacatagcactacagccctccgtcaaagcgacagtttcaaactcgccaagcctccttttctttgtcaaaatatccttcaaaaacttcacataggttggcatttgctccaaagcttccactaatggtatattgatgtggagctgctttagaacatcaagaaatctccggaattgaccatcgtcttgttgcttcttgaaccgttgaggaaatggtggaggtggcttttgcaaagacttttctgcagcagaatgctgactggatgctgtaactactgggggaatttcagcagctgaaattgctggttttttcttcatttccccctctttttggattgaagagggctccttactgcctgttgcagccacatttgactcaagaatttttccacttctcaaggttaccgctttgcaatgttctttgccatctcttcttgggttttcggtgtcactaggcaaagtgccttgtggtctattcttcaaatcattggccaattgccccaattgaatttcaagattccgaagagatgctgcctggctttgaattacagcgtcattcttggccatataatctctcattaagctctccaaagaactagtttgagagccttgaggttggtgtggttgttgaggtcttggttgttgag

SEQ ID NO: 284450 - DNA, 611 bp, Cannabis indica
atgtcattctattttctcttaataaatttaatggcgcatttgattatattcccgacattctatcccgagatgatataatcctcaatcttagaatctcctacttgtatatgtttactttaagcaaataagacttagagttagattagtagtggtggtccaagaaagaattactcatgtatatttggtataaatttaagtctttgactttaaattttagattctaaatagagaatttatatttctatttccagaatacaatacagttacactttcacaagttattaatatccattttctatcaatggattcaaactgtatgttaatatggaatatgagtttaatattttgtgaccaggacccacttgcactattctaagaattctttaatgtaactaaacctaagtcgtcaaaagaccacaagcacatattttataaatctatggcatttgtatcttggtcatagtagttttgccaagatcctgctctgcaaagagtgaatatgcctatatccactgaaagtataatcatctcattcacagatggctgtacattcagggatggatatgagttttcattatattctttaaacgatcactctagattttacctta

SEQ ID NO: 284451 - DNA, 612 bp, Cannabis indica
tattttactagtaatcgcaattaggggattagggtttcataagtttattgggtatcgtgcctaattatttagggcattacaagcccggtcgccctagagaattatagttgccgttcaaacgattggcacttatattcgggacatcaggtaagacagtagttagcacgtagagttatgcgcggtggcacttatattcgaaatgggatatgtgagtaattaataatcgtgattagggttattaccttaatgtgagtggtttgatagcctagggttattaacctagtgatatatgctgtgtaaattctatgccatgttatatatatgaatatgttgagatttagggttatgtgttcaaggcatatccaggttggactcggtaactagaaccgagaggaacccttataaggccttattgtaattagacggggaagcgcaacacgtaggtctacgctacgtagatataaataggcatgtgagcgtaacatgtaggtctatgtcatacaccaaaagggaaagggcattactgaatatatagtgtgataaatatgttatcattattttatactgtcttgctgggcttggctcacgggtgctctactgtgcaggaaaggg

SEQ ID NO: 284452 - DNA, 736 bp, Cannabis indica
atatttcagcattgctacaagtcattttacatgtattaacgaatactaacttgatgtggtgcattataagcagttaaaaatttcttatattaattgttaaaacataatgtgtgagactctatatttatcatattagttgaattttttaacttatcaaataagaatattgttatttgacatcttaatgtgtaacaatattaatatgatattttattatttagtaattttttatattatttattaaattaaaatgtgtggagctcattattaaaatacacctataataatttgtcacttttgtagtacttggtaccttagcatctctaacggtgatactttttaatagtgtcaaaaatcttcatatcacaataaaaaaaaaaagtaatattttattcaaactctcttattatttttgattatttttttgttctaaaatattttaatagtaagtacctctaatattattatattattaattaatatatattaaatgatttaattttttttttactttatcacaaaacaataataaaaaaaataaggaaaaagaagataggtaggatgttaggcatttttttaaaagatccaaaaatatattaatctgaccgaacattatagcattcccacgagctttacataacatttttatcatatttttctttgtctcctcgtaatggccaattagatagatcagttagatcaaaagctgaagtaactagagagaaaaatattaatg

SEQ ID NO: 284453 - DNA, 598 bp, Cannabis indica
ccaaacccaaaagtggacccgaacccgtaccatgtgacccaaattttgaaccaaaatcagaagatgactgggactgcttgctgcccacaactttgaccaagagttttcaagagaaaaacttgctaagatgattgttttgcatgagtatccactcaatatggttgagcatgatggatttagaagctttgtcaactctctccagccattattcagacatgtatctcgaactactattaggagggatatattgaagatatatgagaatgaaaagaccaagacaatgaactcaatgaatgacaatcgtagtagagttgcgattacaactgacttgtggacatcaaataatcaaaagagagggtatatggtggtgactgcacattatattgatgattcttggattttgcgtaatcgaattatcaggtaatatgataaattgcttagaattttttttattatgtcaatatttgatatcgatatatgctaatatttttttttgtgtacattcaggtttatatatgtgcccgcccctcatactgctaaacttctagcaaaagtgttgatggagtgtttgattgaatggtctattgagcgtaagttg

SEQ ID NO: 284454 - DNA, 647 bp, Cannabis indica
ttttcactcttaaattagtaaaagatgttactaattgtttatgaatgtgaatgaatgatagctatttaaaatattgttgttcgagacttgatttattcatttataaggtgtataaatggttcaaaatcaagtgggaatgatttggaacactttggagaagaataggccaaagctgaaaaaatagtaattgagagtctttgtaacagcccaaaactcctccaaagcacccaactaataacataaatgtccaatttatgattggtaacatccaagagctttatggtggtcattcatgttcatatgagagtgaaaactctataaatagaggtcatattattcacttgtaagagaagtagtttaaaccattttgttgtggttagaaccttgttaggatatgctcatccttagacactaggctgagcatatgaggcttgataattccttaagagtatttctagagtttctctaagtgtccatatgagagaggaaatgacttttaggacaaaggtccttgagtcttggtcaagctttgtgtgtgttattcttcttcttcttcttttttaacttcttgtaatcttgataaatacttctatttttattttgtaatatttttgattgtaattctatattctctcttgtaatgagaa

SEQ ID NO: 284455 - DNA, 510 bp, Cannabis indica
tatatcaattgatcaaatttcggaaaataacaatctattgaatagagaaaattctgcaagaaaataaagttgaaccttcaatcttaaatttgactatgttctaatcagattttagaaatggtcaaaacataaaagttttagatttcttattcttctttctaacgcatcttgaatttactcatttggacttcgtatgtgaaagttatgcatattttactgaaagatgctgaagctgtcaaattttactccagtaggcgcgactaggagccaggcagcgagcttatttttcatattttgcctatggtcgcgactaggctttatgtagtcgcaactaggggcaaaaaacgagatttttggacagtttttgactttttcaaacgtagcaaccctaatttctatttacggggctcgtgttttagaaggaagggaggcagaaattggatccaaaagtgaaaggaggcagaggaagcaatggtggcgatccagaatgcaatcaccaactagttcttt

SEQ ID NO: 284456 - DNA, 505 bp, Cannabis indica
gattaatatacacttactatcttctctgcaattttcttgtcgtaatcagtgacaagttttgttctcttggtccgagatttgatccaaacacggtggcgtgggggatcttgaacgtcgagatccttttttctacattattttataacaattaaatgagtacaaattatattttaaagcacattattagaattcaagcattacttaccacaacttcccgtacattaaccattccactccgaccacttcgatgtctggattggatttttgagaaacgttgcctttgcaccttactcaattcctacaatgccaaaaaatacattagatacatgtacttgtatttaagagtttatcttagtacaaatataattagcgtacctgaaattcaggagttactcgactttcaacaaatttcaaccaatcagtaaggttgatttcgggatgcttttcagggacttgtgccattccattgcgggcattataatgtcttttgtcatcctattcttga

SEQ ID NO: 284457 - DNA, 518 bp, Cannabis indica
agataatagatagaggtttgaaataattttagatttaatgattcaaattcggttttgaatttggagacttaggtttatgaaataagtgtgatcatcatctttaaataatttcattatattagtaatatgctggcactttattattaatttaatatttatgatcttttcattttataattgggttggttatttattttttatttattatttttttttgagtaaaaattaaaatgggagcaaaattatcaaatcaagctaggtttttcaaaatataatgtacaattcaattaatcaaattaaaaaatatataaataagaaaaaaaaaatagaaatagaaaccctaccatatagatgaataaataaaaagctttggggcaccatctcttttctacaaacctactttcaaattgagttgatcttcatttataggttgatgtcaaacactaagccaaagatcaaaaaatgccctgtatatcgacaaaggtgtgtctaaaatctgtatcaaaggaaaaataaat

SEQ ID NO: 284458 - DNA, 577 bp, Cannabis indica
aattatgttaagtataatttaggggaaaaattataaggtaatgtaagcatattaattcaaatttcctttttattaattggcaacgctttgagaattttcattacacaaatgacattgaagaactgaaaattttagaatagcaccacgacatagaaattcaatatcaggtgctaaaatgcaaatattaggcaataaggtcgtgtcactactctaaattttttagttcttcaatttcgaagacaccaatcacttgaattttttgaatttttcttgaattggtctcctagtgctctagctagaagactttatttaatgggggtttttcaatattatacttaaaattgattttatttataaaaatacctttaagaaaattatttgcacaaataccgttatgacacgtcagcttacataccaaaattcaaaacaattaccgaaaatagaaaaaactggaaaaatctagtttccaaaaattttcgctttttgggagttttgaaaaaagcaaccatttagttgcttttgatttgaataagatatcaattggttactttttttattaaaaaatttattttagaat

SEQ ID NO: 284459 - DNA, 523 bp, Cannabis indica
agaagtgctaaacaaaccgcgatatcggactcgacgatggaagcagaatacatagctgcagcagaagctgctaaagagcttgtctggctaagaaagttcttcaccagtatcggtgtcgtgcctggaatggaaaagcctctggtcctactttgtgataataatggagcaatagccaatagtaaggaacctcgaagccacaagagaagcaaacacatagaaaggaagtatcacatcatcagagaatatgtggcaagaggggatgtactagttgagaaagtggacacagaagacaacttagctgatccattcaccaaagtcttggccgtgactgcatttgaaaagcaccgtcagaatttaggattaattgatatgtactgattagttttatattagtgcaagtgggagtttgttgggttttatgccctaataaaactctatttcaatgtaatctattttattaaacatcaataaagaaacagaagtattttcattcatttgtgtatgttttggttcatcttatcaa

SEQ ID NO: 284460 - DNA, 436 bp, Cannabis indica
cgcatgttttaaaatttcaatttttatatttatttaattaagcccatacatatgagcccaacccaagcccataaatcttagggcaaaatccataactcttcacaaaccctctcttcttagcaacaaacccaagcccatacatgtgtattgaaatttggagttggaagtttgtgtttgttttatttttaatctattgctaaaagtatatgttagttgtacatttatattgttgttggaatttaattagtttcaagtttgttattttgatttaggtgtgttgttgaaactttaaaaagattattgacttattgttgttgttataacttttattagtctcaagtttgttgtattttcttaagtgttttggaataattatattaatgatagtttaattattttatgatgatttcaaaaaaaaaatgtaatagttcaaacc

SEQ ID NO: 284461 - DNA, 323 bp, Cannabis indica
cgcacgccttaaagactgctccatgtcaaacagaaacgttttggacgctccttgggccaatccctcgcccctccactagcatttgggctcgggtgctctcggtcggccatactccataacctccgtgccccccggtatttgcacgctctgccgctatcatggtaagatttagcttggttgacattcctgctaattcttcccggatggctatgacagacacgttacaatcctcgatcgtatcattgagggagtcttgtaatgcagcctacccattttgtagcacagtgtatagcagcctgcatgtctgctgttgcttattctaa

SEQ ID NO: 284462 - DNA, 480 bp, Cannabis indica
tattttcaacctgcccaattaacagattggacagtgttggttcagattcacttatttatccttaagttgtataacaccactcacagggtttaacaaatatacccttacatcagatacaacaaatatcaaggctaaagaacataaagacagttacaaagacagttacaactgaaacagttacaaatattactctagggctctgccctagataagaatcacagatcagtataaaaggaagtatttttctcagatacaacaagcaataatatacagagcaaaataagagatacaagcagtaataaaaagtcacagcgaacaacaacagaaaataacaacagagaaaagagagccttttggctgtgagttgtcatcttcatgtgcgctcctcctagagtgttcatgtaatagaaaagagagttttgttagtatcaaaagtgagaaaaacagagagaaatataaagttgtaaatcaaagattgta

SEQ ID NO: 284463 - DNA, 581 bp, Cannabis indica
aaacactttcttatcttaatgaccatgggatggtccacccctaatcacttacaatagctatcaaacatgcaaaccttagttaacagttctagcttttcttaaggtcacaatcaggacattcatcaatctagtaatggtttacactaagtacacaaccatttcatcattctgaaattttcctatctctaagggtaaatccctaggaaggacttaagcaactattagtaactaatcatagaccttacactttcatcaatatgcaaatcaaatttctggggaggtaattttgaatacaattcaaaatttaacttaatgatctttgaacggcatatgtaccaaatatttctccacccctatcagttcgtaagatctttaactacttaccttaatgttttttaacattgctagaaatgaaatttctttgcataaggtaaaatctagagtgatcatcttaagaatttgacgataactcatatccacctctgaatggacatccatatattcgaatatagatgatcttactttcaagtggataaaggcatattgactctttgcagagaatgatcttgtcaaaaccacta

SEQ ID NO: 284464 - DNA, 533 bp, Cannabis indica
ccacttgggaactagaatctgatatgaggactcagtatcctgaattgttcaggtagatttcgggggcgaaatccttttaacggggggataattgtaaagaccgcatatggttaatgctttgaattattaaataattaaggtttgtgtatgagattaattaataattatgaaatgtatattttggaaatatatttattattatatatgttattatgctattttatgtaaattacctaatttctgtgattgtgttcggaggctgtggacagcgacgttgggcctttagagagtcgtattttatatgttatagaatatcatcggagtattatagttagatgttagaagcgttagaattgtcggggttttaattaccaacttaccctttgtagttggtcaatattgggattttagttaagggcaatttagtaaattgccaagggaagattttgtcttatttggttttatttaaaatctgaatataagctttagtaaaaaaaaaagaaagaaaggaaaagtcaaatatgcttggtgtg

SEQ ID NO: 284465 - DNA, 532 bp, Cannabis indica
accatggaagtttacatggatgacttaaccgtctttggaaaatcttttgacgatgcatcgagaaaggtcttgttcttaattgggaaaagtgtcattttatggtatcttctggaattgtcttaggccacattgtttctgaaaaagggattgaggttgatcaatctaaaattgacctcatctctaaacttcctacccctaagactgtcaaagacattcggtcatttcttggccatgctggtttttataggaggttcataaagaatttttcaatgatttctcgtccattatgcaacctcctagccaaagatgctacttttgagtggacaccaaagtgtgaggagtccttccgaacacttgtgaattcactcacttctgctcccattattcaatcacccgattggagtcttccttttgaaatcatgtgtgatgccagtaattttgctgttggagctgttcttggacaacgaagggaggggaaaccttttgttgtctactatgcaagtgaactcttaatagtgctcaaatgaactat

SEQ ID NO: 284466 - DNA, 618 bp, Cannabis indica
acctcaagctcctcctgattgggagcaaagatttgctgagatgcaagatagaatctgccagcaagatgaagagatccaaagattgaggcaacagggtcatcctgccgtgcctcctcaagtggttcaggccgttgcagttcctgcggtgccagcagaacaacctgttgttggcaaccgtatggagctgttgtatgaaagattccggaaacaggcacctccagtgtttcttggaggtcctgatgtgatgaaggccgagcagtggctttcagtgattgaacgcatcctcaattttatgggagtggttggaaatgaccgggtgacctgcgccactttccaatttcaggaagacgctctcgtgtggtgggagttgataaccctcactcgagacgtcacgatgatgacttgggagtaattcaaggagttatttaactccaagtattacaatgaagcagtccgcagtgcaaagcggaaagatttcactgatttagttcaaaccgagggaatgtcggttacggagtatacgacaaagtttgatcggttggctaagttggctgcgggaattgtgccgactgattttagcaagaaagaaaaatatttggcgggtttgagtgcaaagat

SEQ ID NO: 284467 - DNA, 634 bp, Cannabis indica
gcgaccaagtaaagatcctgaagactggcttgatatgtacattagctgtaaagactcgttcgactcatggcttagtaagtgctgattgttagttgattagtggattatttactaattgtttgaattgtcttcttatttgatatgtgtaaagttgttcgagaagcgtgataagtttttttgatataaagttgctaagtatgtctatgcatgtgcggtaatgcttattagcattaattctagttagaaagattttaactatgagaaaggaatgatcacactaggaggtgtacctgaggtgatctagtaagtaaaattgagagcctgttaggctcggggtaggtggtgtgggtataaatcttccactaccacagggctgagagcaaatgaatgctatgaagtaagagattatccgagtggcaaggtagtagaacttgcatagttgatcccggcgtggggatggagaatgatactaaaccggaccgattggccaagttctgttttgaggaagcggctgttaaggccgctagggagtctaatttagttgaaggtgggaaaagtatatcgctcggaatgtgggtatagttgtttagtaactaggggttttctagttatatgctcaggtggttgatttaac

SEQ ID NO: 284468 - DNA, 520 bp, Cannabis indica
ttttctagttacctgtccattaagtgtcaagttattatacacgtgttattttttattggtatatttaaaataaatttaaaataaaaaataaaaattaatgatctagactaattagggtctgccatgtggccattaacttaacacttaatggccaagtacctagggaaattccagaattttaacttaggtacgtattattattgtcaaaaattaaacttaaatatttatctgcaatcgaaagttaaacttagatatttataccacaaattactcatttatttaatatgagttacttgattatatacttatttaaatatacgttgatgtatacatattaatttatattttattataaattattgtacttattagatttttttttatgaaccagaaagttgtattgctcaaaaactgattttattataaagaaaacaaatctaagaaatacataaaatataattttttagaaaataaattttaaaaagagtcatcaacaagcttattaaaataaataattttt

SEQ ID NO: 284469 - DNA, 676 bp, Cannabis indica
ggtttaggtctctgtctaggttttgatatgggttcgggtttttgtttaggtcttggtactggtcctggtcctagttcgattatagttccatttgcgattttgtgttcgagtttgggtttgagttcgggtcggagttcgagtcctgttctgagtttgggttcgggtccggatttaagtctaggtccagattaggcaccgggtgtgggttcgtgtcctgggtcttggtctaggttgggtccgagtcccaagttccaatcccgatctgagtgtggattcagtttgtggtctaagtcctttgttctgatcctagtctgggttcgagtttgggtctggttccaggtctagctttgggtatgattctaggtgtgggtttgagttcgagtctgagtctgtgtccgggtttgtgtccaggtctagaccccgatctgggtctaggttcgggtctaggtccaagttggggtcccgagtgcgggtccaagtttgggtctgggtcaggatctcggtcaagatctaggtccagcatttcgatcccattctgggtcttggtccgagtccaggttcgtatctggatccttatctaggtccaagtctgtgttagggatcaggtcccagatttaggtccaggtctgggtctcaattccggtctgggtacacgaccgtgtccgggaccgagttc

SEQ ID NO: 284470 - DNA, 620 bp, Cannabis indica
atctttatttaacaaaataaaaaatataacatttatattatatttgacataaaaaataattttgtaatatatttattttaatttttaatactttaatatacaattacaaaacttaaatacttattgttgatactaaaatatctctaatatatctcttatgttaaagggataatttaaacaaaaaaacacaaaaaaaaaaaaataaatacaaaaaataacaaaataacagttgtacggagttttaaatatttttattatctttttagtattttactttacataaaatagtaaaatagctattttttagttgtatttttattattgttctcttgttattttgttgttgattttttatttgtttattatttttttattgttattttgttattattttcttgttactttcatgtaattttcttgttattttctttgtatttttattaaataccgtaaaatgtaaaaaaaactttaagacgtaaaatataaattttataaaattagtgtttatgtaattatgtgtatattaacatggctatctaacaaaaattagttggtttaacaattttttttcgttaaagttaacagttaaaactaacaccgttaaattaattagttaatta

SEQ ID NO: 284471 - DNA, 683 bp, Cannabis indica
ccgaaagtcgggcaagttttgagctccatcactaagagcaagagtgaagggagggtggtgatatgtcagaatctactagaaccgagtgcgagtgatgcccgtgccatccaccatgaagtactcatcagcaaaacgcccaatcttgctgatggccgtatcgtccgtgcccgtcaaccacttgaagcctggttgagagaagtagaagtaccccgacctgccttgcttggggtggacttcaaatcaaagaaccaagcaacctcgtggggagagggcataccccatttttgggaggcatagaggacgaagagggcagacaaatacttgatgcccttaggagtgaactgggccgggcagaggccgaagaagtccgccacatttttgaagtattgatgcaaaggcatcaatgccccttgctgaccatgggcacccgaccaggcgcacatccccctttcagggtttgtggcacgattgttgtaggtgggaatgtagcaatccaagtcgcccaagtatccatcctggtcgagagaccgaaggcgcgcctcagtaaccttcgacggagggcttacccacctagcgcccaaggcactttgccttctacgaggaacagcagcagcaagttcctcgctgacgtagtccacgccctcaatcaggacgtctccgtcagcatcgactagctacccagc

SEQ ID NO: 284472 - DNA, 797 bp, Cannabis indica
ttgaggtaatctttgatcagctcctctttgttttcttgaaattttaagaattgaaaatgtttgcatgctttgagttttgcttgttgtagttgtttgttgctgttttcagagattttgtgttgagtttttatgttgatcaatgcatgatttaatggttgttggttggatttaagtgagtttggaattttagcttaaaaactatgattttcaaagtgaaatgatgaaatctgttgctacacttgttgtagatgtttgctgttgttttcagaggttataatatgcatgtttgggtagattcaagctggtttgaatgcatgttagaggggtttagccaagcttgagttttgaactcaaagcttggagctttaatggcatttttcgtatctgtgatttctgggttgttttggtgctttgaaaatgttctttggggtatttagatcaggtctggaaggtttggtatgaattgggtttgatttgaatgagatatgaatttttgagtgtctcctgcactgaaccgaaattccggttcagtgaagcctgcagcatccggtctaccggatggggcttccagaaattcccagaaccgaaattctggttgtagaaccggtctactggttagggaaaattgggaaccctagttcttcccatttttatgttgtttagggtattgccatgctttttatcgataggaaaacttctagtttctagtttaagtccccgggaagtgatttagcgtatcacttatcagtgttgtgattgttatggtttaggagcctgtaaatcgccgtgcagttcgt

SEQ ID NO: 284473 - DNA, 886 bp, Cannabis indica
atgatgccatggttcgcgtagaaattagtgaaagattgactgtcgaactgcttgtgattgtccgaaactattttgtacggtagtccgaaccggcatatgatgttcttctctataaagtcttgaatcttctttgatgtgatagttgcgagtggttcggcttaagtccactttgtaaagtagtcgactgctaccaccgcgtactgcactccgcctttacctttaggtaattatccgattaggttaattccccagatggcaaagggccacggactttgcatttgcgtcagctcgttgggcggagctcttggtatctttgaaaatctctgacatttgttgcacttctttacataggctttcgaatcttcaatcattgtcgaccagaagtagccttaccttagaattttcttttataagctctgtccggttgcatgattttcgtagaatccgtcatgaacttcatatagaagtcgtgcagcttcatttggtgtgacgcacctgagtaatggcattgagaatcctctgctgtacatgatcccgtctacgatgatgtactgcgctgcctttcttctcattttctgagcttcatttcggttatttgggagttccccagagttgagataggctgctattggcgtcatctagtttggagacgtgtctatcattttgatttcttctgtgccagtgatgctaggctcttcaagaaacaggatcgggatgaggtttgccttgtcacttatattgctgctcgccaaacgggccagcgcatctgcagttgtaatttcctctcttggaatctgcttcaggctgtagcttttgaattgtgcgagaagatcatgtattttgcacaaatttgctatcattttttctccccgagcctcgtattcac

SEQ ID NO: 284474 - DNA, 647 bp, Cannabis indica
tgaaatgataatttccttcaagcttggctagagataaatgattaagatctcatttcagtaattatattagtttactgaaatatcatttatagatagctaagtgttttaaggataaaatacattgaagggtagaacggtaaatttatccatattcagtgtagattatctatagaggatctttgactattaagattgtaacaatggataatcataacgtatctatatcttggtagatatagagcgttctacataattaagagtacaattctgaatttatagtggcgcaatgataaattaataagttagagaatttacttatagtaaattctagatctacttattggaagcttgattatataagcccatggttctcacactagttgagataatacttcttacagactcagttaatttgtttaattaatcaattacaattctaaaattagactatgtcttatttatgaattttcactaagcaagggtttaattgtgaagaaaagaggttttggggtttatttgttaattaagagactttgtatgatctatttaataaataatataaatgtcaattttatttgataattaattatatttattaaataaattgttttggcatttataggattaaaattagaaaatatggtatt

SEQ ID NO: 284475 - DNA, 995 bp, Cannabis indica
aaaataggacttaatggccggccataatatgggcccaacactagttacatttttgccatttttctcaactatttatctattatttcgcaaatgacatattttccaatttcaatcctataaatgccaaaactatttatttagtaattaaaaataaattatcaaataaaattgtcatgtatattatttattaattagagttcacaaagtctcttaattaacaaataaacctgaaaatcttatttcttcacaatcaagccatatcatagtgaaaattcataaactagacatagtctaattttagaattataattaattaattaaaatcaattaactgtgtcatataagcagtttgtctcaactagtatgtggaccatgggcctatataaccgagcttctattaagcagatctagaatttaccaagtaaattccctaaattattaattcctccctacacaactacagatctgaaattgcactctcaattatatataacgctctatatgttccatgatatagatacgctatgagattatccatttgttataatcctaataatcaatgatcctctatatataatttacatagagtacggacaaaatttaccgttacacccttcaatatattttatgtttaaaacacttagctacctataaatgatatttcaatgaactaatataatcactaaaatgagcgctcattcatttatctctattaagccaagctcgaaggaaattacctttcacttctatgtccagataaaagctatagattatgcatctatgattagcgctcccactcaattaaactaccatgttcttactctatatgtcacgagaagaaccattggtcaactttaacgaacagattgaagaacacaaataatacaattgaactagaacctaaccatctgaggattgagattatttgatctaagatcaactaggtgatattgagttgagtagatattacgataagtttattatatcttatccaa

SEQ ID NO: 284476 - DNA, 796 bp, Cannabis indica
aactaggaactcaaagtttccctatcgataaaaagcatggcaataccccaaataacataaaaacgaggaaatcaagggtttctgaaaatcacccaaccggccgaccggttgtccaatcggaattccggttctggaaattttcaaaacccatccggaattccggatgcacaaccggaattccggttcctcgcaggcagaactcaaaaattcataacttcatcaaatcaaatccaattaaacccaaaccttccagacctgttctaaatgtcccatataacatttctaaagcaacaaaaccacccagaattcacagaatcaaaaatcaccattgaaggttcaagtttgagttcaaaactcaaaacttgactaatccgtccaaacagccactaaaacatgcataaaacagcatatttcaacatattaaaactgcagaaatcaagccctaactcatgcaacaatcacagcaacaaatttcgaaaattctcattgaaaactaaactttgagctaaaaactccaatcttgaatcaaagaaaaaatcatgcattactagcagctcaattcaactcaattaaacatgcctaaatctctgtaaacaacaacaaaatcacaacagcaacaacaacctaaactatgcatgcaacatcatctttttcatcaaaattaaagaaacttaaagagtaagatacaaaggtcttaccaagctcttgaagaacacttagattgaaagaaaacagcttgaaaatcatggaaatccaagccctagaacaccatacagtcgagagagagagagagaga

SEQ ID NO: 284477 - DNA, 591 bp, Cannabis indica
tccggtagtgcgtattttgcctagtagcaaagtacaaacgttcttgggagtccctcagctccgtgtactgggtatattggggagtgtacccccttttctggcgcttctctcccgtccgggtgctgcctttggaggatcttttactcctcgaaccatgggaagggcctgccaggctagcggttggagcggagtgtgaaggagcttgtccattcatccccgaggggtttccaaaatgggatgatgctggcgccaaggcctggccctgactatacccggggatggcagagaactatacgccgcttatcggtggggccgcggtcggggcagtacccgagggtggtactccgggcatgtaccctgctatcccagtgggatagtatcctccataggccactatttgggcttcttcgaggttgatatatttttggactctcttctggaagtcctgaaggatagcagccccctcttgttgtagctcattccagaagggagtccctgtacggatgcctgcttggagaagcgcaagctgctgtccgtcatcaactttcttagtttttgaggcctcctctcggaacctctttatatagtttt

SEQ ID NO: 284478 - DNA, 485 bp, Cannabis indica
ttacaaccactgaaactccctgaatggaagtgggaagagatttccatggattttgtgactgggttacctaagactacaaagcagcatgacgccatttgggtagtcgtcgataggtatacaaaatctgcccattttctaccagtacgcatgacttactccatggaccattttgctgaactttatgtgaatgagattgtgagattacatggggcaccgtattctattgtttgtgatcgagatgctcggttcacttcatctttttgggaaagcttacagagagcaatgggaactcgattgaagttcagtactgcatatcatccagagacagatggtcagactgagagaacaaatcagatcttggaagatatgttgagggcatgtgtgatagatttccaaggatcatggagcaaatacctgcctttgattgaattttcttacaacaacagctatcagtctactatcggggtagcaccctatgagatgtt

SEQ ID NO: 284479 - DNA, 593 bp, Cannabis indica
cttcacatcgagtctcgaacggtcatgctcaacacgtgtccccatacaaaggcagagccagctcggaataagtctcccgtacagaattggggggcaaatgtgatcccaaatttggcactttgacgtggcatcacgagaatggtgacacgtgcactctacttagagcatctgttcggatcaacatgccgagcaggatgcctcgctgacatatccagaatggaacactcaacgagccgtgcagaatgagcaacacttggcgaattcagcttaacgcatcatgagtcaccagctcaatccctataacttagggatcaacttacgtggatgtggcatacacacgatcccactatcagtgtattcagcctcaatcccacgatccttccattcaacattgatcacacgatctttctgtttatgcgcattgtaacgagagagggacttttcctcctcaagtttctagcactataaatagtgatgaatgttcactgggcaaatgaccgagaaattataagccgaaacgctgtaacctaaggctatctaagaattatatattcagagatattattgtaagagctataagaaaagaaaacttc

SEQ ID NO: 284480 - DNA, 627 bp, Cannabis indica
cttcttgctcgtactgagctgtgaggcatatcgttcccgagctttgcccgtatctccagcgatgtgcgggcctccaatgatgacttgcaagtgtccatctattggtggaggcatcagatcctggttattctgaccttggttggccttgacatacttctgtaggtgcgggttgttcttcttgatcagaagttctatctcccgcttcaggttgtagcattcgttggtgtcgtggccgtagtctccatggaaccgaaaaaattttgtcatgtccctcttgctggtatctttcttcatgggtcgggcttcttgtacggaattagcgactgagttgctatatacacactttctatatcctcagttaggatagtgaatgcagtgtgtttggcgcgatcacggggagtctgtccgggtttttcggtgaactttcccttcttcccgttcccttgcttgtggttgttgcctgaacgctcgccacttgagttgctggagtattggggaagctgggcggacgttccagtagaaggagctttcatttttttcggcttttgctcaccttctgctcgctgaaacctttggcccggtcaaggaaatcactcattgagttgactagtccgttcttccttatgt

SEQ ID NO: 284481 - DNA, 481 bp, Cannabis indica
aataaccgacgccatatgtggcgtaggaaccgacgccatatatgagcgtttttcagtttttttaattttatataatttatttaaattataaatttattaatttatatattatttaatttaatttaaatttaaattacatatttatttttaaaaggtaaattaaatattatttaaattaattttaaaattggctaaaatacataatttcatttcataaaagtaattaaatattacacaaacattgtaaaattagtccaaatattaataagttaataaatctaactacaagttaatctaaaaaaaattacatagggaagaaaaattcttgggcctttcaacctcaatcgtcatcgtgaatcaccgccatcaatcgttctatccactgtcgctgtaatggtaacaattcagtttttggatcgtattgccccatacctccaaactgttaaaaaaataaaaaatttatattagtttatatatatgt

SEQ ID NO: 284482 - DNA, 600 bp, Cannabis indica
ttcggaaaacaggtaagaactgtgtataatgtgtgatgtgattatctgggtgtatgtatatgtatgatatatatgcatgctgtttgtatcattgtatatgttcgggtgatatcatagcgacacaatcattgtgtcggttcagcagtacaggcatcgtactggttaagagtgatattctcccccgaaagtatgaattggtactatcatagcgacacaaccatcgtgtcggttcagcagtacaggcatcgtactggttaagagtgatatcatggccaattatactttcgggtgttgttgacgctatcatagcggcacgaacatagtgccggtcctacagctcgattataaagctggtaggagtgatatcatggtcaatagcacaagtagtttgaacgttcatactcatctgataagctctgtaaataggtgtatgggcgcctatttacaggtcggaaattatatgatatgttatatgcatttcttactgagtctatcgactcacagttctactttcatgtgtaggtaaaggaaaggcgaaggctgaacaggggtgaacttgagctcagatgggattgtacatgtcaaagcagcgcgacctgg

SEQ ID NO: 284483 - DNA, 523 bp, Cannabis indica
ggattttggtgcctggtttgaagctttctgtattctcatttgactgagaatattgagaagttggcaatgattctttggagtgtttgggggcccgtaatgatctagtctggaatgataaggctatttctgtggaaagagttgtttcatctgcaattacttaccttgatctttggaaatctgctcaaaatagtaatggaggagcttcgtcttcttctagtcagcttcgtgctggtgttgagcactggattaaaccatctttgggagagttgaaggttaattgtgatgctgctctgttttctggagaaaggagtcatggtttgggttggattgccagggatcatgctggtttgtgtgttgctgcggcagctgtcaaacaccgaggagatattgatcctgttgttgctgaggcgctgtccatgaaggaggctttgagttggattaagtcctgttgggaagatagcaggactgttgagggcttgtgtcctacagcggtattattggagtcagattgtcttgtgttggt

SEQ ID NO: 284484 - DNA, 621 bp, Cannabis indica
aagaatcaacggttggattgattagtaattaaggcagtggaaacgtttgagtatccgtctgacaccattaatgcgttgtatcaatcaatgggcatgaaacgaatcaacgcctgcaaaaagtgaatcgctgcattaatggtgatcattaaatacaccctcacgcgcccaaagcacgtgccaggaaaccgaggagtcaaccggaggcactcgaacaagccttgattcatttttcaaataaacaaggcttgggggtaaatgttgcccctgattttgcccaatatacgtggaccaactggatagggacacgtggatcaaaagagtttaacaattcgagttaattgctaagtcttcattaagaagggtagaaggcatacgaagccccctgtgctcccggaggcctaagcaacatcaaagcatctccgcgaggtgtcaggcttcccccgagcagtcacctcgcatttaatgtcgcatgggaggaaacgtgttgggactgccacacgtaataaagtctaacgacatgaaccccgatctgcgcctacgaagtcatgatcacttaagtctattgacggctacactgcgaagagtcacgtcagtcaaaagacaataaggacattccacata

SEQ ID NO: 284485 - DNA, 784 bp, Cannabis indica
aactcttgaagtgttttcttcattcacggtgtttggtctatactgatatatataccaggataaaaagaatgtatgtattaactatgaatatacagtatacgttttttctttttcctttttttgataaaatctcattatgtttgatggtctctttccactatttttacataaatgggaaatggtaatttagcacgataagtgaaaatctcatatgtactagaatagtcactagatctcgttccatagatatatataaacatggggagtatcatttgatggagttaaactagtgccaacactaactcattcagttttaggaatgaagatctaaagttttttgtttgaattattttttattaacattaaatgtggctatatttctgatttttttttaataatattaggtattagtttgaacttagtttaaataataataacaatgaaattaaaacaattcaattatatttttttaaaatatatatatataatttaatctaattctaaatttatatatatataaatatataaaaataacaaatttatctttttttttgtgaaaaagagagaggatccttttgtcattgacaggatccttcccgataaatattagaagcctcccttgtggtgggagaaaaccatggttacaattaataacaaaacatgacttctagggccaaagtacaccccactttgcctcagaaaaaaaaggaggatagatacaaccatctacaacccctatacaatagttttccattctctacacaaatctaaaaaggataggtcc

SEQ ID NO: 284486 - DNA, 526 bp, Cannabis indica
aaaatatcttaaatatcaaaatatctaatcttataattacataataaataaatattaaagaagttaacaaatttttaaatctgaccataataggaaatatttaaaattagaaacattccaaaatagaaatatttaaaaattggaaaaattccaaattgaaaatatttaaaattggaaacatttcaatttagaaatatttaaaataggaaaaatgaattttgggaaacaatcccatgaaaaaattaaattttggggaaaaatcccacaaaattcgattttttgggaaagggctgccgaggaggctccatgcagcagcccaggaggctgccagcagccccttacgcgcgcggacggacaaatgctgggcgagagacctcggcgccagcagggtgatcctcgacggattgcagggtcacacgggcggaacagcagggtgctcgcgggtagatggggcttgtccgaagctcctgatgcctgcgattgagcacccatgcatacccgaaatcctgattttccaaaattcata

SEQ ID NO: 284487 - DNA, 545 bp, Cannabis indica
agatcctggtaaaataaattccaacagttgatcagtctaagattgatctcatttctaatttgcccactgcaaagactgttaaagatgttagatttttcttgggcatgttggtttttataggaggttcatccaaaacttttcaatgatttctcgtccactgtgtaacctcctagccaaagatgctacgtttgagtggacacaaaagtgtgaggatgcattccgaacacttgttgcaaaattaacgtccgctcctatcatacagtcacctgattagaatttgccttttgaaatcatgtgtgatgcaagcaatttttcttttggagctattttgggacaacgaagggaggggaaaccttttgtcgtctattatgcaagtcaaactcttaatagtactcaaatgaactattccactacagaaaaagagttgcttgttgttgtctttgctcttgacaaattttgagcttacttgattggttcacctattacgatcttcacagatcattctgcccttaagtacctccattccaaaaaggatactaaggcgg

SEQ ID NO: 284488 - DNA, 652 bp, Cannabis indica
gatgacatgctcgtcaaatccacgaaggctgtggagcatatagatgacctgaacgaatgcttcaaagtcctcaggaagtacaacatgaaactcaatcccttaaagtgctcctttggagtcagctcgggtaagattctgggctttattgtccatgctcgaggaattgaagccaatctagagaagattcaagccctcttggatatgaaatctccaacaagaaccaaggaagtacaaagtttgactggtcggatcaccgcactcagcagatttgtttcaaaatcaacagacaagtgtgttcaattcttcaacatcctgggggaaacaagcgatttgagtggatagaggaatgtgaaaaagattttcaggagctaaaaacgcaacttgcaaagcctcctgtactctcaaaacctctggacagagagaacttgggatatacttagctttcaaagagcatgctgtgagtgtcgtgctgatcagagaggaaaacacatacatcacctggtctattacattagtaaaagactcattgaggccgagagccgatacccattgatagagaaactcacttactgcctgattctagcaacaagaaaattaaggccctattttcaagctcatcttgttcgggtgtacactcacctaccgtaacgcc

SEQ ID NO: 284489 - DNA, 780 bp, Cannabis indica
taaatatataaataactaacttttgtaacattgtactacttgttacttatggccagccttttagaatgacgtgttttcggggacttgctcttgccagtccacatgttttcggacctggccttcgctgtgctgaatcgggggtctcgaggagaccttgatggactacgtaatggtatagttgtagatgttgatggaagaactttggttttgctcaatccaaattgcttcttaactccctccatcacagcatgtttagccttgttactctcgtgggtgacaattttcccaacacaatccagtctggcttcaataggatcaaactgcattgtacattaggaaaccaattcagtaatacacatgacaaccaaatccatagaaacaaatccatcaaaaaatagattgacaactcaatttcaatataaacagttagttaactggatgaaaacttaaactaaagaaatcaacattacattacctcttccaatatttcattttcctcgaacagtgattccatgtacttcattacaaacattccacaatcgtggccattttgttgttgtgggtagtccttgcttgaagaaataattacaaactcgctgaaattcaggtctcctggcttgacaggggcaaacaattggtccaaagtctggagctgcaaaaaaattaaaacaatcacagttgagattagtgcaattacactaataaaacggcaaaccgtgtacacacgtgcataccatctctacgcaggtgctccgacgtgacctcttatgcattgcagaa

SEQ ID NO: 284490 - DNA, 876 bp, Cannabis indica
tattattttaccactagtatatttttttgaaccaaatttacaccatcaattaaagaaggtcaatttataacttatcatctaattaatattcaattaaaaaaatcagaaaaaaggagtcttaacaaagatgaaaattatagcatagaaatatatagaaaacttatctcaaactcaaagtgacctcacttcctcacaataaatgaacacgttggatttgtatcaccacatcagattgctttgactatgactaaactctcattagtaatttaatgttgcattatgtatttatataaacaagtttctaaagtcataacaaaaaagtcgttgtagtatagtggtaagtattcccgcctgtcacgcgggtgacccgggttcgatccccggcaacggcgttgtctatgattttactattttcttttttgtttttttgctcttagccaaataaaaattatatgtaacatttaacatataatatatgctaagagtaaaagatatttaaacatatcaatcacatatatatctattttttttttaataaatcaaatcaaacatattaaaagagaaacttccataatcacaaacacaacaacacagttcatatatggcatggaagaatgaaactatgaaatatctttgaaattctcgacatactatctaatagcccgccgttaataactagccgcttttaataattattagtggtaaatttcttctttgttgctaataataattagagtaatttacggtataaatacttaaatttaactcctaagttgcaaataaatacctaaatttaatttttggctgtaataatacttaagttatacttttagaatttttgtaggtacctggttatataaattgtcacgtggtaat

SEQ ID NO: 284491 - DNA, 504 bp, Cannabis indica
taggttctagttcagttgcattatttgtgttttaaatctgttcgttaaagttgaccaaatggttcttctcgtgacatataggttaaggacatggtagttcaattgagtgggagcgttaatcatatatacagaatctatagcttcattccagatatagaagtcaaatgatgattcccttcgagcttggcttaatagagataaatggttggatactcattacagtgagtatattagttcactggaatataatttataggtagctaagtcttttaaggataaaatacattgaagggtgtaacagtaaattagtccatactcagtgtagattatctatagaggatcattgattattaggataataacaaatagataatctcatagcgtatctatatcgtggaacatagagagcgttctatataattgagaatacaattccaaatctatagtggtgcaaggagaaattaataagttagaaaatttacttagtaaattctagatctgctt

SEQ ID NO: 284492 - DNA, 570 bp, Cannabis indica
tacgtgcccacctactttttttttctatttcccacatgcccacctatttcttctccatttcccactccctaaaacaaaaatcttaactctctaaaaccccacccacgcgtctgcactatcgccctcatctctcgctgtcttcctccctctctcaatcaccctttcttcttgtctctctcgtccatcgatctcgacccacccctcctctcgttggtctccctctactctctgtcgcatacgtcggaccaccaccacctcccatcggtgtccctctcatcttcgtctcatatgtcggaccaccaccacctcacgtccgtctccctctctctttttctctctctccgagctcgatataaatacatttatttatttatatatttttttatttattatatatatttattttattattgtataaatttaatgtgctttaaagtaagttgttattgtaacaaaattaattagctgttttattttaatttaggtaaaattataaaactaatggaggaaaaaaaaattggggaaaatacagatttttttgccattaatgggagaaaaatctgtattttt

SEQ ID NO: 284493 - DNA, 881 bp, Cannabis indica
attttacccctagcttttgaaaatacctatgttttaagtcaaagggcattttagtcatttcctttggtgagagttaagtggcatcctaggtttgtgacacctatcactctaagtattcagcaaggaatagaaaaaaataatcctttatgctttttttagaaaaagaaaaagaaagaaacttaagaaaatacaaaaaaatcaagaagctctcctttccttccctctctctcttcgaaccagcagaagcaaaggggttttgttgctggatttttgtgtttgcagctagggattcaagaagaagtcaagccaaggtaagctctagcaactcctagccctaattcttgaatttaagcttaggttgagtatgtgaaattgagtttcaggggctgttagggttagaaatgattagggttcgaattttatagtttatttgagttaatttaagtccctagcagctggttttgatgcttgatgttagttctaagcaagcttgagttttgaaactcaagctttgagctttaatggcaacttgaattataatggtttgttctgtgaattgctggctggaatatgttgtttatgccctaattaggtactctggaaggtttcatggcatttggtggaagattgagcattgaatgaaatgctttggggaaactggtgcaaaccggctagccggtttgcagtgccacaaaaaccggctagccggttttggcagggttccccgggcctttcattttctcaatttttgccattttgatgcctcggttgggtgtttccccatttccagagttaaaataacccattaagagtataacagaacctagggtttcggttttgggtttcccgggattagggttttaatcatgtgacttacccgg

SEQ ID NO: 284494 - DNA, 1050 bp, Cannabis indica
tagattgtgtaaaaattacaaattttaaaggaaaaagatatagaaagaaaaactcattttacagttgatcacaacactcaaagctcttcttccaagctcctcctcttctttttgatttttgccaatctcaaaaataaaaatgctgaactaagactaaaaataacactcaaattaaaactttttttttttcttcattttcttctcttcttagtgttggcatcctggatggagctcacgctgccgcctcttctctttaattcacgtttttcttctttcttttatatgctttaatcatatatgtctgtatatatgataactttgttccatttccattactttttccaaaacaagttcttcacattattttgttttgctggcccaatttttcatctttttttttttttttttcattatataatgcaagagcttgcttttcatatgggtcatttgatttcatttagtttctccatattatctatactataaataaataatgaatacaatgtgaactttagtgtgtatgaatattttgtacaaatatatttagacttccatgagtttatggacttcaagatcatttctacttaattttaacaagtactaaaatatatatttaatttttttactaaaatacacaacattaagattaacaagttataaaatagaaaattaaataaaatgattcaaaattatgaaaattgatatataaagaactaaaattaatatttattcaaaattaaataaaaagactactaaaataaattaaaaatacttaaaaacaaagctaatttaatgcacaaaaagagctaaataactctattttcatagagttatcagcaataataagtccagagctcggggatgattgtacatgtcaagatgtttcaacttggaaaattcggtctcaagacgacttggactttattttgtagtcgttgtacaatatatttatcaagtgtattttgaacatgaatataattgtagaaacgagatcctgagtttttatatggatatatgtatatatatatttataaaagtttaaagtttatc

SEQ ID NO: 284495 - DNA, 623 bp, Cannabis indica
cattgaatagagtagtcaactcatctaaaatggcaaacattctagcaaccttttattcgatcaaaaagagaatccgacgttgtccagtttaggctagagtcaaggtcattactatttcatgagcctccaccattgtttcatacttttttaactcttactaatagtcgccaccattagggtaatccatactaaaaataaaacacttacaaataatacttatctttcgagatcttctacggcgttaaattgctaatgaacgttcctctattagggaggattatccactaaaacaagaactatgtagaactaacaatggagatcgaatgtctcttgattaaagctcattatttaaaaaaatgtatttttatttaatcatttattttaattatattttaataatgaaaattatgaatttaaagttggtctcttgattaaagctcaatagttaattttcgaaaattatatataaatatatccaaatttgaaaaaattaaataaataaattaaaatataataaaaataaattttgaaaattatctaattcaagttgttctaaaataactaaatttctaacttaaattattttcaaacaaaatttaattaaataacaaattaagttatta

SEQ ID NO: 284496 - DNA, 586 bp, Cannabis indica
aaataattttcaactttaatctatttttcaaataaaattcgaaatttttctgcatttaagaaatacaatttcgaaatataaaaaaaaaaatgattaataaaataaaataatatatattttgaaaattattcaaatttaagttattctgaaataagatttcaaacttaaaataattttctatttaaataaatatcatgaaaataataatatatttaagtatcatgatgaaaatcaacttaaatatttaattttcaatttaattaaatgtattaaattcaagaaataaataattaagtatagatgaaacttaattattaattctaatttaatactagtaaaatatactttatttagattgatccataatcaattattaaacaattaattttcaatctaaaatattttcctatttaatattagaaaaataactagtactagaaataactatctagaatatatttcaattaactaaaagtgtttttctaatattaactttaaaatattaaaatgaaaataaaatttcatatattttaaaagttaattatgttgctaattaaatttaaattaggttagactaatataatta

SEQ ID NO: 284497 - DNA, 755 bp, Cannabis indica
tttctaactttatatgtgtttattttcattgttttagaattcatgttaggttgttaatccaacatactttttagtaaatctagatcctggtaaaataatttccaacaagggcttcccagcgatcgcctggcttctcctctcgaccgggctccccacgcgaaggggcctcccggaagctgcctgggccttggaataagccttctcctgagcattctggtagagatattcttggtacttcttctcggcggtggcgatgatttcgtcccggaaggtcttctccgcggcaggcaccctcatgtttggaaaaataaccttagaaaggttagagtcctccactgattggtgcggcaggatgagcttggccttctggcaattctccgtcgtgactaggcccccgacgtcaagttccgcccggtcataagttgcaaagacctaggccctccggagaaagacctgagtaggcacggtccgctcataggggggaatcctaacccactctgtgagaagctccgggtgctccactacttggaacccggaggagaagaagaagcggtggcgatactccttaacgtgagtttgcctattataagggaccacccgagcattgaaagggtgggcccgaaatccgtaaaaaccatctttaaatttctcccccttcttagggacagaaacaagttcataaaaatacaaaatctccgccggactgggagagccccatccccgggcggagtaaaaaataaataagcctgagagca

SEQ ID NO: 284498 - DNA, 567 bp, Cannabis indica
aattaaaagtcataaaactcaaaaaaaaaaaaaagaatcagtgttttgtatggtcaaacaaatgtgaggctagttttcaggagctgaaacagaggttgattacaactccagtgctagctttgccttctgacaaagaaaagttcgtggttttttgtgatgcatctagacagggtctgggatgcgtgctaatgcaagccgatcgggttatcgcatattcctcccatctgttaaaagattatgagcagcgatatccgactcatgacctagaattagccgcagtagtgtttgctttgaaaatttggcggcattatctttatggagaaagatgtgaaatttacaccgaccataaaagtctcaaatatttgtttactcagaaagatttgaatatgagacagaggtgatggttggagttggtaaaggattacgattgtgagatcctttatcaccctgggaaggccaatgtagtggtcgatgccctgagcaggaagggtcccgggcaggtagctagtatgattcagatttcacctcagttagcggaggacatggttagatccagcattgagtttg

SEQ ID NO: 284499 - DNA, 642 bp, Cannabis indica
gggtcggatcattgtgagcacaatgttgggtcatgggtaatgtctgacttgccagtatttttttgggcttattgggcttagtattgtgatcgtatcgtcataaccagtcaaatagtccaatccaatcttgtttgagcattctttgaaaacatcgcatatgacattgagcctgagcccaattttggcctctacagagtatatgcccactcatatcaagtcaagtactcaattatagtgtggaagattatgaagaattaaacacctgaaggagatccaggctcagatctttttaatactctgcgataaaaaggaataagggttagagatctgagtggaaggagccataatattccgctgccatcaatgtaaggtttactaaactttatatgtatttattttcattgttttaggaagtcatgtttagagtgttagattatagaatataatcaacatactgttggaattattttaccaggatcttagatctactcacaagtatgttgatttaataacctaagtatgaacttctaaaacgataataaaattaaacacatataaagttaagaaaccttacattgggtgcagcggaataatatgtctcgtcccactcagatctctaacccttgattcctttctgtcgca

SEQ ID NO: 284500 - DNA, 530 bp, Cannabis indica
taaaaaataaataagcctgagagcaggcggtatgcttgtggaatccgttggtatggcgcaaggccgacaaaaactaaaaaattaataaagtagtcttgaagaggaagcatggccccggccatcaggtgcgtctggctccaagccccgaagccgccatagttatggttgggcgtctccacatctcggggcggccggtgatacgtcccggattgtgagggttttattccagccacctctatgatgttctccagctggtgggggcaggttagggtggaatgaagctcagccgactcccatccggtggcccgtgacttatacccctcctgggcaacaggacccagtgagacattctcgagggtagccagacgcttgccactcttcttggacgactttgaaccggacgcagacatgttttgattctgaaaaagagttaaaattatagcagttaggccccataccaaaccctaaaccaagaaaagggaatgggggtcccctaaccgctggaaagaggccccctccggacatctgtc

SEQ ID NO: 284501 - DNA, 372 bp, Cannabis indica
atttgttagttaagcctactgtttcgtcagggtgatacatacattttaggaacatggtagtacaattgagtgggagcgctaatcatagatatggaatctatatcttctataggtatttagaagtgaaacgatgatttccttcgagcttgctaaatagagataaatgatagagcacccattttagtgactatattagttcactataatatcatttataggtggccaagtattttatttattaaataattagaattggcatttaagttgttaaattggaaaattggcgtttttgggaaaatgacgaaatggcaaaattgcaaagggggcccattatccaacccatggccgaccactatgcatggattttacaat

SEQ ID NO: 284502 - DNA, 513 bp, Cannabis indica
tttttttttcaatcgagggaataatctcaaccatatgatataaaatgaagagatttttctaattaggtagaaaaattaaggataaaaactcaaatttgtctaattttactcattcatgaataatacacattaaaattaggaattttttcaaaaatatacataaaatacaaaataattacaaaaataacctaacaaatctcaattacaataatatcttgtcacgtcattaaaaaatatcttaattccaaaataatatgcctgaaatgaaactattcccgaaattctttttttttttttttaattttcctgcgtttcaaaagtaaccttttggttacttatgatattgataagaaactaataagtaactttttcttaaaaagtatcacttttatatcatataatttgagatacattttggttacctcaaaaacttacatgtataaactttaataatcaattaattatttagattatattaatacatttgagtaactttcaagtttattttcgaaa

SEQ ID NO: 284503 - DNA, 576 bp, Cannabis indica
ccatgcacagaatcaaaatccaccatgtgagctccaagtttgagcttcaaagctcaaagcttggctaacaccacatccagccatcacaaccaactaaattcaacctaaaacaacatataaaacatccagaaaccaacctcaaacacaaacaaagatcacagcagcaaaaacaccattttaccatacaaaatccaaagttttgagttcaaagctttacacaaggttaaatcccaccaactaacaacaaaaccagcttgaatccccataaataaacataattaaacatctggaaacaacaacaattatacacagcagctaccatcaacaaaatcatcaagcatgcaaatattttcttccttaaattacaagaaactaaagagagagttacacaagggttaccttagcttggtttgtactaagaattgaagcaaaatactgagttgaggaagaagaatcaagaaccctagctggttctaagtgtggccgaaagagagagagctagagagaaaaatgggatttttttctttgatttttcaataaaatgaataactaacatactaatccatttatttcagc

SEQ ID NO: 284504 - DNA, 640 bp, Cannabis indica
aatatatgacacttttatcaaaaatccaaaaataaccctcacataacaacaccccaactctctctcttcctctatctctctagcaactctctctctgcccacttcgcacgaaccgaaccccccaccgcccaccacgagtcgagccccacctccgaccgacaccagtccgacggagacccacagccgcaccactccgaccgagacgccgacagagacccaaagcaccatccacgaacccaacccacgcccacctcgaccgaacccacgcatgcacgcacgccatctcgaccgaacccatctcgaccgaacccacgcacgcacgccggccgaacaccatcggagaagaagaaggtccgatgccgcgcaaaaatttcaattttttttgggttttaaggttgggtccgatgggcccattggacggggcatcgagcccatcaggcccccgactgcaaaaaccttaaaaaaaacccatcgggcccaaaaatttgacatcgggcccatcttacccgacttcaaaaactcaaaaaaaaatgcccccatcggacgggcatcgggccccatcggacctgaccccttaaaagcccagaaaaattgaaaaacaaaaaaaagtttttgagaggggtatttttggggttttgga

SEQ ID NO: 284505 - DNA, 311 bp, Cannabis indica
tcttacaagtagtattgtctcaactagtatggggaccatgggtctatatattcgagcttccaataagcagatcaagaatttacaacctaaattcactaacttattaattcttcgttgaatccacacatagaactcaaaattgcactccattgttatcatcctaatttgatcaatgatcctctatatagatgatctacactgtaaagggattagattaccgtaacaccctacaatgttaaccccgtataaatgatgtttcagctaagtgaaatgagtactccaccatttatgttcttttggtcaagctcgaa

SEQ ID NO: 284506 - DNA, 632 bp, Cannabis indica
agctgctacagaggctgcaaaagaacttgtctggcttagaaagttcttcactggacttggtgtcgtccctagaatggaaaaaccactggttttgctttgtgataacactggagccatatccaacaataaagagcctcgaagccacaagagaagcaagcatatagaaaggaaatatcacatcatcagagaatatgtggccagaggggatgtactggtggaaaaagtggacacagaggacaacctagctgatccattcacaaaggtctttgcaggaactgcatttgaaaagcaccgtcagaatttaggattatttgaaatgtactgattattttatattagtgcaagtgggagtttgttgggttttatgccctataaaactccatttcaatgtaatctttatcttttaaatatcaataaagaaacagaagtattttcatcactttgtgtgtcatttggttcatgctatcatttatatatttatttgatttataaattcatccaaatccttataacatttattgtgacagtcagtagtcccgtgatccctaaggggaaacactgggtaagatgtgcaatcccacaccgcctggaggaaggtcaagtggatgattctgagactatgtaggtatggg

SEQ ID NO: 284507 - DNA, 433 bp, Cannabis indica
ccaaaaacctacacccatatatcatataattgcatcacctaatcaggtgagcctgtgccataatctgacaccaatatcgcatcgtctaatcagacgagcccgtacatacgcccggtacttatcatatgtcactgacgtccgtacctatgcccgatacatcaccaggaaaattacattacctaatcaggtgagctcgtgcctatgctcggtactcatcatatatcactgacacccgtacttacgctagtacgtcgccaagaaaatcgcatcacctaattaggtgagcccgtacatacactcggtagtcattatatatcactgacgcccatacttacgtccagtacatcgccaggaaaatcgcatcacctaatcaggtgagcccgtacatacactcgatactcatcatatattgctgacgcccgtacttacgcca

SEQ ID NO: 284508 - DNA, 388 bp, Cannabis indica
gcatcaacatattctcatctctaaaattacaaaaagaaaggtttaggaactttaccaagaatttgaagaacacttagattgaggaaaattagctttgaaatcaaaaattccagcccttgaacacccttcagccgagagaacaagagaggaaaagagagagagagcttgagagcttttctttgaaaaatttctaacttttctaacttatgatttttttgtaaaatgaaaaatgaataatgacacctagcataaacccatttcagccaaataaccaacaaataaatatttatttttcaaataataaagtcactaaaagacaaaaactcaatggggcaaaaagaccattttgcccctccatactaaattctcataaaaatcactaaagggg

SEQ ID NO: 284509 - DNA, 659 bp, Cannabis indica
agtttttcaggtttcaatgatttgagattttcatcttttacatgcttttttaataaacatgggccaatatatgcaaatatgtttctcaacacaatgatttcacctttgaaatatgcttataatgctactaaaatctttgccacaatattacattatttcttgtcaaatgacaagaaacctatgtttctctccactcaacaccatactaaattattaacaaattcatgtttatggctcttctataaattttggattcgatcaacttttccattttttttttcttttagatctctttgtttggtaacacttcaatttctttatctttttttcttaataaagttagaatgttgtctagtttttgtttttcaattgaaattatagaatctttcccacacaaagaaaaaggacttatttaagtataggtccccatgggattacatatatggagtcaactaaaattgtagttttcaccttttgagtattgtgaatttcatataagacttaaccaaaaaaaaaaaaaaccataagtggttattattatttttggtccattttctaatattaatacttattaaaagttcacccattttgatgtgttacccatggcttatgcatccttagttttgaatgatttgatttaataaaatttcatcattatt

SEQ ID NO: 284510 - DNA, 788 bp, Cannabis indica
gatatcatttattaatcgtataaatattaagtatcttaataaataaatgatataacttttcaatcttcctattaaaagatatttatttttaataaataaattattaattttaatattattatatagtagatcaattttttaagttattatttattacattgataaataattattttttatgattatactacaattaaattaaaataataataataataatatataaaggagaagtataaagcggtgacatggtattttaaaatcactcttaactatttttttcttctctccttaattcgcttaattttaataaattattaaagcataaatctataaattgatattttactattattttaataattttttattaataaaaaaccataaatataaaattaatattttactattattttaataatttttttataaaaatatgaaatattttaaaaagagttagaaaatgaaatataaattaaaaaaaattattaaaacttaaatcaaatataattaattgtaaatttcatttaaaataccaatcaatatatataccttaacgtttttggcttttttttttataatctaaaaataatgactctaatgtgtaagtttttttttttttttcttttttttaaggtttttggcctttttttaaaaaagtaaaaataagatataataatacggtttttttaattacattgtcttgtctaatttaaagttttagccttttaaatttttttattgaaagtaatattaattaattttttaacaaaaagccctactttacg

SEQ ID NO: 284511 - DNA, 351 bp, Cannabis indica
gccgtatacaccgatagtggaatcgtgtgtatgccatatccacgcaagttgatccctgagttatagggattgagctggtgactcacgaagtgcttggctgaattcgctaagtgttgcgtcattcttcacggctcgttgagtattccattatggacatgccagtgaggcatcctgctcggcatgttgatcccaccaggtgctctaaggtgatgccacgtgtcaccattcttgtgatgccacgtcagagtgccaattttgggataacaataacaatggataattaatgtttatgaattttcactaaggaaggacttaactgtgagaaaaagagattctagggtttatttgtta

SEQ ID NO: 284512 - DNA, 719 bp, Cannabis indica
atgaatgatttgcatatattaacaaggttgatgtcttgtcatttttctatttatttatagttatctttttgttattttatagttattatgtgtattattatggtgtatatttttagtttattctacacaattttttttgttgtatatatgcgcatttgttttgtaattttttagttgttttaagtgatttcgagaatattttttgttcaacaattattttttatttgtttttttatttatgtgtatttttttatggtgtatatttttagttttctctagataatattttttggttttatgtgtgttgctttatagtttatttagttaatttttttgacatactttattaaaatataatgataagattttttattttagttggtaccatgtgcaacagtagttattaatatattaattatatattacccattatattgtataccacattttgaaatcatgagattttgttatttctattactagtgtaattatttatttaatttttaaaaaataaattattattaaatcaagttgtcaaaactaagtaaaaaaattcgtaatacaaaaacatattgaggagttgatatgaatttacatattgcaattaggtcattattttgttatatcagttgctttgtagttatatttttgttattttaaaattttcatgttgtttgttattataggattgttctaaggttgtttttgatttgtttttt

SEQ ID NO: 284513 - DNA, 1004 bp, Cannabis indica
attatgagatcaaatataaatttaaagtctatatggatgaaaaaattatagttaaaaaatatatatttattttatgctaaatttgtcaaaagattatatcgtatcaaaatttaattaaaattaattttaaacatactaaaatttggcataaatttaacatactattcaaaactaattttctccaaaatgttaaaatataacactataccacttttactattctgtgtaaaaaaattaagatcactgactttaagtaattaatatttgtattaaatacaacaaagactcgagagacactggcggatattcacgtacatcataattaatttatgaacaataaagtcaaatgaaatataatatctatataaatatatattagttggttcaagaataaataagtaaactagcttacaaatttttttttttgtaagttattatcctcgtttgggaaaaaaaaaatgaaagaaagaaagaaagaaagtgatattttggttgatttcttggttaacagctggtatgcctttggggactctggacccagctacgaaggccacttatccaatatatccaaaaacaaaaactattggttatactttttatgtcttggattgtttaattcatgtgtgttgtgtggtctctagctatattataaaacttccaaagtccaaaaaccatatactccaaatcatgaaagacaaattaaataaaacaacacaagtttttgcaaaaaccagcagggtatatatatttttcatctctcccacggtttcattaattaacaatttaacatatatatagggtcaagagaaacaaaaaaaaaaagaaaaagcaatattacacaatccatatacaaactcgttggttcaagagcctattaatttctcatgaaactcacccatctttctacaaagggaagaagaaaaaaacatattcaccgcacaacagcagcacttaaaaaacagagagaaaaaagaagtcaactcactctcactcctcctctctat

SEQ ID NO: 284514 - DNA, 661 bp, Cannabis indica
ctattctgtgtaaaaaaattaagatcactgactttaagtaattaatatttgtattaaatacaacaaagactcgagagacactggcggatattcacgtacatcataattaatttatgaacaataaagtcaaatgaaatataatatctatataaatatatattagttggttcaagaataaataagtaaactagcttacaattttttttttttgttaagttattatcctcgtttgggaaaaaaaaactagaaagaaagaaagtgatattttggttgatttcttggttaacagctggtatgcctttggggactctggacccagctacgaaggccacttatccaatatatccaaaaacaaaaactattggttatactttttatgtcttggattgtttaattcatgtgtgttgtgtggtctctagctatattataaaacttccaaagtccaaaaaccatatactccaaatcatgaaagacaaattaaataaaacaacacaagtttttgcaaaaaccagcagggtatatatattttttcatctctcccacggtttcattaattaacatatatatagggtcaagagaaacaaaaaaaaaaaaagacaatattacacaatccatatacaaactacgttggttcagagcctataatttctcatgaaactca

SEQ ID NO: 284515 - DNA, 577 bp, Cannabis indica
caatctcaatagttcgaggggaatttttaacgaccaaaaaaattcagggagcacgatttagtacatgtcaaaatttagggggaaaaattactaattagcttaataatatataagttgagaatgagaaaaaacaaggtttgatgattaagcgaacataaatcctcaacaaccggcagagttgaataataattaatgtccatgcaaatgcaatcacatcactaagttaccatttctcttctcttttggtttttgtcttaataacattattctctctcacgactcacgaccgacgtttttcctcttcaaagcccaatgctacggcccaattcactcttcttcattgcttttggttactttctttctcttctataaaaatcaaaacttaatttctgttgtgtcaaaataaatacatagataccctacactacaccttattaacttcactcttttaagttggatgcaattaaattcattcatcaatatatttttggaaaaaattaaagaaatttttacaaaaatactggattttggtgaaaaatttataattttactgtcacacagattttttttttttttt

SEQ ID NO: 284516 - DNA, 915 bp, Cannabis indica
ctttcggtacaagatcgcgactggcgattactgtgtacaactgccaagctgcgagaacaccagctgattccagagaacgcaagtcttcaaagagagccagtatacaaagagccatctgagagacaacaagagcggatagacaaacgcctctccaagcaaacttctcgaccagtcccaggtaacatatcttatgtttataaactagtgccttgaaatttatccatacttatccttatttatcctcgcagagatgacatttttgaagtccgcgcccgtccttaaaatcaagccaaagagtggaacagcgacgacatcgcccgttatcgcccagaagaggaagagcgatgttgtaactactcttgccgcagattcttccaagaagctggctaaaaccacgcaggacaaggggaagaaagtcatgatcgagccaactgtccgagcccgcgattttctggctatgcaggagaagtttgtgggtgaggagttcatatccaaggcggagaagatcccttctgaggagcttgttccgcgttctgtggagttggcttcgcagtcgatgactctgttcatgaaagctgttgccgctggttctaaggaagctgactcgctgaagaggcacaatgcccagctccaggagaacatgaagagactgaaacaagaggcggctagaaaggacaaagagcttgaagaccttcgcaagtctaaggagcaggctgagctcgaggccaagaactctcaggcgaagatcgaggagatggctcgcgacttagaggtcgagaaggagaatgggaagaaacagtatgatcaggcagtttctgattattttacaccactctttctaaaatcccagacttcgacttctctatcctcggagcagaggccgctgagatggtcgaggcttttcgcgccatgtcg

SEQ ID NO: 284517 - DNA, 759 bp, Cannabis indica
tccaaaaggtggattaggtctatgccgatcagaattgacggtagggagttaagtcctcacctaatagagatgagcttagtagattttaatattattctgggaatggatttcctatctaaatactcagccagtattgactgcaaaaggaagattgtaatcttccaaccggaaagagaagaaccatttgtttttgtcggttcggttcagggatctcagatcctagtgattttggccctgtcagcgagggaattattgggtggtggttgtctagggtttctggctatggtggtggacaccactcggccagacactagtcggccagaggatatcaaagtggttcgggaattgctagatgtttttcttgaagaacatccgggtttaccacctcagtgggagattgaatttgtgatagatttagcacccggagtggaactcgttttcaaggctccttatagaatggctccagctgagcttaaagaatttaagattcagcttcaagggttacttgacatagggtttattcggtctagtgtgtcacccttgggagctccggtattattcatcaagaaaaaaaggatgggtctatgagaatgtgcatcgactattgggagttaaacaagctaatagttaaaaataaatatccattacctaggatcgatgatcttttcgatcaacttcagcggaagacggtcttctccaagattgatttccgatcgagctatcatcagttgaaaatctgagaggaggacattccgaaga

SEQ ID NO: 284518 - DNA, 919 bp, Cannabis indica
atccaaaataccgatccaatccgcactattgccgattggattggattggatttaaacttttatgcggatcggattggatccaaaatatgaaatccgcacttagtgcggattggatgttgtttgaccaaaaaagtgcggattggatcggatgaacacccctaccttcaatcatcctttgcatgtcggtagtcatcgctaactcttatcgtacatactccatttttctcttttagtattttctttatttaatgtcttagaattctagatctgaaaatgttgattagtgagagtagatttataaatctaactttttctttaatttgttcatccttatagtataactttttggattgttttaatttttaaactgttgattgagcacaaagcatctctattcagtggctctgcaaggattagagacttgttagattataatttttttctctgccttcgaatattataatttttttctccgtttggtaatcgagaaagtgcaagaaaatcaaggagagaataagaacatcaatctcaagcattaattagagtgtaaaaagaggacttggagtagagagagacatttgttttgatcgagctccatacgttcgagccgttcaaagttacattacatttttaatgccaagagctaatattaatccatttatgagttgttgtagaactgcctaaggttgaaccaatcagagatgaagatattgaagcagctctcaagaacacatatcacaaacaacactatttcttcaaaataatccaaattttagaatacaggcatttgcaaactatacattttgattcaccaacaacacatattatcaaaaggggaaggggagttcaaaataaacttataaatacatcctattattaaaaaaatataaacttaaataatttttaaaaagtattctta

SEQ ID NO: 284519 - DNA, 504 bp, Cannabis indica
gtagtaggtcattattgtgtcatttttaagttaatgtgtcaacttgaaaataattcatttaataaacggaatagaggagtcaatctaaaaatatttttctaccttaataagtagagctatagaaaacaaactctgtaactttttgagtgttaaaaaattgtaaatggttataaatttagagtaagtaacttgtgtgtggcagctggttaaagaagccaaaattgaggtttatgtatatactgacaactcaggttcacatttcaagttttgtaagactatactctctttcttgtcctattaacaaaaagttaacgtacacataacacatgaatatgactttctgcccgaaaccaagagatgattagaaagtagaagcaccgctagaactttcctttgtttgaagtaataatataataactaatatattttattacatattaataattaattcaagatgaactttacaaagtatttttaaaatatcgtgggatatataaatacaat

SEQ ID NO: 284520 - DNA, 668 bp, Cannabis indica
taagttggttgagggtgttcttcaagatccagaactttgaagcttgaagaaccagagattgaagctcgtacatgcaaagaaaaacaacagagggttagatctagagagagagagggattaaacacagaataaacacataaacacttgtattaaacttaagattaccagtcaaaatttacctgtgacttggaatcttcatgattgtacttcagatcgacttgatatagtggaatcgagctctcatatttgaggagcagctcaaacggagacgtagccaatttattggtgaacttcgggaaaatctggtgttttctaaacttagatctttctgtttttgtgtgtgtatgggtgtaaagatcagatcattttagatctgatctttttgctgggtttgtgtttgggatttctgggtttctagggtttggattcgagtttctctttgagaaactctctgctagggtttctagcatttcagagagaaaggaaggaaatgagaaggttctcgatccattcctaggttttgttcaaagacaaaacggggtcgttttggggttaactttgaaaagtcaaagtgaacagagaaaggtcgaaattgaccttggtatttgattcgtttgtttgttggtgtagggggcaagatagtaaattcctatcttaaaattcctaca

SEQ ID NO: 284521 - DNA, 517 bp, Cannabis indica
aagttcatatttagggttttaatcaacatacttgtgagtagatctaagatcctgctaaaataatttccaacagagatctccaaaatcatgaagggggcccttaaagaggacaaacacttactggcgatcgggcactctgccatctcaaccccttgacttaagaagaagaacttacagatagattttttgctgcataccgggatgagggtgctgttgggattttatgtcttaaataaaacccattacaatacaatctgatttgttatcaatagaagattagaagtcatttatgtttatatgtagttttcatgtttatggtttaatgtgtacgaaatctgttaaatccaggaacatatagttattcacaattacagtgatgtcaacatagtggaaggtaattgtgattatatgcttcaaaagacaatgtcccttgattcatcagtgcactggatttacactgatgtgatagtcagcgataaagtatacttacaccttggataagtgttatgttctctcc

SEQ ID NO: 284522 - DNA, 637 bp, Cannabis indica
aaaaagagttgagagagcgaggaagcccgaaactccaatatcgaggctatcgcaggattgaagctcaaagatcaatgactggaggtattgtttgatctttcattgtatatatgttatcgatatgtttatagtattttccgcattacatatcgttatatatatgctgtatttcatatactatattatagtctaacagttaatatcagagcgatttaatttctgtcttgatttgtatttgagtttttctgtgcgtatatatatatatgcatatattgtgatttttgggttcttgcggtatgatttcttcattttgatttcattcatttattcatgttattattaattttattctatatttatattttatatatacatatacagtattcagttcataaatatatttattcatacagtatatatatacgtataaattcatacatatatatttatatatattatatatgattttattatttctttacatataattaattattatgatttatttatataatattttattcagtataaaaaaacaatatatgcgactgtatatatatatatgaaaattttttctgtctgtgtctgttccgattttattttttcattttcggtatttatttcaattcctatatgc

SEQ ID NO: 284523 - DNA, 595 bp, Cannabis indica
ggtgaagggttcttttgttaaagctgataagaagagagtaaagcctaaagagcgacttcgaacgattaggcgtcgttggaaaagattgatgtgtggtagttctgaaggtgaacttactcttgtgcaaaactctgaaattaacaatattggaggtcaattttcttcattcggtacgagggctcttttggatgcaaggggtggacttgatccaatttgaagcagtattgaggttcaaccccttctgatgggggtgcaggtaagtctccctttccttgttttgcatgacacattggggacaatgtgtattctaagtttgggggaggggacttataaattttttttaattgttttagttattctgttctttttagttattttgctttagtttagtctttttatttggttgttagtcgattaaataaactgaagatagttgtgtgctgctgttaattgtgatatgtcctgaaattttgaaactgtgtgcttaattcttttaactctttggattagtttggatgcttgtgaaacctgtgtatgaatgcaatttgacgatctgtgaaatatgttataattgttttactgtggtttgtggtaa

SEQ ID NO: 284524 - DNA, 348 bp, Cannabis indica
ttggaaagtctgatcactcgccttcgcattgaggaggaggctcgtaaacaggaccagaaagaagaagtgcttgttgtgtcaaacaacaacactacgaaatccagtgcgattctgaaacccactaggaaaaaatttcaagaatcacgaatcgacaagcatgctccaaaccgtaacaataattctcggaataataataaaaatttggtttccaaggaaccaaaacaacagcagcaacccctaataagaatgacccggcaccgttttgtgctttctctgtaactaaaccgggtacatatggcacgcaagtgtcggaacaggtctagttctgctccgctaggctaacctgac

SEQ ID NO: 284525 - DNA, 678 bp, Cannabis indica
aagcaatttgattgcgaagagttcactgacttctgcaaccaacacggagtcgttaaaagcttctccgcggtggcaagaccgcaaacaaacggacaagcagaagcagtcaacaaaatcctaaaggtcaccctaaagaaaaagctgctggcctgcaaaaacaactggcctgaagaattgccaagagtgttatgggcctaccggacgaccccaagaactacgaccggccactcgcctttctcaatggcgtacggttgtgaagcaatggtcccggtagaaacgttattcccgtcccacaggagaacgacttatgatccagctacaaaccaagctttattacaggaagcgctggatcaggttgaagagctccgggacgagtctcaaatacgaatggcagcttatcaaaagaaggtgactaaatattttaactccaaagttaaaaacagaaaattcactattggggatatggtcttaagaagagtcttcccagccactcaagaacccggagtgggggtacttgggccaaattgggaagggccatatgaaatcgaggatgagatcggctccggaacctataagctaaaaaggatggatggaaccattgtgccaagggcctggaacgctgatcatctctggaagtattaccaatagtccaaatatgttaacttaggctttgtttaa

SEQ ID NO: 284526 - DNA, 228 bp, Cannabis indica
aagagctccgggacgagtctcaaatacgaatggcagcttatcaaaagaaggtgactaagtactttaactctaaagttaaaaatagaaaattcactattggggatatggtcctaagaagagtcttcccagctactcaagaacccagagtgggggtacgttgggcaaattgggaagggccatatgagattaaggatgagatcggctccggaacctataaactaaaaagga

SEQ ID NO: 284527 - DNA, 934 bp, Cannabis indica
ttcacccaagacgacatttttcaatggaccgtctttggttaacctgtgaagtctatcatagcctatatgacctaatcgtaaatgccatagatatgtttcatcattattattgatctcttttcttttatggtttctaggtttagcaacattgaaaagttcgttgttaagtgcgatttgtatttccggtcttaaaacataaagcccttgttccatgtaagcaacacataattgaaatccattacgagaaattgtgcaaatagaactcgaaaaattcaattgataaaattgtgtttgtaaacatgaaacactaataaagtttctactaaaatttggaataaacaaaatattgtctaaaactaaaaatttcttctgaaacttgaggcgggcttttcctttagcttggaccgatactaattcgccatttccaactttgagcttcaactcctctggatttaaataatcccaagtttcaagcagctgcaatgaagaacaaacatggttagtagatccagaatcaacaatccagaaggatttgtcattctctaaaacacatgattcaaaaacaaaagcattaccttcattcgaattgtttagaattctgggacatcgttcttcctgatgtcccttctcattacaatttgaatattgaagtgtactaccatcaattgtttcacgatttgtacataaagaagcagcactgttagaagcttcatacttaattcttttcctcttacttaagtctacaaaactggagggtggcctccttgcaggcaagctccgttcataagcacgcaattcttcttctagcttttccacatcggatgagttaaatttgttgatcatataagatacaacaaatccattatacttaggaggaagactattaagaataaattgaacccatttgtaacgccctaatgctaaggcacgctac

SEQ ID NO: 284528 - DNA, 564 bp, Cannabis indica
atccgcgatactgggggacattgaagtcctctgtgaactattgaaggatataaggaagaacgggccggtagactcaatgagtgatttccttgaccgagccgatgatggaattattttaccaggatcttagatctactcacaagtatgttaatttaacaacctaaatatgaacttctaaaacgataataaattaaacacataaaagtatgagaaaccttacattgggtgcagaggaataatatgtctcctctcactcagatctctaacccttgattcctttctgtcgcagagtataatcaagatctgagcccgaatgtccttctttgttgtctctgaattctacacagccttcctcactatgattgaggtattacttgatgtgtgtgggcactactctatcacctagagggtttcgaaaaacagagaagaaagagagagagagagagtggcggcttcaacagggattttgagtgaaaggaaataatgtaaaagtgtatgtaaaacttgaagcctttaccttttatttatagaagaccacatagggttatggatgaattacatggc

SEQ ID NO: 284529 - DNA, 613 bp, Cannabis indica
tattatttttggctgaaacaaaaaggtttaatgttgcatgttctctcatttcattcaaagctaagaaagttagaaaaaaattagaatttcaagctctctctctctctctctctctctttcggcctccttgtgcagcaaggatttgtggcttcttcttagtgattctagcttaaattcatccaatcttagtgttcttcaagtgttggtaaggtttctatacctttcccttttgtaatttattgaaaatgattaaaaagatgattgttgcatgttgatttgttgtgatgcttgctgctgtgattttgttgttgtctacagaggattaatcttgttattttgagtggtctagagctagtttgatgcatgttgtttgctttgattcaagttggtagtttttagttcaaagttagagtttttaaagaaagatgatgaagtttgttgctgtaattgttgctgcggtttagatgtatgttctggagttttattatgttgaaataggttgagttatgcatgatttagtggctgtttggagggattagtcaagttttgagttttgaactcaatcttgaacctctaatggtgaaatgagtttctgtggttgaagctcggtttt

SEQ ID NO: 284530 - DNA, 651 bp, Cannabis indica
aactagcataatataagctctgaaaacaaacaacaacaaccagcaattcacagaaacaaagcatggcattttctctcaaaattcataacttttgcaaagaaaactcaaggctttaacaatctaacctacatgcttctaacatagcttaaacaacaacaataatcatgctttaatcctcataaatcaacaacaataacacagcagtaacatctctcaaaatcacatgcatttactcaactattttcacttaatttcaagaaaacatagaagaataagttcaaggatcttacctacaattggattacacttagatgagaagaaaatcacaagaattgaagagaaaaacctctgccctagcagccaagaccaagccgaaatggagagaaggaaaagagagcttgaatgtgtgatttttttgaaatttctatttttttgtctaagtgttaaaaatgaaggaacttggaaataataaagccatttaattaaactcatttcagccaacatttaataaaataaatacttatttttccatttaataaatcacataaaaccaaacactaatggggcaaaaagaccattttgcccctccaccataaaatcactaaaatcatactaaaggggtatttttgggacattctaaattcccggcca

SEQ ID NO: 284531 - DNA, 417 bp, Cannabis indica
cttccacgaccaggatgacttcttcttgctcgtattgagctgttcgggcatatctttcttgagctttgcccgtgtctccagcgatgtgcgggcctccaatgatgacttgcaagtgtccatctattggcggaggcatcagatcctggttattctgaccttggttggccttgacgtacttctgtaagtgcgggttgtttttcttgatcagaagttctatttcccgcttcaagttgtagcattcgttggtgtcgtggccgtagtctccatggaaccgacaaaattttgtcatgtcccttttgctggtatcttttttcatgggcccgggcttcttgtacggaattaacgactgagttgctatgtacacactttctatatcttcagttaagatagtgaatgcagtgtgtttggcgcgatcac

SEQ ID NO: 284532 - DNA, 739 bp, Cannabis indica
aggttgctatacaatttttggttgcgatttaggttactctataagttgcaatagggttcctatgtaaaattccgtaaaaatgcaaaaaaaaaaaaaaagaaaatgtttagaagtgtaaatataaaaaagctcctaaattttattgtatagtatagtataattttattttattttatggtatattattattattattaaatgatatttttatttattattttgctatatgtataatattggtataaattttattaacataatatagatattttaatatatgtatataattttattggcatgctacatatatttcattattatttttatatattttaattgtataatatattatttattttaaataatatttaattagtttcgatctattttattatatataatggtggtatataattttattgtcatgatatatatattttaattgtggtatataatttggttagtttagtaaatgtatatattagtaatatatatttttttattataattgttagtatatatgttttggtgaatgatatatgtattttttgttatacaatatattatttttagtaataatattcatgctctaatattttttatctacttttgttgacgtggcatataattttattatcatttctatatgtttttattttttatttatttgttattatatatataagggtgcacggatattacacatgaatgggtaaaattagaaaatttttgagttttt

SEQ ID NO: 284533 - DNA, 504 bp, Cannabis indica
ctctctctaattttctcttttattttattttttctaatttctctttgtgtctctcttctttttttttctcaaacttattttttttctctctgtatatatataaatatatataattagtgatacatttttgtatctctttttttttatagaaattaaacttgtttttttttctatttaaactactatttatttttttttttgtttttttttgttaacaactaattattttattaaaaacagcaaaaaaaaaaaaaccagtttcatcaacatcatcatgaaaaaaaaaacaatataaaaaatcataatctaaaaagaatgcaaactttaaaaactacttttatcaacattgaaaataactaataatttcattaaaagattaaaaaaaatagtttcatcaacaagataatgaaaaaaaattacaatctaaaaacgatactaactttaaaaaccagtttcatcaatattaaaaaaaactaattatttcattaaaagaggcaaaaaaaa

SEQ ID NO: 284534 - DNA, 132 bp, Cannabis indica
aaatttacactaaaatttctacacttctgattcagaaaaaactgagcctctctctctccctatctttagccgccacttccctcttcttttcttcttcaatatttcgaaattcttagtgtgagaatagtgccc

SEQ ID NO: 284535 - DNA, 750 bp, Cannabis indica
gtaccacaattttgattctctactgttcatagcttgtaaaaacgtttctggatcatttccaattccaatatcagattctaataaatacacaacatagtctttgtaaatctttggtttgataggtctagtagatcttcttaagacttcaccaacaggctcttggggagcagcagctggttcagcaggttcagcaggttgttcaacagttgcaggcaactcttgaacatcttgatctactggattatcattaccaacttgtggatcttcagtgattggtaatggttgttcaacattcgtttgaactacaggagtgttaaccattatcaatcttgcttttgaagtggaaggttctgaaggatctttctcaggacctaagtcctttgattgatcactcccactgatcaaggcattctcaagaaattttgcattccttgattccacaattcttgtgctatgagatggacaataaaacttgtaacctttagacttttcagcgtaccctataaagaatccgcttatggtccttgggtccaatttcttctcttgtggattatatattctgacttcagatggacatccccaaatgcgtacatgattcaaacttggtttccaacctttccataattcaaaaggagtttttgagactgcctttgttggaactcggtttaatatgtacacggatgtctttaatgcttcagtccacaaggatttaggaaggttagagttgctactaagcatactccgcaccat

SEQ ID NO: 284536 - DNA, 519 bp, Cannabis indica
acttcacaaacttaaacaaggataacaagcatgcatcacaacttttaaatagaaaaacaacaacaacaactaacagcagcaacaacattaaaaatcatacatgcaacactcatcttttcataaatttcaacaaacttatagagaagaagataaggagctaacctagcttgattaaaacaccaacaaaagcttgaataatagagaaaaaccaaagctccttgttgctcaatgggggccaaaaatacagagagggtttgagagaaagaaactttcctttaaactttgttttatttgtaactttgaaattttgaataaacaaaaagaattaaacttaattctgttatatttcagccaacacttaacatcataaacacttattttccacatactaagtccacaaaaggacaaaacaataatggggcaaaatgaccattttgcccctcacactaaaataacataaataacactaaaggggtattttgggaaattctaaattcccggccaatcccaacattccca

SEQ ID NO: 284537 - DNA, 476 bp, Cannabis indica
gagctttaatggaatttttggtatatgtgtgttctgggctgttttgatgctttggtattgttctttggggtatttagaacaggtctggaagttttggtgtggtttggaattgatttgagcaaagtatgaatttttgaaagttcccgcgtggaaccggaattccggttgtgcatccggaattccggatggggttctgaaaattcccagaaccggaattccggttgggcaaccggtctgtcggttgggtgattttcaaaaacactagattttctcgttttaatgttaattggggtattgccatgctttttatcgatagggaaacttttagtttctagtttaagtcctcgaaaagtgatttagcgtatcacttaatagtgttgtgattgttatggtttaggagcctgtaaaccgtcgtgcagttcattccagtcaggttgaccggcacaccttaattcggaattgaggtaagattagta

SEQ ID NO: 284538 - DNA, 377 bp, Cannabis indica
gcactctcaattatatagaatgctctatatgttccaagatatagatacgttatatagatttcatatctatgtttaacgcttccactcaattgaactaccatattcccaagatgtaagtatccgccagaaccactggttagctttcacgaacaacttgaagaacgtatataatacaacttttgaacatgtaattgttatagtgagatttctctcacctagaaactcgagaccagacccccactaaaaggacacgtatactcagattttccacagaaaactgagatgtccctgagggactcctcgaagttttaaacctcgcttaggatatagccaacgagagggtggcaagcatgaccgaagtctaatcgcatccgaga

SEQ ID NO: 284539 - DNA, 609 bp, Cannabis indica
ttgtaggggttgctcctcttcttcttcaacactaggctctcgttgccgccaacgtccttgcggtgcatcaggtggaggctggccatagggatgtggctctttcagcctgttgacaaaggcgatgtccatcttgcgaagtggcaacaccgtgttgtcatactctaattagggaacttcatatgccccgcagagttctgttataactcccgccaaaccaaaaccacctcccgtggctccttgtacaatctgatcaatactatgcctgatgacttgtccaatgtttatgttgtaccccttcataatggcgtacacatatttcaggcgatccatttggacatcggagaagtgcttatttggcactaaccgagcacttataaagtacagccatgttttcgccaccgggttcaattcacaccggtataggatgtttggcgacccctttgtgccatcgttgtcgtggaacctcaacccaggaaatcccaccgtctcagccacatccaccatatcaaactgctattcctcctcaataattcggaggcgttgctcttccctagtgtaatcttggacagagaacatcacattaaaagcatcagcagtagcgggaacctt

SEQ ID NO: 284540 - DNA, 306 bp, Cannabis indica
aaagaatcagataaagagatccaggttcagatattgttaatgctctgcaaaataatttccaacatgaaccactataattcgttgtttcattgttatttccagcgttctgttaatcatttctcattcccagtttgagtactcgccattctaggttgaatactcgcatttgttcttcatatagaattctttctgttattaataatattatctaaaattggtgttgcgaaattcactcgacaacagttatctctaactaatcaacttaaatctgaatatcttttgaatttcaaatttcaaaattaagtt

SEQ ID NO: 284541 - DNA, 711 bp, Cannabis indica
aagtaagacattgatattggacgttgagtgtacactgaaaaagttgcgtgaagttttgcatgaagagttggaggtggaccccttggtgtatgaattgaagttagaagttctttacatgtacatgaaaggcactaagtttccacctgaggttttagtgaaagatagtcaactacgagtgttcttgagcatgaaggcaaaaatgagtgtggacaacttgttgccactatttgtgacaaaggtgaagaagaatgtgaatttggagcaaactccccgaaatgtaacccctagaagtgttgttgggacctttgtcccagaaactgatatgggggttggtttggacgagcaagttggcactaatgtagatgatgagcaagttggcacattgtacttcgcctctggttgagtaatttttttctccttcttccctttcttcttatccttagtagatttatcaaggtagttcttcctcaggtcagtcatacttttggctgtggatgacaacaacttctgatatgaaagaaggccccacggatattcgaagaacttctcctcgttttctactaacttcagcatatccgaccatatataaacaccctcagcccttgatagtagcacaccttcaacaaatgcacacagccccagcttgtacacgtcgtcggccacatcgcacgcctcaaaagctagccaaagggttttgaaagtgacccgttt

SEQ ID NO: 284542 - DNA, 625 bp, Cannabis indica
aatttgattaaatgaggaacagaagaaggcatagacaatgacaaagccagaaatttgactgagtgacggcttgactaaatattaagtcaaaaactaataaaaataactgataaatgtatctttttaaattttcacattcaacaaaataaaacaaaatattgtcaatagtattattttattttttaataaagtattatttttttattacatgtattgggctacttttaaaatggacttgattagaatgagagtaggctcattaatcatgattaagatagggaaacttacaaaaatactgtttttttacgaaatgttttcaaaaatactaggacacggcaaactttacatttttactgtccaagcccatttttatttcttttatactgcacaggctcaatatttttacttttatactgtaaacagtaacaaacacaaacggcacctctccttcgtggttggggacggcaaatcaacaccggaatcatacgaaacaccagaaaaaaaaccataaaaatctggtaaaagagaaaaaaaaaaactttacgaaaatcaacaactaaattatattttgtaagtgttattttactgttgttttcatgtagaaaaacggcacataaatgaaata

SEQ ID NO: 284543 - DNA, 506 bp, Cannabis indica
actcttagtcacaacaaaacttgtgactaaaagtaaaaaaattgtgactaataattataaattattattcctatgttgtaactaaaaggcccgtggcaaaaactattagtcacaaaaattacaatttgttgtacatttagtcacaatacttattgtgactaaaactaaattagtgacaacgtgtatgtaaaaactatgttttggtcacaagtaccattttgttgtgactaaaagtcacatttagccacaaaaaaattatgttgtggctaaaagattgtcactaaaagtaacagttttttgtagtgactcaataaattaaatgtatattctattcttatatatatatatattttttttgtctacatacaatttaaaaaaattaattttttttttctacatataacattgcacattggattagactcactggcggacccaatgaaggaccagtgtgggcttaagcccgtgctgaaaaaaaatatttcttttactttttaattaaaaaa

SEQ ID NO: 284544 - DNA, 794 bp, Cannabis indica
ggatgcatggagtatgcattagagggaaccgatattgaactttgaatctgatatattaaacttaccgtaatatctattcaattcaataccacctagttgattttaaatcaaatgatcttaatcctgatatggttaggttcgatctcaggagtattatacatgttctttgatttgttagttaagcctactttttcgtcagggtgatacgtacattttgggaacatggtagtacaattgagtgggagcgctaaacatagatatggaatctatagcttgtatctagcaaatagaagtgaaatgatgatttccttcgagctttgctaaaatatcatttataggtggctaagtgttttaaggataaaatacatttaagggtgtaacggtaatttaatccctatacaatgtaaatcatctatacaggatcattgattattgggattgttgacttcgcctttagccaacgactatgagtctattttacaagcgataaatgatttataataacaaatatacaataaagcaataaaaagacacaagaatttatagaggttcagccccgagcagctcggtaatagcctaatcctcgttatttgtattaacttaagatcaaggaaaaagattcattttcttatagctcttacaacagtatctcttaatgtataattcttagataatatatgtaaggtatagtctgagctcaactgcttttcgacccatcccctgcccaatgaacaaacatcactatttatagggctaggaggattggggaggatgagtttcccctctcgttacaa

SEQ ID NO: 284545 - DNA, 520 bp, Cannabis indica
gcaggatgaaatcgaagagctgattcaaagaggaaagttcgacaaatacaaaaagaacgaagaaggtcatccccgagcggatgacaaagaagaaagccagaacgtgagtggttcgagaacacctcgcaatatattaacaatcattggagggccccatatcgcaggagactcccgcaaatctcaagagcgatatgccaaggatgctaaagagaagccgctcaccaatgtaaacaatctcagtgaacggtcagagaaattattttaaagagaatacgacgacatcacgtttatggagagtgatgcgagatgggtccatcacccgcattccgacgcactagtcattgtctccaataattggcggagacaatgtccaccgtatactcgcggacaacggaagttcagtgaatctcttgaatttccaagcctttaaacaaatggggttgcatgagaaggacctgcgacctgtaacgtagagtatatacgattttaccggcgacgtcatcacactgaaagggatgat

SEQ ID NO: 284546 - DNA, 746 bp, Cannabis indica
cccctactaggaacaacatctttgcgttttggatctccataactcttttgtctactctaacaggcaagcattctagcttaaattttctcaattgcctcattggtccgctgtacgaattctggacctaggtatttcttctcccctgtctcatcccaatggatgggagacctgcacttccttccatataacagttcttagggagccatccctatcgtactctgataactgttattatacgagaattctattagtggtaggtacttactctaggaaccctcgaaatccataacacaggctcgtaacatatcttcgaatatctgaatcgtcctttcgaactgtccatctatctgaggatggaaagttgtactaaactttagtttggtacctatagcccgttgtaaacttttccaaaacttagaggtaaacttcagatctctatccgaaactatggactttggcacaccatgcaatcttactatctccttgacgtacaaatctgcatactaatccactgaataggttgatttaactggtagaaaatgcgcagactttgtcaatcgatctaccacaaccgaaatagaatcaaacaaacccgtggttttaggtaatccaaccacaaagtctatcgcgatatcctcccatttccactcaggtagggttaaaggcttgatttgctgacaggttaggcatcttgatacgaattctaccacattcttcttcattccgctccaccagaagtaaggttt

SEQ ID NO: 284547 - DNA, 520 bp, Cannabis indica
ttttgttgaagtgaagaaattgtgaattttgcagaagaacaaactaggcagcagactcggaaacaaaatttagtagaacacatcaaggaaagtaattgtgagtcactattttctaaacataacaaattgttcttttttctttatttttgtagaagccaaaaaattgtaactttaattgattttgccaccttgttatatacttaattttaattagatataaatactttaattctgctttttttaggttgttcatatgagcaatttggtagtcattcccaacttcatcaagagatgacaaagaaaaacggtaggcctaatcatcaactttttttttgctttgtcattatagattttaagcctagtcaattatcactaaagtaggatttataactacctaatacttctcacttatggtactatgaaatgtggaaatatcaattttattttgcatagaaaagtataatgtaaagcacgatcaagacaaaaaatactagtgtttactaaaaatcacttacaaatt

SEQ ID NO: 284548 - DNA, 868 bp, Cannabis indica
ataagctactaaacctacctctagattaggtgcaagcatacttcagctttacataaagaaaaattaaatagatacttacatgtcaagaccataagaagataaccaggattaaagaccgcctggtcatcacacaattcatgacaaaaaataggattaaacaatagtaatgttcaaaaaatgagtgtgtataggctaagagtacgaacatgaaggccttggggctgaaaataagtaagtagtcaaaaatccatacagaacatgaaaacactgtttatagtatgaaacgataatgctaaaaattaaataagacgaatctacatgtgtctaggtgcatgtggggctgaattgagagctacaaagtttggatcgttagagtgtgggctggtcggccacctggtcaaaatcctggctggccccatactcaacagatggaccagccatactcctcatcataatgccccgaggatcgacccctctagcttgatggtggcctagtctacttcaatcagctctcaaacaacacttttccttgggccagtgtactctctaggaaagttgtgtcacccatgtgagaaagattagcattggagttgtgcagcttgaactcataaaggtcagtcatacctatgctaaattatagacccttcctggccagtcctaggtacgggagcttgccttggctggaaaggcctacacctggttattgtgcttggccggccaagcctacattagacagggtttggccaaccagttttccttcgtggccagccagataaagggcagggtttggccacttgcaatcctcctatggctggcaaaacctacaggaagcaaggtctggccacccatgactcctcagttgactaat

SEQ ID NO: 284549 - DNA, 446 bp, Cannabis indica
acaaaagattgacgtacgatcaagataccaatcacatactccttgcagaataacttgatgaaattgaagaaaaacgagccactggaaacttaaagttgatagctcatcaacaaaaagtagctccagatttcaacaaacaagtgaaagctcagaaattcttcgtgggagatatggtcttaagaagggtattcctaaacaccaaagacagcacgtcaggtgtactagggcctaactgggaaggaccatacaaattggtcgaagttctcgacttcagagcatacaaattaggtgagtatgacgaaaaaatgcaactcattctagtaccacgatactggaaatggagaacatttaaggaaaatactaccaataaagtaccaggtcgggtagaccactttaagtacacaagatcggcatgacaacttaaaagtactcaggtcggttgacca

SEQ ID NO: 284550 - DNA, 504 bp, Cannabis indica
ggcacagttggacgaactaaaagtacggaacttcccaagtcgaagataaagatgtggatcctcgacttggggactcaagcagcaatgttggacatgtggaagaactagaagagattgagatcgacccagatgttctggccagaaagcttaaaatttgaaaaggtttgttgggcgaagtaaaatcagcactgataaaatttctgagagcaaacgtggacatttttgcctggtcacatgaggatatggtcggaattgatccttctgtaattttgcacatcctaaatattgatcccaactatcgaccagttcaacaaaagcgaaggctgttggacaaggagcgagctctagccctgaaggaagaggtagagaagctacgaaataacaacttcataattgaatctttctacccgaattcggttgctaatcccgtactggcacccaagaggttcgtgtattgatttcatagacctgaagaaggcgtcccccaaagactgttttccactt

SEQ ID NO: 284551 - DNA, 542 bp, Cannabis indica
cttgaccttaattcgaaatgaaagatttgggcgaagctccttatgttcttggtattcaaataatcagaaaccggaagaacagatcccttgctctctctctcaaacatcttacattgataaggttttggagagattctcattgaccaataccaaaggggcacaaataccttctagatttggtatccgtctatctaaggaacagtgtcccactgatcctcaagagatagaggacatgagaaggattccttatgcttcagtagttgggagtctaatgtatgtaatgttatgcactagacctgacatatgctatgtagtaggaattgtgagcaggtattagacaaacccaagagaggaacattggactgcagttaagcatattctcaaatatttgaaaaatactaggcattatgtgttagtctacaagggtagtgatttaaatcccgtaggctataccgactcagatttctaagcttgtcttgatgacagaaagtctacatctgggattggtttttactctgggggtggagcagttgtttggagaa

SEQ ID NO: 284552 - DNA, 592 bp, Cannabis indica
ggtaaaataattccaacataatggctttgaatgggatagagattttattaccaggatgttctcttgtcttcttttggaagaggataaacttatttaacaatcttctgctaatgggattatctcttagaaacaagcttaccgggatttgaacaagaagcatttcatccttatgactacaaatgctaagatatggaagtcaatctttcatgatcatcgctcttcttatggaaggtgtatgaggattgtctctccattggctctcttctttcggccatcttcaatagctattgtggagattattctttatgtgaccttgaggggagtcacaatgcttctgattaagtacttatggtttactggtggtagattggggtattcaaattaatgaaatctctctccattccaacgaggaggttgtaaattgatttttttaatccatttcactcttaaggagttcacatcaatgtagagaagaaataatttatccggtttacaaaaattgtggtcattgcactttggtaggttgcccctgcattcttgaggccaaatgacataattgtataacaaaatatgccttttggtgtttgaaaag

SEQ ID NO: 284553 - DNA, 652 bp, Cannabis indica
cccactaacccctatttttttccaaaatcaagattagctactacttactaatggtgatcaagcaaaagtaagcaattgcacaataaacactcttgaatgaacaaaaccaattcactaaacatagcaataaaataccaaatcacaatttaagtcaacaaaataattctagcaaaataaaaattaactcataaagaattgtgcaaaaattacaaagtttaaaagaaaagagatatagaaataaaaacccatttggagcttgtcacaatactccaagttcctcttccaaatttctcttcttcttcctcttaatttttgccaatctctaaataaaaatgctaaattaaaaccctaaataaaactctctctcttttcttttcttctttttcttcatttttttttcctttttcttcatttttttttctctttgattgttgtaggtgtccctggagtccaccagccgcctccttttctattccatcaccctactgccttcaatcatcatatatatgatgttttttttttcttttttcatttctatctttttccaaaacaagccctcacttgactttcttttatctttcttttttttttggcccaatctttctttcttttgactttcaactagtgaaataaaagcccaataaatatagcc

SEQ ID NO: 284554 - DNA, 503 bp, Cannabis indica
taccttatggggctaggctccctagacttttgctgttgggtactaggcgaggattcctctggttccttgccgagtccagcagtcattgccttgggatgcacgtgaataccagccgcctccatggctttttgcatggccagcatcacttcttgcagtttttggttttgtgctttttgggcttcgatctcggcttcgtgatcgatagctttttgccttagaagcaccaactccgagtagctaccttcatcgtaggcatactcatcgaggtttccctcgtagtcatcatcaggaattccttcttcttcctcagaaccctcagctgctcttgaggctacatcctcctcatttggatcttgagcatcttctagtgggcgaggttgacgagtacttctagtctccaccatttttgtaaagtgaagtgtatttttgcagaagctttcttcagctctcaatgaaagcaccaaaatgttgaccgaggttttcggcaaccgataaaatattat

SEQ ID NO: 284555 - DNA, 513 bp, Cannabis indica
tggagcgggcctgtgagttctgctaaactggtataagtcgtagatatgaaactttttcgagaaagcttttcaattctttggctgattgcggtaccttcatggctagtatagctttagtcttatcttcgtctatgcttataccatttttgtgtacaacaaatcccaaaaatttcccagcgcttacaccaaaggtacatttaagaggattcattttgagcttataccttctacttctttggaatgctttctcgaggttgcaaatgtgatcaaatttgtttttggacttgacaacaatatcatcaacatacacctctatgctttcatgtatcatgtcatggaatattaccgtcattgctctttgatatgtggcaccagcatttttcaggccaaacggcatgacagtgtagtagaagtttccgaacggggttcgaaatgccgttttctctgcatcttccttggccatctgatttggttgtacccgctaaacccatccataaaagaaaacatttcaca

SEQ ID NO: 284556 - DNA, 511 bp, Cannabis indica
gaggacgagggttcgttcgactctgttcgttctcttctctgcttaagttatataaataacttaatatatatataacggttttacttttctttttaacgttaatattattatataataatataatattaataaaaattttattattaataattatcttatcatttcttagttactaagaaacttttacttctagggcgctacattaaattctacatactcctaattatcccaatacctatattatcaacttatcaaaatattcccattaattctatcaattaagcatgttatgacatttctggcccccgatcgagtctccaaggttgccaaacctgaaaatatttttattccacatatagtttgtaacgccctaaataattaggcacgctacccaaaatgattatgaaaccctaatcccctaaccgggattgctaattaaaaatagcgcagaatttaaacttttatattaaacacactaaaaataaacttgtaatatatttaaacttttcaa

SEQ ID NO: 284557 - DNA, 185 bp, Cannabis indica
ttggggatgtatcaatcatttcgatttcttccgtgccagtgatgctaggttcttcgaggaactggataggaaccaggtttgccttgtcactcacattgctacttgccaatcgagctaacgcgtctgcagtcgtattttcttctcttggaatttgtctaagaccgtagcttttgaattgtgcgagc

SEQ ID NO: 284558 - DNA, 786 bp, Cannabis indica
taggtgaaggcccattaacataacgccaatctatttaaatcccaccaccaaacctttcaactcaataacatcacccctttaaatttttcgtcaaataaccttattttacaattacatgtggaatgaaattaaaacaatttgtactattatactgttctgacgtacgagaggagttgagttcagattgtaatattgtagaggcccattaatatcagcccaacagctttaaatgtgatcaccaaatgagatcaccaactccacacaaccctattatctcagccctttaaactcacaaaatctaatttcaatcccctcagcaccctctaaaccttactcctcatctacaattcttacaaatcaataacaagccaacatgaatgacgaacacacttatgaatgggaaaccatcacagcagagctaaacatcataaaaccagtgaatgagattgaaatacaggacgtgctaggcaagagtctcgacaaactggaaaaatgggaagcattctacgaaatgtatgcgaaacggatgggtttcggcacaaggaaagacgatgtacgacgttctcatggggtcattgtaatgcggaggtgggtttgttgttccgagggttcgaaaaaaatcgcatcaccggacacaccaagaaaaaaaagacctcatgatgtcactagaaccggatgtcaggcagcattgcgtattttactcacacaaccgtgtaacacttggaaatgcaaagagttcagcacaatgcacaatcacgagctggcttcatcaagtgaggtacaatt

SEQ ID NO: 284559 - DNA, 660 bp, Cannabis indica
cacgtaaaaatccttctctcactttcttacagctcaataattttataatattttattagttgccgaaaatctcggtcaacaggcctaaacaaaactatcaaggtgatatttttttagcaacctagtccattttaatatccaaaaataaatgggcttcctgtatgcatctaagcccaatagcaaacatataagctcatatagacaaatgatttagatagaccctatcatgttacaaggtttatcacaaataaaagaaaattacaaaattaccactactagaaaattgggttttagtcacacattgagtaactctaaaagtatatagtgacacttcaacgctcgtcactaatgagggtgactgaaaaaataatttttagtgacacttcacacgtgtcactgaaaccttttgcattcattttctgtgtgtcactataggcgtatagagtgaggttttgtcagactaaaaaggtagcaaccacacacataaagtgtcactatatccttttttttctttttattaatatttttagagatatagtgacacacaaaagtgccaaggattgttgtggcattttgcacacctaagttagtatttcgatagtttaatgaaatgacgttatccctagtaactgagtttcttaatattgaagtgctagtgcg

SEQ ID NO: 284560 - DNA, 839 bp, Cannabis indica
gaagaggagaaggctgcgcaggttactcgttcagggtcagaccgattgatcaacaaatatttcaaccggtctggtagtgtgaagacagaagcactccaagataggttcacaaactgtcagaacctggaagacttgtacaagcttggattgtgcttgtttgttgaggcagtgcttctaggtcgcgaggctaacgcgttgattacacctgacatacttagatatgtcgaagatctcaagttcttctttaggattccttgggggaagcactcattcgccagactcatgcactcgcttcaaaaggacttgttgaaacagaaggccaattacgagaagaagttgagttcggatgtttagcatgagtgcaaatacacagcttatggcttcgcacctgcagtacaatattgggcgtatgaggccattttagaggttgcgaagaggtatggcacgaatcatgggattcggtttcccaggatgcttagctggacgagcaagggtgatatagggaagaaagaactcagtgcatattttctagacgggtatgagtttcacttatgtttagagtaattatttaacataaatgcttgtaataaatgctaaatcgttttactctgatattttttgaaccttaaatagaatcttgaagtggtgaaggggctacttccacggacagaagaggaggcatttgtgaggaccatctcttacgatggtgtggaaaacctagttgatgatggtgtggatgacacagaggctgaggcagatactcaagtaccagagactcaggtaccagacactcaggtaccaatttttggaacttttttttatgattgtataacttgatt

SEQ ID NO: 284561 - DNA, 683 bp, Cannabis indica
aaagactttacaatctccccctttggcactttagatgaacaaaataatttttaacataaagtacctgcaaggcaaagttagcaagagcaaaagatactactccccctgagtaacacaatcgaatatcacaaagaaaccaaaaacaagctaactttaaaagatatgttcacaagtactaaccaaccacaactccccctggaaaaagggtctagagttgataaaaacaaattgaatgctcaataaaatgcacattaattaaaaaatattttgacaactaaattgccaaaaaaggacctaacaataacaaatggtttcatctacttctcatacaagtgaacaatatggcctctatttatagagttttcactctcatatgaacatgaatgaccaccataaagcccttggatgttaccaatcataaattgggcatttatgttattaattgggtgatttggaggagttttgggctgttacaaaggctctcaaactttcaaaaacgtgggcaataatatgctgaaaaaaaacagtaactagttactagttaccattttttcagctttggccaattcttctccaaagtgttccaaatcattcccacttgattttgaaccatttatacaccttataaatgaataaatcaagtctccaacaataatattttcaataactatcattcattcaca

SEQ ID NO: 284562 - DNA, 502 bp, Cannabis indica
tatttattttcggaataataaaaaataaaaaaaaggagagggaggcgtgtgacttgattcatgggctaaggaaattttgtgcataaatggtaagtatcaacatttattcttccttgatttattttgatatgtttccatttaaagattgatcttttatatggtaatgtgtctttaatcttgaaagattgacttatttttggaaatattgttggtaattctagtttccttttttttttttaaaaaaaaggaaaggagttgcaagagaatgggcggtttccttttgtgttcttgggctggtagtttctctttttaagttggtttcctcttttgatcctctctcacatgattatataaaccaacttcctttgttttttataacctagctacccgatccctattttttgtgttcttgcttctttgtttctcattttactttcagaaattcattgctacaactaagaacctagggcatccaaggaaaatggtggaatccgaacaagcc

SEQ ID NO: 284563 - DNA, 611 bp, Cannabis indica
ttcatgatatcttgtaattttaaccaattaccctaaataattagggaccagccataaatcatgcgtgaaaaccttaaaaggcaccaaatccataaacaatggcgcagctcatccatcaaatttgtacttccatttcttccatcaaaaaactaataccactcatccagaaattctttaaaaatacaaataaatataataattttggtacattcccaaaatattgacaacaaaccaaatttttataataatttgacttcccaaatatatctgaaccaatatattctcattagaccattagtgtttccacctccctttattacaagatcctcaagattcttattcttcaatttacttaattaattataatattagaatctcaatactaaaattctaaacactttccttttatgctgaaaattcctaaaaaaatataaaccaaaagatagctaataggaattagcgtttaaagtaaacactcttaaacattatttcaattaaaaatattctttaaaacataccttaaccaaaataatccttttattccgactaataaatctgtatagtgcataacttattaactttaaaatattaatgtgtcaaaattttcttat

SEQ ID NO: 284564 - DNA, 635 bp, Cannabis indica
tcgtggaactttcaacctcctttcttccacggccaggatgacttcttcttgctcgtgttgtgctgtccgggcatacctctcccgagctttgcccgaatctccagcaatgtgcgggcctccaataatgacttgtaagtgtccatctactggtggaggtagcaaatcttggttgttctgaccttggttggtcttgacatacttctgcaagtgcggattgtttctctttattagaaattcaatttctagcttcagattgtaacattcgttagtgtcgtggccgtagtctccgtggaaccgacaaaacttcttcatgtcccttttgttggtatctttcttcatgggcccgggcttcttgtacgagattaacgactgagttgccatatatacactttttatatcttcagtcagaatagtgaatgcggtgtatttggcatgattctctcggggggagtctgttcggattaatcagtgaactttccgttcttcccgtttccttgcttgtggttgttgtttgaacgcttgccacttgagcttgaattattggaatagttgggaagttggacggatgtgccagtggaaggagctttcgacttgcccggcttctgttcaccttctactcgttgaatggcttcttc

SEQ ID NO: 284565 - DNA, 855 bp, Cannabis indica
tggtttgatgaagccaagttaatttcttcacttgaacatgtgattttgagttagggattgaatttttgtgttttgaagcttgagatatgttatatttatgttattatactgttctgtaaagtttgggaacaattggttaggtttggagcaagttttgggactttgaagagctgaaattttcgagtttctgctgttgtgaactggaattccggttggtgaaggaattccggatggaacagagctgcaccaaccggaattccggatggtcaattttcaggaatctccgattttcgtattttagccataactttttactcgggtgtccgttttagacattctatataccgattcgaagcttatgacgagctctacagtatgagacatagaatagagccaaaagatatattttattttagggtgtttttaccataagatttggtagaaaatcctaggttattttatgcgggttttagacagtgttttggaatagacccttattgatttacctttgtcgtgacataggactcgaaagtgtcgggcatcgttccactcaggtcggcccacatacttgacttctggactgaggtaagaaaagtattaaatactgtataaggttaatgttatgattgttacagtttcgattaagatcgaaatcttgttatatgttgttgtgacttaatcctaatcgaggttaacgatatgtattggatgtgactcgattatgatcgagggaaatattatgaaacgattattatcgtttgactcgattatgatcgagggaagtattatgaaacgattattatcgtttgactcgattatgatcgagggaagtattatgaaacgattattatcgtt

SEQ ID NO: 284566 - DNA, 245 bp, Cannabis indica
aaaggcctcatccttttgctttaaaaaatatacataaatatatctactaaaatcatcaataaaagtaataaaataccttttaccacctctagttaaaattccatttaattcacacaaatcactataaattaaatctaacaattttgaatttctttcaacatttggaaaaggttttttaatcatctttgcttttacacaagtttcacatttaccataatttcttatatcacaatcaatcataccac

SEQ ID NO: 284567 - DNA, 683 bp, Cannabis indica
gttaatcaaacatacttggtagtaaatctagatcctggtaaaaataattccaacaaaatcttcttacttgctagggttatgagcctccctcctgttagttaaatgaaactataggaagtttcctcgtagtgagatggtcatctcgcattcttgttcttcgagccgattcgacttttacacttagtttgcttattgcaagctaaggtatgtgttactttcctccagtgcctcgctattctccttcagcgatatatggtttctcgttaatacactaagtgccagttcgtacattgattcctcgcttaagaccttacagtcaccgggttataaatatactctgatacttatgcaattaatgagttattccataaaaagatattgcaccgattcacattccctttaccttgacacgtgtcctccagctgaattttgggtacaacagcaactaataagtttcttaaaggcgaaccaggatcaattcgcctggagccatggtgatatgatagggatcgaccctaacattatctgccatcatttaaatgttgatccaaactacccagtgaagaggcaaaaaagaagaccttggattccgagatataagggacactaaaacaggaagtggacaagtattagtccatgacttatacgcgaggtgtttatcctcgtggatagccaatcctgtt

SEQ ID NO: 284568 - DNA, 631 bp, Cannabis indica
aataagttagtagtggaattaaagagcccaccagaaattgaagtagaagagataatagaaacgatggaactccttttggactcaaaatctgaagatgaagagatggtagaaaatttagacgaatcagagtattccccatcgttagataatgaggaattagaaaatgcagaactgtctccaacaacaaatgataacaagtcaaatggagatataccagattatcatttcgaggtagagatcggaatcagagtcagaaaatgaaaatttaccggcataccacccatcgccaggacaagaagtctcagttgcaccaacaccaatttaagaggatgtgagaatggtaacatattcagaagaagggcttgaagagtcaatagttgagtcatgcgtggaggacaattagttattgagaatttttttagttgtttagctatttagtttgtttatttgctttccacttttaaattttagaaggaaaggaatttaacccttttctcaaaaatttagaatttatgttattaggaattcataagactttgtttgataaatagaaaaatatgtacttgttgtttttttttttttttttttagttctaacattaagttttagatgtgcatgggatcttctctcc

SEQ ID NO: 284569 - DNA, 525 bp, Cannabis indica
aactgaatccaaactcagatcgggattggaacttgggactcgaaccaaacccagacaaagtcccaggacgcgaacccacacccggagcctgatctggacctagactgaaattcggacccgcacccaaactcagaccaggacttgaactccgacacgaactcaaaccaaaactcgaatccagaatcgcaaacccgaacccaaacccagatcaaaacccagacagagacctgaacctagaccgggacccaaacccacagactaatcggcattcgaacccaaaattaggatacggacctgggaaacagaactaggaccgggacctagtactgggacctaggacccagctcgtgacccggcaccagaaatggaaccagactaggacctgagatagggattcgaatctggacccaaggcttggacaaaacctgtattcggtgtctggacttgggacccagcctggacccaaaccctgactaggacacgaacccacacccgaacctggacccagttccaaacccaaaagtg

SEQ ID NO: 284570 - DNA, 544 bp, Cannabis indica
gtagtgaaggcctctttgaaaagtagattcacagagcttccgttgtcgatcaagactctggccaccactttattggcgatggggtgtaacctcccaaacctcattgtgcttcacggccccgcataccgcttcaattctttgcgggtagttcctccgatatggggtccttctgagatcatggccactctcccattaggtctgggtggcaaatcggggatttgcggggcatcttcggtgggagcaactggagccaatactcctgctgcaccccttggtgttccctatggcaaagcccctgtcgcctgacccggattgaggtgaggcagtcgattcttgatccattcatagaggtgccctaatcggattaggttttcgatctcatctttgagatttttgcattcattggtgctgtgcccaatgtcgttatgatactcgcatcttttgttggggtccctccgggaactatccttgtacagaggaggtggtctccggtagtgtgtattttgcctaagtgcaaagtacacacgctctcgggagtccgtca

SEQ ID NO: 284571 - DNA, 587 bp, Cannabis indica
ggcacagtttctgatattagttgttccttcagcctttaacgccatgataggccgaccagctttgtatgacttaaaggctgtcacatcgatattccactcatgcctgaagtttccaacgaagaatggtgttgggtgtttgagaggaaaccagcagactgctcgggaatattataaccttgcagtggcaaggctaagaagaaagtatcctctagccagagcacggacaagggaaaaaacatttctaagtagggaacttcccaaggcggggatgaagatgtgaatcctcgatttggggacccaagcagcaatgttggacctgtggaagaattagaagagatcgagatcgatccagatatcccgacgaggaaactaaaaattggaaaaggtttgttgctctaagtaaaatcagtgttgataaaatttctgagggcaaacctggacgtttttgcctggtcacatgaggatatggtcggaatcggtccttttatgatttcacacgtcctaaatatgtatcctaacttttgacaagttcaacaaaagcgaaggctattggacaaagagtaagcactagccctaaaggaagaggt

SEQ ID NO: 284572 - DNA, 568 bp, Cannabis indica
attaacaaattacgattatttactcacttatagcaaaatttaaattttatgctgaaataaattagtaggatcataatcccacttattacctgattaattcataatatcaatataaaccctaattatttaccatttaacttatcgggatattacaaccatcccctccttatagaaatttcgtcctcgaaatttatttaaacaatttgggatattacccccatatttatgattctaactctcaaattgttgtttctaccttgctatatatattataatttttacagcaatttcttaactagtggaactgtctcattttatagtacctcctctttctagtccaaaacatggacaaaatatttttcccatataataaatttgtctgaacttaacatcatcacaactcagaatatgggtccattctgatacatattttctcagcatggagacatgaaacacattatatactccggacaacgcaggagttaaggctagctgataggctacctagcctaattacctcagtaaacaagtatctaatatttctcttgtaccacacttattaaggtac

SEQ ID NO: 284573 - DNA, 502 bp, Cannabis indica
gctctaatcttgacaagtggtctgctaccaggttctcggtgccctttttatcttttatctctaagtcgaactcttgaagtaaaagtacccaccgaatcagtcttggttttgcatccttcttggtcataaggtatttgattgctgaatgatctgtgtaaacaattaccttatttccaattaggtagggtcgaaatttgtcacaagcaaacactattgccagcatttctttctctgtagtggcgtagtttaattgagcgtcattcagagttctactagcatagtagattgtgtggaatactctgtcaactctttgacccagaaccgctccaatggcatagtcactagcatcacacatcaactcaaacggcagttcccaatttggtgaagttactatcggtgctgtaatcaatttctcctttaaaatcttgaaagcttttaaacaatcttctccgaactcaaatggaactccatttacaagtaagctcgataaaggtttttgaga

SEQ ID NO: 284574 - DNA, 786 bp, Cannabis indica
atatggttaggttcaacttagttgcattatttatgttctttaagctgttcatggaagctaactaatggttttggtagatatttatatcttgggaacatggtagttcaattgagtaagagcgcttatcatagatatggaatctatagcttctataagtatttagaagtgaaataataatttccttcgagcttggctgaatagggataaatgattgagatctcatttcagtaattatattggtttactaaaatatcatttataggtagctaagtgttttaagggtaaaatacattgaagggtagaacggtaaatttgtccctatttagtgtagatcatctacagaggatctttgactattaggattgtaacaatggataatcataacgtatctatatcgtggtacatatagagagttctatataattgagagtgttattcaattccaaatctatagtggcgcaaggcaaaattaataagttagggaatttacttggtaaattctagatctacttattgaaatcttgattacataggcccattgtaacgtccccgcttcaagcctccattgggtccttacacccacggaatgaatggctcttatacacgagtacgtcactttggctgcttcatggactgatggctgaccctaaagaccaacacaagtgttttcagcgtgctttgtcctcactcgcacgcatcctgggaaaacttcccaggaggtcacccatacttgaaattgctccaggccaagcacgcttaactatggagttctttcgagatgggcta

SEQ ID NO: 284575 - DNA, 643 bp, Cannabis indica
aaaaactctcttatgaccagttgaagaagagcttgcttgtccatttcccttaggattggtggctttcttcttatgaaacctttggtcactagagttgttgggagtgaactttctcttgtgagaattgtttggattggtcaccatggagatacttcttgctctcccctttttcatgtcctcttcttctttggcaagaatagcagtcatctcctcaatggtccactgctccttttgagcattgtagcttgatctgatcgaatcaaattgagaaggaatggtttccattacaaaccacaccatgtaatcctcaccaagatccaatcccatgcccttaagcttttggtaacaacccatgagcttgtcaatgtgagctctaatgtcacccgtatcagtgtaattagtgcgatggaacaaagttaagcatttttctcattctttgagaacttcttatacttttccttaatggcagcaagaaaatcttttgcattttcagtttgaggaatactatcacgaatggactcatccatgtgatacctcataagcatcaaacaacaacgattggaatgctcccaatcctcataggacttcttgtccttttcagtggcatcatcagcgggtttaggcggtgcatccactctcaagg

SEQ ID NO: 284576 - DNA, 798 bp, Cannabis indica
aaaattgaaaaagaatttaaaatattctttattcacaaaatagatgataataatttccacatcaatagcaataaacaatattatattattactatcaacattattatcatactatataactcatacattaatataatatgtatgttactaatcaacatcttatatgtaacatacacataatatcaatattaaattcacaaataaatatgttacatatctcatatacatgtaacatatatactttaatatatatcatataaacataatatatattaattacacaactatatatgttacatatctcacacatatatataacatatatacactttaatatacattatatataacatattatacaagcatgtctcatataaatacataaaaataattatttctacatatttgatctcactaatatatattatatcacatgctctacatatatataatatatattactcatatatatacatgttatatattatatatctcacatatatacatacaataacatgatataaaattcaaatatcatatatataatatgatataaacacatgattacatatatataccacatatatatcatatatattactatcatataaaatagtaaatcacataatattcaccatcatgctcacccatgaatggctttcacataaaatctcttatccttatattctcacaatcttgatttatcacctcttccattgaaaagggataagcttttgattgttagagatattataacaatggaagaaaatcaagatttattaaaactctattgtaaaa

SEQ ID NO: 284577 - DNA, 484 bp, Cannabis indica
taaatcatttgcttatgatgtcattctgttttctcttaagaaattgaatgaagcatatgattatattctcaacattctatcccgaaatgatataaatcaccgatcttgaatctcctattgtatatatatatatatatgtttactatagacaatttaaacttagagttagattagtagtggtggtccaagagagaataattactcatgtatatttagttaaatttaagtctttgacattaaattttagattccaaataaaatttttatatttttatttcctgcaacacattacacattacagtatgactttcacaagttttttttaatatccattttctgtcaatggattcaaactgtatgtttatgtgtaaatttgagtttattattctgagacaaggatcaacttggactattctaagaactttatcttgtaactagacctaagtcatcgaaagaccacaaacacatattttataaatctatg

SEQ ID NO: 284578 - DNA, 181 bp, Cannabis indica
acaaacgagggggtttgctgttgatttttgagtttcagcaaggaatccaaaggaaaaaaatcaaactaaggtaagtttcaatgaaacccttcttagtttcaagcttttaagttaggttcaaatggtgattttgagaataagtggctgttaggttttaaaatgtttagggttcgaattttag

SEQ ID NO: 284579 - DNA, 372 bp, Cannabis indica
atagatatggaatctatagctcctatctagcaaatagaagtgaaataatgatttccttcgaggttggcgaaacagagataaatggttgagtactgattttagttcgctgaaatatcatttatatagggctaagtgttttaaggataaaatacattgaagggtgtaacgataatttaatccctacacaatgtaaatcatctatagaggatcattgattattgggattataacgatggataattgatagcgtatctatatggtggaacatatagagcgttctatatagcttggagtggaatccaagttctatgcgtggatgcaacaaggaattaataagttagtgaatttacttggtaagttcttggtctgctt

SEQ ID NO: 284580 - DNA, 573 bp, Cannabis indica
aacaaaaataattctagaaaaaattcacaaattattttttgagtaaaaaatttgtaaacatcaaacaatcatcaaataacacgtagatcaacatgaaaccatccaaatcacacatatatcgttttaagtccaaattcattgaaagtaaatcaattaaccttgctctaaggctagttgttggaattattttaccaggatctagatttactaacaagtatgctattaatatcctaaacatgaacttctaaaatgatatgaaataaacacatataaagttgcaggagccttacagtggtttcagcggaatataatgtctccttccactcagatctcaaatccttgtatcctttatgtagtagagtatcaccaagatctgagcccgaatctccttctcttgaaactagattcttcacagccttacacattatgattgagtaccacttgatgtgtgtgggcacttactctaatcactctagggtttcaattgaagagaggaagagagagatagggtttcggttttgtataggagaggaggctcaaaattttactgaaggaatgagatgtatcatcttt

SEQ ID NO: 284581 - DNA, 860 bp, Cannabis indica
cttctttgcagagagttcactacctaccattgtgccctactccgtccgccagtcggccgagggatacgctgggactcccaccacctcctggagtggatcaaacttaactgtgatgttcgtgtgggcttagagagtatgtgtacagctgttgttgcaaggaatcatttgggaagggtggtgagtgttcacacgtctcggttggacttctcaaatgctctttgtggagaagctgcggcctgctgcttggcgatgtccgttgcgatggagctccagcttaagtatattatcgtggagagtgactcgaggctagcaatcgacgcccttaatgggaaggcgtcccattgggctctagagaactatgcctccttttgcactaggtcttctcctcatttcatatgttgtaatttctcgaacattagtaggtcttgtaattttatggcccataatgtcgcttattgggcttttaacaaccagatgtacggatccattccgattgactccttaccggagaacattttgtgtaatgaccgagaggtctagtatcttttttcatatatatatctacgcttattttcaaaaaaaagaataaaataatcaataaagaaaaatttagagaattatgaagccattgattccagtattgaatattgatgttggagaaagaagcttggctctcgtgtgttaaaagaaagagatataaatataacatattaggattaatagatgtatagctaatataatttatgtgtgtatattattatatatatacatgcaaattttaaaaaataaatgcaatcgataaaggttaccattaaataattattttttaaaaaataaaataaaaaatattagagaaaata

SEQ ID NO: 284582 - DNA, 665 bp, Cannabis indica
gtaatctaatatttgttgatgctctgcttatctcttagtgtttaagataccttcataagctattacttctagtaattttatcatgtctctttctaacttcttattttggattctattcagcacactacactcctttctacgtgatggcatagtcctctttggactaatttgtataatagacttttctctaaagtgttcatatacaatattcatacttcttaccatctaacttaggggtgtgtatccatagaatatccatcaagacagtacttgctccttataggtctattctttcatctttcttaataagtgagtttcataaaataccctatctagtctagtataacattcactatcttaaatcattccctactccctataggttgggcttcctttcataactaggtgtagagacttcatctttaaccatttgtagaaaggtgcaattctatgcatcgatacttagttggctattggtacatttcattatgtgcttcaagttccactactagtgttggtgatctattgcactgagcctatgaaaactcttcaacaaatcgtcttagtcatgctcgtagtccttccaatacctctattagatcgttagtcttaactattattgggttctctggaacatcaaccatctgtgggtcagcggaacacac

SEQ ID NO: 284583 - DNA, 363 bp, Cannabis indica
aggatgccctcgacccggtggggagatcatgccaaggatttattattttttccaacttaggagatttcctaggtcgatcccggatgggttctggacctccggagcccgttcccttggacccttcggcctatctttcttctagctggttccggccctcggacagctatctcggggatgatgcagccagcattaagattcgaaactttgctagggccgaattagagagtcagggtaggactagcttgattgcttttttgagtgtttactgctttcacagatattctaacacttggctcttttcttttgttgtagcagctaattccatggatgccattttggccgcccttgccggagctcacactc

SEQ ID NO: 284584 - DNA, 252 bp, Cannabis indica
attcaaattaaatcgaaattgagttctgtaaaaaagtaaattgcttaattttttccatactatccaacaaaaataattccagaaacagaatttcaattatttttcacgaaaattcacaaacatcaatcaatcatcatataacacacaacacaacatgaaaccatccaaatcacaaacaatcattttggtttcgaaattatgaagaggaaaagagagagggttaagttcggctatagagagagagagaaggct

SEQ ID NO: 284585 - DNA, 558 bp, Cannabis indica
gacgcatcagaagtagtgtttttgcttacagcatcttcgtacgtactatagataccttcatttggtccattgaaaataacccagtgtggacctgaactcatacttgatatattgtaatgctaataactaagttacaaattaatttctctataaacttgatgctggattggaaaacgtctcaagtgtcttatataagtcgtggagaataaccctatagtacgttttttagttagctgtactccattgggatgtactccattgggcaaatgtgatgtgtcaaaagaggggtgcttaaatctctgaattacacaattaaatacacgtgtaggcgtacgtagtatggtcaaatgtcaacattattcatcaatgccgtttttccaaaaaacctaatgtcctacggtactgttctaacgtacgacgatggtttaacttataagaagatgtaggtgaagggcccattaatatcagcccaacataaataaatccccaacatatataaatcagtaaaactacccattctactaaaaaaagtcatcactttaatacacgtgtacacgc

SEQ ID NO: 284586 - DNA, 621 bp, Cannabis indica
cttcgatcctaatcggcatagacctaatgcgtctattagagataaccaattccccagtaggcattagggttacaaatcctcttacaggaaaatcataaagtctatccaaaagattaaatactctcgataccacatacgagtatatagtcccaaagtcaaatagtacattaaaatgggagttgttgataagaagctaacctctcaccatagaaggactggatgcaacatcagcctgggtgataacaaatatctgagcaagtacaggctttgcttccagcttctgcttatctttctttgcctgagggcaatttctcttaaagtgcccaaccatgccacacaggaagcatgcttttcagttgcactctccgggatgatgtttcttgcatcgcgggcactcagggtaagaataatccttgcgtacacccttgccttgatttcctcggaaccgcttgttccgttttaaacccaccactgacgacgtaggtttactcttctgctcaaccatggagcccctaccacctctgccataactagaaatatggcaagcggtatcccgatttcgtggcataacctcttgaggtcctaaaatacattctttagggcttccagtccaaagagcat

SEQ ID NO: 284587 - DNA, 368 bp, Cannabis indica
ctagtatcagcctatactcggtatactggtcatactccagttgctagtcatactctagcctaactgatgtgatatggtcggatggtacgaagccaacatcatgtaatatatatgcatactattatactaatcttacctcaattccgaattcaggtgtgccggtcaacctgactggaaccaactgcacggcggtttacagcctcctaaacaataaaaatcacaacactattaagtgatacgccaaatcacttctcggggacttaagctagaaactaaaagtttccatatctataaaaagcatggcaataccctcaataacataaaaatgagaaaaactatggttcttgaaaatttcccaaccggcagac

SEQ ID NO: 284588 - DNA, 827 bp, Cannabis indica
caaattttaaagtaagaatatattagctgaaacataaaacttaggttgcgtttggttagaagtaataaaatggaatagaataaaaaagaaataatcttcatttcattcttttgtttggttgcattttagggttcgtttggtatgccgcattagaccgtattgtatagtattatattaaattgtattttatgtgatatttttatgtaaaactatatgtggtattaacttttatggacacctaaatatataatattttagtataaattaaagtttaacatagtattacataaaaatatgatatataatctaattcaatataatacaatacaatcgacctattacgacgttccaaacgacccctaagtattggaatatcattccaatggaatagcctttccgtggaatgactattccattttgaaatggaagaaaagaccattccaatgcaagatttgaaaaaatttaataattttttttatcaattatttatgtattttaaattttattccattcctattccaattctcattcccattcctattcttatatatttatttctcccaaccaaacgccaccataaagaattccaaaatcatacttagacggtccaatcaaaaaacaattattttcagtctgtagaaaaaaaaaaaaaaaaaaacgacgcatcatagagaccttacactagtcgattggagctccaaggtggctgaatctacattttcctgaaagacagacaaccaaagatcaatgaagtttcactttatttatttgtttattttaaaaaactagatggttctttgtatgtagaaatgcacagctaagagaaa

SEQ ID NO: 284589 - DNA, 835 bp, Cannabis indica
aaactcccaatactcatgttctgttagcaatttaatatttttatcaattttaggtgataagtgccatgttggaatatttacgtatacatctacgtggacatagtgtacacatgacacaattttattagtccacataaaaaaatatttaaaaaattaaaataaaatcaaaaattgtaaataaaaaaaaataaaaaatttgaaaaaaaaaaacaactggaaaccctaaaattaaaaagggttatttgcggcaaaaccccctaaagtaggcaggtttttgcaactaaccccctaatctaaaattttggtggtaaaacctcctaaacccagcttctgttagcagttagccctttccgtccatttttgggtgttaagtgacaggttggaatgtctacgtgtacacaatgtacacgtggcacaatttaattagtccacgtaataaatatttaaaattaaaatataaaaattaattattttaaaaataaacaataaaaaaaatatttttatttgaaaatcaaaaaatttaaattaaaaatattatttttatattttttttttcttttttctttttctttgttcttttttttttcttttctttttcttttcttcttttctttcttctacgcctccttcttcttctctctctatcttcttcatctttgaaaccctagcccccaaaatcagccccatcaaatcccagccgactccccattccatctccacgcacagccaccaatctatccccagctccctaaaaatctcactcaggtctctcgtctctccttctatcgcgcctccctcttctcaaatcgcaaccttccttctccgtcagtccact

SEQ ID NO: 284590 - DNA, 505 bp, Cannabis indica
ccgctagggatatggctctgataccatgttgagaatcatggggttctaactcaaaaccaattggcaatgagtggagtagcccatgttcttatatatggctcaatacttttacatttaatccatgtgggacaatgttctccaatagtcttaaagtggtatagtccatgagtcgcatacacgagggttgtgaggttagacttagttgtagtaggctacctagctaaccacgtgagtcaatatagattcaaatgagctctaatgtatttaggtttaccattcctttgaactttattgtaggtctaaatatgtctaaggaactgtgggtagtaaaacctataattaagtgagtttgtattgttggttgtacatacagacatcaaatattacaatttaactaaagcctattctagttctctggagtagcccacgaatagagtggtttatacaaagagaaaattactctcttttttaaagtctatcatttttacttttttttttaaacatt

SEQ ID NO: 284591 - DNA, 549 bp, Cannabis indica
tagattttggaccgaatcccagggtgggtctttgaccaagtctgggtcttggtccagttacagttttgggtgtaggttaatgtcctggtcatgtcttgttcttgggtcctgatccgcttctagtttcgattccagtttcaagtcaggggatacgggtttgggtcgagtttggatccgagtctgggttcgggtcatgatttgggtctgtggcaaggttcaggttcgggtttcagtctcaggtacggttcgaggctgggtctgggtccaggtcccagtcccattcaaagatcttggtcccgttctaattcatgtttcagttttggttcacgtgtgtgggtcttggtcttagtatgtgttagggtcttagtttgacttcgagtttgggtttaggttctagtctatgtccttgatccaaacaccgagtactggtcgggtccaagcatcgagtcccggatcccacgtcttgatgtgggtcctatgtcaaggtttgggtcttgggttgggtcctcgatcctcatccaagttctgagaccaagttctggtcctagt

SEQ ID NO: 284592 - DNA, 763 bp, Cannabis indica
actcataaaaacaaaacatgcttctttttttttttttttttttaaattctcatttcagcaacaactcagaaattagaaatggtaggagaactacctcaaatccaagcaagagcaaatccccaaatctccaaaactaagctttcttccacaagcaattcaccacaaaatcaaagctaaaaaaaatgagtttttgagagagggagaggctggctgctagggctggagtaaaatgcagaaataaaatctcattttgcttaatatttcccttttaatgaatcataacccaaaatacacaattaccacattgcccttagggccaaattcccattttcaagcatataagggtaaaaaaaatataattatcacatttcacacactcaaataataaatttcagatttcttgtataaaaataaaatgccaattaaacatcccaaaattgtatttcggcccgaaacccggttcggcccgaaatacccggttgtgactataccgcgccaacttgtcagaacacacctgaaaaaggacacaccagatatactatataataatatagttcataagcacataaataaattaaattcacagttttacccttctcgggtcaaaattactaaaatgcccctggctcaccaacggggtcttaacatgtcatttctcaaattaattcgcatataataaattatataataatataattctacaataatactaaattaactagttagggctttgctaatctatttccttaattccagggtatta

SEQ ID NO: 284593 - DNA, 550 bp, Cannabis indica
gtctggattcagttctgggtctaagtccttggttctgctcctggtgtgggttcgagttttggtcctggtccgggtctagctttgcgtctaattcttggtgtgggtttgagttcgggtcggagtctgtgtctgtgtttgtgtccaggtctggaccccgatctgggtctaggttcgggtccaggtccaagttcgggtcccgagtgcaggtccaagtttgggtcttggtcagcatctcggtacagatctaggtccagcatttcgatcccagtctggttcttggtccgagtccaagttcgtatccggatccctatctaggtccaagtctgtgttggggatcgggtcccagatttaggtccaagtccgggtctcagtttccgtctgggtacacgaccttgtctgggcccgagttccagtctcagtttgggtctgaggctaggtctgtgttcggttctaggtctgggtccgggtcctggtcacgttccttgtcttgttctagggtcctggttctgcgatccttgttcaggttctaattttgggtcccaggtctagg

SEQ ID NO: 284594 - DNA, 778 bp, Cannabis indica
aagtggattgaagtgtgacctttgcaagttgccctgtaataaactctataccagctcgttccatgtcttccactaattcccttgatactccttgtaaagtggaaactagtccgggacctctacggctgagtgcatccgctaccacattggctttaccgggatggtacattatctcgcagtcgtagtctttgactagctccaaccatctcctctgcctcatgtttaactccctctgggtgaaaaagtactttaaactcttatgatcggtgtagatttcacatttcactccatagagataatgacgccaaatttttagtgcaaaaaccactgcggctaactctaggtcatgtgtcgggtatctctgttcgtattcttttaattgccttgaagcgtaagcaattaccttcccttcttgcattagaacacaacccaacccttgtttagatgcatcacaatataccgcaaattgtccctcttctgttggtaaactgaggattggtgctgagataagtctattcttcaactcttggaagctttgctcacacttgtctgaccaggaaaattttagattcttcctagttaattctgttaagggtgtggctatctttgagaacccctcaacaaaccttctataatagcctgctaaacccaaaaagcttcgaacctctgaggcggtctttggtctaggccattctttcactgcagcaaccttggcaggatctacttttattcccccgttagtgacaatgtggcccaaaaatgcaacctcggacaacca

SEQ ID NO: 284595 - DNA, 500 bp, Cannabis indica
ataactccctgaccaaacctttttaacgagaaagaggtcgaatcgttataacaccttgatcaaacctctttgacgaagaagggatcaaacaactataattttttatttaaaacctattcgacgggaaaggaaaatcaaaagttataactcacgtataaaactgaatactaacggttctcgcgagctaggaaagtacaaaacgagcacatgaacctagaaaatggatatataatataactattcatacgagcaaattaaaaatatacaaagtgatagaatcattaaagtatatttaagtttgcttaaggcagattattactgctatagcgaggcagaattgacaatgcttgaaaatcgaaaagtttggtagattactaactacttaaacaggaagattacgagcaatagaaaagcccaaaagtactgtacatttgatcaaattatagttgtttacattgtgaataaaaacgcaagaaaacacaattgtattaagttcgaat

SEQ ID NO: 284596 - DNA, 898 bp, Cannabis indica
tttcattgagagcagaatcgcagatcgcttctttttcgacattcaacacgatggtgcaaactcgtagaggcttgtctgacccaacaaactcacagacgctggatccgacattgcaggacccagggagttcaagggttccgcccgctgtcaatcctggacagacgggaaacacggtgaatggtgggacaactcttgttactgaaactgggcctgttgtgcaagagactgggaataacagttacggacacagccaggggggttcataacatgactattccaccaggcatcaacgcccaaacgaccatcggagacgcaaccgaattgcaaaatctttgtgctgcgctcggactcatgcagggtgataactctatgaaaatagagttatttatatctttttgggcattaaattagttttgttctcaagaatttttagtttattttagtgacttttatttggttttctttaattttgcataaatattaattttagtattttgaaattagttttaattaatttttttaatttttatttgtttatttagtctcccaattaattaaatacaattgtgtgtgatgttgtaggaatttaaatgcaaaattgatattaagtgttatgggccatgatgttgggcttttatttcactagttgaaagtcaaaagaaagaaagattgggccaaaaaaaaaaagaaagagaaaagaaaatcaagtgagggcttgatttggaaaaaagatagaaatgaaaaaaaaaaacatcctatatatgatgattgaaggcaagagagtgaggggaattgaaaaaggaggcggctggtggactccagggacacctacaacaatcaaagagaaaaaaaaatgaagaaaaaggaaagagaaaaatgaagaaaaagaagaaaaaga

SEQ ID NO: 284597 - DNA, 628 bp, Cannabis indica
ctcttcaaatcttccatccaaaacaccaaaaacacaaatttctctcataaatcttctattttcttcaaaaatcacaccacaatttccactttttcacccaaatccgaattttccactattcatcatcttcaaccttgagttctccatggatgtgcaacaatggtggtggatgaacggcattctcgcttagtaagtctctttcttgtcaaaactttgattagttaagcgagttttccgaaagtttgaataattatctagagtatttgggaatttgtggatttattttggagaaattgttgaatatttgtgaaatattgttgttgtgggattattgtggtattattgtgatttttgggaagtgaagaaattaaggggaagtgctgccgaatttttcccaaaatttttgtgtggtaattttgaagtgtgtaatgggttccaagcgtactagaacggggcaatcgggtgcgtcatcatcgaaaccgccaacaccggcgtcaaaggccaattatgaaaaagatagatttgtgagtttgaaagcgcaagaaagatactttgaactgcaaaagagagccttcattatggatcgtggtattgaatatgatgacaatcccatcccgaataatccatt

SEQ ID NO: 284598 - DNA, 1260 bp, Cannabis indica
cttcagggtattttggtaatttctgttctctattatttgaccagaagtatttcaaagtctaactaggctctgtttttgagttttttctttttatatatatttaaatgaaatgtactttgttgtcttttgtgttggtttagttggagaaaagaaaatatttgaagaaatggataatatgtatgagacttatttttcctttattagattttttttttggacaaaacaaaacaacccgaacagctcatctatctaaagtagtatcatttttatttgatgaactattggtactttaaagaaaaaaaaaaaaactatgcgtactttacccaattttactaactctcaactcacacgagattggaatgtataaaaatctgtaattattttacgtttgatgtttttattttaggattgtgttattcttttcgaatatgcatgcatacaatcttaaatttgagatgtataacaataaattttgagatacataagaggccatgataaagtttttctttgataattatattttgtattctacacactccaaattttaatttttacttattacaaacatgtaaaacttgaataaaaagatacgccaaaaaaatcagcttgacatccgaatgaataattgtgtcaccgaagttttaatcaaattttaacgcaaactatcgcaaaactttgttagtaattgttttaccgttgttggccaaaatttatggtttcgtgtgtgatagaatctcaaaaccatagctagtcatcattttggccaaaaaatattgttttttcacattgcaaaaccatagtttaaacattgttggtgattgttttactatcgtttttggtcaaaaatatgttttcgcatcgcaaagttcaaatttttcaaattttgataggtttagattttaaaaaaatgctagcaaagtcaataaagtatacatatgtgtttaaaccccttaaaatagtactttgagtgaatattattggagttttaagttttagattgattttgattattaaataacaataataatgatgaattggtgcttcaatggtgatagaggtggcaacatccatggtaaagatgatattaacgttgatgacatcacaattgaagcaaccatatttttttaattttacgtcaaatttttatattacacacatgttaacgcagattttcgttaaccaaatttgagcctcacgattatgattcaacacagaaataataaaagctatagaaaaataaaatatgaacaccgagttttt

SEQ ID NO: 284599 - DNA, 1007 bp, Cannabis indica
atatatatatatttatgtatgttaacatactgtatctttgtatttagtttggtatgtcaagttggaaagggaaattgtatgagaatatgagagatcaggttagcttggcgttatagcctgtaaatgactttgactctgtttggtggtgagcattgagtaattagagtgtataatctattatgtttgaactaattggattcgactgggggtttctgaaccctgatttggatgtaagattaatatcttttgtgtgttgttattagtttctgttcttgttgttttatatgtgattatggttgtactctatacacagtcagtagttattatatttgctatagggctttgttaattatgttgctctgaatattttgctatgcgataaactgtacagaatgaggctttcttttcttgtttacattacatagtgattcaaaggctaacagactgtaccaagttttccttagctctataggcttctgtatatgaggatttgacagatcaagctagctttgtgttgaggcttataactactggatttgactgcgggtttcagactctcaccttggatgtaagatcagttctaagcattgttttgaattctgttcatgttggttttatttgtgtttttagtttctacatttatgcttggagtttttaatgttgcaagctcacgaaggaggcctttagtttagctgctctgaataatttcttctctgttgagtgttgaccgaccaaaggcatgtctacaactgaagactgtagtgattttgatgtttgatacaagtattttcttttcattttgttttggttggtacccttgttgttgaatttttgtgatgtttattggagacaatctgactcatgaataaatatttgcaatcttatgtttgaagccagattggcacaataaccagcactcacaagagggtgccttcaacagaagacaccaattcattcagataaaaaaaaaaaaaaaaacgtaaaatactattttggaccttgtattt

SEQ ID NO: 284600 - DNA, 805 bp, Cannabis indica
tgattttatgggaccgttcccaccttcttctggctacctttacattctcctcgccatagactatgtctccaagtgggttgaagccgtgccatgtcgaaatgcagataacacaactgttgtgaaattcttaaaagaaaatgtgttatctcgttttggcacaccacgagctatcatcagtgatcaaggcacccatttctgcaaccactcttttgagcatttgatgcaaaagtatggtgtacttcacaaggttgcactgccttatcacccacagacaaatggccaagctgagttagctaatcgtgaaattaagcaaattttagaaaagacggttaaccctgaccgcaaagattggtcctcccgacttctcgatgctctctgggcctaccgcactgcttacaaaactcagctaggcatgtctccttacagactagtctatggcaaggcctgccatctccctgttgaactggaacataaagcatactgggctgtaaaaagcctaaattctgatctcaacgcggcgggccttaatcgtaagcttcagttgtcagaaattgaggagctacggaatgatgcttatgataactctaggatctacaaggctaaattaaaagcggctcatgacaagcagatcctgaggaaagaatttgagccaaatcagcgagtgcatctttatgacactcgcctgcatatccaccctgggaaactgagatcccggtggactgggccgtatgttgtaaaaactgtttcccccacggtgttgttgaggtcgaagacccaaccgatgggagaaaattcaaagtgaatg

SEQ ID NO: 284601 - DNA, 530 bp, Cannabis indica
ggcaactcggtcgggtcaaatcagggccaaggagctcaatttcctccgaatgttaggggtcgtggtagaggtcccaggggcagggctcgtggtcggggtgatgataacccgcaacaggctgctcaagccaatcaggaagcccagaattgggaaactaggtttgctgaaatgcaagccagaatagaggagcaagatcatgagattcagagattgagacagcagggtgctcctgcagtgccggtgccagaagttcctgtggcacctgcccctgttgctcaagccgagatagtggtacgcggcaaacagaatggaacccctgtatgaaaggttctggaagcaggcacctctggattttctgggaggtccggatgtcacgaaagccaagcagtggctaacggtgattacaaagatactgaactttgtgggggtcaccgggaatgacagggtggtgtgtgccaccttccagtttcaagaagacgccttagtttggtgggacatggtatctcagattcatgatgtcaccaccatga

SEQ ID NO: 284602 - DNA, 683 bp, Cannabis indica
tataaaattgatacaattgattatttttaaaaaatgtaataaaaaaattgatgaggttgtcccacgaaagctttctgtgtttcaatctcaatgtcgacccatcacaaaaggcaatctccggccacttgatcgcgcatctcgtgaacaagtagagtggtatatattcaacaattcacctgaaattcaagcttacttagagtgagtttttttccttatttatttttctatttttttaaacttaaatttcaatcaatcaattcaaatctattttattttacagtgaacacttggaagtgatccgacaaaattacccgaatggagatcataatgtcctacacaaaaaatattttcgtccgtggtttcacaagaaggtgaatgcataagtgttgtaaacatttattatctaatggtgtttgtcattttctaatgatgtatttatttttatagatatatgacttgcacaagtccggatcattagacaatggcaaagagttgctagctttagcatccgggtctgatcacttaggcacttactatgaaggttgtattgtgaatggagttcgatttatggctaccaaaagagatgagaagaggagcacacaaaatagtggagtgtttgtggcaggaacagaaggttttaattattacggcacactcactgaagtgctaaagttaaccttcac

SEQ ID NO: 284603 - DNA, 711 bp, Cannabis indica
taaaagtaagaattttggtgaaatatgtttagttctgtctcctttaatgtaccctcctttaagttgagcgatgcaagcagcattatcttcatagagaattgttggtacttctttattagatgttaatccacatgttcctcgaatatgttgtgtcattgatcttaaccaaacatattatcgacttgcctcgtgaattgcaagtatctcagcatgatttgaggaagcagccaccagattttgcttttttgaccgccaggatatagcagtgtcaccgcaagtgaacaaatagccagtttgagatctggctttatgtggatcagataaatatcctgcatctgcgtagccaataagttgtgacccacaattattagaacagaataatcctttatcaatagtaccctggagatagcgaagtatgtgcttaatccctttccaatgtctatatgttggagcagaactaaatcttgctaataaattgacagagaaagctatatcaggtcttgtacaattagcaagatacatcaattctcctattgcactaagatatggtaaccaaggagctcttcatgttcttctctaggtcgaaaaggatctttttctacatcaagtgacctaactaccattgggctactcaatgagtgtgatttatccatataaaaccatctcaaaatcttttcagtataagttgactgatgaatgaaaattccacat

SEQ ID NO: 284604 - DNA, 672 bp, Cannabis indica
acatcaatcaatcatcaataaacacataaatcaacatgaatcacatccaaattacacatacatcattttaaatccatacttcttgaaagtaaatcaattaccatggctctgaggccagttgttggaatatcttttaccaggatcaagatttactaacaagtatgtttttaatatcctatatatgaatctctaaaacgatgaaaataaacacataagaggtatgagaaaccttacattggttgcagcgaaattaaatgactccttccgctcagatgtctaacccttgtatcctttctgtcacagagtatcacgaagatctgagcccgaaactccttagttgtttagattcttcacagtcttagacactatgattgaggactaacttgatatgggtgggcacacactcaatcactaatggcttgaatttgatagtgaagaaagctatagaattttgaaatggaagaagagaaaagaagaagaagaagtctcaaaactcactagttgtctttcaagaggaaaactagatcaagagttaatgttttcatttgttcgataatgagactttcttttctttttatactacttcaattagggttaggattgatttatttgaaataaaaaaaatgataaaaatggagcaaaaatagggacctagtggccggccattagtgg

SEQ ID NO: 284605 - DNA, 694 bp, Cannabis indica
gttattaggggcatatttgttaattatgatactttgtatggttcaattaataaatatgataaatgacaatattatttaataattatttatagttattaaatagttagaattggcatttaaatggttgaattagaaaattggcgtttttgagaaaatcagatacaaaagtgataaaactgcaaaattgcaaaaagtgaggcccaaatccaataagccatggccggccacttttataggaattatcctctgatattttcattattttaatgccaaataattcaaacctaaccctagtggaatgctataaatagatagtgaaggcttcaggaaaattacacttttcattcagaaaaacctgagcctctctctctacctttggccgccactctctctctctctcttcttccttaatatttcgaaacccttagtgattagagtagtgcccacacacagcaagcaatacctcaatcatagtgaggaagatcgtgaagaaagattttcagcaaaaggagtttcagcatcaaagattcagagaaagagatccaggttcagatcttgataatactctgcgacagaaaggatacaagggttagagatctgaacggaaggagtcatttaattccgctgcacccaatgtaaggtttcctaaactttatatgtgtttatttcatcgttttagaaagttcatatttag

SEQ ID NO: 284606 - DNA, 494 bp, Cannabis indica
caccaggagtcagggcaactcagtggggtcgaatcaaggtcagggagctcagggtcggggtgaggataacctgccacaggctgcctaggctactcaagccaatcaggaagcccagaattgggaaaacaggtttgctgaaatgcaagccaaaatagaggatcaagatcaggagattcagagatagaggcaaccgggtgctcctgcagtatcggtgccagaagctcctgtggcacctgcccctgttgctcaggccgagatagtggtagcggaaacagaatggaacccttgtatgaaaggttccaaaagcaggcaccttcagtttttctaggaggtccggacgtcatgaatgccgaacagtggctaacggtgatcacaataattttgaactttatgggtgtcaccgggaatgacagggtggtgtgtgccacctttcagtttcaagaggacgccttagtctggtgggacatggtgtcccagattcatgatgtcaccac

SEQ ID NO: 284607 - DNA, 625 bp, Cannabis indica
tgaagtccggagcccatactcaaatccccgctcagaaagacgctgacgttgcccaacccaacaagaatgccaatcaagtcagcccagtcctacagactcagcttgacgaactgaagaatatgtttcatggcatggtcgtgcagcgtaataaagatcttgagttagaccgtgcacgcggaactcccttctcaacagaaatcaacctcctaccactacctcacaagttcaagatgccaacgtggaagatgtacactgggagagaagttcctctctctcatctcaagtatttcgagatgcaaatggatttacaaggggtgcgaggagacgtatgtagcagaatcatacccgcaaccctgtcagaggccccacagcaatggtatttcaagttggctccaggaaagttttgttcatggaaaaccttctcttcggaattccatgcacaattctcttcctcacgccaactcccattgcatctgggagatttggtcgaagtaaaacagcgaccaggcgagccactccgggcatacatcagtaggttcatgacggaagcgaccaaggtgtcacgggtaaccgacgatgaaaagttatctgcgatactggggggcattgaagtccttagcgaact

SEQ ID NO: 284608 - DNA, 1158 bp, Cannabis indica
attaaactatttacatatttatgtttcactgttttatttgataaaataccgttagtttttgtaagttatctcaaacacgcagggccagcccaaggcataggcgggctaggcccgtgcctaggggcccacacttttcggggcccaaaataaaaaaaataaaaaaatttattaggcttttatttaagtaaaatttaagtgtattataagcaacaaatatttatagcttagttggttaaggtggatgttataatgttctaggttacgggttcaaatcccataacacttttttttatatatttttgaggaccccaaaatttaattcgtcttgggcccatatattttcagggtcggccctgcaaacacgcataccgagatatcttcagtttgtaaagtagactcttcagtttgctttgtcaattttagcttctttttttcttattttgtacgctctcttttctttttgtattaatatttattatttaataattatatatatgatactacacaattattactctttcccttttcaagttttattatgtttaaatatttaaattaattacattccacccgtaaaaattaaacatttaagaaattattattgattattaaaatattagttattatgtaatagtttcacacacactgataatttattttaaaaattaatggtttttttgaaataggctgacatatatatatatatattaatacaactgtacgaaatttttaatatttttataattttatgattttatttatagaagatactagttttttatgttgtactcttgttaatttattgttgattttttattctatgtatgttattttttgttgttatttgaatattattttactgttacttttatataattttttattgtttccgtgttgtttctataaaaaaccgtaaaaatatataaaaaaaaatcttcaaacataaaatataaaaatttacaaaaaatagttttctatataattatccttataccctacacattttttttgttgattactttttttttgttctttatgactcataacataaacacaaaagttatttttttaattaatgataataaacttgtcaaacattttatttcttcttctttttcatttttttttattcaaatactttagttttttttatatata

SEQ ID NO: 284609 - DNA, 652 bp, Cannabis indica
caaggaagacaagcatatccaccgggtttttcacaacaaccccgacattcacaacatgctcaaaatgcccaaccaagttctttggagagtctaatgcgggattatatggccaaaaatgatgcggtgatacaaagtcaagctgcctctcttcgaaacttagagttgcaacttggacatttggccaatgaattaaaagctaggccgcaaggttctttgcctagtgacacggagaatccaaggagggatgggaaggagcaatgcaaatccattcacttgaggagtggcaagcatctgaaaaattccgaggaggaaataaagggtagtggggagcccacttcaatccaaaacgacgaaaaattgagtaaaaaaactgcccaggaaattgctgataccagaccagttgatacagcatcgggtcagcaatctgacagtcagcaatccgcaccagtatgtactaaaccaccccttccatttcctcaaagatttcggaaacagcagcaagatgggcaattcaagaagtttttagatgtgttgaagcagctccatatcaatattcccttggtggaagcattggagcaaatgccgaactatgtcaagttcttaaaagcattttgacagaaaaggaggttggggagtttgaaactgtagctct

SEQ ID NO: 284610 - DNA, 389 bp, Cannabis indica
aaaaaaataaaataatcaaattttaaaggaaataagaaaaaggtaagcaaaacttgattttttcctattttcaaaatcaaattacactaatatctaaaattaattttaaaaataaaattaatttatttctgataattagatttgaaatttgaaaaacaaaaatcaacatacaaaactacacaaaaaatcgaaatttaattccatgaaatagcatgaaaaatcgaaaaaactgaaaaattggatgaactgtacggatggcatgccatgcatggccatccgcgcgcggatcctgggtgcttggccgagaaatcacggcgcaggaaggctgcaagcagccattccgcgcgcgtgatgaggttgctcgtcaccccgattttccaattttcaaa

SEQ ID NO: 284611 - DNA, 826 bp, Cannabis indica
tcgaagatcgtagtcggcaagccactgtgctgatacgaagagcctatcagactgtaggccagcaagcgccgagcgtcattccccttggagaaaccgaggatgacccaacggtgaatgcttcccagacaaccaacggtcagccgtccaatccccggtcacgagttccactcgtgggccaagaggtaggcggacagaccttgtccgggaattcatcaggaggagtcatgctcgacggatccacgcaaaataatggagccattccacctgccaaccaagcgaaccaatcgctaaggcagccaggttcttctgtgttcgataggttgggaacaacccatgacctaagggacgacctaaacagaagaaggggaacagacgagcagaatactacaacgaacgtgcagtccggagcccatactcaaatccccgctcagaaagacgctgacgtggcccaacccgaccagaatgccaatcaagtcagcccagccgtacaggcccagctcgacgaactgaagaatatgtttcatggcatggccgggcagcgtaacaacgatcttgagttagaccgtgcacgcgaaactcccttctcaccagaaatcaacctcctgccactacctcacaagttcaagatgccaacgtggaagatgtacactgggagagaagatcctctctcccatctcaagtatttcgagatgcaaatggatttacaaggggtacgaggagacgtatgttgcagaatcttccccgcaactctgtcagaggccgcacagcaatggtatttcaagttggctccaggaaagtttagttcatggaaaaccttctcttcgga

SEQ ID NO: 284612 - DNA, 548 bp, Cannabis indica
tattgatgattgttaatgaaattagtatgtagctttatgtttgtagaaaaaaatatattattttatatagagtttaaatttaaatttatataaacatatttatttttaaaaagagtaattcataagaaaaaaaaaatcgcataaatacacaaatacacaaatatataagcccaatgaataaattaattcaaatagaagatacctctaatttcagataatttcagattgttggttagcaaattaaagacaaagcaaatcgggattgaaaaaagaaaaaagataaaaatagtgaaagagatccttacgttttcctccaccgaaaacctggtgaactggtctttctcgcccaaaaagcctgaaaatcttggtcttaacagaagacggagattccggtttcacttgctccgattcagagtcggatgaggaggatgaagagtcgccatgaccatggatcttctctgtaatcttctcgatcaaagactccgatttcgcctccgcgctctcagtgtgctcagccatagtttttccgatccgaatgaaatacactg

SEQ ID NO: 284613 - DNA, 116 bp, Cannabis indica
gtcatagtggacaggtttacaaagtctgctcactttttacctgttcggacgaatttctccattgaccagtatgctgagttatatgtcagagaaattgttcgtctgcatggtgtccc

SEQ ID NO: 284614 - DNA, 785 bp, Cannabis indica
ctaagggacgggctccggaggaccagaacccatccaggaccgacctaggaaatctcctaagttggaaaaataaaactccttcatatggtctccccaccgggtcgagagcatcctaaacctataaagatgctcatcgaaccctacaggcctaagactcgcatattcgccaacagaagggacataatgaactgctaaatgagacttaccactggagccggaagtgctggcacccggagccccagtgttcggctcttgagctgaaggctttggccttggagcccttctctccgtcgagtccccgatatgaaggggcttcccagcgatcgcctggcttctcctctagaccgggctccccacgcgaagtggcctcccggaagctacttgagccttagagtaggctttctcctgagccttctggtagagatagtcctggtacttcttctcggaagtggcgatgatctcgtcccggaaggtcttctccgcggcaggcaccctcacattgggacagataacccggaaaaggttagagtcctccacggattgatgcggcaggatgagttttgccttccgacaattctccgtcgtaaccaggcccccgacgtcgaggtccgcccggtcataagaggcgaaggcctgggctctccgaagaaagacctgagtaggcgcggtccgctcgtaagggggaatcctaacccactccgtgaggagctccggatgttccacttcccggaactcggaagagaagaaaaaacaatggcgatactccttaacatgagtttgcctat

SEQ ID NO: 284615 - DNA, 383 bp, Cannabis indica
catttagtagttttctataattttgcatttcggtgcccggtaacatggaactcggtgtttggctcagtaaaatcacaacttagtatgttagtagtttgagacggtttattagacattgggaatgtcgggaatggccgggaatttagaatttcccaaaaatacccctttagtgttatttatgtgactttagtgtgaaggggcaaaatggtcattttgccccattgttagtttgtctttttgtgacttaataaattggaaaatatatgttatttaaatattattttggctgaagtaaaatgggttaagtgcctttcaatttcattttcatttcaaacttagaaaaattacaaaattttaaaaagaaaagctctctcttttcctct

SEQ ID NO: 284616 - DNA, 577 bp, Cannabis indica
catttttccaaaaggaagcttctacttctatctcctctaggtcaagtttagccacaatttgatctcccaccttaatcggttcagtaaaattaagtttagtagagggagtaggtacctggttcgatttgaatttgctccataggtccctggcatccgcttggtaattcgcctgttcaacctcttcagcccagtttccaggaatcggagcaacacgattcaactctggttcatttacctcaatccccaattctgaactcaaattctcaatcgtatcatggaactcttcagctagctccgggtctgtcgcttcctcctggattgaagggagatctggatcctggtcgacgatctctgtagcagcactggcaggcttccggccaaccctcttcttcttcgccatgggagaagagcgggagacactttcgcctaatctctttttttatatgtcccctatcctaggcgagaagcttaacgatctccattgttggtcttacaaaagttaattgttttcaatataacctcgagacgctagacttcgtccccctatagatggttattcgttgaacgcatttaacac

SEQ ID NO: 284617 - DNA, 560 bp, Cannabis indica
gcaatcgttcattcgacaaagactccaaaggttcaccttgaacaccatggccgacgtaactgagactccagacctagcttcccagatcgctatcctcactgccgaggcagccaaggagcgagagcaagcagccaaagatcgagagcaagcggctaaagaccgtgagcaactagaaaagctgcaagctgaaaacgcagacctgttggtgaggatggagaccttgtcatcccagaacatgaccgaccctccgccacctccatcccgctttcgagttccaatcagtccgatgcagtccttggggagcctcactcccaactcctctattggcggatcgagtcagatggatccgccagccttggtaaggaaccaacaaactccaaccattgtcactaatacaccaaactcttctattaatgcaggtggacaggtaaccttaacgacaccagaagcccagacaatttcagacaatgggcagacagctcaaggggttaacctcccctcctccggtgatggtagacagcccaccaccttggagcaacaggtcacaacaactgaggcag

SEQ ID NO: 284618 - DNA, 622 bp, Cannabis indica
gatgccacgtcagagtgcaaaaattgggataacatttgcccccaagtctgtacgagactttcgaagttgcgtgtagactttatcagagctgcttttaattttggatggggacatgtgtcgagcgcgaccgtccgagactcgatgaaggctgactgggcatcccttcggttttcggctaataaattctctgacacttaatatttcgaaatccgattttctctctccacggctgacggctgaacttgattattttttatttcccatattcgcttttaaggagggaaactgcgacgtctgaggttcctttgagacgattacctcttttcgtgacttgcctataaataccaaacagcattggcacataaacttattttcatcacctttctttgctaagtaagcttcagagcgaaaagagagattcttgacttcaaagttgccgaagcgccttcatacaaactgcttgttggattcgcgttgctcgcacccagacatctgaccctcgagtaagtctctggtttcctttatgcttatctttgcatgtttatatgtcaaatgcatcctctactttgttgtagaaaaatgtttaggaaaccctaagtccagaaatctctacgatccttct

SEQ ID NO: 284619 - DNA, 502 bp, Cannabis indica
ctaattttattgtatttcattatgtgaggttttcggcaaccaatataataataataattaagaaagctataaggaattaagagagagatttttacgtggttggggcgttaatgagccttagtccacgagtctgtgtatttatgatagtatttattacagagaatgttcttggtggatttttcctcttctagttcttatgaaacccagaattctcgacccctgctttaatgagtttggggggtatttatagtgtttttgtggggtgatccctagaattgaggtacatgtctttctgtaattatcagtaaagccacacattcccaatgaatatatcataggaaatgcatggtctaatccctaggctttgtaggggttttatggatgtagtcctttatcctttttgactgatgtgagtcctcataaagtagccgtcactaggctcattaatcatagcatagtagctgcagagagggggttgtgccgtcagactttaagacatatg

SEQ ID NO: 284620 - DNA, 603 bp, Cannabis indica
atcgagaaaatttagtttcgcctttttatttgcttaatgcttgcatggaacaaggtagtattggaatcgccactttgaatccaggatgccttagctttttgctgcagaaaagatgaataatctttctgcaactatgacaaatctggatcttgcttcctgttcaacagcaatcaaatcatggttcaaagggtcatgctgcaatttctcctgaatatctttaatatcaagtctggttttcaaagcagcagaatgaaggttagaaaaccattcttattgacctccttgaacaccagctttagagctttaagcttgctaactacttgatacatttttgttccaggaatttgctgtgcccaaatctccctgagtttgtttcatactcaggatgatttttccacttcctgaaatacttgaagggtttccttccccctttccattgaggatatgaagtcaaaaccgcaggagagtgatcaaaaagcccttcattaagaaaagcagcttcaataatgagaaaatcatcaagccaggattggttggctataaccctgttaaccttggaaaaaatacgatcatccccttcgctgtttatttgtccatgtgaag

SEQ ID NO: 284621 - DNA, 742 bp, Cannabis indica
tactaatcttacctcaattccgaattctggtgtgccggtcaacctgagtggaacgtactgcacagcggtttacaggctcctaaaccataacaatcacaacactgataagtgatacgctaaatcacttcccggggacttaaactagaaactaaaagtttccctatcgataaaaagcatggaaataccctaaacaacataaaaacgggagaaactagggttcttgaaaatcccccaaccggcagaccggttctacaaccggaattccggttctggaaattcctgaaccccatccgaaattccggttgcacatccggaattccggttcctcgcaggaatcaatcaaaaattcataactccctcaaatcaaatccaattcaaaccaaaccttccagacctgttctaaatactccaaagaacatttctaaagcatcaataccacccagaaaacacagatactaaaaatgccattaaagctccaagctttgagttcaaaactcaaacttggttaaacatcattaacatgcattccaaccacctcaaatcttcataaatatgcatataataacctctgaaaactacagcaagcatcaacaacaagtgcagcaacagattttattattttctttataaaccatagttttgagttaaaattctataaattgataaaaccaactaatcaccaacacaatcatgcttgaatcaacattttaaaatcatgctctaactacagaaatcaacaaca

SEQ ID NO: 284622 - DNA, 502 bp, Cannabis indica
aactctggattatattcataactccacatgatctctatatcacttaagggtggataaagctattgacatatgtagttccttttgaactctagattatactcaatacaccacagtatctctatggcactcatattttaattaaacatggatgtaatataataaacaaattagcaaattattagaacttattcttgatcctgtaatttttgttccaattaatatattactgtagtaattgaaatagataccaataaagttcttggacatagtgtcacagtacattatttgagtgggagaattttaaaattgtaagcctatcttcatttagatgacacttgtgataggaacttttgaattcaattgagaaagtaaatctaaccatggatagaaataacttatcagaattttgaggataagatagaagaatttttgcatggtctattcgaatgacttaggcaaaattcctaatcctcatgaaatgttttatggtatctctaatgat

SEQ ID NO: 284623 - DNA, 635 bp, Cannabis indica
gttcggcgattcttgttcaggttctaatttttggtcccaggtcaaggtctaggttcgggttgtgttcttcgtctgggttctggtcctagtgtgagtcccaaatctagacaccgacttctggtctaggtcccatcactatcacgggtctcggtcttgttctagttcaggtcctaggtaccatttctgagtttgggttcgggatcgagactgcggtgcggttctaggtcccgaccatggttctttgtccctagcatggttccatgttttggtttgagttcaggttcgggttcgggtcccgagtcaaggaattggtttggatctgggtccggctcccaattcgggacttggtcttatttggagtccgagtcttggttcagcttccaagtcccatttcagagtttgcgttcgggatcgagactgaggtgtggttctgggtcctgaccctggttctttgtccctagcatggttccatgtttgggtctgagttcaggttcgggtttgggtcccgagtccaggtttggggtgggatgcgggtccggctcccaattctgttctaggtctgattttgagtttgggtcctggtctagttacggttctggatcaaggtccaatttcaattatgattccaagtccaa

SEQ ID NO: 284624 - DNA, 499 bp, Cannabis indica
gggacggtttattagacattgggaatgtcgggaatggccgggaatttagaatttcccaaaaatacccctttagtgttatttatgtgattttagtgtgaaggggcaaaatggtcattttgccccattattagtttgtctttttgtgacttattaattggattttatatgtttaataatgctttatgttggctgaaataagtgggttaggtggcatttctctcattttattcaaacttagaaaaaatagaaaattttcaaaggaaaactctctctctcttttcctctctctattcggccctttgagcagcaagaaaaagggaattttctcttgggattctagtgatttttcagcaagttagtgtgatcattgaagaggtatttattgtctagcttctcttcctttgttttcttgaaaaaaatgatgaaaaatatgagttatgcatggatgattttaatgttgttgctgctgctagttgttgttgttatttctatgtttaaa

SEQ ID NO: 284625 - DNA, 869 bp, Cannabis indica
aaaaacacatagatcaacatgaatcacatccaaatcacacatatatgatatatcgttttaagtccaaatttcttgaaagtaaattaattaccatggctttgaggccagttattggaatatattttaccaggatctagatttactaacaagtatgtttttaacatcctaaacatgaacttataaaatgatataaaataaacacataaaaagtatgaaaaaccttagagtggttgcagcggaattaaatgactccttccgctcagatctctaacccttatatcctttctgtagcagagtatcaccaagatctgagcccgattctccttctcttgagtttggattcatcccagctttacacactataattgagtaccacttgatgtgtgtgggcacttactctatcactatagggttcgaatttgaagagagaaagagagagaaggattcaaaattggtagagaagatggctcaaatttttgattgaaggaaagtgttttcatcatctttttctttgaggccatcactacctatttattggaatctaactagggttaggttagaattatttagcattaaaatatttaaaaaaagaaatggtaaattagcccttaagtggccggccatgatatgggccccactttgtaattttgccattttttttcaactatttatcttattttctcaaaaatgtcatttttctaatttaatcacttaaatgtcaaaactaattatttaataattaaaattaattattaaataaaattgtcatttaaaatatttattaattagacttaataaatactcttgattaacaaataaaccctagaatctctttcttcacaatttagccctagcttagtgaaaattca

SEQ ID NO: 284626 - DNA, 822 bp, Cannabis indica
atctcgaattgtttaaataaattgtgaggacgaaatttttataagggggatgattgtaaaatcctaataagtctaatagtaaacaattagggtttatatttatatcatgtgttagtcaggtaataagtgggattatgatcctactaatttattttagcataaaatgtaaattttgttataagtgagtaaataagtataatttataaattacggagatttatatagaatgtgtgaatgtaatatgagccatatgtggaataaaaatattttcaggttcagtgaccctgaagacctgattagtggataaataagcgtaatttgttaattacggagatttatttaaaatacgtggatataatatgaattatttgtgaaataaaaatattttaaggttcggcaaccttggagatccgattggaggccaaaaatgtcacaacagtgatgggattattagaataagttgattttagaattattgaggtattttaggatactcgaaattagccaaataccttaaaatagaggtttcttaatggctaaaaaatcattagataactattaataataaagtttttattaatattatattattattttattattattaataatattattataatattattattttaatatattaaactgataacgtttagttatcagtttcgtttgtttatatattatatatatatatattagggtgcactcttaatggatattactcatgaatgggtaaaattagaaaattttgaatttttatgcttaatttttctatctaattaaaaaaatctactcatttttatatcatatgggctgaga

SEQ ID NO: 284627 - DNA, 415 bp, Cannabis indica
actgttcatgtggctaagactaggctggatgagattcaaactaagatgcatagctgcccgtttaatgaagaaattcagcagcaggaaaaagaggctcgggagacatatgttaaggtccaaacagattataattcttttctacaacaaaaggcaaaggtggcttggatccgagatggtgatagcaatacatcactctttcatgcaagtataaggcaaaggctcagacagaatagaatactatctattgaacatcatgatgggaagagaatccatgatcccaagctggtgcaagatgcttttattgaatactataaacaacttcttggtactaaaatggagaatagaagatgtgtgcttccagggatattgaggagaggcccaatggtatccaaagtgcaagctgagatgttggaga

SEQ ID NO: 284628 - DNA, 1494 bp, Cannabis indica
cctaaatcatcgcatagctgtcgcatttctttacagtcaaactgttttccattatctgaaatgagtttgtgcggaatgccaaaacgacaaatgatggaagtgtagacgaactcgcgtaacttcgttgcagtgatggtcgcgagtgctttcgcttcagcccttggaaaggtcaataacctctcccaacagtcagctccttggaaaggtcaataacctctcccaaaggtctcttctctgaagacccctcttcgcccttagacttcttggcctgaggggaggcactagaacttccgcccatcctcttcctcagagcatcaatcatctgccgagacatgtctgcacagaacaaaaacagcgtggttagcacaaaccagcagaaaatacaaagcatgaaagtcaagaagctgaaaaagaagtaaaacgcagagtgactgcccgcccagaaagtcagaagtccatcatcacctgatatctcagacataacagccttcccttttccagcatagggatgagagggccgaacaggtgaaatgggctcccttatgcgaatggcatgttcaacaggcctgggcgtggccgggagtttcttcttcctcttcaaaggagtcacctgctcagcctcagcctcagcctcggcttcatcttcaggattcatgagctcctgagcatactgctttgcccgggcacctcccttcaacttagcttcacgcttaagttgaatgagctcatcctccttattagctcgttcgggccgggcagcatcagatttccccttcttccccgtcacggacttaggagaaaagtcctctgggtaaagcccgtactgcaccagattctcgtcggaggtcaactggatgatatccctgtcttccgccggcaaccgggcaagtttttgagctctatccctaagagcaagagtgaggggaggacggtgatatgtcgggatctgctgaaaccgagtctgggtgatgctcggatccttcaccatgaagtactcatcaacaaaacgccctattttgctgatggccttgtggtccgtcccgctcaaccacttgaagcctggctgagagaagtaaaaataccccgacctgccttgcttgggggtagacttcaggtcgaagaaccaagcgacctcgtggggagaaggagcatcccatccctgggaagcgtagaggacgaagagagcggacaaatacttaatgcccttgggagtaatctgggccgggcagaggccgaagaagtccgccacatcccggaagtacttatgcaagggcatcagcgccccttgctggccgtgagcccccgaccaggcacacatccccttatcagggtttgtggcacgattgtcgtgggcgggaatgtagcagtccagctcgcccaggtatccgtcctggtcgagagtgcggaggcgtgcctccgaaatcttggacggaggacttacccacctggcgcccaaggcaccctgcctcctgtgaggaaccgcctcagcaagct

SEQ ID NO: 284629 - DNA, 751 bp, Cannabis indica
tgaaattagataaaagtccttaaatataacaatctcaatagttcggggggaatttctgacagccaaaaaagttcaggaggcacgatttagtacatgtcaaaattcggggagaaaaattactaataagcctttctttttttctcttgctgctgggtattgaagattttgagtggaacctatttttttcttttctcttgatgctgtgtatccaagcttttattagaagattcttcttaaaaaaggtagctgtataatcttaattacattgatgttgtcccgtttaaaaaatggggaaaatagattgtatagatttggggtaattaagttttatgaacatgaaaacttatttcagatggtaataatgtgatattttcttcttcttaagtcttaattttttttattaaaatccctaatctttcagatttaggttttttttttgtttttctgtcgttgttgattatccaagactttacttggaacatattttcttcttctctcttgatactgggcatcgaagccttattgaaagattcttattgaaaaagataactctataattttaattgctttgattttgttctatttcaaatttagggggaaatggattttatagatttagggtaattaggttttaagaacttggaagcttattccatatggttataattgttgggttttatgccctaaataaaactcatttcagtacaatcagtttacttattaataaagatcagaaataacattttatgtt

SEQ ID NO: 284630 - DNA, 901 bp, Cannabis indica
ttgcggctctcaaatgccacggggtggccctcctgcacgagtacccctcctaaagcataatctgacgcatcagtctgtacttcaaaaggcttgcatacatcgggcagggctaatacaggatcttcgaccatggcttctttcagacttcgaaaagcttcttcgcacttctcagaccacgtccatgtaacacccttcttcaataactctgttaagggtgtcgctcttctcgaatagccctccacaaatcttctatagtaattggctagaccgagaaacgagcgaagttgtttcacgttggttggggtcgtccactcttggatcgcccgcaccttttccatgtccatacggattttcccgtgttccacaatatgacccaggaacttgatacttttctgagcgaaagaacacttctcgcgctttacatacaactgttccttcctcaacttctgaaacaccgttgtcaagtgttcctgatgctcttctaaagtggcgctgtagaccacgatatcatccaagtacaccaccacgaacttgtctaagacatcatggaagacttcattcatcagtgtacagaatgtggctggcgcatttgtcaacccaaacggcatgacgcgaaactcaaacgccccataccgagtaacacaagtcgtctttggttcatccccttctgcgatacgaacttgatagtatcctgatctcaagtccaacttcgtgaagtattttgctccacttagctggtcaaacagatccgcgatcaagggaatggggtatctgttgcgcacagtcaccttgttgagggcgcggtagtctatgcacagtctcaaggtcccgtccttcttcttttggaacaacacgggggcaccaaaaggtgcctttgagggtttgatgaattctgcctcca

SEQ ID NO: 284631 - DNA, 829 bp, Cannabis indica
gctgatatgtacattgctgctacaacctcgtactcatggctgctcaaccttagccttccctttacctgcactataaagcacctgtgagtcacaaagactcaggaagaaaagtgaataaaacaataaccgataataaccatcaattcaatctcatatcaacatgcttaaacatttacacaataccataaacacacaatcctgatactttataaagtaccccttgtaccactcgttaaccacgagctgaatatgtcactatcgttgcccgatgaagcaaacgataagtaagaaacctaaccgcagtttcaagagtaattactcgtaacggtactaaccatttcccaccctaggtcataacctaggctcaacaaatatttaatcaaagtcttgataataattaaggccataaccattcaagcgtgggggccaacctgagtggaacgatgcttgacaatctcgggtcctatgtcacgacaaaagtaaatcaataagggtctattccaaaacactgtctagaacccgcataaaataacctagggttttctaccgaatcttatggtgaaaacaccttaaaataaaatacatcttttggctctaatctatgtctcatactgtagtgctcttcataagcttcgaaacggtatatagaatgtctaaaatggacacccaagtgaaaagttatggctaaaatacgaaaatcggggattcttgaaaattgaccatccggaattccagttggtgcagccctgtaccatccggaattccggttcaccacagcagaaactcgaaaattttagctcttcaaagtcccaaacttgctccaaaccta

SEQ ID NO: 284632 - DNA, 514 bp, Cannabis indica
aaaggaaagcataaaggaaatcagaaacttactcaaagattagaatgtccgagttcaagccagccaacaatcgtctgtaggcacttcggcaactttgaagccaaaaaactctctctttttgctctggagtttacttaacgacgaagggtgataaaaagagtaatgtgccagtactccgagtatttataggcaaaaattgtaactgcatacaaaggaaccttagacgcctcgacttcccgcctcaaaagcgaatatgggaaattaaaagtaatcgagtgcaaccgtcaaccgtagagagagaaattcggattttcaaaatattaattgtcagagcattaattagccaaaaactgaagggacgcccaatcagcttcacatcgagtctcgagcggtcatgctcgacacgtgtccccatccaaaggtagagccagctcggaataagtctacacgcaacctcggaggttccgtacagacttggggggcacatgttatcccaaatttggcactctgacgt

SEQ ID NO: 284633 - DNA, 607 bp, Cannabis indica
tggaccgcgcagtactcaaggtacaagtccttggcgtcgcccaagtagtcaaagttggcccggggattagccttcctaaaatcaaagaagagctcaagaccggctgtctccaagtcattgaccttctccttcaacctgtccacctcggccgaaagctccccctccttggcatccttctcctccttcatccaaagaagaactgctcgcagagaagtcctctcatcctgaagactgtttacctcagcagataagatctcgatggtctcctcaaaacggtcagcagcctcaagatcctttgtcagcacgaagatcttcttctcagcagcgagcagcttcttgttggcctcacccaactccaagcaaatatgccgaccaggagtactcaacagattaaaggactgctatgtccaaagaaaagtcagaacacaagaagtcagaaaattttcttgagttagggcaaaaaagttcatgaagcttagaataagcaagatgaaagatggacgcaatgcagttcagagacaagttctatggctataaacccacatgattacatgacaaagaagaatcccagaagtttctaaccctagggttgttgggttttatgccc

SEQ ID NO: 284634 - DNA, 505 bp, Cannabis indica
tcgcacgtcctaaatatttatcctaacttccgaccaattcaacaaaagcgaaggctattgacaaagagcgagcactagccctaaaggaagaggtagagaagctacgcaacaataatttcataatagaagctttctacccagcttcagttgccaatcccatcttggtacccaagccgaacaagaaatggtgagtgtgtattgatttcacggacctcaacaaagcatgccctaaagattgttttccactcccaagaatcaatcagctcgtggatgcaacagtcgggcatgaaatattaagcttcatggatgcttattgggggtacaatcaaatcaaaatgcatccacgagaccaagagcatacaagtattcgaacaaatatgggtctatattgctacaaagtcatgccatttggtcttaaaaatgttggagcgatataccaaagattggtaaacaaaatgtttaaagaccatatcgggggaaacatggaagtgtatgtggatgacat

SEQ ID NO: 284635 - DNA, 507 bp, Cannabis indica
actagaaccgaactaggactaggacaaggacaaggacctaaagcaaaacccgaacccagatcaaaacccagactgagccctaaacccgaaccaagactaggacttgaaccccaacctagaacgggacccaaacccacacaataactgggacgtggacccagcattaggatagggaccttggaaacagaactaggaccgggacctactacccgacccaaacccgaacttgaacctaatacccaactcgtgacccggaaccagaaatggaaccagacttggactccagattgggatccagatctggacccagggcttggacaaaacccgtagccggtgtctggatttgggacccagccctggacccgaacccacacttggacctgaacctgacagagtcctaaacccgaaccgagactaggactcgaacccgaacctagaccaggtcccaaacccacacaataaccgggacctagacccagaatcaggatagggacctgggaaacagaa

SEQ ID NO: 284636 - DNA, 617 bp, Cannabis indica
tgatactgtattacagttttttaacagttgttcaaccttttcatttgtgtttctgtgttgtttttgtttcagcatatgaacaccatattctattaccttaggaaaaaaggtaaatattcttccgctgtgacgttgaattttgcgacaactgattgtctctttgatgattccatccaagctttgtaccacaaatataacaaagccaagtcaatgaagactaagatgtcacacattcacgctgcccacccaatagcgcattacattcgaggtttgcgcattccgtgttctaagccttggtatgaagccgatcatgtgttattcatcatcaatctaaggagggaaagtcattgggtgtttggtcgtcttgacttgaatgaagggattctgtttctgtataattctttgaggactgcgaaaatgaatgctgcagctaggaatgccatgaaggcttattctgtgttgctgcctttgttttttgatctacttggtttctggaagaataggtcacatgctcctgctttaggttctgaccctacagctcctttaagaatcgtggagattagtggtctgccgtctcagcagaaaaagtgagtgtttcttttaagtttattttatgt

SEQ ID NO: 284637 - DNA, 910 bp, Cannabis indica
cactttgtccaaaaaagagaaacaaacagtttgcaaatcacttgcaaatatgaaagtacccgatggttactcgtctaacatcaaaaacttggtgaatgagactgaattgaaactaatgggtctgaaatcacatgattgtcatgcgttaatgcaacatctacttccaattgccattagatcagtcttgccaaaaaatgttcgagagtgtttgacacatgtttgcattttctttaataggctgtgcgggaaggaattagaattggataagttagatgcattacatgaacatgtagtcaaaacattgtgcaacctggaaaagttttttccgccatcttttttcgacatcatgatccatttaatggttcatctagtgagagaagcaaggctgtgtgggccggtgtgggcgagatggatgtatccatttgaaagaaatatgaaggtacttaaaagttatgtgcgtaaccactatcggccagaagcatgtatggttgagtgctacatatctgaagaggctgtggaattttgttcagagtacatggctggagttgaggcaataggaattagcaaaccaagaactgacccagatgatgttgatagaggattaaggggcaaagggacaatggtgacagtgtccaagcttgaactagatcaagctcaattagtcgtgatgaacaataacgcagaggttcaaccatatataacgtaagtaccttttgtttgattaacattacttaagtcacgatgaacaataacttgatttaccttacttgttttacagtgaccatatggagctgttacaatcaatggttccaagaaatcaaaaaaataaacaaaaatgggttgcagaccaacatcgtcaaactttcattgggtggttaaggaataccattatatcaaagttgaacgaacc

SEQ ID NO: 284638 - DNA, 524 bp, Cannabis indica
agcagtggaactaaaaggtgaaagtcctaatactttcaaagtgaatggacagcgattaaagctctacttgggaggtcaatttgatcaaaccaagtccgccatgattctggcgccactttgaagatctcgatcaacgtctagctgagcgacgataaagttagcgctaattgggaggcaacccaagtgttcttttgatttagttgaactctttttaagtttactgttatttttcttgatgttcattctgtttcgttactgaaaaaaaaaaaatttttgtcagtggccgcggccatgggatgtatggccgcggccagaatggccttacagaaaggggctatttttcacgatttctagccgcggcgagggtatacaccgccgcggccagattggccttacagagagggtgttaatttcacgaaatctcgccgcggcgaggatacatgtggccgcggcgagaatggtcagaatttgtttaaaaaccccaaatccctaacatttcaaaactcacaccccattcaaaccct

SEQ ID NO: 284639 - DNA, 541 bp, Cannabis indica
tgattcctttaacatcacctagtgtccaagcgatggccttgttatgagctcggagtaccctcaaaagtctatcagtttccacatcagagagagaagctgaaacaataactggcagctttttatcttgacccaaaaactcatacctcaagtgactaggaagcaccttcaattcaagttctggaggcttttcagtagatggctttagctcttttggaactgctcccaattcctcaaaatatcttctgttcaaaggcccataggaatcaagccacttcacataccccatgacctcttgtccttcttgctccgtcaattcatcttcagttagacttagttcaagaggatcatctagcagctttttctcactcaccatttcatcaatcaagtcaatgaagaaacagttatcacttgcctttgggtacgtcatagcctttagcacattaaagaccacttcttctccttggactctcagctttaattcacccttctgaacatcgatcaaggcttggccagttgccaagaatggtctcccaagaataat

SEQ ID NO: 284640 - DNA, 557 bp, Cannabis indica
gcgattttgagttcgagtttgggtttgattcgggatggagttcgagtcctagtctaaattttgggttcgggtctagatttcagtctaagtccagatcatgccccgggtgtgggttcgcatccttggtcttggtataggttggtcggagtcccaagtttcgatcccaatctgagtctggattcagttctgggtttaagtccttggttctcatcctggtctgggttcgagttttggtctgggttcgggtatagctttgggtctgattctaggtgtgggtttgagtttgtgtcggagtctgtgtccgggtttgtgtctaggtctggaccccgatttgggtctaggttcggctccaggtccaatttcgggtcccgagtgcgtgtagaagtttgggtctaggtcgagatctcggtcaagatctggtctagcattttgatcccagtctgtgtccaagtctgtgtttgggatcgggtgccagatttagtttcaggtacgggtctctgttgcgttctgggtacacaaccgtgtccgggcccgagttccagtctcagtttgggtct

SEQ ID NO: 284641 - DNA, 477 bp, Cannabis indica
gaagttatcaagctcccacctggactccttcccattaagagcattgatcaccactctcgaatcactctccagaataagaaacttgacaccccgaactttagcttcctgaagggccagacagcacgccattgcttccccacagagagcattggaaaaatccatcttagaagtaaccacccagatgaccttgccaacgtgatcccttgcaaccacagccgcacacatgctatccaaccccactctgatgtcgcagttcagcttcaaccaatccgtggtgggggggggggggggcgccacacctccgtcggacacggtatggggcaagggagcaagtgagcatgatgatctgcaaaagaaaactgaacatagtcaatacatttaacaatatcagcaggacaattattatgtaccttgtcgttccgagtccgccatattgtgtcaactatcagcgatgcatagaggaaaacttcctgatca

SEQ ID NO: 284642 - DNA, 520 bp, Cannabis indica
gttctaattttggttcccaggtctagctgtgggttcgggtttggttctttgtctgggttctagtccttggctgagtcccaaatctagacaccgactggtggtgtgttccaggccccgttacctgaatcctgagtcaagagctggatcactgtcacgagtctcggtctggttctggttcaggtcccaggtcccatttctgtgtttgggtttgggatcgatactggggtactattctaaatcctgaccctagttctatgtccctagtcttgttccatgtttgggtttgagttcagattcaggttcgggttcggagtccaggtttggtttaggatccgggatcagctcccaattctggtttaggtctgatttgcagtctgggtcctggtccgattaccgttatggatctaggtgcactttcagttatgattccaagtccaagtcctagttcaagtcccgatcaactaccggttttagttccaattttgggtcacagggtacgggttcgggtccaattttgggt

SEQ ID NO: 284643 - DNA, 595 bp, Cannabis indica
aagagaaaagaaaaactcatattggagttgtcacaatactccaagatttttcttgccaaaatcttcttcttcttcctttgaatatttgccaatctttaaaataaaaatgctaaattaaaaccctaaataaaactctctctctctttttctttttcttctttttcttcatttttctctttggtgtgaagctctgtagcagccgcctcttctcaatttgtatcccgtctcctctgccttttcaattcatcatatataggatgttcttttttttttttttctttttttttttttcatttctatttttttttccaaatcaagccctcacttgattttcttttctcttttcttttttttttggcccaatctttctttcttttgactttcaactagtgaaataaaagcccaataaatatagccactcaagtgtaaaatatttgggctttgagtccatttcactttacatcaaatattggtggtcattagtgagtccatccatgaacattaatactcttcatttgaactaatgtgacaagcccaaaatatgcatttaaactttctacaaaataaaaaacacaacattgagattaaaacttat

SEQ ID NO: 284644 - DNA, 537 bp, Cannabis indica
tggactaagcagatcacaatctgactgaaccactataattctctgtcttactaatattttccagttttgttgattgttctcccattcccaatcgagtactcgccgttctaggttgaatactcgcacttgtcgtttctcttaaaaattctctttcgtattaataaaataatataatttggtgttgcgaaattcactcgacaacatttggcgccgtctgtgggaaacgactaaagatttcattcatttcaaagaacaatatcatcatggctggaaatcacgctaacagagctaacaacgggtccatcaacattggaatgatgaacgtacccctatctggagctggagcaccacctgtggacgtcattaacggcggagtagggagaagcaatatcagacctctcaacctattcccagaaacgactgaccctcaagttggggacacatccacaccacaagcaaccatgcactttcccccgttactccggcagtggtatccgagggaatgatccagctcaccactgatcaatatgctacgat

SEQ ID NO: 284645 - DNA, 914 bp, Cannabis indica
attacaccacataatgaaattttgaatttttttacttgtatactgtgggcgaaattttttttaaaaatactgtgtactgtggtaagtttaaccgttgttctactgttgtttttagttgttctgttttgtgttctactgttgttttataaaaatacagtatttttgaaaaaaaattcgtgtgacaatatttctgtaaaaaattaactaaaaattataataattttataagtttcccaaataattctaccccaaactttacagtaccactgctttggactttgcttagaaacaatactattatagtcaaacttgattattattgtatacctacatctttataaattgttaaaaaatagtgcatgtttggcatcataattaaaaaactgttttttgtttttaaaagtagaaaataaaaacaatttggcttgtttggcattgttttttaaaaacagttttcagaaaacaaagttacaaaaaacaagaattttgaaaactgttctaaaaactaattcacctttggtcaatattgtttttaaaaatcactaaccaaacatgacttgtgttttaaaaacttcagaaactattttttgttctcatttcttaaaacaattttttaaaacaaaaaacagaaaacaataccaaacatgctttcacttgcttactttttttttctttacttgcactatttggccacaatatcaactattttgtattgtgggaacaatactaagtatttgtttaaaggaaagttttaattatcataaaatttattaaatgaacttttaatttaaaaattttttgattaggaaaggtaaaacaatatttaagaatattgtaacgtgctttagactttagggtgttacacatctcatctaaattattagtacatgtgttatttattgatttaagagtag

SEQ ID NO: 284646 - DNA, 278 bp, Cannabis indica
tatgatttttgaagattggaaaaatatcaggggtcgtgcaacccatttacgcgcgcggaccacacgcgcgcagacaactagctcgaccgagctacctccgtcagacacaaatggctgtctgaaaacgtcccatgcggtgcggaagaggctgcatgcagcctcctacgccgagggacgtcggtcacgcctggctgcatgtgcgtgtggacagtatgcaatgcatactgtccgtaccacttgcaatttttcgttttgcttcgatttttcatgctatttca

SEQ ID NO: 284647 - DNA, 555 bp, Cannabis indica
agtagaataggcgcatgtttttaatttccaaattaagcggcattagtaagcgttcgttgatcgtgacttgatgtgccaactctgggtttcgaggttgttcagactagatggacgccaggcggaacaccaagaatcagggcaactcagtcgggtcaaatcaggtcaaggagctcagtttcccccagatgttaggtagaggtcccaggggcagggctcgtggacgggatgatgttaacccgtcacaggctgcccaggctgcccaagccaatcaggaagcccagaattgggaaattaggtttgctgaaatgcaagccaaaatagaggagcaagataaggagattcagagattaagacagtagggggcttctgcagtgcctgtgccagaagttccagtggcacttgctcctgttgtccaggccgaaccactagtagcggtgaatagaatggaacccctgtatgaaaggttctgcaagcaggcacctccagtgtttttgggaggtccggatgtcatgaaagctgagcagtggctatcagtgattacgagaatattaaatt

SEQ ID NO: 284648 - DNA, 1135 bp, Cannabis indica
taatcaacaaggtttatggaaatcgtgattcattaaaattttgcttctttaattaaaacttataatatttcatacaaaatactcgggatcccaattacaaaatactttacaaaagttaaataattctttacaaaatatttgtcgcccagcgactaactacaaaagcgctgctgtcccgaggatcgtacgctccagacctaaccgcctcgacatgtacaatcttcatcggctcgtcctcacagttcctcagccttggccttgcccttacctacacataaacatagcactgtgagtcgacagactcagtaagaaaagaataaatcataaaacatacataaatctcaggttatgatcagacgcccatacccctgaccacaaccctaatccccgtgtcccacacggtattgagtctcaaacgttcgtacgacggtacttttgacagagtaacagcctatactcggtacactggtcatactccagccgctagtcatactctagccttaccgatgtgttatagtatcagcctatactcggtacgctagtcatactctagccataccgatgtgatactgtcggatggtacgaagcctacatacatatctaatgtaatctaacaggcttcctaacatgcacgctaaacatgtaaatacatacgcataccgttatactaatcttacctcaattctgaattcaggtgtgccggtcaacctgagtggaacgaactgctcggcgaattacaggctcctaataacaacgatatcatcacacataagtgacccactaaatcacaactgggacaaaggttttaaaaccacacctaacatactgcaacttaacacaaaaataccccaaactagcagggaacaaactgcctgaaaacctgaaactagcacgaaacgacaagctgagaaaaactggttttcatccctgctgcaaaatctgggtaactggttttacaggcagtgttaaaccggttttacccagaaatcccacaaaaatcaaaccccaaatcaaaacgtttccaaactcaaccaaattttctagacctgctaattagaccccaatgaacatatttcaagtgataaaacaaagcttcatgcacaaatacaaaaaatgccattaaagctccaagctt

SEQ ID NO: 284649 - DNA, 880 bp, Cannabis indica
cacacatacatacattcgcatatatatcacatgttctacactattcttaccttgtttccgaattcaagtgagttggctgacctgaacggaaagtctcgtgctggatggatgccctaatcacataataaaaccaggtaaataacacgctaaaaccctaatccgagaaacccaaacctccaacttaaatttctgttattactaaatggaacttcaataccctaagaaacaaggaatcacccaactaatgctccgaaatggacacgaatcgagaaaatgaattgttcagggaatctgccaaaataggttaaccggtttgcagcaggtttccccaaacaattccaaacctactcaaaacatgtccaatcccactaaactctccaaaacacctataatgaccttccacaatatatttcaatcaatagaaactagaaaaacaccttgaatcaaaacatgccattgatgactcaagtttgagttttggtcatccaccacaacatacaactaaaccagcaacaagaacctatttccaacttaaattgaacatgaaaaatgaattccaattcatacaaaccctaataacccctaaacttcaaaattgcaaaaaaaagactaaattcaagttaagaactaaagagctatgatactaggcgttaatatttagctgtaaaaaaacaagtcatacgtcatcaaacttctcaattacatagtctaatatcaggttgaccaatttaacattgtaaataataataataataataataataataataataataaataaagatataaatacttaaagttttaagtttgtaagcagtataaaaaaaaaaaattagtaatataaatacccaatgtttataaaattgtaattttattctat

SEQ ID NO: 284650 - DNA, 779 bp, Cannabis indica
caactaactccagaacagatgttagagacaacaaatactgaacaaaagcaatatctaatttgccacacaaaacatgacacttacaatctcccccttggcaaattatgatcaacgacaaaccacattgaaatcatcaacagtttagacatacgcaatactaaaacacagccagtatccacaatattaacacaaacccccaaaaaaaactgtgtacaaagtttatatcaaaaggtaagaacaaagtttatatcaaaaggtaaaataactccccctcgatgatcataatcaatcactgctggaatatgagaccagaggagcaccaagaatccttgagtcaccaccatctggagcagagaccggagccacattggaaggctccccctgaacagctgccacatttgagggctccccctggactacagcagtgtgtgacgactccccctgaataccagtcccaatatcctcgccttgttgaaaccaggaatcaatctctttgtcaatgccagctgatgaagagacaccctgagcaccttgaacatcagcagagaaagggacgggagtggctgcagacatttgtggctgactttgtccagcagatgggtctatggcggcaggagatggagagagaccaggagcaggctgatgctggtcagattcatctgcagaagagctagacacaatcccctgagaatgaacagctggagaagcttcagattccttgagtacattggccatagcagtgagaacatcaatgaccgatttttcaaagcgacgttgcc

SEQ ID NO: 284651 - DNA, 564 bp, Cannabis indica
tagcttattcatttcgaattagcttaaataatatatcattcgatgaatggtttataaatcatctccttataatgtcattctatttccttttaagaaattgaatggcacacatgattatattcccggtattctatcccgaaatgatataaatcctcgatcttagaatctcctacttataaatgcttactttaggtaaatcatacttagagttagattagtagtggtggtcaaagctagaattaaattcattatacattgggtataaatgtaagtctttgacttaaaattttagatttcaaatagaaattttttatttctatttctagaatacaatacagttacactttcacaagtgattaatatccattttctgtcaagatattcaaaatgtatgttaaagtatggaatatgagtttaatattttgtgaccaaaatccacttggactattctaagaactctttaatgtaacaagacctaagtcatcaaaagaccacaaccacattcttatataaatctatggcatttgtatcttgttcatagtggttttgacaagatccttctct

SEQ ID NO: 284652 - DNA, 636 bp, Cannabis indica
aggaaatcaaaaacttactcaagagttagatgtctgcgttcgagcaacgtcaatccaacaagcagctttgatgaaggcacttcagcaaacttaaagccaagaacctctcttttcactctaaactctcttagcgaagaaggatgatgaaaatgagtttatgtgccaatactggttgatatttataggcaagtcacgaagaggggtaatcatctcaaaggaacctcagacgcctcagtttccctccttaaaagcgaatatgggaaatccaaaataatcaagtgcagccgtcagctgtggagagagaaaataatatttcgaaatattaattgtcagagcatttattagccgaaaattgaagggacgcccaatcagcctcacatcgagtctcggaaggtcgcgcttgacacgtgtcgccatctaaaggcagaagcagctcaagtgaagtctacacgcaacttcggaagtcccgtacagactgggggcaaatgttatcccaatttttgcactctgatgtggcatcgcataaatggtgacacgtggaatccacttggagcatctgctcgggaagcatagtctgagcaggatgtctcgctaacatgcccagagcaaagttttcagcaatccacactgagcaac

SEQ ID NO: 284653 - DNA, 490 bp, Cannabis indica
gtttttagtggagaaaatattgtatcttgacgtattatggtataaatctaatttctactaattttattaatgtagattgctttaatttttattttataaattttttagggtttttctatattattaaatatgtattatgttgtattgaatatgtattgtgtgtatatatattgtgaataatgtattgtgtgtatatatattgtgaatgaaaaatgtgatataggagagtatatatgtatgtattttgtgttgtattaaatatgtattgtgtgtatatatattgtgaatgagaaaggtgatataggagagtattttatatattttatatgtatatattgagtattttaaactaatagttttgttaattaaatattgtgatgagaatgagataggaaagtattaaaataaaagtttagaaattaatttctataaaattagtttagaaacaaaagtttagaaattaactatattttgtgtcaatttttttttt

SEQ ID NO: 284654 - DNA, 742 bp, Cannabis indica
gtgttgttgttgctgttagttgttgttgttgtttttgtgatttaaaatgctgaattaagtgagttagacaggttgaaatgcatgctagttatccttgttctagtttgagaatttttggttcaaaagctatggtttttcaaagtgaaaatgtgagttttgttgctgtgtttgttggggtcgatttcctatgttatcagaagtttttatttgcatgtttaggaagatttgagctggtttgaatgcatgttagtgatgtttaaccaagtttgagttttgaactcaaagcttggagctttaatggtggattttgattttgtgcatgaagctctgttttatcacttggaaaatatttattagggtctaattagcaggtttggaaagtttggttgagtttggaaatgttttggttgtagatttgttttttgttggttttctgggtaaaaccggctcacttgttgtaaaactggttacccggattttgcagtagggtgtgaaacaagtttttctcaacttttcgtttcgtgctagtttcgggttttcaggcagtttgttctctgctagtttggggtatttttgtattaagttgcagtaggttaagagtggttttaaaacctttgtcccagttctgatttagtgtgtcacttatcggtgttttgattgttacggtttaggagcctgtaattcgctgagttgatagttccactcaggttgaccggcacacctgaattcagaattgaggtaa

SEQ ID NO: 284655 - DNA, 457 bp, Cannabis indica
gtaattatttttaaatatgtgattatttataaaaaagaaattaattttttaaagaaagttatgtaaataataaattaatattatttataaaaatatttattaaaaatattaacaaacattagaataattagaaaaaacttttttattaaaaaaaaatatttttttaacaaacttaaatttaattatttatattaagttaattatatttttttaattttttaaataatatgataattaaatttatttgtaaatatatttatgtaattattaaattgatatatttatttataagtaaattaaatattttataagtaattatttaaaaaaaattagagaaataaaatgagtttatttaatagtattgaatataaatttaataaataaaatataattaaaaaatgcgtaaatgaatatcatgaattaataataaataaaaaataaattgataactaatatt

SEQ ID NO: 284656 - DNA, 457 bp, Cannabis indica
gctttggtatggtgggacatggtgtccctgactcaggatgttacaacgatgacctgggagaagttccaggaactatttaatgcaaagtattacaatgaggcagttagaagtgcaaaaagaaaagaattcacccagttgactcagaaagaaaacatgagtgttactgaatacacgactcaatttgatcgcttggcaagattagcctcaggaatcgtgccaaccgatttcaacaagaaagagaaatacctggacgggttgaatgtgaagatcagacatgacttaatgatcactactgatgacaaccccacctatgctgatatggtggataaggcactgcgagctgagggcgcagtggagtgcaacttaaagtatcgagggactccggttgttggtggggctcctactcctcctacatcaggctttagtaggggaggtagtggctcggccactgatcaga

SEQ ID NO: 284657 - DNA, 749 bp, Cannabis indica
gtatacattttgtggagtactcaaaatacccttccatacattctcccaacagatttccttctcttttttttttttattctccttaaaccaattcacattaaaattttacatttaagcatacatttcacttcaccaacctactacaagtttgtgcaaagcctttattgggcgaattgctgcacttaacctattcgtctccaaattcatcgacaagtgtggttccttctttaatctactaaatttccttctttaatctactaaatggatgcaatgaggcttgaatggactaatgaatgcgaacagactttcccatctctcaaatatcacttagccagtgaggaatatatggtgacaaattattcatttatttcgagaatgcggccagtgttgcgctagtgcgtgaggaagaagggatacaacacctaaggggtgtttggtatgagggtttattagcatgggaataggaaaatgaaacccaatctgtgtttggtattgattttttaaatttttattggagtgcttggattgtcgtggcttaagatggcattgatttgggggtaatgtctactccttccaatctttgagtttaatattactggaatagcaaaatgcggtttttgtttttttttttacacgttgagctctactaaattttattaaaatatttgcatattattataaaatattagtattatgtaatattataatttagagaaagaaaatagagaagagatgagaattttctgagt

SEQ ID NO: 284658 - DNA, 335 bp, Cannabis indica
ccaagtagcttttgttcactcatgagttgtagccctctttcactaatgtatcccaaccttctatgccataggacaaccttagtgtcttctgtaacatgctccttggtgttgtggcagcaagctatgtggcttccttgcaagtagtatagaccaacatttttgtgtcctttgatgatagtcatagaccccttggccaatttgattgtacctacctcaattttgctaacaacaccaagatcatcaagtacactaatagaaatctaacattagttaaagttctaataatgccatcaaacatttaaagttaatagaacctgaaccttcaatgttgcatg

SEQ ID NO: 284659 - DNA, 663 bp, Cannabis indica
ttttcgtttcccccttttttgaacattttattgtatttccagtttctacgtttttgtttattctactttgtgaaattttagggtttcgcttttaaaatttcgtttgatgttgtttgattttttaggtctttaattttgtttgatcaatttattttgttcttttctgggtttggctttttaatttgattgtatttactttcgttacagtgtttgtttgtgttttaggttctgtatgtgtttgtaatttattgttagatatttttgaaacttctgttttcgttttagtgtgtgtaatcagttggttgtagtttcctcttagtttgtttatagtttaatatgtttatgtttgatgtgttttgggatttttattaggtatagttgtttgctgttagtttttaggtatcaatacgatttcagatgtttgcagtttatatttgtatggttgtttctgtttgggagtttgtttttagttttgttatagttttattatagttgctatacttgattattgacaatttatatttattgttgccattttggttatgttgcaggtctgggactacaaatttagtccctctgattattacagatctaaatgtgtttgcactagccttttttctgttattgataatattaagaaaactttatctgtcaatttactgt

SEQ ID NO: 284660 - DNA, 542 bp, Cannabis indica
atttggttcaagtcaagggtcaagaaaaattgtattcagggaagaacgtatctatgtccctgtacttgttgcttctgcttccgctgctaatcctactaatgatcctatgattgaacaagttccaatagaagctcatggtgaaccttaagatccagtacaagatgaaaatcttgatttgggggacgatgaggttgtggcgagaagatcacaaagagcctgtaggcctgctattcctgatgactatcttgtctatatgcaggaacatgagtttaatgtgggagatgattctgagccagccagttaccaagaagcagtgaatagtcctaaatctgcattgtgggtggatgcaatgaaagaagaattgagttctatgtcacaaaatgaagtttgggagttggttgaactacccaaaggttgtagacccatcaggtgcaaatgggtgtataagatcaaatgtgtctcaaatgggcaagtagagaggtgcgaggctcgacttgtggctaaaggctatagttagaaagagggcattgatttcaaagaaa

SEQ ID NO: 284661 - DNA, 853 bp, Cannabis indica
tccacgagtcaatcttattcagtatttctaataatcgttttttaggaactctctcgtatgtagtttttttcatccctttttggctcttgtttgtcactatttataattacatagtggataattaattacaaagttgaccggaatatgtttacaacaattatccctaaaatcgtgggatttgattacatatcacgtagtgtaaatgcggtttatgatttaaaaattatatagctgtgatttttccgcttttactgggtcaaaataatcgtgtattaaacacatctttagctgttgtatctggagatgtctcgacaaaaacttggttacagtgatcccaacagcgagctgaggccattcttctttccaaggtcgataatgtatgtctggtgtcgatcgcggttcttatttataaagaatcattctgactcgccagggttgtaagcctcgttaccactagctggatgaagctataggaagtcttcctataacaagacggtcacctcgcttacttgttcttgagccgatctgactttcacacttagtttgttcattgtacgctaaggactttcacattgatacgtatcactatttttggtgcctcgctatttgcatttagcgacatatggtttcttgctaatatactaaatgtcagtttgtacattgattccttgcttaagaccttacagtcagcgggttacaaatatactttgatacttacgtaatcaatgagttattccataaaaagcaatggcaccgattcacattccatttatcttgacacgtgtcatccagccaaatttttgggataacaattgccccttaaaaagttctttttagttaaaagaacttttta

SEQ ID NO: 284662 - DNA, 676 bp, Cannabis indica
taattgtactttccaactagtacaatttccccctgttaagaaaaagtaggccgaagtagatcttctagtgtccctgtcccccgcataatctgcatcagtgaacccttcgatgttctgatgtgtttggtgaccctgatagaccaatcccaacttagatgtaccttttaagtatctcataagccatttcatggctttccaatgctcctttccaggactagacatgaacctgcttagcacactgattgcataagcaaggtcaggtctagtactaaccatcaagtacattatggaccccactgcattagagtagggaacattcgccatctcttcttgttctaacttggtcttagggcacatagatttagacataaggtattggttggtaatcggttgtgaaacaacctttgaatctttcatagaaaacttttctatgatcttgttgatatagtcttcctgatgtagcatgagtttccctttgcctctatccctttgaatgttgatccccaaaatcttagtagccacacctatgtccttcatttcaaattccgacttgagcaaatccttgaccttgttgacatttgacctctccttgctaattattagcatatcatccacataaagtagcaagtaagtgactttagtaatttccgaacctttaaaatacaaacagtggtca

SEQ ID NO: 284663 - DNA, 461 bp, Cannabis indica
ggttcatgttgaactaagcattgggtcgcggttccacatccaaattttgagaattcttagagtctcccacatttggtgttaggtttcatcacaactgttggtgtggttcgtatcaaatgcactcccctcgcatcctcctccttgaatgttgccaagtcattctttcccttaaagctttttggtggcctttgttctaggctccagacttggggctcatgcctcgcttcgtggtcatacctctctctcttcccttgtagtgttgcccccaacttctgctcacccaatgactgttcagatgtcccttataacttctagagcctccacattatactctcactgacgcaactcatttggcctttaattttcctttcggtatcctcctaagtacccacgttgtatcaactcttcaattttgaccttaagatgtttgcactcttctatgagatgtccagtcatttttg

SEQ ID NO: 284664 - DNA, 567 bp, Cannabis indica
gcatagaaaaaccataactttaatcaacttaactatcaagcatcacaagcagcttaattaacctcaaataaacaagtataaatctctgcaaacaacaacaaaaaatcacagcaagaacaacaacctaaactaagcatgcattacaccatttttcatcaaaattcaataaacttaaagaagagatgattagaagctaacctagcttgatttgaacaccaaagggagttgaaatcacaaggaaaatccaaattttcttgctgcaccaagaggtcgaaatggagaggaaaagagagagagagttttttgagaaattttctaatttttctttctaagtttggaaaaatgaggataaatgccacaactcagtttacttcagccaaacaaataacataataaacgcatatttctcaattattaagtccactaaaggacaaactaataatggggcaaaatgaccgttttgccccttcacactgaaatcacatatataacactaaaggggtatttttgggaaattctaaatccccggcccttcccgacattcccaatgtctaataaattgtccca

SEQ ID NO: 284665 - DNA, 461 bp, Cannabis indica
cttaattaacctcaattaatcatattaaacctctgcaaacaactacaaaatcacagcaacaacaacaacttaaagtaagcatgcaaacatcatcttttcatcaaaattcttcaagaaactaaaaggaagagctacaaggatcttaccagcaacttgaggtcaaaatctatgctaaaaccagcttgagaaccaaggaaaacaccactttttcttgctgctcaaagggccgaaatagagaggaaaagagagagagctttttgagaattttcgaatttttctaagtttggaaaaatggaaataaatgcaacataacccttttacttcagccaaacaataacatagtaaaacgcatatttcccaattattaagtccactaaaggacaaaataacaatggggcaaaatgaccaatttgcccctccatgctaaaataacataagtaacactaaaggggtattttggg

SEQ ID NO: 284666 - DNA, 697 bp, Cannabis indica
ctgttttattaaatgataaaatggaccttgtatgttctaaaatggtacaaataggacccttaacttaatttttgacaacttttttttttaatataaccaacttgaaaatacgaacagatatagaaaatgtaaatagttttgtcataacacttttagatcggattattattaaattttattttgacaaaaaatcagttcagggtcctatttttactattttggaaaatacagggtccattttgtcatttaacaaaacagaaggtccaatcggtaacttttgcaaaatacagggtccaaaatggtatttaccatattttaaatggatttgtggagtgtggcaaaaatatagaatccaaaattaataaattagtataacttaaaaaaattggacttctacattctcgaaagagttacatattaattgtttttgtaatctttttagactaaactaattcattttagagaaatacaagtaagtgaccctatttttaactttatagatagttaatgtccattttttaaaataataaagcaaatgtcattttttactttttaatacctaaaatacccttcattatataaaatgtattatatgttttattcctttaatagaaatgatgaaaaacaattgatcaaaacctctctactgaatttttgtcaactattttttcattatataaaaggtattatatgtttt

SEQ ID NO: 284667 - DNA, 640 bp, Cannabis indica
cgatacacaccttaaataaggcatgctgagtcctcttcggtagagaatttgatccatcattacataacgatgagcctgatactgaatctttcgagacagtgccctttcttggggcaactcaccttttgttatgtattctatgatggggaccatccagctgggttcttgcccaaccgttattgtggcctcttttattttgatgcttggctctgccaagcgttccactggtactacccccagcccttcgatttcactatctgaagctaacttagccagacagtccgcgtgagcgttcttttcccgggggattctttctattttgtagtccgtgaactcgtggagcagctcccggactattgttacatacgcggccattcgctcgccgcgtgtttggtactctcccgatatctgatttacgaccagctgggaatcactgtagacttccactcttttggctcctacggcttttgctaatttcagccctgctattaaggcttcatattcggcctcattgttcgaagctgggaagtcgaaccgtagggccgcctggagtcgcagtccggtcggggatatcattgccactcctgctccggatccattttcattggaggctccgtccacaaacactctccatgtgggg

SEQ ID NO: 284668 - DNA, 354 bp, Cannabis indica
atgttttggttcatcttatcaattgtttgtctatttgatttataaattcatcaaaaccctttttgcatacttgatccagtttattgtgttgtcaacacagtggaaagtaaacatgaatatgtgaataaagattcctagatttatcagaacacatggttttactaatatactaatctacaacagagtttacttgcatttggataaaatgctatgttctttccagagcattggttaaagtaaagcttgggttgggtgcagtgagtatgtgatacgtacattttgggaacacggtactgcaattgagtgggagcgcgaatataaatatggaatctatagcttctatctggtgaatag

SEQ ID NO: 284669 - DNA, 778 bp, Cannabis indica
attgatcttttgcaccagaggctcggtcatatcagcgagaaaggacttcaaactcttgctagaaagaaattcttaccgaatttgcaaggtacgcctcttaaaacttgtgatcattgctttgctggaaaaacacatagagtttcttttcgtacacgtccacaatctagaagatctaatgttattgatctgattcacactgatgtctgtactatgcaaactagaactcttggaggtgcactttattttgttacttttattgatgaccattctagaaaaagtttgggtttttgctttgaaatctaaagaccaggtgctcgatcctttcaaagaacttcacgccaagattgaaagagaaacttgaagaaagttgaattgtgttcgagcagataatggtggtgagtacaggggtccatttgaatactattgtagactccatggaatcaagcttgagaagtcagttccaaaaactcctcaacataatggtgtggcagaaagaatgaacagaacaattgaagaaaggattaggtgtatgctttcacatgccaagctacctaagtccttttggggggaggctatgagaactgcagttgatttgattaacctttctcctttagttcctctgaacggtgatgtgcatgagagagtatggagagggaaagatgtctcatatggtcatttgagagtctttgggtgcagagtatttgttcatattcctaaagatgagagatccaagcttgatgataaggcaaaaccatgtattttcttggggtacggtcat

SEQ ID NO: 284670 - DNA, 550 bp, Cannabis indica
catgtacaatcttcataggctcgtcctcagggttccacagctttggccttgcccttacctacacatgaacatagcactgtgagttgacagactgagtaagaaaagcataatcataatcatacataaatctagagttatgatcagacgcccctacccctgaccataaccctaactgtcgcgtcgcacacgatactgagtcctgaacgttcataagacggtactattgacaagtaacaacctatactcggtacactggtcatactccagctgctagtcatactctagcctgtaccgatgtgttacagtatcagcctatactcagtacactggtcatactccagctgctagtcatactctagcctgtactgatgtgatacgtcaaatagtacaaaaccaccaaccctagtatcagcctatactcggtacattggtcatactccagctgctagtcatactctagcctgtaccgatgtgacacagttggatggttcgaaaccaacatacatatctaatgtaatctaacaggcttccaacatgcacgctaaacatg

SEQ ID NO: 284671 - DNA, 599 bp, Cannabis indica
attaaataaaaatcttatttgttagatataagttttaaatttgaattttaaaacttagggtttttatactaaacttaacaggtggtcactttgtagcttaattttgaccccaataaagttcaaattacaataaatctatttctacataactgatagatctttgaattatctttccaacgccactgaaatcacctcaatccgagctctagaactccagatatgatcgttttagtaaaacagtttttaatcctgcgaatttatccaaacctacgaatttttaacattaattctataataatgttatttgatatcacttataccattaattaaaatccactaaataatttataaaccctaataaactttcatattgggctttaattaaatgattacctaccttgtaaaaataccataatattttactttcgtagttaatataactttaactctctctagaaaattggtacaataatctaagcaacaatctcaactcactaacaacacaaatatataagataattatcctcacacaattaatatcccaaggagagaaaaaaaaaataatactattttaatctggatattacattctaccctcc

SEQ ID NO: 284672 - DNA, 541 bp, Cannabis indica
cattacttaagctatcacctatcaaagattaccctctctttctcatctcttgctactactccctatttcgtcttttatgccataatattcattgcttattacctcaccccaccatcaataccatcatccttcatcattttctttatcatcatttttacaatttcctttttatcatttcaccatcctctcaaacactattcccaaccaattatttcatctccatcattcttgtcatactcacatatcaccaccaccaacctcttacttatttatatatagatactccactattatttacttatatatatcaacatcaccaccaccattattttcctaccagatttcctttttaatctaaggtatcattctataattttagatttgtagattcaatgttaaggtctcgtatatatatatatatatttatatatacctttgtaatatgttctaattaataaatatgaaatttaggtttttcataagataatttttggttctcaaggatcacttttgcaatcaagctaggatctccacattcgag

SEQ ID NO: 284673 - DNA, 684 bp, Cannabis indica
aagtcaagaagtgcaacaaatgccagagattttcaaagatagcaagagcttcgcccaacgagctgacacaaatgcaaagtccgtggccctttgccatctggggaattgaccaaatcggacagttacctaaaggtaaaggtggagtgcagtacgcagtggtagcagttgactactttaccaagtggactgaagccgaaccactcgcaattatcacatcaaagaagggtcaagactttataatgaagaacatcatatgccggttctcactaccacacaaaatagtttcaaacaacggcaagcagttcgaaagtcaatctttcactgatttctgtgcaaaccatggcatcatcaaaagcttctccgcagtggcacatccccaagcaaacggtcaagttgaagtagtcaacaagaccttgaaggatacactaaagaagaaacttgaagatgctaacggaaattggccggaacaactccccgaagttctatggtcataccgtacaacagaaaaaatagcaaccggtcagacatcattctcaatggcgtacggttatgaagctatgctgcccgtagaactcgagccaccatcccacagaaggttgatgtacgatcaaggtaccaatcacatactccttacagaatcacttgatgaaatcgaagaaaaacgagcaactgcaaacttaaagt

SEQ ID NO: 284674 - DNA, 536 bp, Cannabis indica
attaatataatttattttttaagactacttttgtatgatatatatttatatgtgtcttaatatacgtatttttatggtatccaataccatattaatatggaactttacaagttgttttcttatattatttattaaatcaaaatatttaagactcgatattattttacaccaataacggtagtttacttttcacgacaaaatatcttatttttagtcacaataaaatttgtgactaaacataaaaaagttgtggctaattataaattatcattattgtgttctgactgaaaggtccatgactaaaagtattagtcacaaaaattacaatttgttgtgactaaatgtgtttttagtcacaatatttgttgtgattaaaattaaattagtgacaacttgtaactaaatactatattgtagtcacaagtaacttcaacaaatttatgatgtgactaaaagattgtcactaaaagtaacagtttttatagtattttttagtacttggcactataaggcgctctttattatttttcattatt

SEQ ID NO: 284675 - DNA, 651 bp, Cannabis indica
gccattatttatggctttggcgccttacaaggctttagcacctattatatggttgggcccctaattatttagggtagtttgtttacattttcacgtttttcggtattgaatgtataagaaaattttgacacattaatattttaaaattaataagttatgcactatacagatttattagttaaggtatgttttaaagaatatttttaattgaaataatgcttaagagtgtttactttaaacgctaattcctattagctatcttttggtttatattttttaggaattttcagcataaaaggaaagtgtttaaaattttagtattgagaatctaatattataattaattaagtaaattgaagaataagaatcttgaggatcttgtaataaagggaggtggaaacactaatggtctaatgagaatatattggttcagatatatttgggaagtcaaatattataaaatttggtttgttgtcaatattttgggaatgtaccaaaattattatatttatttgtatttttaaagaatttctggatgagtggtattagtttttgatggaagaaatggaagtacaaatttgatggatgaactgcgccattgtttatggatttggtgccttttaaggttttcacgcatgatttatggctgat

SEQ ID NO: 284676 - DNA, 683 bp, Cannabis indica
tctgattctaggtgtgggtgtttgagttcgggtccgagtctgtgtccaggtttgtgtttaggtctagaccccgatctgggtctaggttcgggttcaggtccaagatttaggtccaggtccgcgtctcaattctggtctgggtacacgactgtgttcggtctgtgttcagttctaggtctaggtccaggtcctagtcacggtcctagtcttgttctacggtcctggctgggccattcttattcaggttccaattttggctcccaggtctaggtctgggttcgggtttggttcttcgtctgggttctggtcctagtttgagtccaagttaaacaccgactactggtctgttccaggccccattactcgaatcccgagtcaagatatggatcactttcacgagtctcggttctattccggttcaggtcccaggtccaatttcttagtttgggttcgggatcgagactggggtgcggttctatgtcccaaccctggttctattatgtccctagtctggttccatgtttgggtctgagttcaggttcgggttcgggtcccgagtccaggtttgggttgggatctgggtccggctcccaattcgggtctaggtgtgatttggagtccggtcctcgtacggttacggttctggatctacgtaaaatttaagttatgattccaagtccaag

SEQ ID NO: 284677 - DNA, 928 bp, Cannabis indica
agatgtagctcgtctataatggaggggtaggagctgactgagatcgcccaactccaccggatgtacataattgttgtattggaaataaccgctatctcgaattagatttgcaaagagctcgctgtaaggcttcaaatatgactccatggctgcctcaacggtggcaccgatatcagaatcatatacaatgatctcccagttctcgatatccacctcaactgccacccagtggcgctctttgggaaggtgcaacacaaagtatatgtactcctgcttctcccaacatggcaagtatctgtgcggtatcccctgcacgtaactcataacgccctcatcccatttcatcttgctcctgtcaccctcatacatattccaaaacatggaaaagaactgtggagcagatgtgtccaaaactacaccttttcgagtgtagacttctgggtacagggtccgtcttcttctcaataagtgcgccatggcatcaatttgctgtgttccaaaagaaaacagtaagacagaaatcgcataaaagtcgcacaaatatcgcaggaaatcgcacaaaccaattaccaaaattatttcgaatgtcgcacaaacatcgcacagtaatcgcacataagtcgcaaaaaatacacaaatcactgaataataatcgcacacacatcgcatataaatcgcataaaagtcgcataaccagattaaacattaagtgcaaatatagcatataaatcgcatgtaagtcgcacagaaaatgaaaaacacaataaattaattctgttaagaaataacttacagcatcgtcgagccattcgttcagcaccatcaatttcacgaaccaagatctagtggcttcgccagtgtgaacatccctaggacggccattgtccctagcataagtaatccacttctggaaaaattttacagccgg

SEQ ID NO: 284678 - DNA, 744 bp, Cannabis indica
aatacccctttagtgatttttttatgtggttttagtgtggaggggcaaattggtctttttgccccaatgatgttttgtcttttagtgagtttattaaatggaaaataaaggtttattttattaatattggctgaaatgaaatgttaataggtggcttttatctcattcttttcattttataaaaaatcacaagttagaaaaagttagaaattttcaaagaaaaagctctcaagctctctctcttttcggctgggtttgggtgtgcatggagttggattttcctttgattttcagctagtttcaacctaaattcaagtaatcttttgttgaggtatttctttattgatttccttgccttgttttcttgagatttttaatgaaaaagttgagtaatgcatgatgtttttgagtttgttgctgctgtagtttagggttgttttctatgattttctatgtttgaattgattggaattaagtaggttttatgcatgctagttacttggttcaagtttatgagtttttgttcaaaagctttgattttgaaaatatatgtggaatctgttattacttgctgtagttggttgttttcattttcagaggcttagttatgcatgattatgtaggtttgatcaggtttgaatgcatgttagagggatttagccaagcttgagttttgaactcaaagcttgaagctttaatggcaattttcgtatctgtgatttctgggttattttaatgctttga

SEQ ID NO: 284679 - DNA, 810 bp, Cannabis indica
atttagagagcggtggtgtgtagatttgttttaccagaatttagcatgaacaaatgtgtttttttttatttggtatttattaagataacaatgtaactggttttttttattggtatgtttatgtttttttaagagttcatacaaattttacgcctttctttcatgcaacaaattataataattatgtaaacataaaatatcacaaattctaatgtttaaaatagtccaacattaattcaataacaatacataatagtccaacacatcacgatacaaataaactaaaataacatttttaacctcggtagttgcaagtgcttctgttgtgccccttggcaccgcacttgctacaatttcgtgatttgataatcctttcaccgttacaagcagttcggttgttcttaattcttccaaccttttgcttcttgggtcgccctactggttgcttctcaacaggcactccaactgtcatgttcttgatgtcatcaggcaattcccaatcatcctcgtcaccaactggcataattgttccttcatatgtcctcctccaatattcagtcgtgtaatatggcgagcatagtgtgtacgcgctaatacttcgctcctgagatgcagcacatgcatgaggacaaggaaacttcatgcactggaacaagccgcaagtgcaagtatgttcctgcaagtccactacgccaccggtcataactgttcctccagggtgaacctgcaacgtgtaaggcccgcatgagtcaacgttcaaataccgacctttttcaaaatgcaatgtcaagtcctcctccatttctggtg

SEQ ID NO: 284680 - DNA, 499 bp, Cannabis indica
attgttaatgtgcaccgcttaggtgaggtttcagaaccccaaattttaaatatagtcatattatatgtcgttggactcggttttgaatgtagaatgcgatgatgataattatttaaccatttgatggtataggtgagagtaatatgtaagattggactaaacaattggagctcgggacttgagagcttaagattgtcttttggataaagtttaacgacttgggagaggtagggactcaacttgattattggacttgatttttatatgtgttgtataacattggacatattccaatttttatgatttacaaattgtttgaaaaattgaaaacttaatctgcatatttttctggactgttctagggcactgagtgccaaatatatttttgtgtgcaaatatttatgcaggttatgatttttgggtttattcaaaatacagttgttatgctgccaaattttttttagaaaataaaaaggaatatgttctttgttatgattat

SEQ ID NO: 284681 - DNA, 615 bp, Cannabis indica
tgtctctttttataaaaaattaataaaatgtctatttagttaaaaatttgatgatgaaattacaattataaccttgaataattaagtgtttggtatagttattttgcacaataatatatcatttttatgtacaatagtatattaaaaaaactaggtagtatatattagtttaagattgtagtatattaatttaatgtgctatggtatataatgaacgaaatacggaaattaaaaaatgtggaatattagtttaactttgaggcatagttatatttcactaggaaatatttatgctcattagtatatcatgaaggaaagaaaaagagggaaaaaaaacatgtggaatattaaattaagtttttggggaaaaaaatctcatttaatagtatagtagtttaagtttgtggtatattcatattagtcttaggtatatcgtttgtatgtgatatgatatatcgtgaaggaaagaaagaaaaaaaattaattagtttaaatttgacgtatatataattttcactacattatatatattatgcattacattatctcattaaaaaaataaataaaagacaaacaaaaaagaaacttataaaaaatttaagctcgtggtatatt

SEQ ID NO: 284682 - DNA, 500 bp, Cannabis indica
ggacaaaggtgcttaaaccttgttcaagcctttggtgatccccctttgcttatttgtgttcttcttcatcttctattttctatttattttctaccctcttctcctctttattatatattcatatactatatctcttctatatacactaatatatatacactatatataccatatatcatacatatatatctctgtattatatatatattttctcttattgcttttacatttatgtgtatattttactttaacttctaactttgtcttcattatttctttctctttatttgtattttgtgctttgggattgtaacttttatttaatctatagtccttgtaattttgttgcatagagttgtaattttcttggtctctttgttcatcttattgttattcttgtattgatatctcatattttcctaacaatcaaaaagcttattgttttaaatggaaggagaaacaatcaagatgatgaaccaagacttggtaagattggaccg

SEQ ID NO: 284683 - DNA, 369 bp, Cannabis indica
ctactctattcactacaagtgttacgaaatttagaagagaagaaaaaagagagagagaggcgtgtggcttttctgaaagaaaccaatgttcaaagttgtgtgtttcctgaagccaacactttctatttatagaataccctctaggtttaggttagaattgtatggcattaaaataatggaaactataaatggtatttcttgtgcatgtggccggccatacaaagggaattgggcctcactttgcaactttcccattttgttattttccattcccattttctcaaaaatgccaattttccaatttaaccttttaaatgccaattctaattatttaataacttgaaaaaaattattaaataatattgccat

SEQ ID NO: 284684 - DNA, 853 bp, Cannabis indica
caatatgaccatagaacttcaggaagttcttctgtccagtttcctttggcatcttcaagttttttctttagtgtatcctttaaggtcttgttgattgcttcaacttgaccatttgcttgaggatgcgccactgcggagaaacttttgatgatgccatggttcgcacagaatcaataaaggattgactgtcgaactgcttgccattgtctgaaactatcttgtacggtagtccaaaccggcagattatgttcttcacaataaagtcttgaactttctttgatgtaatggttgcgagtggttcggcttcagtccacttagtaaagtagtcaactgccaccactgcgtactgcactcctcctttgcccttgggtaattgtccaatcaggtcaattccctaaatggcgaagggccatggactttgcatctgagtcaactcgttgggtggagctcgtggtatctttgaaaatctctggcacttgtcacacttcttaacataggcttttgaatcttcaatcatcgttggctagaagtaaccttgccttagaattttcttggataagctttgcccggtggcatgatttccacagaatctgtcgtgaacctcagataggagctgtgcagcttcttcttgagtgacacatctgagcaatggcatcgagaatcctcttctgtacataattccctctactatgatatatcgtgcagctttccttctcatttttcgagcttcatttcggttatctgtgagtttcccagagtcgaggcaggctgctattggtgtcatccagtttggggatgtatcaatcatttcgatttcttccgtgccaatgatgctaggctcttcgaggaaatg

SEQ ID NO: 284685 - DNA, 519 bp, Cannabis indica
gagttttagggaaaaactcttgtcttttgtggaaaaaattaagaaaaagaaaaattagaaaaatgctttgttcttgaatgctctctctctttccttcggctgaagcaaaccagggcaaggttcatcattttcattccatttttctgggaattagctagaattcaaggaggtttcaactaaggtaaagccctagacctttgtttagttgtttttaagctttttatttaggttgaatatatgatttttggtgttgggagctgttaggttttgaattgcttagggtttgaattctggggttaggttgagttgatttgagtccctatctattgtttttgatgcttgagaatggttttaagcaagcttgagttttgaaactcaagctttgagctttaatggcataaattgaattattggtttgttctgtgatttgttggttggaaatggatgtttatgcattgtataggtatactggagagtttggtaaagtttgggattgaattgaatcaagggggatgtttt

SEQ ID NO: 284686 - DNA, 692 bp, Cannabis indica
tttttttcaatattgaaacaaaggcccaataatgaatatcaatttatttggattttgtgagctcattccactttgatgatagttacttcatattttgacccatgagacaagttcaaaatgtacatttaatctttttacaaaaatacacaacattgagattaacatttataaaatgggaaactaaactaaattgataaaatattacaaaatttaaccaaaactaatctaaaaaatattaaaattgatatttatttaaaactaaacaaaaccaaataaaagtcactaaaataaactaaaaattcttgagaacaaaactaatttaatgcccaaaaagatataaataactctattttcatagagttatcacaccccaaacttaaaactttgcttgtcctcaagcaaaaagaaaaaaataaactaaaatcaatgtaaaataggcaatatgacactaaagttggtgatctccacatttccttaaaggttgattaatgaacatagcttagagaaaaataaaaagattgtccaatgattgtgaaaaattcaagcacaagtttcattccaatttcgattactccaagtgtgtgtgatgccttttatcaaaatattacttgcaatttagatcaatttatgtaaatatgaattaagcacaaaatctctaaaatgacaaagtctcataggtttatttttcatct

SEQ ID NO: 284687 - DNA, 623 bp, Cannabis indica
acatgctccaacccacgaaataattacacccataccatatctacctcaaaagtactcattcattatgttatataaccggttctattttagttatatccggtttgaattatttcgtgttatttatttttattcattataacattgttatagaacctgttctaatttaattataattagtttgagttattcattatgttacagaaccgattatatttcaattacaaccggtttgagtcattttgtgttatttattttcattcattatattatagaaccggttctatttttgtttatatttgagacatctatttcttgtgacttttccagtgactttttccggtgatgatgactttttcggtgacttttttcagcgacggtgacttttctggtgatactaactttttccggtgacttttttcggcgacggtgacttttctggcgatactaactttttccggtgactttctcggcgcctgtgactttttcggcgccgatgacttttccggtgattttttcggtgccgacaactttccggcaaaacttattattgtttacaaatatgggatttccatctttttttttttacaaaatatggcataaaaaaacccatataaatataaaaa

SEQ ID NO: 284688 - DNA, 664 bp, Cannabis indica
tggttggaattgaaaaaaaaaattagtgttaaaatagtaattttttggtgttgatttaacacgaaattagaggaaacaagagtttggtagcaaggttactgatttttttgtgtaaaagaccttttttggtattggcctaatgatatttaccacctttcattaaaaaaaaatatctataaatgttgtggaaatattttataaagatgacattttatttagaattttacttttaagggttatggtataatttaatgagaattttcaattattgtaaataataattaatttaatgagagaattatgttatgattttattacatatgtttggattagattcacctaactaatatggtttgtatatcccttaatcttttttaaattccaaataatcattaagtataactttttatttctaaaagtttggtataaatgaagatattgttttgaataaatctttttgttatttctttaatttttaacatagctgtaataatgaatattcgaataaaaaccagatattataataaaattaaaatcattgtaaatatcataatataaacacataaaaaaaaacataataattaaaagggatattggcggctaaaccacctgaactttacggtttgtaacacttaaccaccaaaactgaatttttggcggctaa

SEQ ID NO: 284689 - DNA, 609 bp, Cannabis indica
ctcatcatctctctccccgtccttatcactaacttccatcatttctttgtcggcctcctcatcatttctctccccgtccttatcaataacttccatcagttcttttagtagagattgcctcaactccattaacacggactgcctcaactctttcatcactgtttgatgcaactcggctgtcacagattttctcacctcaggtaatatagcttcacgaagctctggaataaaagattccttaacctcgtcaatgatagattgcttcatagtgacgaagccctttccgatgtccttagagatgtcggctttgaaagagtcaaataatcttagtagttcttgacaagtagtgtctaactttttatccctctccttcatttcatctcttaagatgcagttgcagcatgtagaggatgaggttcctccctggttggataatggaatggaagtgtcttctgtatggccatatgtcttcctgaacataggcgggtgtagaataatctgccccaaaatgagaaaaatttcaagatcactttacaaaaaaaaagtacaattaacaaattgattggcctattccaataacaagtaactttgaagagttgtaaaccaaaa

SEQ ID NO: 284690 - DNA, 613 bp, Cannabis indica
attaattcaaaaaatattattcaaattaatatgatggaaggtaataattcaatcctaccatttttttaaggatgaacattaccctccttaagggtagttatattactaggggaataacatttcaaggctaaaccctccaaacaaacaaggtaatgtttcacattaccattcccttactaggattaacctattccaaacagccccttaggggctaatttgtgtatggtcaacagctgaagcacactgctgcggtaaactaaaattatatgctttttttccttccaagtaaatagtattggtgctcactaactaagcaccacttcttttaatgttccataaccatatatcaatttatgaactttacttttatgaaaaacgagtctcaacaactaatggtttccctgaatacctttataggttgttccatattcttcttctttggccatttatataacaaccaagttgagatgccacaacaggaaaatgggatttcaatagggcaggcaaagaagaatcaagtaataaaattccccccggcaaaaaaataggtaataaaattcctaacatttcttcaccaattttttttattatttttgaaaaacttgactagaaa

SEQ ID NO: 284691 - DNA, 611 bp, Cannabis indica
gggtccagggctgggtcccaaatccagacaccgactataggttttgtcctagccctgggtccagatccgaattccaatctcgggtcccagtttggttccaattctggtgccgagtcacgagctgggtcctaggttcaagtacgggtctgggtcgggtattaggtccgggtcctagttctttttcccaggtccctatcctgattcttggtccaggtcccggttattgtgtgggtttgggtcccggtctaagttcgggtttgagtcttagtctcgattcgtgtttaggtctctatctcggttttgatttgggttcgggtttgggtttaggtccttgtcctggtcctagtcctagtttttttttggaaaggtcgtagtcctagttcggttcttcgtgcatttgcgattttgagttcgagtttgggtttgagttcgggtcggagttcgagtcctggtctgagtttgggttcgggtccgaatttcagtctaggtccagatcaagctccgagtttgggttcgcgtccttggtcttggtctaggtttggtccgagtcccaagttcaaatcccgatctgagtctggatttagttctgggtctaagtccttggttctgat

SEQ ID NO: 284692 - DNA, 522 bp, Cannabis indica
tcgaggtcgcggtcgaggcaggggaaaccagcatgtccctgccgaggcggtgatccaggagaatcaaaatgcccctgtaaatggacaacaaccaggtcaaggtgggggcaaccacgaagtccctgctggggtagttggtcaagaacaccaaaacgcccctgtagtggtgccaccacaacaagaagatttggcgcaagaagttgctcgtctcaaggaagaaattaggaagcgagatgaagaggctcacaaccgtcaggaacaacccaatcaaggacaacatcaatttttgccggtgcaatacatgcctgtgccggagggtcgatgggaaccaatatatgaaaggttccgcaagcaacacccaccaaattttgaagggggctcagatccaatggaagctgaggaatggttaagaacagtggaaggtattgttgagtacatgcggctcggtaacggagatagtgtagcttgtgctgctagtttattgaaaaaggatgcccgcatctggtgggatgttattaaaca

SEQ ID NO: 284693 - DNA, 669 bp, Cannabis indica
ccagaggcatccagaaggctccttaaatgggcaatggagttaagccaatttgatctacattacattccacgcatttccataaaagggcaggcgttagtagacgtgcaatgaagccgaagctaccgcaaacatacccacaccaccagtctcggcgtgcgaggtattcgtggatggcgcctccaacgagaacggatccggagcgggggtcgcaatgatatccccgaacggacttcgactccaagcagccctacggttggaattctcagcttctaacaacgaggccgaatacgaagccctgatagcagggctgagattagcaaaaaccgtggttgctaaaagagtagaagtctacagcgattcgcaactggtagtaaaccaagtgtcaggagaatatcacacgtgcggagaaaaaatggctgcatacgtggcgatagtccgggaacttctccacgagttcactgactataaagtagaaagaatccccagggaaaagaatgctcacgcggactgtctggctaaattagcttcaggcagcgaaattgagaaactgggggtggtacctgtggaacgcttggcagagccaagcatcaaagtaaaaaatgccatatcaacagttgaataagagcccagttggatggtccccataatcgaatacataataaaaggcga

SEQ ID NO: 284694 - DNA, 570 bp, Cannabis indica
attgtttccgattattttctatttttcaaccgattcatttctcctattaattgttctgattccaattatagtttagtaaatatgttattaaactttgtttggtatactgtattagtattgtatggtataatattatattgaacagtattttcactactacaaaattcactattcacgtctgtttttaagtgtcacttaaagaatttacgtcggtttataaaaccgacgtatataccgtagtcgcaaatagttttttattagcgtcattttcaaaacgacgcaaaaaaatattttcgacatttataaaccgacgctaaatacttacttttctattttattttaagcgtcggttaaaaaatgacgctaaatgtttcatggcattttaaaactgtcacaaaaaacttattccgtcggtttaaaaatgtcatatctattacgaaaatactttttttttttacctattgcgtcacttataaaatgaagcacaaatataagtaagggaaaattgcaaatttttcatgcaattttccccacctgcattatcaaattttagaataactctatataata

SEQ ID NO: 284695 - DNA, 662 bp, Cannabis indica
ctcatttcataattttctactaatatttttcaatcaataaaacgaaaagacatactttaattcccgtataaaaaatcaaactctcaatcccaataatcaatagaaacaacatcaaatttcaagttctcaaaatctataaaaataaataaataaataaataaaaagatctcataaatacaaactcaaacagtagaaccccagtaaaacactaactcaaacattaaaaatacacacaataaaattcgaacccaaaacttaacacacacattagaataaaaattaaaccataaatgaattaaatccaaactcaaatctctcttcttcttattctttggcttggtctctgtttgaccattaaaactcttaagtttagaaatttgaagattcatgctattattttttaaatttcggtatttattagcaataaatttaatattttaagtatttatgtcacgtattttttaatagtaaaattaaaattttaatataattttactaagtatttattattaattaaaatacataatttattttttatatataatttaaaatatttaatacatccgccgcgaagcgcgggatgttgactagtcttaacaataatatgaaataaaattaatttagaatttataccttaataacttacaaaaagctacttatgt

SEQ ID NO: 284696 - DNA, 828 bp, Cannabis indica
atattagattaaataaattttcaccatatgcatattataaataatattcaaatcttatgaataaaccctaattatttattgatccaaaatgttaatcataagcggtctttacaattatccccccgttaaaaggatttcgtcctcgaaatctaacatgaataactctggatattgagtccttatatcagactccgattcccaagtggcttcctccactttactatttctccagagcacttaaccagtgtgatggtttacttcaaaggaccttttctttcttatccagaatttgcactagttgcttgtcacaaaataggcccggttgtaattacaatgcctcataactcaagatatgtattggatcagatacgtacatcctcagcatggaaacatgaaatacattatgctcagctaacaacgatggaggtaagcaacctgcctaaccttttcaagtatttcaaaaggtccaataaatctaggacttaacttgcctttcttcccaaagcatttgatttcctttcatttggggacactcgtaggaaacatggtttccaggtttcatcttgacatttagggtctgcataattttcatgcgtgctttgcgaagcaagcattcgagctttaatcttatctattgcctcattagttttctggatcaactcagggcctaactattttcgttctcctgtttcgtcccaaggggttggggaatgacatttcctgccatagagcagctcatgaggagccattcctatggtacttttgatagctattattgtaggagacttaatcagagttgctctatgaccctccaaaatccatgacaca

SEQ ID NO: 284697 - DNA, 617 bp, Cannabis indica
ataggaatccctaagtaagtgaatggaagctctcctctctggaatcctgaagcatcaagaaccctttgcatctctgaatgattcataccatggcagtatatagcagatttagaaggatttggttgcaaacctgaggtctgtgaaaacagtttgagcccttgaagcaagtagataatgctcttgtagtctccattgcaaaataggagcacatcatccgcaaacatgagatgattcaacttcaactctttgcatctatgatgaaagatgaaatctgatttctgcccaattttcctcatgattcttgttagatattccatacccagtacaaatagtaagggagacatgggatctccctgtctcagacctcttttagcttcaaaatacccatgtgaggatccatttatcatcagagaaaatctaggggttcgaatgcataacatcacaagttgaatgaactgagtagggaatttcaatccttgcaacatttcttcaatgaaattccattctattgtgtcataagccttttgcaaatcaagcttgataacacaacttggctttgtttgcttccttccataatgtcgtatcagatcctggcatatcataacattgtgtgcaat

SEQ ID NO: 284698 - DNA, 513 bp, Cannabis indica
atggatgctaggtattattttgatattttattgacttattaaatctatctatttggtgatacataactgtggggatattactgttcttttatattgatgagtgatcctgattttattactaatattttcttattaatataggagttaatccatttcttttaaattagtattttgtaatataaataaaaggatcatttataagctttattttcctacaatggtcaaagtgtgacctttgaccacccaagttatggatattacacatctgccacagcctagggctcgggtcgtgacatcaagtctatcccacagtgcattgatgtcagctctactgacatcttcccattttaatttattgatggggaatgacatccgagtcatccatttagccatgttgttgaatttttttccgtttctgccgacgggggtgccagtctctacatgcaactcaatctgtaacttggcaaattgtattttggagagttccccttcaatattcttgcctttgtattt

SEQ ID NO: 284699 - DNA, 61 bp, Cannabis indica
tgtggcctcttttattttgatgcttggctctggcaagcgttccactggtactacccccagt

SEQ ID NO: 284700 - DNA, 812 bp, Cannabis indica
gcaactaagtccactaaaggacgaaatacaaatggggcaaaatgaccattttgcccctccacactaaaataacataaaaggggtacaaagggtattttgggaagttctaaattcccaaccaatcccgacattcccaatgtctaactaaactaccccgctatactaaaatactaaaatgtgattctactgagccatacaccacgttccaatgttgtcgggcaccgaacatgcaaaaatataaaatttctatctatgacatataaaaatgcattctgaattcaaataaatcaacataaataattatttgaatatcaataaataattttcataattaaccctaattatctactaatttcaaaattaaagataagcggtcttcacaactatccccccttaaaaggatttcgtcctcgaaatctaacctgaataactctggatattgagctctcatatctgactctagctcccaggtggcttcttccaccttgctgtttctccagagtaccttgaccaatgctatggtcttattccgaaggactttatcctttctatccaggatctgcactggctgttcctcgtatgacatgtctggctgcagttcaaggctctcataactaagtatatgagtagggtctgaaacgtattttctcagcattgagacatggaatacgttatgaactgctgaaagagttggaggcaaagctaaccgatatgccacttgtccaaccttctcgagaatctcgaagggtcctatataaacctagggcataacttgcctcttttcccaaaatgtttgatcccttcattggaga

SEQ ID NO: 284701 - DNA, 522 bp, Cannabis indica
taacaaacttgaaactaattaaattccaacaacaatataaatgtacaactaacatactttcagcaatagattaaaaataaaacaaacacaaagttcttactccaaatttcaatacacatgtatgggcttgggtttgttgctaagaagagagggtttgtgaagagttatggattttgccctaagatttataggcttgggttgggctcatatgtatgggcttaattaaataaatataaaaattgaaattttaaaacatgcggtgcggtgcggtttgaatcgcggtttattaattcaaaacctcaaaccgcaccgcactgcgcggttagggaaaaattcaaaccgcaaccgcaccgcgaagaatttcaaaccccattttttttgcggtgcgggcggtttgagtggtttgagcggtttgatgtacaacactacccggtcctagttctgtttcccgggtccctatcctgattctgggtccaggtcccagatattgtgtgggtttgggtcccggtctaggttcgagtt

SEQ ID NO: 284702 - DNA, 749 bp, Cannabis indica
atggactaaatattgttccctgaaaacttcctcaaattctcgccaagtcatcccatcagtttccattgtcctggacaaggtctcccaccaatctgctgcaccaccctctaacttggacacagcgaaagtaacttggtattcctcaggtgttcctattgtgttgaaatttttctttatctgcctcaaccacctttcagctaccatgggatcttgtccaccctcaaactcaggcacttggatccgatgaaagatttgaaaatgatgactttgtcgagcggcaggatccatttgttgagcgggaatagctcttaaggcttcgagaagggcgttcatagggaattcagcttgtggaggttggacattagcttgaggggcgtcttctccaaccgttctccttgtcttctttccttttggaggcattttcttaggtctgagaaccaaaagctaatcagttagtgaggattggatgctaataatataaatatgccttatacatataaataccaagatatttattactattattatttaaaataaatctaaactatttggtgacacactccgaggtaattaaacccggtgctctgataccatttttctgtcacgacccgagccctaggctgtggcagatgtgtaatatccataacttgggtggtcaaaggtcacactttgacccttgtaggaaataaagcttataaatgatccttttatttatattacaaaatactaatttaaaagatatggattaa

SEQ ID NO: 284703 - DNA, 576 bp, Cannabis indica
gggacacgggagcagtgcattctccatattggcttcttcgatatatacccgacgataatctttgtgtaggtattcttccatgttaatggaaaactttccatctttcaaatatttctccttcacaatgtggcctgaagcaaccttcagtaccatcccactaggctccaacagacagtgcatccaacatggtaaggtctataaatccaaaacaaacaagcaacaactcaatttgtaagttgaccatatttataattttgcatttgaataattcgtaaactaacattaagattacctcttccgaactaccaccagtaggtggcggtgctgctgctggagcaatttcctctcgaaaacgcgggggtgatggagagtagacattagcagtacccgacggttgtgctatgggatctggtgcagagtagacattggcatcacctgacggttgtgctatgggatctggtgcagagtagacattggcagcactcgacggtcgtgctactggttcggaggcaatgtcaacgttcggtggttcagttgatgctcctccaacaccggaaccagatgcaacgctgctat

SEQ ID NO: 284704 - DNA, 501 bp, Cannabis indica
tgagcaaatccctctaacatgcattcaaaccaactcaaatctacttaaacatgcataaaatcacctctgaaaactacagtaaacatcacaaaacagcagcaacagatttcaacaattttctttgaaaaccatagttttgagccaaaatttcataacttaataaactcaagaaatcatcagccctaacatgcatgaatcaacattttaaatcaaaaataaacctctgaaattaactcacaaacacagcagcaacaacacctcaagaagcatgcatttactcaactttttcattaaaaatctcaagaaaacaaggtagggaaatcaataaagaaatacctcaacaaaagattacttgaacttaggttgaaactagctgaaaatcaaaggaaaatccaactccatgcacacccaaacccagccgaaagagagagagcttgagagctttttctttgaaaattctaacttttctaactttgtatttttttttttgtaaaaaatgaa

SEQ ID NO: 284705 - DNA, 768 bp, Cannabis indica
ctcggtttccaggcacgtgcttcgggcgcgtgaaggtgtatttaatgatcaccattactgcagcgattcactttttgcaggcgtcgattcgtttcttgtccattaattgatacggcgcattaatgggtgtcagacggacactcaagcgtttccaccgcctcgatgacaaaccaattcagccgttggatcctgggaatttgaatcgtgtgccttcccaaccgcacgattggtagatgatcgcgcctgttccacatgcactttggcctataaaagccaccattctcacttcatttggctactttcagactttcaccaaatttttccaagttttccagagagaaagaaaccctcgaaccagaaaaccctcaaacaccatagatttcttactgaccttccttcgccattgtcagtcaactttttaccgtcgatcaacaacaacgcccagttctcaagctttatgtaagttcttcgcatctcgtactttattgtttgtgctcattgcatgcttcactgttcatctgctttttctgggtttgatgtttgaattttctgggaatttccgtcttgagtttctgtgtaatacgttagattcctcttttctggtgttcgagttacttttattctacgtattattttttcaaggacccatcttttctttacgtaatgaccttcaagtgttcagagaggactttgtctttctcgatttttaccattttttccttttctttgcttatttgtaatgtcgccatctgtgggattcttgcaccc

SEQ ID NO: 284706 - DNA, 506 bp, Cannabis indica
accgggataacaagatatgtgcccggagcccacctctctggcactatgccagcatcagctccaaagatgagcggcatacagttttctactactcccggacatagccaaggccagaccttagacccagcatcttcccattttggaaatccctcagggataaatggacaagccccctcgcacttcgctccgacagccaatttagccggtccttcccagggctcaaggagtaaaaggtcctccaaaggaagcacccggacggaggataagcaacagaaaagggggtatactccccaatatacccaatacacggatttaacagactcacaagaacgtgtatattttgctactaggcaaaatacgcaataccggagaccgcctcctttgtacaaagacacctcctggagggatcccaataagagatgcgggtgccacaatgacattgggcacatcaccaatgaatgcaaaaatctcaaggacgagattgaaaacttaatctgattgggaca

SEQ ID NO: 284707 - DNA, 900 bp, Cannabis indica
ataatataaataggtagtgatggcttcagaaaagacgatacatcttattcctttcagagaaaatcccgagccttctatctaacctagccgccacctctctttctttcttattctttgttttgtttcaaaccccttagtaatagagtagtgcccacacacagcaagtggtacctcaatcatagtgtggaagatcgtgaagaatccaaattcaacaagaaagacattcagacttagatcttgataatactctgcgacagaaaggatacaagggttagagatcgtgggtggaaggagacattattacttccgctgcacccaatgtaaggtttctcatacttttatatgtgtattttataaatcgtttttagaagttcatatttaggatgtttaaacaacatacttgtgagtagatctaagatcctggtaaaaataattccaacagcaagtccaatgcaacattgaacttgctaaatggtatcgctttaattaacatatcagcaagattgatctctgtggcaatctttaccaccttgatgagttcgttgttagttatatcccttaggaaatagagtttgatgttaatgtgtttctttctttcatgaaacacagtgtttttagctaagtgtatagcactttgagagtcacagaacacacttacatccttttgatcaaatcccaactcagtcatgattccctttaaccatagagcttcattttcaacttcaatgagggtaatatacgctggttaattctatagtggataatgccactacatgttgtaattggatttccaactaactatatttcctctaacagtgagtttgtagcatgtcaatgaccttcttttattaaggtcatcagcataatcagagtgacataaccagtaattgtgcagtccat

SEQ ID NO: 284708 - DNA, 577 bp, Cannabis indica
tatatatatacatatattttgaagataggattataatataatttttacctgatttttgattagtggccggaagggcattgaatttgaagcaaaggggtcttcattatttatcaagaatggtacttgagtttcattagtcatgttgttacagattcacatatttacccttaagttgaataacaccactcacagggtctgacaaatatactcttacatcagatacaacaaagatcaagactaaagaacacagaaacagttacaaaacagttataactgaaacagttacaaaatcagttacaaatattactctaaggctctgccctagatcagaatcatagatcagtataaaaggacgtattttgctcagatacaaaataagagatacaacaaggagtaaaagagagagtcacagccagagaacacaactacaaaaataacaacataagaaaaagagagccttttggcttagggttgtcatctccttgagagctcctcctaaagatgttcatgtaaaagaaaagagagttttgttagtatccaaagagagaaaaaaacagagagaaatacaaacagttgt

SEQ ID NO: 284709 - DNA, 558 bp, Cannabis indica
gcatttttttttaacaactacaatatagctagttttagtagaatatttatatatactgtatataaatttccatatttacttgattggcataaatcatcagatggtcaatttgtgtaccattctttctatggataagaagggcagtagtaacatgttgataatgagtttcccactattgaagaaataatttccacagcaaaagtagggaaaattaaaaaaataaaataaaaaaaaaaaaaaaaaccaatgtggggttggtgtgttgaaagctgagagggtcaaaattaaccctaaaatcagagaaataattgttgctattcttcttcttcttctatgtgttggggttttgaatagaaggaaagctcactatctatcaccactagtttgcactttattattctgaactaatcgagtacatacccaccacatgcattacattagtaaatgaataatcatttatttatatttaaatatatggagaaggttccaatggttacattaaatatgtaaccacgatggttacatttatttttagtcgttggatcattattagacggt

SEQ ID NO: 284710 - DNA, 628 bp, Cannabis indica
gaaaaaatattgaagatgttttggtacaagtagataagttcatctttccggcggacttcattattcttgactatgaggaagatagggaagttccaatcattttagggaggccatttcttgccacgggaaggactttgatagatgttgaaaaaggagagctcaccatgagagctcaagatgagcaagccacattcaaggttttccatcccatacgtgccccggatgcaataggagaatgcttagcaattggagatatggatcctaacatggttgaggagtccaaattcaaagttagtaagaaggtgagaaagaagattctccttaaagaaattgctaaggatcacgaggcacaagaaagcaaagacaaagcatcatttgactctaaaaaaccacccaaaaagaagagaaagaaaaagaagcttagtagaaaatttcggtctcaaatgtttgaagttgggcaacaagtgattttttccaactctttaacgaaggctactcatggacgactagattcaaggtgtgatggatctttcttggtggtgagagtataccccgatggggtggtggaacttcgtgatgcactttcaagaagaaaattcttagtgaaaggccaaggagtgaagtttgg

SEQ ID NO: 284711 - DNA, 532 bp, Cannabis indica
gactattttatagtcacaaggataaaaaagtggttgtctctacaaatgctactttccttgaagatgactatattaaagacttcaaaccgaaaagtaaagttgtgttagaggaaatgctttcagatataacttcttctaatgttccatcctcttctactcaagtagaggataatcccacttccttagttgaacctttacaagttgatacagccgagaaaactaccactaaagttcctgttcagaaggtcaccgctcctcatcgtagtgggagggtttctactaaaccatctcgttatggcttggatggtgaaatcaataggatcgctagtgacggtattgatgacgacccattaacctacaaacaagtaatgactagtcccgaactgaaacaatggtcgccaagggttacacccaaagagaaggcgtggactatgaggaaacatttagtccagtcgccatgctcaaatccatctgaattcttctctccataggagcaacttttgattatgaaatctcacaaatggatgtcaag

SEQ ID NO: 284712 - DNA, 521 bp, Cannabis indica
tgatttggataactgtactaggttaattaaattagtttaacctaataaaattgattagcaacataattaatttcaaagtttttttttaattaatttaagaaaaacacacttagtttaatgaattaatttctagataaactatttgtatttttcttgtatttaataaagaattttaactaactagattctttctaaaacttactttaattatttcattaaatattcctatttaagttataaattagttatttttaactaattttccttattaacttaaattcgaatatcttttgaatttaatattaagttgaggaattctaggaattggttattgaagattcttgagatattttttaagttgattttaaacttaaaatggaatattattaaattaagtagttaccacttaattttgatatttactaaaattacatttggaaactttttaagttccttattatagattctttctataaaaacttaaattagatagtttccaaatcttgaaaagatacttagtt

SEQ ID NO: 284713 - DNA, 543 bp, Cannabis indica
gagctaagtcaattcgacttgcactacgtaccccggatttctataaaaggccaagccttggcagacttcattactgaatgcaacgaagccgaggcaacagcaaatacgccggtaccgccaatccccacgtggagggtatttgtggacggagcttctaatgagaacggttctggagccggagtggctatgatatcaccaactggactgcgactccaggcggccctccgattcgacttcgcagcttcaaacaatgaggccgaatatgaagccctgatagcagggctgaaattggcaaaagctgtaggagccaaaagagtggaagtctacagtgactcccaactggtcgtaaaccaggtatccggagaataccaaacccgcggcgagcggatggccgcatacgtaacaatagtccgagagctgctccacgagttcgcggactacaaaatagaaagaatcccccgagaaaagaacgctcacgcggactgtctggctaagttagcctcggatagcgaaatcgaagagctgggggtagtaccagtggaa

SEQ ID NO: 284714 - DNA, 429 bp, Cannabis indica
tgatgaacagctagatgttgtatttacaatatttatctatcgagatctaacactattatgtttgtctaatggatgacaatccattagggatttgtcccattaaaacaacaagccaagttagaccaataatgaagattcgaaatttaaactacaattaataacagaaaataacatggttcaatataaatctcacacaattcagaaattatcaaacatatagcaagtaagaatgacaaacgaaaatactaaaacatacaatcctaaataatttccaaggtctttaacaaactgatatcagtgtcccgtttaggcgagagtcaaagataccatccattaaatagagttgtcagctcatctaaaacgataaacattctaggaaccttttatttgatcaagatcagaatccagcgttgtcccatttaggtgaga

SEQ ID NO: 284715 - DNA, 649 bp, Cannabis indica
tgtatgtagtctagtttgccttttgttgtgtgttttccaggtgagaactttaacttgcaacatttgccatacacacagtcatcacagaattctagcttttcaccaagttttcccttgagaatgccttgcttttccaactcactcatgcctctttcactaacatgacccaatctaagatgccataacctagtgctttccatatcaggccctttgactaccatgtcattttcaccagtgattgtctttcccttgagatagtaaatcccattcttaagttcccctttcatgacaactaaagatcctttcatgactttgaaagaactatcaatctttatggtatgacccttctcaatcaattcaccaatagaaagtaaatttcttttcaaatctggtacatacctgacttcttgtatgcttctcacttgatcatcatgtagtttcaatctcacagttccaattccagcaaccttgcatgctttgttgtctcctaacaagactgatccaccatctaatttcttgaaagttgtgaacagatctcttcttggtgtcatgtgaaatgaacaccctgagtcaagaatccatgaatcacctgattcttggcttgatacaaccaaaacatcagctgactcatatccatcagtagccacac

SEQ ID NO: 284716 - DNA, 509 bp, Cannabis indica
attaagagactttgtatgtctaattaataattatattaaatgacaatattattcgataatctattttagttattaaataattagaattggcatttgaatggttaaattggaaaattggcatttttgagaaaatgggaatgaaaaataacaaaatgggaaagttgcaaagtgaggcccaatttcctattctggccgcccactatgcataggcctttaccattttattttttcattattttaatgccatacaattctaacctaaacctagagggcattctataaatagaaagtgttggcttcaggaaactcatgactttgcacattgtttccttcagagaaaagccatgcgccactttctctctcgtttcttctcttctatttcgaaacctttgagtgatgagtagtgcccacacacatcaagtggtacctcaatcatagtatgtaagactatagaaaatctgcatcaaagaaggagaaaagaagatgcaggttcagatcttggtgatgct

SEQ ID NO: 284717 - DNA, 621 bp, Cannabis indica
aagagatacaaaaactaatcgacgtgggatcagtcagagaggttgattatcctgactggttagcaaacgtagtagttgtgaagaagaagaatggaaaatggagggtatgtatcgactttactgatctcaacaaggcatgtccgaaggattcgtttccacttcctcacattgacatgatggtagacgcaacagctggacatgaattgttgagtttcatggatgccttctctggttataaccaaatcttaatgcatcccaatgatcaagaaaaaacatcattcataactgagcgagggactttttgctacaaagtcatgccgttcggactaaagaatgcaggggccacgtaccaaaggctggtcaatcgaatgtttgccgacatgcttggaaagacgatggaagtttacattgacgacatgcttgtcaaatctttagcagcagagaatcacctcgatcacctcaagcaagcattccaggtattagaaaaatacaatatgaaacttaatcctactaaatgctcttttggtgtctcttcaggaaaattcttaggttacctcgtcacaaaaagagggatcgaagcaaatccagaccagataagatcaatccaaaatatacaatctc

SEQ ID NO: 284718 - DNA, 1018 bp, Cannabis indica
tcacccaacatataaatcaagaagtgatcatggagatagataccgttcaggaggtcacctggataactccaatcgtcgcatatctggaaaagggcgtcttacccgatgacaaggtagaagcaagaaagctgcgacaacgagccgcccgttatgtaatgtatgatcaaaggttgtatcgcagaagttttagtcaaccgctactcaaatgcatcagcggggaagattgcgattatatacttcgtgaggtacacgggggaatttgcggcaatcatacagggggtaactcccttgcattaaaaatcatgcgacaagggtattactggccaaccttgcgacaagatgctctcgcttttgcgaagaaatgcgacaggtgccagcgaatagccacatatacccaccaacctccgagtaacctacattctatcacaagtccatggcccttcgcagtatgggggatcgacttaataggcgagctacctaaagggaaaggtggagtcaaatatgcggtagtcgcagtagattatttcacgaaatgggccgaagccaaagcactcgcaaccatcacagcaactaaattgcgcgagtttgtctataactccataatttgtcgatttggtattccatacaaactcatttcagacaatggaaaacagttcgattgtaaagagatgcgacaattatgtgacgatctgggaatcaagaaggcgttctccgcagttgcttacccgcaaagcaacggacagactgaagctgttaacaaaataataaaacacaccattaaagggagactagaagaacgcaaagggacttggccagacgagctatcgcaagtcctgtggtcttataatacaactcctcgatccacaactggcgaaacacccttctcgctttcctacgggtgcgaggccatggtgccagttgaaattggggcaggttccctacgcagagatgttttcaacatctcgcagaacgaagaaaagcagtcactctaccttgatcttctggaagaaaaacgcga

SEQ ID NO: 284719 - DNA, 556 bp, Cannabis indica
ccaagcgttccactggtactacccccagcccttcgatttcactatctgaagctaacttagccagacagtccgcgtgagcgttcttttcccgagggattctttctactttgtagtccgtgaactcgtggagcagctcccggactattgttacatacgcggccattcgctcgtcgcgtgtttgttactctcccgatatctgatttacgactagctgggaatcactatagacttccactcttttggcccctacggcttttgctaacctcagccctactgtcaaggcctcgtattctgcctcgttgttcgaagctgggaagtcgaaccgtagggctgcctggagtcgcagtccggtcggggatatcattgccacttctgctccggatccattttcattggaggctccatccacgaacactctccatgtggggaccgatggtgctgacacatttgtggttgcctcgggttcgttgcattcggtaatgaagtctgccaaggcttggccttttatggagattcgggggaacgtagtgtaggtcgaactgacttaactccattg

SEQ ID NO: 284720 - DNA, 598 bp, Cannabis indica
ttagaaagttcatatttagggaattaatcaacatacttgtgagtagatctaagatcatggtaaaataatttccatcaattcgatcctgcttcccagaagccaagaccccacggctgatatgtacattgctgggagacctctaactcatggccgaacacagcttctaacttccttacctgcaccacgaagcacctgtgagtcacaatgactcagcaagaaaagcaactatataaaatcatagaaagtgccagcaaattcattacaatgtaatatatataccaataggtcatacatactcaaggtgcataaataacttaatgtctatgagagcacacttattacataatcaagtatattcatagttatttataatcaacaatctctgtgtttcatacaacctcctaaacatttatcattataaatactcaccttcagtgcttcataaaacactctaattcacacattaccataactccataatctcagtgcttcataaagcactctaattcacgcattaccataattccataatctcagtgcttcataaagcactctaattcacacattaccataattccataatctcagtgcttcataa

SEQ ID NO: 284721 - DNA, 589 bp, Cannabis indica
cctagttcggttctagttccatttgcgattctgtgttcgagtttaggtttgagttcgggtcagagttctgttctgagtttgggttcgggtccggatttcagtctaggtccagatcaagctccgggtgtgggttcgcgtcttgggtgttggtctaggttgggtccgagtcccaagttccaatcccgatctgagtgcggattcagttctgggtctaagtccttggttctgatcctagtctgggttcgagtttgtgtccggttccgggtctagctttgggtcttattctaggtatgggtttgagttcaggtccgagtttgtgtccaggtttgtgtccaggtctggaccccaatctgggtctaggatcgggtctcgagtgcgggtcaagatctcggtccagatctaggtccagcatttcgatcccattttgggtcttcgtccgagtccaggttcatatccggatccctatctaggtccaagtctgtgtttgggatcaggtcccaaatttaggtccaagtctgggttcacgaccgtgtccgggcccgagttccagtctcagtttgggtctgaggctaggtctctgttcggttct

SEQ ID NO: 284722 - DNA, 727 bp, Cannabis indica
ggggcatgtaagtcagagaggacttgaggaaatgaacaggcaaggactgttcaaggagaagctaacagaaaaacttgagttctgtgatgaatgtgttttggggaaggcttgtagattgaagttcaacaaggcagaacacaccaccacagaaaggttagcttatgtccattctgacctttgggggccatctaggattccaaccaaaggtggagcacactactttatgagtattattgatgattacagcaggaaagtctgggtgtatttgttgaaaagcaaagatgaggctctaggaacctttgatacatggaagaggctactagaaaaccagactgggaacaaaatcaaggtactaagaactgacaatggtcttgagtactgctcaaatgagttcaagggattgtgtgccacaatgggaatcaagagacatagaactgtgatcaaaacccctcagcaaaatggtgttgctgagaggatgaatagaacattgattgagagggttaggtgcatgttactaggagctggtttggacagaaccttttggggagaagctcttaaaactgcatgttacctaatcaatagatcaccatctgtgccaaacaacttcaagaccccacaagagttatggacaggtaaaacccccaaatttagatcacttgaaagtgtttggatgtactgcatttgtgcatgttagacaagataagttgcaacctagagcattgagatg

SEQ ID NO: 284723 - DNA, 565 bp, Cannabis indica
ctagttgagacaaactgcttgtaagactcagttaattgattttaattaatcaattctaaaattagattatatctagtttatgaattttcactaaaatatggcttgattgtgaagaaatagaattttagagtttatttgttaattaagagactttatggagtctaattaataaataatataaatgataattttatttgataattaattataattattaaataaatatttttggcatttataggattgaaattagaaaatatggcattgtaaaaaataaataaatggttgagaaaaatggtaaaaatctaactagtgttgggcccacatatggccgaccattatagtccctttttttctattattttatcattttttatttcatataattcaatgctaaccctaagtgaattagtataaaaagaaaagaattgtctcataatccaactaatgactctaaacctagtttttatcttgtcagacaactagagagtttgagacttcttctttttattttctctcttctaattcgaaatcctatagtggtcttcaccattaaaattcgagc

SEQ ID NO: 284724 - DNA, 634 bp, Cannabis indica
aagacacaaaatagtggtgttactgttgctggaactgaagggtttaattactacggcacacttgaagatgtaatcactatatcttatactggtgcatatacagtgtcattgtttgaatgtaaatggtataacactaatccattaagaaagaagacaatcactgaaaataatataactagtataaatactcgtggatattggtatcaagatgaaccgtacatccttgctaaccaggcgaagcaagttttctatcttgaagatccactcagaggtcgcgattggaaggttgttgaagatattagccatcgacaaatttgggacattactgacaacgaagatgagactgatgtagatgttgttagtgattctaactctgccaattttgtgttgacggttgatcttggagagttgattatgcaatcgaatgaacctccagtaattgttgaatcgtccgatcagttagtggattctgagatagagaataatgaacttgatgaaaattatgttgctgaagaagtagatgatttactagttgaacatgtggaggatgaaaatgtaaacttagtgaatgatggaaatgatagtgattcttcagtgtaacttttattttgtaaacatttgttactaaaatttt

SEQ ID NO: 284725 - DNA, 558 bp, Cannabis indica
cttccggagttctgctgcagcaacttgaacttgcagcagcagcagcagcagctccagccttgggccgtttttgaaacacaccatcaaagtattccgagggttggaatgtaggaccaatgatagggggctcaagtgtttcatgtgattgggccacattcttctgagaagataaaaccttaaagattagatttggaaatacaagtttaaaggttggctttttacctcttcggaatgaaacaatctggttcagaatgtgtgaggccaaatcaattgaagctccagaggtgatgcggtataagaatgatgccacatcttgagacactacggtcttgttggagttaggaacccaattgcttagagcaaaccgcaaaagagatgcatgagcaaatgtgagatgagtgattcgaagactctctcctggtttcaattcagatcgtgcacccgtgagttcagagagcatcaattcacgatccatagacatcactgcattggagacattctcgggcaattgcaaagcttgagcaatgtccttttcagaaaaagagaaccaatgtcccc

SEQ ID NO: 284726 - DNA, 447 bp, Cannabis indica
ggatttgttttctgtagcatgtacaggtatctaggcaagagattgtacgactctttagcatttccatgtagctgggtttgtgctcgctctttactacgccatgctttcatgtaattcatctttattccgtatttgtctttcatttctgtctttatgtctgcagggctgcactttgttttcaggttcaagaattttggttttacaaaatctgctatcaactttgatgtagcttgtcgttgatctccaaatcttattgtaactgcacatgtgtgttcttcttcgtagctccttattatgaatgtttctgtgtttccattttttgtagcctttaaactccatttgcagtttgtgtccaaacacactatgttgtattcttttgtgcaagatttcactactttgtattgaaatgtcttcttgattgcaaagtagtcatagtgtacttatcaa

SEQ ID NO: 284727 - DNA, 561 bp, Cannabis indica
taccacttgattatccttgagttgttaaacacaaggttcatcattgttttggtgaaagctgtaggtcttggctatttaatcaaaccttttattccaagagcaagaagcttgcttaagtccataaatggacctattgagtttgcaaactttctcttcctgccttggaagaacatagccttctggtggctccatatagatggtttcttaaagaattccgttaaggaaagctatcttgacatccatttgccaaatttcataatcgaaagtgacagctatagagagaagaattctaatggatttgagcatggcgactggactaaaagtatcctcatagtccacaccttctctttgggtataaccattagcgaccagtccagccttattagtttcgacttcgccaccattaccacttttcttcttgtacacccatttacatccaataggatgataatcatcaggtgcgtctacgtattcccagactttgttctttttcatggaatccatttctactccatgccggctgacattgttctgttcgggacttgccactgcctgtttata

SEQ ID NO: 284728 - DNA, 795 bp, Cannabis indica
cactgggaccatcctcaggttgagtcctcttggaacgggtggtccttctggactgaggattggtagaccttcagagcccatgggctcttttccagaacgatgattagtttcctcatgtggggtgttaatattctctggatcttcaaccataaaggagaagatttttctttaaaagaaggtaaggctttttctgagctttttcaaagaggctctaaatgaaagcaccaaactgttaacgcagattttcgttaactaaatttgagcctcacgatgataattcaacgcagaaaaaaataaaagctatagaaaaataatatatgaacacagggtttttttacgtggttttgcagttaaaattctgcatactccacgagtcaatcatattcagatttctgagtatttttttagggcctctttgttttttcgtcccttttttgagattgtttgccactatttatagttgcatagtggcagttaattacaaagctgaccaaaatatgattacagtcattatccctaaaatcgtgggatctgaatacatatcacaaaatgtaaatgcggtgtatgattttgaaaatcatatagctgtgatttttccgcttttactgggtcaagatatcgtgtattaaacacgtctttaattgttgaatctggagatgtctcgacagaaacttgattgtagtgatcccaatggcgacctggaaccattctctttccgaggtcgacaagatatgtctacgtcgatcgcgagtatacagaaatctctaaacttgctagggttatgagcctcgctcc

SEQ ID NO: 284729 - DNA, 1104 bp, Cannabis indica
aaaattattccagcatgtaatttcagacgtaaaaattgactaaaagattataattatgctgaaataattaatattttcatgaagcatattttatttatactacatgaaagagaactttccaatttatctttggaaattataatttttgtaagtgttaactgaaaaactttattccagtataggtataaagactttccaattatatgtagaaatgtagaatattcttaattatttttaatagtcactgttatgcatttaattatgacgaatgtatcatgatatttttttaataaaattcagatgtattatactgttgattagtcaactgaaacattttataattaataacagttgccctccatactttttttttttaaaaaaaaagtactatttatttatttttaaatatataaaaaaaatatctgatgtattatttttaaatttatagtttgaattgtttctataatgtttatgtgggtggctatgttaattttgattgtgcaatttaaattattctgttaattagtatgtcagttgcatttgttaattgttatataaattactatatgtgaaatttggtaaaaatacaaacaaaaaatattactttcaagtgtttaaaataaaccctcccccaaaaaaaaaagactccaaattaattctgaaaaaaaattattaaaaaatactaaattttgtattgggctctcatttcatgaggctccaccctggatacattattatctcactaaaagaaatttgtaggaattttaagatagaattttactatcttgccccctacaccaacaaacaaaactaatcagatataaggtcaatttcgacctttccctgttcaaagacttttcaaagtcagagaacccaaaacgacagcgttttgtatttgaacaaaacccaaggctcgagaatcttctcagccactttctctctttctctgtcttctcttcgaaaccctagcagagagtttctctttgagaaactcgaagctaggtttcaatctacccagaaaatcaagccccaaacacactacacagatcagatctacaatgatctgatctatacacacccacacacacaaatagaattagttta

SEQ ID NO: 284730 - DNA, 624 bp, Cannabis indica
cgggtgtacgataatgatttagcatgcaccaccgacgcacagtttgatgccatcatgctaccttggactcagttgtttccacatctgctgaggtctactggctattatgatcaagtgaacaacaacattctgaatgtggacttaggggacagtagccaactcagatcaatgcatgctagacgcatgccaagtgaggtggttccccaaagtaaaacaaggtaattgttaatatagtatattattatttcatttgccattactctttaaatgcagttcagtctctaaatgtgtttgttgttaatttttcagtggtgattgcggggtgtatgcacttgagtacatcgaacacctaatgctgaatcggtccttggacaacattacagatgataacatgagaatgttcagagatcggtggtgtgtagacttgttttatcagaacttaacgtggtaaaataggtacaagggttgtaatttttttgtattttaagaactccattacaattgtacaaacatagttgcatagttgtttttaaatctgtacagtttttatatatcgaaaagtgttcaattttaaaatttttacttacatgtcgctacaaaatcgttaacatgtcgtttaatgtc

SEQ ID NO: 284731 - DNA, 591 bp, Cannabis indica
attttggtcattttctaactttcccgatttaacctagttctcaacatcttaacctagtccggtataatttccaatataacacaatttcaacaatcgtgacatttctgaccattctgtcgagttccacaattgccaggcccgaaaatattttattcgaattatggtatctacgatacccacatatttcaatacaatctccgtaattaatcaattacgctttattattcatttactcatattttcctaatcaactcgtaattagtttaagtaggattataatcctactctaatacccacttaatcacatatttaataaaatatgtccaattaaaatatcaatatatttttcgggatattacaactatcccctccttatagaaatttcgtcctcgaaattattcaaacaactcgagatacagctctcgcaactgcgaccttaactcccaaatcgcctttcaatcttattgttctttcacagcactaaaactagtgatatagtcttggttccgcaacactttctcttttctgttcaaaaatctgtaccgattgttcctcatataacaagtctgtttgaaattcaatattttcata

SEQ ID NO: 284732 - DNA, 806 bp, Cannabis indica
gttctttttttaataaatatattgttagactaaacaagatgaaaaaaaatacaattcttaaatgtgtgcctgcttgtataatatttttttttttcatattttgtttttaattttaaacatttaaatctaaaaaaaaatatgttattaattttttttagaaattaaaaaaaagattattttatacacccaaaaataacaaaaaacttacatttttatggatctacaattatttttacatttttacgaattttaattttcttttttaaatacggagagttattttcacattattacaacaggaaaacaacgtgaaaataatgtttctttctaaaaaaaaacaaagaaaaaatctgtaaaaaaataaaattcataaaatgttaatatataaatatataaaaatctaatcttaagtgtattgtgtaaatttttcaaataaaaaatgtgtttataacttttaattttacgttttagtttttaattaagtgaaaatagtgaaaacaatgtgatagaaaatgagagagaaagtgatgagataaatgaaatgaattttgataaaagaaagtatacaaaatagattgtgattaaaaaaaattatttaaatgaatttttaaagaaatttattttattttcaaaattttcaactatgtgttttataaaaattattttagatgctttttaattggtaccgtaccaatttgtttctcctaaacttattgttttttgacagaaaaaataaaatctaaccaactttattaattaatactagaagcatactacaattacagtttgctttcatatgcttttaa

SEQ ID NO: 284733 - DNA, 626 bp, Cannabis indica
aacacaaacacccacacctagataacacccaaagctagacccagacacggacccaaactcgaaccaagaaaaggattagaaccaaggacttagagccagaactgaatccagactaaaatcaggattagaacttgggactcggacccaacctagacaaagacccaagacgcgaacccacccccggtgcctgatctggacctagactgaaattcgggtccgaacccaaactcacaccaggactcgaactctgactcaaactcaaaccaaagctcaaactcagaatcgcaaatggaactagaaccgaactaagactaggaccaggttcatgacctaaacctaaacccaaacccagatcaaaacccaaacagagacctaaagccgaactgcgactaggactcaaacccgaacctagaccgggggccaaacccacgcaataaccgggatctggacctagaatcaggatagggacgtgggaaatagaactaggaccgagacctagtacccgacccagatccgaacttgaatctaggaccgagctcgtgatctagcacaaaaaaggaaccagattgggacctgagattgttatccgaatctagacccagggcttggacaaaacccgtagtcgg

SEQ ID NO: 284734 - DNA, 505 bp, Cannabis indica
gtcaatatcgctattggtgtaattaagttatcgggtccatatagtttaatataatatttttatggagtatacgctaaccaattgcaagtcgacacaatctagaaggtgctaggcaccactgatgcccaatagacaatgctctaaaaaaatggactaaaaatattttttagatttcaaaacagataaaggtgtattgatgtacatatttcaagggagtagaattttttttaataattttattccttacgaaaaaaaaatgtaaaatatctaatataattttgggtgcttttataattacaatacactcccttaaaatgaatgttaggctatttttagcctaagtttcgggtcacattttatagttgttcttcttctttattattatttttggaatagaattacgcttattttctttgatttcaagtttctacacttgggatatataaattggacaaatttcggaaaatattgatctataaaatagagaaaattttgaaagagaata

SEQ ID NO: 284735 - DNA, 319 bp, Cannabis indica
aaattctaattaagtcggtggttcaagccttattacgtcatgagttgcttttcgatcacaaaagtgattcttcatgatattgaaagcatgattgcctgcatttggtagggagcttacttctaaaaaaatataagcttcattggggtaattggaggaagatgttgttggaaatattttaccaagatcttagatttactaacaagtatgttgtttaacatcctaaatatgaacttctaaaacgattataataaacacatgtaaagtatgagaaaccttacagtggtgcagtggatatgatgtctccttccactcagatctc

SEQ ID NO: 284736 - DNA, 646 bp, Cannabis indica
gacgaagtcaaaccaccttgaatttgccgaaatcttctcagtgcttgggcttccgtcattcgtcatcggtgatggagcttcgagattcaccgactccattggagtcactcacaacaattcaaaacttaaccaaatttcttgtacccgatcttctagctattggatgaattggtgaaaagaaatatgagaagatgaaacgttctgagactaaagctctaattatacgaagagagagctctccgcaaatccttatcttcgattaagccgcttccgtcctgatcagccgcttggaagcaagccaccacgttgggatccgtaccgggtgggaaagtcgacgacgacacaagcaacgcgaagccacaccacaaccccagtatccaaaaaatcaaacaactgcttcttgctctccatccaaacagaaacagtattcccaaaacttccctcaaattatggccgcttctcccattttaatcctcaccctcatcgtctccattgtgcgggagcccattccaacgattccatcgacaaaacattactattgttttattatcatacgtatactactacgtcatttggagtctaaatttatttaagtcaaatgattttgtaatctttgatactttactaattgatttcattctctggg

SEQ ID NO: 284737 - DNA, 535 bp, Cannabis indica
ttataaaatactttacttacgtcatctgtaagccattctttggtgtgagcattatccaaaagaatcctggatcgtaatcaccacttctcaaatcccgaagtcggtggttcggaatgagtccaacacaccactttcggaaagtggttaacaatttctcatccggtggctccaggggatcaaaagtcgaagatggcctatgtctcctcttcatctccgtatagtcaccgaaccatacaggaggctttctcttcctcttccgactcttaaccactgcaggttgtgcctctatggacagaatctcaccctgcgactcggtgtcatgtacatggataagaggttgtgcctcgatcggagtcgctggagctccctcataagggtcctaatcgtcggggaagacctcatcctcttctactgggggtgaagcagctggtggtggggtagatggatctgctggggcctccggtgctgaagccgtcgttggcggacgattcaacatggccaatatgtgtctgagctgctccataattacgttctg

SEQ ID NO: 284738 - DNA, 962 bp, Cannabis indica
gaaaaataattccaagtttaaagaccgcttggccggtcatgatgtcttaaaggccttgaggccatatatatataaacaggagataaaaagagaagtgttcaaacagctagagtcccaggctctgggttcggttcttttgagccaactggagcaggaggatctgttgttcgagcaggagaagcatcagcagcctggtcagaagcttggccggaggttgaagcagccacctctttcccaccataggcaacttgggccgcacagtactcgaggtacatgtccttggcgtcgcccaagtagtcgaagttggcctggggattagccttccaaaaatcaaagaagagctcgaggctggcagtctccaaagcattgaccttctccttcaaacggtccgcctcggccacctgagcgtccttatcttccttcagccgaagaaggacctgccgcagagaactcctctcatcctgaagacgatcaacttcagcagataaggtctcgatggtttcctcaaagcgatcagcagcctcgaggtcctttgtcagcacggtgatcttcttctcggcggcaaacagcttcttgttggcctcacccaactcatgacgaacagctgcagtctccgccctggcctcctcagcttccttcttggccaagtccgcctccgccctcaaggtgtcggacagagccgcactcttggaagtagcagatttagcccgggagtaggtgtaagccaacttcaaaccggcctgcataaaggaaaaagtcagcatatggagctaagtatgaaaagctaaagggaagtatcgaaaagaaaagactaaccctggtgagctccttcaagactccgcccaccaacacatccagagatgagtcgtcagcaccagccagttgctcaccgacctcaggaaccagccggttcatgtagtgagccatcacctccttgcccttcttggcctcaggcagcacgg

SEQ ID NO: 284739 - DNA, 541 bp, Cannabis indica
ccaggtcacttcctgaagcaaaaaaaaaaaataaaaatcatttaacaagttactttataagaaatttaaaataacatgtttcttttcaacacaacaacatagtcttattcaaatgtaaagtatcaggttacattcagaagcaatataaaactataagattgaactagcaggtgacttttttcaagacatggtatttttttttgttataaattgcagccacaacaaaacaaacacaaccatattcaaatgtaaagttccaggttacattcagaggcaatataaaaccctaagattgaactagcaggtgacttttttcaagacatggtatttttttgctataaattgcagccacaacaaaacaaacacaaccatattcaaatgtaaagtaccagcttacattcagaggcaatataaaaccctaagattgaactacaaggtgaactttttcaagatatgagagtttttttgtaaaaaattacaatcacaacacaacaggttactatgaaaaccaaaacaaaaacctaaaattaaaattccttat

SEQ ID NO: 284740 - DNA, 598 bp, Cannabis indica
ggcttgcaatttttagtcttttagtacaaaaaatatattttaacatgtaggtcacttaaatagttttttagtcaatattacaaaccaatagatgataacaattgtattattttaaaatattttaacttgtcactatcttattcttctttttagatttttatttatttattcaaaatttcggcagcataacaacttaaaaatcataaatccaaaattttataatctacaaaaacattaagcaatcattacagaacattatgtgcatgaaaaagtaatccacccatccgaccgcagtacatttaatcacagaacctacttcactacggatgaatatttaagatattcaaactcttctatatgatgatacacatatttgagtactatgtattttctaatataagaaatgtaaaaataattacaaacctttaaattgcaaaaagattattatagaaattatagtgggcagcagcgatccaatgcagtaaagcaagaactaatttcaaaaaaaaaaaagaaacaacgtaagcaaaagaatatatattcacacacactttatacatattcatatatatatatatatatatatatcctaacacaa

SEQ ID NO: 284741 - DNA, 876 bp, Cannabis indica
ttgtccacaacactgccgcacgcattgaaaatagagttccgttgtaggcatctcgggcttcaacacccatctcccacaactgtttcagttcatcaattaacggtctcatgaatacatctatgtctttcccaagagaagatggacttggaatcaataaggccaacaacaacgattcaaaactcatacactttcacggtggaaaattatatgggacacaaataactggccacaggctgtaagagttgctcatattgccaaatggattaaaaccaaccgtagccaatcccggcctgacatttctaggttcaacagtaaaagacgaatgaaggcggtcaaaccgctccaattcttcagcatccgcaggatgcctaagcacaccgtcttctttcggtctttatgagtaatgccactgcatatcctccgcggtgtgtctttagcaatataattgttttagtctcggtgtgagtggaaagtaacgcataactttgtgaggaacttttttccccttacctttttttttacccatcgtgattcaccacatatagggcaaaaccttttcttctcattctccttcctgaaaatggcacaattatacttgcatacatctattgagtcgtaacccaaaccttgatcgcgcaatcgcatcttcgactcataatgcgacttcggtaattttgacccctccagaaatagttcaatcacgatagacagcaacatatcgaaagagtggttactccacctattcaaaaccttgcagtgcataagttttaccagtgcattgagggccaattttttcaacctggatacaactcagactccatctccttaaataattcatcaaacttgttgttgtcattgatagggggttcattgaag

SEQ ID NO: 284742 - DNA, 677 bp, Cannabis indica
aaattcagattgcataaaaaaaatcatagagttcaagcatgttcatggcaacatcaagctcttgaataagagcttcatcaacaacaaccaaatattttccagcagtaaaacaataagtaaatattagattcaagcatgaaaaacaacctagaatcatactctaagctcaatcctacacaaatcaagagattaacaagcttaaacatccaattcactaagcatgcaacaccaagaacaaacaatctcaagcatgcttttatcaccatatttcagccatgaattcaacaaacaactcatataatttcagctagaaactacctcaatctcttgctcaaacaagctccaagcttccaacacccttttccaacacaaatcaagcttccaaatcaagctaatttctcacaaatcaagcttgaaaatcaaaggggtaaaagagagggagagggttcggttgagagggagaagccaccagaaaattacatttcatttcctcaaaaatcacattttccaaacatagtaattaggggtcaaatgaccaaaatgcccttagggcttaaatacccacatacaccctcacaagggtaaaatagtcattcaatactcaattaatttcaaataaatttcagattatcactcatcaaataaaatgccaattaaatcaatccaatttacatttc

SEQ ID NO: 284743 - DNA, 482 bp, Cannabis indica
aaaataaatataaaaaaaagtttcaagtttcaacgatacaataattattttttcagcgaaaaaaaaataatcagtaggcttaggttgggccttcacatattgaacctaaataaatataaaaattagtatttttataatatgcgatgcggtgcgggttgaaccgcatattaacaattcaaaaccgcaaaccgcaccgcacctcgcggtttagaaaaaattcaaaccgcgaccgcaccgcaaagaattttaaaccgcatttttttgcggtatggtgcggtgcaggcggtttgaacagtttgagcggtttgatgaacacccctaccggcagcaactccaacgacttttccgacaccggcaactactccgacgatgaaaaaaagatgataatctagaaacccataaaatttattaaccaataaaatgaaagaaaaatagaggttcccactccaactgttgatgtttttattgtaaatttttaagtg

SEQ ID NO: 284744 - DNA, 513 bp, Cannabis indica
taccaaataaagataataagtcacaccaccgcaaaagcaacgttcatacatcaaagcgtcataaaattcaaaagggtcatcactaagaggatgtccgcacatcaaaaggatcgttaagcatacatacttaatgccacaatggcgatgttcatactttaaacaaattggacctaaagtttaaatcaattgtcacttgtaaacaaaagggagaacttaaaagacccactatggagcaatggtaccatcttcagcaatggagaacatcacatcgtcaatgccactcccgccagaaacagaagtatgagcgtcgacacccatactagggacagaggtatgagcatcagcgccctcatcaaacacagagatatgagcgtcaacatccatttcattctcttgctcaagagccaaatattcttcatgaagtgcaatagcaccatcgacgtcccatccacgatggagccctttcttatactgtatcatcaactccccccttgtcttgatggcagtcttgag

SEQ ID NO: 284745 - DNA, 570 bp, Cannabis indica
agattccaataagtagatctagaatttacaaagtaaattccctaacttattaattcctccttgcgccactatagattcaaaattgcactctcaattaaatagaacactctatatgtaccaagatatagatatgttatgattatccattgttacaatcctaatagttaaaggtcctctatgatgatctacatcgaatatggataaatttactgttgtgccattcaatatattttatctttaacacacttttctacctataaatgatattttagtaaactaatataattactgaaatgagatctcaatcattatctctattaagccaagctcaaaggatattatagtttcacttctaaatacttatagaagctatagattctatatctatgattagcgctcccactcaattgaactaccatgttctcaagatgtaagtatccgccagaactattggttagctttcacgaacaactctaagaacataaataatacacttgagatcgaacttaaccatatcgggattaagatctatagacctaagatcaaccagtaatattgacttagaaagat

SEQ ID NO: 284746 - DNA, 508 bp, Cannabis indica
tcatgtggatagaaataacttatcagaattatgagaaaaagatagaagaattcttgcatagtccattcgaatgacttgagtcaagatttataatcctcataacattttatggtatcttattttgattgcttaatctctagcaagtattttacacttcaaatactagactgctatgttgatgacatagtcttaaagaaacttacagtttcagactaagataataagtcacaactagatacccctcaaaacaataggaaaaggttaaaagtactatctaaccagacaccaattattgagtgggagccatctgagatgtaatcaaatgaggaacattaggggacaattaagaaagatttatcaaaagtgacctatatgttagatattaaggaactgtatatcagttatccttatatctacaccaactcattaagaatttgagataatggttactctggaggtggaggagttattctagaacagtgtaaaaacccatttataataattcaag

SEQ ID NO: 284747 - DNA, 624 bp, Cannabis indica
tcactataaagtcttgaaccttctttcatgtgatagttgcgagtggttcggcttcagtcgactttgtaaagtagtcgactactaccaccgcgtactgcactctacctttacctttaggcaattgcccgattaggtcaattccccagatggcaaagggccacggactttgcatttgtgtcagctcgttgggcagagcccttggtatctttgaaaatctctggcatttgtcgcacttcttgacgtaagtttttgaatcttcgatcatcgtcggccagaagtagccttgccttagaattttctttgataagctctgtccggctgcatgattttcgcagaatccgtcgtgaacttcatatagaagccgtgcagcttcatttgatgtgacgcaccttagaaatggcattaagaatcctcttatgtacatgatcctgtctacgatgatgtaccgtgctgcctttcttctcattttccgagcttcatttcggttatctgggagttccccagagttgatataggctgctattggcatcatccagttcagagatgtgtcgatcatttcgatttcttccgtgccggtgatgctaggctcttcaagaaactagatcgggaccaggttcgccttgt

SEQ ID NO: 284748 - DNA, 536 bp, Cannabis indica
ccccaaataacataaaaacgagaaaatctagggttcctgaaaatcacccaaccggcagaccggttgcccaaccggaattccggttctgggaattttcagaaccccatccggaattccggatgcacaaccgaaattccggttcctcgcagacaaaactcaaaaattcataacttcatcaattcgaacccaaagcatatcaaaccttccagacctgttctaattacccctaagaacaaatccaaagcaagaaaaccaagcttcaatcacagaaactcaattcaccattggaggttcaagattgagttcaaaactcaaaacttgactaatccctccaaacagccactaaatcatgcataattcaacatacttcaacatcatttaacaccagaaaacactactcaaccattgcagcaaccacaacaacgaaaatcaagaatttgctttgaaaaccatagcttttgtactaaaatttcacaaacttaaacaagggtaacaagcatgcattacaacccctataatccattcaattcaagcat

SEQ ID NO: 284749 - DNA, 571 bp, Cannabis indica
acctcgttgattagcaacaagctgcacagcaagtttaaaaatgacgtaatacgcctatgttagttagggtgttacagtttgatattttagttttgttgagaaaactaaaaatgttaaatgatattttttaaagtggccttaaagggtcatttcaagaggaaaatatacaaaagtgatattttatatacactttatggtagaaatgtggggtgagccacaaacttaatcaaaatgtgatgagacattgttgattagttatttgatttggaattcaaattctaaatcaattttggctatgtgcatatgcgaaagttttgacatattttggtgtcaaaattttagtgaaaataatttcaagaaggaaattaaagagaaattataaagacaaagaggtcttctatattttaaaatcaagatattatcttgatagtgaaatgtgaaaaaatgtgggggtgatatatccaatatttatcaagcaatttggtaaaaggatggatgatatctgaaatttaggcatgcttggtgcctaagacttgagtatatgtaacgccctaatgctaaggcacgctac

SEQ ID NO: 284750 - DNA, 547 bp, Cannabis indica
aagcttcttgggtttagccggttattatcgtcagtttgttgaagggtttcctaagatctcaacacccttaaccgaacttacgaagaagaatcagcggtttgtgtggtcagataaatgtgaagctagttttcaggagctgaaacagagattgattacggctccagtgttagctctgccttctgacaaagaaaagttcgtggtttattacgatgcatccagacagggtatggggtgtgtattgctgcaagccgattgggttatcgcttatgcctcctctcagttaaaggattatgaagaactatacccgactcatgacttagaattggtcgcgatagtttttgcgttgaagatctggcggcattacctttatggggaaaagtgtgaaatctataccgaccacaaaagtctcaaatatttctttactcagaaagatttgaatatgagacagaggcgttggttagagttagtaaaggattatgattgggagattctctatcaccccgggaaggccaacgtagtggccgatgccctgagcaggaagggtccc

SEQ ID NO: 284751 - DNA, 848 bp, Cannabis indica
acatatatataaatttatagtagtctttctttaatcattacttaaaataatactaattaatactgtaatataaattgggtagacaaactaagcacatatgataacataaatatgtataattagttgtcaagtttgacacaaaaatattgacctagtttattccgttatttttaataaaatatatcatagatcaataatatggggagaataacttttcatgaaaagaaaaaaaaatgtaaaacaaatcagagacttatagttacaataaaaatacatgtaaaaataaaattatatagtgactaaaatctgcattgaatgttttgtcaaatttttataaattcacaaaatctcaatataacgagcttacaaaattaaaaattattgatttattctgcaacacattataattttaaaaaaataataaagtttacaatgaagtttggtagcttttggttcagataggagcgagttttgggggcctaaaatggaaattttcgagcccttgctgcccagtttcggcttccccgaaggttagctttcctgaaggttagcttccctgatggttaacttccctgaaagttagcttccacgaaggttagcttccctgaaggttagctttcctgaaggttagttttcttaaaggttagcttccctgaaggttagcttctccaaaggttggcttccccgaaggttagctaccccgaaggttagcttccctgaagataagtttccccgaaggtgagcttccacatttgtggggcttccagaggcagggtttaccgagaaggtcaactttagtattttagtcataaatttttactcgggtgtccgttttagatgttttacat

SEQ ID NO: 284752 - DNA, 614 bp, Cannabis indica
gcctagtagcaaagtacacacgctcttgggagtccgtcagctccgtgtactgggtgtattggggagtgtacccccttttctgacgtttctcctccgtccggatgccgcctttggaggatcgtttactccttgagccctgggaagggcctgccaggctagcggttggagcggagtatgagggagcttgtccatttatccctgagggatttccaaaatgggaggatgcgggcgccaaggcctggccctgactatattcgggagtggcagagaactgtataccgctcatcggaggaaccgcggtcgggatagtacccgagggcggtgctccgggcatgtaccctgctatcccggtgggatagtatcctccataggccactatttgggcttcttcaaggttgatatatttttggactctcttttggaagtcctgaaggctagcagccccttcttgttgtagttcgttccagaagggagtccctgtacggatgcctacctggagaagagcaagctgttgtccgtcatcaactttcttggtctttgaggcttcctctcggaacctctttatgtagttttctaaggtctcggtgggcgaattgtttgatattagtcaaggc

SEQ ID NO: 284753 - DNA, 576 bp, Cannabis indica
gttttttgccttcctaatggcctctagaaaactaaggccgtatttctaagcacacccgatcaaggtattgactaatcacccactccggcaagtcctacaaaaaccaaaagcatccggtaggctcctcaagtgggcaatagaattaagtcagttcgacttacactacgttccccgaatctccgtaaaaggccaagccttggcagacttcattaccgaatgcaacgaagctgaggcaaccgcgaatacgccaacgccatcaatccccacatggagagtgtttgtggacggagcctccaatgaaaatggatccggagcgggggtggcaatgatatccccgaccggacttcgactccaggcagccctacggttcgacttctcagcttccagcaatgaggccgaatacgaggccttgatagcagggctgaggctagcgaggccgtaggggccaaaagagtggaagtctacagtgactcccgaactggtcgtaaaatcgagatatcgaggagagtaccagcacgtggcgagcgatggccgcgtatgtaacagtagtccgggagctgctccgacgagttcaca

SEQ ID NO: 284754 - DNA, 678 bp, Cannabis indica
tccaaaaggtggattaggtctatgccgatcagaattgacgatagggagttaagtgcttacctaatagaaatgagcttagcagattttgatatcatactgggaatggatttcttgtccaaatattcggccagtattgactgtaagaggaagatggtaatcttccaaccagaacgtgaagaaccgcttgtttttgtcggttcaattcagggatctcggatcccggtgatttcggccttatcagctaaaaaattattgtgtgatggatgtctagggtttctggccgtggtattagacaccactcggctagactctgttcggccagaagacatcaagatggttcgagaatttctagatatttttcctaacgaacttctgggtttaccacctcagcgagaaattgattttataattgatttggaacctggaccagaaccggtttccaaggctccttatagaatggctccagctgagcttaaagaattgaaaattcagctacaggggttgcttgacatatggtttactcggcctagtgtgtcaccctggggagcccccggtagttatttgtcaagaagaaggatggatctctattaccgggagttgaacaagctaacagttaagaataatatcctttacctaggatcgatgatctttttgatcaactccaggggtaagacggtc

SEQ ID NO: 284755 - DNA, 687 bp, Cannabis indica
ctttttgtctagctctgactctggctctggttctggcgggaagagaggttagcatcaatcaacttagcacagagctcagaagaagaaatcccataaaccctagacaaaccttgctctcctcaaacaacatagtctccatctatgtgaatcattctcctcgattcatcaacaacatgtattggatggccacgcgaaacgtcgtcgtttcttctcctcgttggcgctcgctcgctctgcttcttcgttttcctccttctcgttacagctccttcactccctccccagtcgccctgtaatctctctctctctctctctttgctttgttttgttgaagctgactgagtttactgtgtgcatttttgtttacttttatgcttgattatgccagttttcttctgtttgttttgatggaaaatgtcatcttttttataaaaattgtagtgagaattgtgttaaatattgtccaatatatatgtgtttttgagttttggtttgcttgtattgagtttcaaaatttgatggggtcttttaattttccaccagaatatttttgtttggatattgaattgcagaaacgatggaacttaagttaaatccttgttgtgctcaatgttatacgaatgtagtttgtttccctttgtagaaaaagcaatagtattctccttttgattagattagagaggggtg

SEQ ID NO: 284756 - DNA, 688 bp, Cannabis indica
aaacccctatacgaaaccaattgtttttaaacttaaaacgaaattaaaccataccttaagctttccctcttcaaagatttgctatcctgctactaccagagcttagatcgctaagttttggattgaaaattgaagaaaatagatataaggggagaaggttttatcgaaggagggagaacgagggtttcgttcgtcgttcgttctgttctgtttcactgataacttaatatatatatatatataagttaacttacgttaacttacttatatataaataatattataataatataataatataataataataataatataataatattaataaaaattttattattaatagttatcttattatttcttagccactaagaaatttctatttctaaggtatttggccaacttcgagtaccctaaaataccccgatatttctaaaatcaacttatcccaataatctcatcaatatttctaactaaaactgttgtgacatttttggcctccaatcgggtctccagggtcgccaaacttgaaaatatttttatttcacaaataactcatattatatccacgtatttcaaataaatccccgtaattaacaaattacgcttatgtatccacttattaagtctcctgggtcgcccaacctgaaaatatttttattccacatatagctcatattacatt

SEQ ID NO: 284757 - DNA, 824 bp, Cannabis indica
cacagtctcttaattaataaacaaaccctaaatcttcttctcttctcaaataagccattgcttagtgaaaaattcacaaataagacataatcttatttagaattctaactgattaattaaaaccaattaactgagactacaaaataatattatactagttagtgtggggaccatgaccctaagtaatcaagctcccaataagtagatccaaaatttaccaagtaaatttcttaacttattaattcctcctgattccactatagatttagaattgcactcctaattacatagaacgttttatataccaaaaataaacacgatttgaattacccattgtttcaatccaaataatcaaatatcttctatagatgatctacatcgagtgctctaccctttaatgtatttttatcattaaaatactttagctacttgtaaatgatatttcagtaaactaatataattactgaaatgagcgctcaatcatttatcatgttaagccaagctcgaaggaaatcatcgtttcacttctaaaagttatagaagctataaattctatatatgtgattagcactcccactcacttatactaccatattcccaagatgtaagtattgggaagattcactttgtcaactttaacgaacaagtcaaagacatgaataataatctaagccagaacctaaccatcttaggattaagatctattgacctaagattaactagtaatattatcttagaagatataacgataagtttatgatatcttatccaatatcaatatcgatccagtttgatgtatactccatacatctgatactatcata

SEQ ID NO: 284758 - DNA, 751 bp, Cannabis indica
ctgtgaaagagccatcattggcaatatatcgaacaatggtccaagagctagcaaagaattttgaggaatgtcaattcgagcatgtgcctcgaacacaaaataggtacgccgatgctttggctactatggcttcaaaaattgaggtatcagaaatccaaaacttgacatttaaaatagtcaatcaaaagtgttcaatcacctcggggtatggaaaagagtctgccagcaagaagtggacacaacaaatgattgataagctcgcgaaattgaaaaagactcatctcaaagaaatgcaacgctttgttgttataggtgggacactttattaccgatcatcggatggggtgttagcaagatgtttagaccaagaggaaatctctactcagatggaagaaattcataatgctgcctgtggagtcgaaggtcccaaattatcaagaagattacaaagggccggttatttttggctagaaatggaggaagatgctgcaagattgcaaaaagattgtccgcaatgtcaactcttatttaataaccatgaggcaattttgataaccgaagattacgattggaggagaccatataaagaatatttacgggacaaaataacaccatgtgataagaaagaaaaagaaaaactactcagacacattagtaagtatttcttgaaaacagatgatgacctctaccgcaaaggattcaatgggaaattattgcgttgcatttgcaaggaagaagccaatgaagtaat

SEQ ID NO: 284759 - DNA, 460 bp, Cannabis indica
attgcagcgtcaagttgtgaagcttgcctaccacaaactcaatgctagatctgactatgtcctctactaactggggtgagatctgaatcttgctagctatctgttggaattatctaaccaggatcttagatctactcacaagtatgttgatttaacaacctaactatgaacttctaaaacgataattaaattaaacacatataaagtatgagaaaccttacattgttgcagcggaataatatgtctcctcccactcagatctctaacccttaattcctttctatcgtagagtataatcaagatctgagcccgaatgtccttctttgttgactatgaattctacacagccttcctcacttagagggatttcgaaaacagagaagaaagagagagagagagtggcggcttcaagagtgtttgagtgaaagaaaataatgcagtaatgtgtgtgaaacctgaa

SEQ ID NO: 284760 - DNA, 553 bp, Cannabis indica
cagatttaataacccttgtatcctgtcctttagcagagtatcaccaagatctaagttcgaatctccttctcttgaaactggattcttcacagccttacacactatgattgagtaccacttgatgtgtgtgagcacttactctatcactatagggtatgaaattatgaagagatgaagagagaagagtggttcgaaataggtagaagagatggctcaaacttttcactaaaggcaagtgtttcatcatcttttgatatgaggcatcacaatctatttataggcaacgacctaggtttaggttagaattattttgcattaaaatattgaaaaattaaatggtaaattccctttcaagtggccggtcataggttatgggccccactttgcaattttgccatttttcaacaatttttccttattttctcaaaatgccatttttctaattcaaccacttaaatacgaaaactatttatttaataattaagattaattataaaataaaattgccatttaatatatttattaattatacttaataaagtctcttgattaa

SEQ ID NO: 284761 - DNA, 396 bp, Cannabis indica
ctctctcttttcttctcatcaaaatttcgaaatccttgagtgatagagtagacccacacataaattcctatgtgtttatttcattgttttagaattcatattaggatgtaattaaaacagacttggtagtaaatctagatcctggtaaaatatttccaacatgatgccacgtcagagtgtaaaagtggatctgagcagatccaggctcctaccccacctccatcactgcatccagagaccaaaagaggcaaagagatgctcacccattacattaattggtcggtccctgaggtgtaacaccctaactaacataggtgtattacgtgatttttaaacatactgtgcagctcgttgctaatcaacgacgtttatggaaatcgtgattaattaaaattt

SEQ ID NO: 284762 - DNA, 599 bp, Cannabis indica
ttcacctgtctctcgagtaatagtttccctctgtgaccgcacctgtcacatcgcgaaactaggggcatgtgttatagtgagatttctctcacctagaaactcgagaccagacttctatttaaaggacacgtgtattcagatttccaatgaaagctgaattttccatgagagactactcgatagaatggtcaacatccttacgaatgctgaccaccccgtccatatgcgagtatagatgcgagtaagtcacgcatccttggccaagtgatatacctccagaaacggctgggagaaactcagttactcaaggggcatgcgttctcaagcatgaccccgaaattactaagttactcccaccgttccgagactacctatcagccaaggagtacgctcatttgaatattaacgcatgtcgcaaatggctgggtgtatctcagtatctcaaggggcatataaccgcgtatatgaccattagaatactgagacacacccaccatttggaaactcggttaatactctcgcaattcaactcacagcatataaaatcctaaaagatctagccaataatccgaagtaataagttctgtcagtgtgcgagt

SEQ ID NO: 284763 - DNA, 534 bp, Cannabis indica
cctttatttgctactttgttttaagacttagtaattttcttagaaaagtagtatttgttaaaacaaacactttcttatcttgatgaccatgggatggtccacccctaatcacttagaatagctaacaagcatgcaaaccttagttaacagttctagcttttcttaagatcacgattaggtcatccatgaatctagtaatggtttatactaagtacacaaccattccttcattctgaaattttcctattactaggatatatcccaagaaagacttaggcaattggtagtaagtaatcatagaccatgtattttcatcaatatgcaaattgaatttctggggaggtaagtttggatataattcaaaaatcaacttaatgatctttgaactgcatatctaccaaatatttctccacccctattagtttgcaagatcgttaaccacttaccttaatgtttttcaacattgctagaaattcatgaaatttttctaacatttcaaatttattttcataaggtaaaatctagagtgatcgt

SEQ ID NO: 284764 - DNA, 511 bp, Cannabis indica
acctacaacaaagcatgccccaaagactgttttcaacttccaagaatcgatcagctcgtggatgcaacatcagggcatgaaatattaagcttcatggatgcttattcagggtacaatcggatcgaaatgcatccaccagaccaagaacgtacaagttttcgaatagatatgggtctatattggtacaaagtaatgccgtttggtctaaaaaatgctggagcaacataccaaagattggtaaaaaaaatgtttaaagaccagatcgggcgaaatattgaagtgtatgtggatgacatgctcgttaaatccaggaaggctggggggcacgtagatgacttggatgaatgcttcaaggtcctcaaaaagtataacatgaaactaaatcccgtaaagtgctcctttggagtcagctcgggaaagtttctgggcttcattgtcaatgcccgaggaattgaagccaatcaagaaaagattcaagccctcctggatatgaaatcgccaactaaaacca

SEQ ID NO: 284765 - DNA, 612 bp, Cannabis indica
ggagactagaagtactcgtcaacctcgcccattagaagatgctcaggatccaaatgaggaagatgtagcctcaagagcagctgagggttctgaggaagaagaaggaattcccgatgatgactacgagggaaacctcgatgagtatgcctacgacgaaggtagctactcagagttggtgcttctcaggcaaaaagctatcgatcacgaagccgagatcgaagcccagaaagcacaaaaccaaaaaatgcaagaagtgatgctggccatgcaaaaggccatggaggcggctggcattcacgtgcatcccaaggcagtgactgctggactcggcaaggaaccagaggaatcctcgcctagtacccaacagagaagtctagggagcctagccccataaggtatcctgctgaagggaaccaaaagaaaaaccctacctctactccagggcgaaagaaaaaggcgcaggatccgcgaaaggtccgctcagatttccctaaagggaaaggtccgcagaggggcaagctccaaaaagggagtcttggccctcaggatcgagaggaccgaaaagcgtttccgtgcaccaagagcccggaggtagaggaagaagaggacaga

SEQ ID NO: 284766 - DNA, 787 bp, Cannabis indica
caattcttgattttttgcatttttttctttctacaacacccagttggaactaacccctctccagacacgactcaaggagtatactgctctctatctttgtttgtttttcctgttcgtataggaatggagatgttcagagaaggagggtccacatcatgacccccaatgctggaaggtgccaattacccatactggaaaaccaaaatgcgagcattctaagggcggcgaatgaaagagtttggatggccatagaagatggttggacatgcccaacgatgatggataacagtaccaaaccaaaacctatgagcttgtggactccagatgagatggagagggccaattttaattcgaaggccatgcatgctttgttcaatgtagtgtccacaaatcaattgaaggtcattgcgaactgtgagatggccaaagaggcttgggaaaaactacgaaataaaaatgaaggaacggatgcaataaagaaatctcgtcttcgtgctttagcaaaagcgtttgaagatttatcaatggaggaagaagaaacgatggttgagttccatgccaaattgtgtgacatatatatcaaatgagtcttatgctttgggaaagacttattcaaatgcaaagttggttcgtaaagttcttgcagttctacctaggagatttatgtctaaagtaacctccattgaagaaatgagaaacgtggatgaactggatcttaatgaactgattggatccttgcagaattatgaaatgtccttaacaagatggaagaaagaaaaaaagaaga

SEQ ID NO: 284767 - DNA, 895 bp, Cannabis indica
aagaccatttctttccaaccaacgtgcatggctttgatgatcattattctttatagtaattccacaattatgctacaaagtaggagcatggatgatatagttagagaatcagtagcatcacgaattaggtggtaattaagttactgtttgaaatggagcttttctctctactgttgaattaatccaaagtgttttgagcatgaaacatatatagggctgccatgtggatttaattaaagattggttcaatagttttgagtggagtgtggttaaattaactagagttaagtccactcaaaaatctataaatagagctatgtagtgcacttatttcctcactcatattcaaagaagccatcaaaattctcaaaccacgctcttactaaatttcatatctaaaacattcattttctttcttgagccctctctctaccgccagctatagtcactttcttctaatcccattaatcacttgtttcttgaaaagccgtaagccaaaatcactacaccaccatcgcctctcctatatatacatatacacataaatatatatagggctcatcacattcttcatcgtttcgacgtcactaccttcatcgttttacattcaagtgtctagtgttctactagattttatttggaaactaaggtatcattttataatttgagattagtaaattcaaatttaaggtttcatatatatatatatatatatgtatatatgtatatatatacccctataatgtgttctaattaataagtatgaaatttaggtttttcataagacaattatttctcaagggtcactttcattgcaatcaaggctaggactccacaattgaggtaaggaaattaagtagaaaaaaacataagttttctgtatgtaataacattc

SEQ ID NO: 284768 - DNA, 606 bp, Cannabis indica
aaccgcgcaaattgtttcctagttaacgtataaaaaatagatgaaattacactctatatattttttatattgtcttttttttatttactctcttttttaaagtctatcaattattacttcttttttttaaacatcatgccaattttgtccctgtcacttcaagatactctccatataactcttttatgtcagggtattttgggtacaagacatataaaatagatatgtttcaattaaatataaaattagaggtaaattcgattaattgattaataaaagtggtatttttcaacttaccccataaaaataaatgtgtaataatttgggaaacttacaaaaatactgtttttttaccaaatgttttcaaaaatactgggacacgggaaactttacatttttactgtccaagcccatttttatttcttttatactgcccgtgcccaatatatttgcttttatactgtaaacagtatcaaaacacaaacggcacctcaccttcgtggttagagacggataaatcaacaccgaaatcatagaaacaccagaaaaaaaaactataaaatctggcaaagagaaaaaattactaaatcaacaacaaattactgt

SEQ ID NO: 284769 - DNA, 912 bp, Cannabis indica
gaaagaaaccaatccctcaaactcaatcgacggtgcctccccaaccaactactgaaatgatgagcactgtggcagatatattctcagctatgcgtgccacttgggggggaatttgacgcctgaacaacgtgcccaaatatttaacccacgctttgacaatttcattcaaacgtatagtcagtcgcagtcgcctggtggttcgtcttctcagagtcatgccgctcctccggaacagcaacaacaacctccttcgcaaccacaatttcagccttcctcgcaacaacaattccaaaatttgtcacagcagcaatttgaaaattttttgcagcagcaaccccaatcttttcctcagcagtttcctcagcagcaacaacagtctgctccgccaatgggaaatcagttcttataccgaacaccgtcagagtctcctccgctcggctcaaactttgctgattttggattatttgggagttcatcgcaggagaaccaatttttttcaactcccattttcaaccaagctgagctcggtaatttaacgctgggtttatcatcagaccaagcgtatgtgccttctccgccacgggcttcggggactcgtaccgaaaataatccagatcaagacttcataattagagacctgaatgaagatgttaatgaataatttatttatgttttgtaataatttagtttaattttgagacaatattttattaggattaatatgttaaagttaattactttggagacaattttaaattattaataaattttattaaattgttttaattatattaattagatttatttattaaatatataaataaatatttatttatatataagattaatatataaataaatttttataaatatttattaattttttttattctgatgggtattagcggcgga

SEQ ID NO: 284770 - DNA, 636 bp, Cannabis indica
ttttttttttttggttatttgatagttgatttgtagttgttgagaaattaatttttgattattttttagttgtttttttacttttttctaaacaaaatatagttttgtaattttaaaattttaaaagtatatttttgtaaataaaaactttaggtcgtaaaattgtaaataaaatataaaaaagattatttttgattttttttttcttttttttattgctgtttttagtattttttttagggtaaattgcggcataaatacctaatatttcagattttatatacttaaatagatattgtttatttttggaagcaaaaaatacctaatgttacaattctcttacactgttactaccacttccgttaactcataaatatggacacatgaagggttcagatgcattacatttatttttattttattttaaaacttaatattcttaatatcagaaactaaatgctacttatttaaaaaaaaaaaaaaaaaaaaaacaaaaaaaaaaaacttaagtactacataacaatttaacatgatattggcacttcaattcgataatcatgttccatatactacacttgttcactcagctatggtaatttagtattgctatttcttttatttttttaaaaaaacaag

SEQ ID NO: 284771 - DNA, 689 bp, Cannabis indica
ttcttgggatatcctgaagggaagggatacaaactttggtgtcttgaatcagggttcaaaaagtgtatcatcagcagagatgtcacattcagagaagaagaaatggccatgaaaccattaccaaatccaacactgcagacagaagagccatattgcagagtcaatcttgaggtggatcagtcacactgcacagacaaagactcagaagcagatgagaatcaagctcaagagcttgaagaacaatctcatgaaacacaaggagatcttgatgactatctcttggccagagacagggaaagaagagacatcagacctcctacaagacttggttatgcagatttctctgcatttgcactagctgctgccagtgaactcgaaaattctgaacccactacatacaaggaggcactgaaatgcaaaaacagggaacactggttgagggcaatcaatgaagaaaaagtatcattgatcagaaacaaaacatggtctgttgtgaacagaccaccagggcaaagattgatcgatagcaagtggctgtttagacagaaagagggagtcaatgaaaattcagtaaggttcaaggcaaggcttgtggcaaagggattcacacagagagaaggtgtcgatttcaatgatatatttgcacctgtggtgaaacaagcttctattagagccattatggcaaaagc

SEQ ID NO: 284772 - DNA, 553 bp, Cannabis indica
attccacatatattttcaaaatcaaagcttttgaacaaaatctcataaacttgaaccaagtaactagcatgcataaaacctacttaattccaatcaattcaagcatagaaaaacatagaaaacaaccctaaactacagcagcaacaaactcaaaaacatcatgcatttactcatcattttcaccattttattcaagaaaataaaggaggaaaattaagaaacacctaccacaatcaagagttcacaaaattatgatgaatctagcttgaaaattgaagaaaaatccagcccttgaaccccaagcaaccagccgaaaagagagagagaaaagagagagaaagcttttcaatttctaatttttttaaacttagtaattttttgataaaatgaactaaaacccacataacatataacctcatttcagccaacattaataaaataaacatttatttttcaaataacaaaatcactaaaagacaaaatactaatgggcaaaaagaccattttgcccctccacactaaaaccacataataatcactaaaggggtatttt

SEQ ID NO: 284773 - DNA, 1058 bp, Cannabis indica
atcggattggatgttatttttaaatatccaattggatcagatcggatggtggatggggtgtctaaaaatccaatacatccaacatccaatcgaactaattagtattttcatttagtttggatgaataattagattttatattgttatacgtcaaatctatatgtatatatgaaaattaacattaaagttttacttttcttttcttggattggatggatccagtccaatccaatacatactggatctaaaatattggatggatccgatccaatccaaaaaatactaggtttaaaatattagataaacccaaattaaataaataaatatatatgaaatacatccaatggatagaaccgatccaatccaacatccaatggatgttggatcgattggatgacgaaattaattggatcggatcggatggtaaaatctaacatccaatatatgattggatcggatctggataggcctaaaaacattggatccaatgaacacccctattaaaagtgtttatttagatagcagtgaattggttaaaccttagaaggaagttttaactgtatggctaaggacttatcagtatcagacaaggggttagtaatcaactggacttagattgtgttctggttagtggtggactcagaatggaaaattttagataaatttcacactatctctctttctcattataaatagatattatcaagtatgttagtttgagaccctattattgttggtgcagttttaaaagggtacagtggatctggtgcctaagtgcctgatgtgttagtaggttaaggttaaaactttagaaacccactgggttattgtaacttttaactattccagagtggtacttaaattagggttgtacaaaaaaatttgtaaaccgcctaaaccgaataacccgcccaaaccgaaccgaaaaaaccgataaaaattacaaaccaaaataacccgaaaaaattacaaaccgcccaatctgttaattgggcgggttgaaaataggtccaacccgcccaattaaaccgaccaactcgaccaacccgattttgcac

SEQ ID NO: 284774 - DNA, 756 bp, Cannabis indica
ttgatagagatgagactagtagatgtcgatgatatattttttaggaatggatttcctatctaaatactcagctagtattgattgcaagaggaagatggtgatcttccaaccggaaagtaagaaccatttgtgtttgttggttcggttcggggatctcggatcccggtgatttcggccatgtcagttagggagttattgcatggcggatgtttagggtttctggccgtggtgatggacaccactcggccacatagcattcggccagaagatataagagtggttcgggaatttctagatgtttttcccaaagaacttccagggctaccacctcagcgggagattgatttcattatagatttggcaccaggggtggaaccggtttccagggctccatatagaatggctccagctgaacttaaggaattaaagattcagcttcaggggttgcttgacatagggtttattcggcctagtgtgtcaccctggggagctccggttttgttcgtcaagaagaaagatggaactatgaggatgtgcatcgattatcgggagttaaacaagctaacagtgaagaataaatatccactacctaggatcgatgatctgtttgatcaacttcaggggaagacggtcttttccaagattgatctccgctcgggttatcatcagttgaaaatccgagaggaggacattccgaagacggctttccgtactaggtatggacattacgaattcttggttatgtcgtttggacta

SEQ ID NO: 284775 - DNA, 495 bp, Cannabis indica
taaattatacatgattttgagatatgatataggcaattttttttttgattgattgagcttttcaagcctaccttatttgttaaatccctagttttacccaatttgactaaatgttgacattctttgttttttctttttaattctatacaataacctttaagcctaaaaagaaaatccttattcatttttttttcacaccattgtatattgatgttttatttatttgtaaaggtgtgagagttttgttgatgagacaatattcatggttatgtatatgtgatgatgaaaaaaaattattattcccttagaattaatgtttgcaagttgtaagtatttcaaaaaaaaatcaataaaaaaaaaaatgaatacttgcaacaatttaagtgtgggggaataataagttttatggaaaaaaagatacaagattgaattgttgagaagaatgattggggaatacaaataggaattatttgagagaatgttgtatatgtatgt

SEQ ID NO: 284776 - DNA, 573 bp, Cannabis indica
tggcctcttttattttgatgcttggctctgccaagcgttccacgggtactacccccagtccttcaatctcactgtccaaagctaacgtagccaggcagtccgcgtgagcgttcttttccctgaggattctttctactttatagtctgtgaactcgtggagcagttcccaaactatcgtacatgtgcggccattctttcgccgcgcgtttgatactctctcgatatctggttcacgaccagttaggagtcactgtagacctctactcttttggcccccacagcctttgctaatctcagccctgctatcaaggcttcgtactcggcttcgttgtttgaagttgaaaagtcgaaccgtagggctgcctggagtcgaagtctgcttagggatatcattgcaacccctgctcaggatccatttttgttggaggctccgtccacaaatactttccatgtggggaccgacggtactggcgcgttcgcggttgcctcggcttcattacatttggtgatgaagtcccccaatgcttgtccctttatggagatacggggtatgtagtgcaagtcgaattgact

SEQ ID NO: 284777 - DNA, 1100 bp, Cannabis indica
atcggtcgaccaatcacggcgttatatgcagagtactggtcgattactgcgaagtcagccattgacttggctgtcaccggggcggttcccaaagtgattgggagtttgatcattccttttaatgttatgacgtcgcctgtaaaaccatagatgctcgacgtcacaggccgcaggtccttctcctgcaatcccatttgtttgaatgcttggaagttcaacagattcactgaactcccattgtcgacgagtatgcggtggacattatccccgccaatattggcgattataactagtgcatcggaatgcgggtgatggacccatctcgcatcactctccataaaggtgatgtcgtcgcattccttcttaaatagtttctcgggccgctcactaagattgttgacattggtgaacggcttttctttagcttctctggcataccgctcttgtgacttgcgagagtctcctgcgatatggggtcctccaatgatggttaggatgttgcgaggcgttctggaaccactcgcattttggttttctcctttgtcatccgcttggggatgactttcctcgcccttcttatacttgtcgaactttcctctccgaatcagctcctcgatttcatcctgcaagacccaacattctaaggtagtatgaccaatgtctttgtggtacttacagaattttttggggtctcttctgtcgcgatttcccctgatggggggcggcttcttgaagactccgtttctttcttcgattgcgtagatatggtctcggggtactgcgagttcagtataattgacgaaacgaggtccacccttccttttcggcgaggattccttctttggaggagacttggccaacttcggacttcgctgtctccgcgggctacgtctccttgggcttcggcccctggagttcttccctcggggactgcgagatcgtgaacgcggtattggtgatttgcgcttgtctttgcccttctctaactctgccagagaattctcgattctcttgtgggttcggccatggcgaagaacgactaaggattctggccttcgagcttgtaactctttccagaagtcggtcctcggcaaaatacc

SEQ ID NO: 284778 - DNA, 701 bp, Cannabis indica
aaaagaaaaataaagtaaaattaaattaaaagattgggttgcctcccaatagcgctgctttatcgtcgctcagctagacgttgaccgagatcttcatagtggcgccagaatcatggcggacttggcttggtcaaattgacctcccaagtagagctttaaccgctgcccgttaactttgaaagtattagggccttcacctttcagttccaccgctccataaggaaacactttgaccactgtaaatggccctgaccaccttgacttcaatttaccaggaaacaacttcagccttgaattgaaaagtagaacttgttgcccaggttgaaactccttcctaactaaatttcggtcatgccaccttttagttctctccttatagatcttagcgttctcataagcctcattccggaattcttccaactcatccaactgcagtaatcttttctgaccagcagcctttaaatccatgttcaaagttttcattgcccagtacgccttgtgttctagctccaccggtagatgacaagcctttccaaacaccaaccgatatggtgacatcccgattggcgtcttgaacgctgttctataagcccacaatgcgtcatccaactttcttgaccaatctttccttgatctctgcaccgttttctccagaatcatctttatttcccggttagaaatctcagcttggccattacttt

SEQ ID NO: 284779 - DNA, 860 bp, Cannabis indica
ctccgtacccgtacgcaaatactgagagctcaatagataatttttccttcgtggttgcgcacgcataaagctcccataaggtttaacaatctcatcctcaggtgtatcaaataacttaggacaaaagttttccgaatgacctatcaagccacagataaagcaaaacgtcggagcaaattcgtatttaaaattagcataaaaccactcaccacccgttttcttaagcttcattcgtcttttcagtgggacatcaatgttcaccgtcactctgactcgaagataatcccgccaaagaccattatagttcttaggatccgattcaacaaaggagccaatgtagtttgcagctgtagagacaattttctccgtcataaatcccgtagaaaggccatgaatctgtacccacatatcaagttgattaagctttacagccttcggatctccacctcgtggaactctaccaaatatcaatggtagcctattgaaagtccaagggctgccattaataacacgcttaatatcgatctcatggtaaaactgaaataagaaaaggttcggacccaattccttgacgaacaagcctttgcccggtttccataaccccgccaacgtgtgtttcatagcttcaaaatctatcgatcgcgcattcaaaaacctccccaccaaacaccaacgatcatccaccagaaccgcttcctcaacgtcatcctcaatctcaaaaccacattcttcctcatcatccaattctatatgcccatactgaaactccatgtcatccatggctgtgcttgtcgaagccatcaaaaccagaaaaactccaactatcccaatcgcaaaaacccgagtaaaacaaacccaac

SEQ ID NO: 284780 - DNA, 869 bp, Cannabis indica
aaagtggtagaaaatctggaaatgggtttttgaagtttctgtaatggagggaaagaggaagttaaaagaaaaaggaaaaatgggagtttttgattcgtatcaaagggtttaaatacccatatcccttattaattgggattacgacacgtggcagccagaatgcctaaggtcgcccaatctaacggccaacgatggccacgcctacacaaaaaccgaggagttttgtgacgtggcaccataaatgtaataaaaagtaataattacagccgtcatttttcgagaccctcgacgggacaaccaaaaggtcacctcctcgtgacaacctttcacctgtctctcgagtaatagtttccctcagtgaccgctcctgtcacgtcgcgaaactaggggcatgtgttatagtgagatttctctcacctagaaactcgagaccagactcctatttaaaggacacgtgtattcagatttccaatgaaagctgaaatgtccgtgagagacttctcgaagtttagacctcgcccaggataaaaccagcgagatactgcgagtacgacctaagtcgaatcacgtaaccgtaattcgcattatgcagggtagatccaactcgcatgtgtcaggacatatgcgagtatcccctctatacttctgcaaaagcatagaggtcaactctctatggtgcgatctggtcccaacgacccaatagccttgataaaccgctataggctcacatgtctaggttctatcagctcgatatgcgaggtctacaagaggcgattgcttaaagactcggacagtccctaacgtgatgataaccttgcaagctcaacaaacggaacatgaacagtcaactcgcagatgcggaagacgca

SEQ ID NO: 284781 - DNA, 567 bp, Cannabis indica
tcaccagagatcaatctcttgccactgcctcacaagttcaaaatgccaacgtggaagatgtatactaggagagaagatcctcttcccatctcaagtactttaagatgaaaatggatttacaaggagtacggggggatgtatgttgcagaatcttccccgccactctgtcggaagccgcacaacaatggaatttcaagttggctctgttaggctatttttagcctatgttttggatctattttatgtgcgtttttcgctgtgttgggacggaattacgcttgttttctatgttttcaggttctttggaataaaagaggtctcgggtgcagaaattcaataaaagacgagctgagccgaggaaaacacaaattttgaagaattgtgtatatctggccgcggctagacacagcttggccgcggctagatcacgaaagaaataaggaactctgggatgctacagtcgccgcggcgagggggagtctcgccgcggccatttaagagatacagagagagcccaaatttgcaattatctcgccgcggcgagaggaagcttggccgcggcgagat

SEQ ID NO: 284782 - DNA, 674 bp, Cannabis indica
gttatctactgcttaaatcttagggttgttttatttttacacttccaaactagttttttttttttttttttttttgtttgtatttttacgaaattctacatagaacccccctgttacaactaacggagcaatctaaatcgtaagtaaaaactgtatagcaacccatatagaaatcactggaaaaactatttagaaatttaaaccgtaatttaaaaaaaaaattaaaaaataatatattgagtaatttctttaaatcttaattattattattattgttattattattattattattttactcaacgcttaattaggttgcagtttttgaccatcgatcttatgcatacgttaacaatataatgattttcccgtcgtcatcttgtagtgtaagaaaagtgtctattgctttaactatattttaggattaattaatagtactctctggagggggctgtcattttctaaaaaatgaaaaaaaaaagtcagtgttaaaaacaaccaaaaaaaaatatacctcaaaacaaacaagacgacgatccgtaacctcaacattttcagaaactgaaatctgtttacaaggatcaccaccaattccatctgaagacatctgtttatatatggtattaaaaaggaattagagcatggttaaaaaataacaacctttacacaaccaa

SEQ ID NO: 284783 - DNA, 380 bp, Cannabis indica
agtatcactaagatctgagcccgacactccttctgttgtttggattcttcacagtcttacacactatgattgaggactaacttgctgtgtgtggggatgcactcaatcactaaaggctgaattttaatggtgaagaagactacagaattcgaattagaagaagaagtctcaaactctgtagttgtcagaaagaatgaaaactaggtcaagagtcattagaaacattagttggataatgagactattctttttcttttatactaattcacatagggttaaaattgatttatttggaataaaaaaaatgataaaaatagagcaaaaataggctctagtggccaccccttcaatgtattttacccttaaaacacttagctacc

SEQ ID NO: 284784 - DNA, 507 bp, Cannabis indica
aatccatattttctttgaagaaatctttccctagttcggagttcttaccagtcaaaagttaggatctttactcggttatggtatttcgttctaagttttgtttcagaaaaagtgtcttcagtaaaaattcaatatctctctcacttttgatccattttaaaagatctttatctcgttttaaagcttagaaaaatagctacaatttctttgtttcaataatacattttttatgatgaaattattgtctagatcggggtgtaactatttttaaaacttttatttttgggctgtattcagaaatcggcatgatccaggattttaaagaaactgttttgagaaaacatgcataactcctaggttatagctccgattttgatgatctttataccgttagaaaggtctttcaattaactaaaaactttgtgaacagtaggacttctaattcaaacgttttataagtcaaattctaggctaaagttgctgtacagtaagagtaataaatatatt

SEQ ID NO: 284785 - DNA, 573 bp, Cannabis indica
ttgagcagctgggtttgggggagattctcttggatttcaagctggttttggcatagatcttgtcctcaagttgttggtaagatccttgtagctcttcctcttagtttcttgaagatttttgatgaaatgttgatgtttgcatgcttagtttaagttgagattgttgctgtgattctgtagttgttgcatgagttagggtttgatttctgcaatttttatatacttgaatatgtgattttaatcagggtttattgcatgatatgttgcttagtcaagttttgagttttagaactcaatctttgacctttaatggtgaattgagtttctgtgtgtgaagctcggttttgttgctttagaaatgttctaagggatgtatagaacaggtctggaaggtttgaggtcaattggatttgatgtggttgagttatgaatttttgaatttctgcctgcgaggaactggaattccggttgtgaatccggaattccgatgggttttgaaaattcccagaaccggaattccggttggacaaccggtctgccggttgggtgatttttcagaaaccctagttttcc

SEQ ID NO: 284786 - DNA, 549 bp, Cannabis indica
tttttattccctatttttcatattattgcagacaatttattttttttgggaatatttaataaagttttctcttttagtaatgaattgcatttatgaattgagcttcatatttctttatcttgtgtatgccaataccaattatatttatatgtttataatgtttgtatgtgtttgtgttttattattgatacaaaatctatggtatattcatctctgcaaagagataataccacataaacactttgaattcaaattcaatgtttatgaataattgttaattcttaagcaattattaagattttgtttaataaaaagatcttttgatctgataggggtggaagaagttaagaataatatatgcagttcaacgatcttttatatctattgaactctggattatattcataactccacatgatctctataacacttaggggtggataaagctattgacatatgtagttcattttgaactctagactatactcaatacaccacagtatctctataacacacatattttgattaaacatggatgtaatataatga

SEQ ID NO: 284787 - DNA, 350 bp, Cannabis indica
ttgcattttcggtgtccgacaacatggaactcggtgtatggctcagtagaatcacaaattagtattttagtatagtgggacggtttatttagacattgggaatgtcgggattagtcgggaatttagagttttcccaaaatacccctaagtacccttttatgccttttagggtggaaatggcaaaatggtctttttgcccatttgtatgtttgtcttttagtgaattttatgttaatgagaaatcagatttttaaagcttattttggctgaaatgatttaataaaaccatcattttatcccattttatccttttttctaaaaaataagaaaattgaaaagatattcatctc

SEQ ID NO: 284788 - DNA, 715 bp, Cannabis indica
gcatgtatttcattaaatcaacattggcgtctatattacaatacttgaaaatctacaagtcatcataatcatcatcatcattaacatctacatgattttcattatcactatcactagtgtcttcatcatcactataaataatgaattcatctaaatcttcacggttagactgctcatgacgacccatgttggtcacttgaattgggtcaacatcatcacgaacatattgaacatcatccaactatggaagttgaatgactaaagaaattcttgaagagtttctttcttgtatagttgtggtctcatcatcatcctcatccgaaaagtcccagacattgcgaggggtgtaaaattgacaaggttccaatcaactccattcttcaagtcaggaatgtaatatattaattttgcttgggatgcaagtatgaatggttcattttggtaccattcacgggcaatgcaaacactagtgaaaaaaccatcattttctgtcctcttacagtttgtgtcccaccacttgcacctaaaaataataacactacaatctttcaagtaagtgaactcgtacacttgtttgagtacgccataaaaattgttaccatcatctccaggcaccaaaataccactattttgggtcttacgattttcataccgatcctcgactaagaatttaacactattaacaatacatccaggataacaataacatgttggg

SEQ ID NO: 284789 - DNA, 534 bp, Cannabis indica
cattacatcaaagaaagttcaagaatttcttgtgaagaacataatctgtcaattcggactgccgcacaagatagtttcagacaatgggaagcagttcgacagccaatccttcactaattttagtgcgaactatggtatcatcaaaagtttctccacagtggtgtatcctcaagcaaatggtcaagttgaagcaatcaacaagaccttgaaggatacactgaagaaaaaacttgaagatgccaaaggaaactagccagaagagcttcctgaagttctatggtcatatcgtacaactgagaaaacggcaaccagacaaacaccatttgtaatggcgtacggatatgaagctatgctgcctgtagaactcgagccaccttcccacagaagattgatgtacaatcaagataccaatcacatactcctagcagaatcacttgatgaaatcgaagaaaaacgagccactgtaatcttaaagttgatggcccatcaacaaaaagtagctcaatatttcaacaaacaagtgaaggctcagaa

SEQ ID NO: 284790 - DNA, 129 bp, Cannabis indica
ttcaaaactttaaaatctcctccaatggtgagaagatgcccaaccccaagaatgatttttctcttacatagggaactttatttttgcaaaaagagggccttttaacccaaaattgctattataaccctc

SEQ ID NO: 284791 - DNA, 562 bp, Cannabis indica
attttagtttttttttttattttagttaaggaatggcaataagcttgacgatagttgtatactgctgattagtgtgatgtgatctgaaattataaaataactgtgtgcttgattctgctaactctttggattagtttggatgcttaggaacctgtgtttatctgcaaatactcaatctgtgaaaattgttataattgttttacgatggtttgtggtaagattgacaggatagcttagaacttgcatgtttattcttttgagacgaaatccttgatagtgttcaattggaatatgatttaggcatttgttggatagtttgagcctttcaagcctaccgtaataagatgtatccatagttaaccttttgagcctaaacctgttatgtttttcacccatcgatttgaaaaattagcaaccacactaattaatttttactttctaccctgttatccatgatatcataagctacataattagtttgggggaggaagtaaacaattagttgtgaggaaagtaagtgagagggaggaaaaacttagtaaattagtagaagaaaaaaaaa

SEQ ID NO: 284792 - DNA, 583 bp, Cannabis indica
aataaataataaaaaacacatacacatacaatcattaaacatataaatataatttgtactggcatacataagataaagtaaatgaagctcaattcataaatgcaattcgtttatcaaaatagaaaactttattataaaattctccaaaataaaaggaattgtctgcaacaatatgaaaatggaaataaaatcccaaactaataattgaaatccaaattgttcttaactaaaacaattaattcaaaaataaaagaagatttcgagcttcatcttcatcttagactatctccacccatctgtccaaccatccgattcaactcgctaagatagcatccgagttcaagcagctggagctgaaataagaaggaaaacaaataaacatggttagtaggtccagaattaataatccaagtggataataattctctaaaactcatcagtttatatgaaaagaaataccttgtttctttgctagaaatttaggacattggggtttccaatggcccttttcattgcaatagaagcattttcctttcggtgtatcaccaggagtagcagcctttttctttttaactgttttcac

SEQ ID NO: 284793 - DNA, 1305 bp, Cannabis indica
ataaatgcagcaggtgcattcgttaacccaaatggcattaccaaaaactcaaagtgtccataacgtgtcctgaaagcagtcttagggatatcttcttccctaatcctcaattgatggtagcctgacctcaaatcaatctttgaaaagaactttgaaccaccaagttgatcaaataattcatcaatcctcggtagaggatatttgtttttaattgtcatctgattcagctttctatagtcgacacaaagtcgcaaagtcccatcagctttcttggcaaacaagactggagctccccatggagaagtactatgtctgatgtagcccttatccattaactcccctaattgttttttcaattcagccaactctgcaggtgccatgcgataaggtgcaatagaaactggttgagctccgggaatcaaatcaatgcaaaactcgatctccctatcaggtggtaaccctggtaaatcctctggaaacacatccggaaaaccactaaccactgatatccaagggaactggtctaaattcctagactcatcatcgatcgcaaacagattcccataacactctaagtttctctttccacctaaacatgcccttaagataggattttgtctcactgcactcatgttggctcgataaacaatgaaatcaccactaggggttaaaagagtcactcttttacgtgaacaatccacaatagcttggtatttagacaaccaatccataccaagaattacatcaaattgccccataggcaacactaataagtttccagacaacttgtgtccctcgaacacaatacaaactgacctacatatggtggatacctcaccatgtccccccataggtacactcaaatgcaatgcaggactaaaagtttcccaactcaaacccaacatactagcaaacatcaaagatataaaggaatgcgatgcaccagtatcaaataacacatgagcccaagagtgtgagataagaaccataccatcaacaactccctggtcagcaccgccctgtacatcatcaaccccaagagcgtaggcttgagcggatgactttgcttttgcctttccccttccctgactaggatagcttgtacttgcaccagaccctccaccttgattgtaccctctttgactcccactaggagcaggagtttggaaaccttgtgagtaccccatgttgaaccctgaaccttgtggcctaaactgacgttgatactgagactgctggcccgattggggtgtgaaaccataggatgaagactgagactggtttgtcctgggctgtccatgaaaa

SEQ ID NO: 284794 - DNA, 767 bp, Cannabis indica
aaaaaaaaaacatatatttttactagttataaatatattttatatttataattaatctatattttttttttaccaatatatatctttattatttaataaatcacatgtttattaaaaaaaataaacaattttataaaattaattaaatatttagaataatcttttacaaaaataaacatactaaatatttttatctaaacaacataatagcatttcaattatgataatatataaggcatattggacatattttaataaaaaaaatcatgattatatatgtattgattttgaaaaatataccatacaattattatgtgaatcatgtgatttgaatattggacattataaataaaaaaaaattagccataaaaatagttacacaaatctaattatggtaagtttgactcattaatacatctaatataattaaattaagagtttgtatgattttatgtaaaaatgttttcaaatgtatacatctttaaaattaattttttttgcacattttttgtaattaattaaaataatgtatacatttatgtaaaatgccctttttgtaatggtgcatgaagctgtgttttattgatttgttattgacctctaggatgtttagaacaggtctggaaagtttggagtggattagggttgaattggttagatatggaatttttagtgtttcctgcactgaatcggaattccggttcagagaggcctatacgaactggaattccgattggctcccaggatttcctcccagaaccggaatt

SEQ ID NO: 284795 - DNA, 729 bp, Cannabis indica
gcattttactaatttcaattgcaaccagatctttcagtttattctttagttttgtatatgtttattgtcagttttttctcggttgtttgtcacactactattatcgactaccattttcgaaatttcataacaacgagtttgtacagtgttgtttttattttagttgtttatatttttttgaaagttgtttatctcttacatttatcatactgtaagggtttaggaaaacgttgtttttaggttttttattggctgtaatttggttactacattttcatatattcattgttattgtatctaagatttgttgcttttgtttttcttttttgttgcaggtccatgctaggacctcagtgaaggttgaaggatttgacctaccaaagaaaaatcccgctaaggtgtcttttttttttaaaaaaaaatattatttttattatttgttttctattttttttttagtttttttgtttttgtcctgatttattttgtttatattgctacaggaatgggattatatatatgaccagaagaatctgttcattgctaaagccttttccactgctactttccaggtgatagagaacattaaatcttgtctttcagatgtacagcttgaaatcttttcaaaaacctgttttggtcatttccttgaccttcccgattttaaagttcaaccccaagtgtttcatgggttgttgctccgagaggttcagcaacctaatgatgctg

SEQ ID NO: 284796 - DNA, 689 bp, Cannabis indica
ggccatatcaagcttaagtgcagccaactatttacctttttttctattgttaatagcatgcacaacttcctgagcctgaagtatatatcaaagataacccttcagaaacaaagcactttgagcaggggagacaatcttacttaagataacttttaaacgattagctaaaaaccttagaaataattttataaaatgtgttacatagactgataggcctaaaatcttgaatgaaatgagcatgttgtttcttagggataagagttattaaagtctgattaatataggaaaaatctctatcattattaagacaatccaacacagccttaacaagatcttggcctagagtagaccaattcctttgataaaagaaagcattcaggccatctaatccaggtgctttgtccccagaaatctggaaaacagctttcttcacctcttcagcccgaaaaggctcccctaaataatcaatctcaaaattattcaaagggggacctaaaacagaaagaatttgttcaacaaaaccagaatcacaaccttgagtttgaaaaagattggcaaaatatgaagaaacaatactgctaataccctccaagccattaacaacctccccatggtcagacttaagaaatttaatagtattagttttttccttttaaaagcaaatctatgaaaaaacttagtatttttat

SEQ ID NO: 284797 - DNA, 372 bp, Cannabis indica
caacagtatctctgaatatataattcttagataatagtatagtcttagctcaactgatttttcgaccgatctttcgcccagtgaacatacatcactatttatagggccagtaagcttggagaggaagagtttcccctctcgttacaatgcatataaacagatcgatcacgggatcaatgctgaatacaaggatcgtaggattgaggctgaatacactgatagtgggatcgtgtgtatgccatatccacgtaaattgattcctgagttatagggattgtgctgatgactgatgatgcgaaagctgaattcgctaagtgttggttgctctgcgcggattgctgaaaactttgctctgagcgtgccagcgatatg

SEQ ID NO: 284798 - DNA, 731 bp, Cannabis indica
ggccactatactaaaatacaacaaatatatttaaaatcgctattaagtaatacaaaaaaatcattcattcattcctaatatcacttctttatttctttaattgaaaatgatcctaatttaaaaaaccagataaagtttcaatcatttctctacatttagaactcaatttggattatcatatttcaaaaccattaactaattatcctcttcttctaagcaatttttcagaacaaaacacaggttgattcaattactttaacattgatcacacaaatgcagagagaaatcaaaaaaaaaaaacaactgtaaaaatagatgaaagagcgtacctttgagtgaagctttggcaggtggtaatgaagccaacagcctatgaattcctcctctccgatgaacgaggtttaaggcttctgataccgctgatgatcaaaaaagagacagaggagagaaagtgattaacgtagacacaggctgggcttctcatataattaagacacaatttcatattgtgtttttggtagggctgagcattggggtttggtcggttttttccctcaaaaaaatccaactttcggtttttcggtctggattggttcaatccaaaaccgaccgaccaaatttaaaaccgcccgaaaaccgaccaaactaaaccgcggttcggtcggttcaaaccgccaaaaccgacttttttttttgctgaaaaatatagtccaatttattccataaaccca

SEQ ID NO: 284799 - DNA, 766 bp, Cannabis indica
cgcctttgtctcatattcaaatctttatgagtaaagaaatatttgagacttttatggtcagtgtaaatttcacatctctccccatagagataatgccgctaaatctttaaagcaaacactactgcgataagttctaggtcatgagtcgggtatcactatttgtaatctttcaactgacaggaggcataggcaataacccgatcgacttgcatcagaactcaccccagaccctgtctggatgcatcacaataaactacaaacttctctttgtcaaaaggcagagctaacactgaagctgtaactaacctctactttagctcctgaaaactggattcacacttatccgtccatacaaaacgctgattctttttggtgagttcggttaagggtattgaaattttagaaaactcttcaacaatccgacgatagtaaccagccagacccaagaaacttctaacttctgtcactgttttcggtcttggccaattcctgacggattctatctttcccggatccacttttatcccatcttgactaacaatgtgtcgaagaaaagacacctgagacagccaaaactgtcttgaatttggcatacaacttaggttccggaagttgctgcagaaccatccagagatgttgctcatgctcctcttctgatcgagagtacacaaggatgtcgtcgataaatacaataacacaaacgaaatccttaaataccctattcatcaaatccataaaagctgcatgagcattggtcagtccaaaa

SEQ ID NO: 284800 - DNA, 723 bp, Cannabis indica
tttcaacaaaggaaagttcagctgaaaagtgcaactttcctaacaaggaaaagagcaactacaaaccgaataaacaaggtaagaaatcgaatatgaatgcacaacaatcttaccataaatggaaaaaatattttgtcaactaacttgccaaaaaaagactttacaatctccccctttggcactttagatgaacaaaatattttttaacacaaagtacctgcaaattaaagttagcaagaacaaataacaactccccctgagtaacacactcgaaattgtaaaacaacaaaacaacatgctaacttttaatccaaataagttcacaagtaccaaacacaactccccctggaaaaagggtccagagttgataaaaacaaattgaatgctcaataaaatgcacattaattaaaaaatattttgacaactaaattgccaaaaaaggacctaacaatctccccctttggcactttagataatcaaaatattattaattaacaaacacctacaaaacaaagttagcgaaacaaacataaaaactccccctgagaagcacaacattaaaccaaaataaaaagctaactttgaccaaagacgaacacaaacacaaacctcaactccccctagacagttgagtatacaattaaaccaattactcccctttttgtttatctataagggccaaagacaaaaagaaatgaaaatatagaaatatgtccaacaaaa

SEQ ID NO: 284801 - DNA, 234 bp, Cannabis indica
atcaatcaatcatcaaataacacacaaatcaacatgaaaccatccaaatcacacataaatcgttttaagtccaaatttcttgaaagtaaatcaattaccatggctctaaggccagttgttggaattattttaccaggatctagatttactaacaagtatgttattaacatcctaaatatgaacttctaaacgatatgaaataaacacatataaagtataagaaaccttacagtg

SEQ ID NO: 284802 - DNA, 569 bp, Cannabis indica
ttttgactttttcaaaggtagcaaccctaatttctatttaaggggctcgtgttttagaaggaagggaggcagaaattggacccaaaagtgaaagaaggagacagaggaaacaatggtggcgatccagaatgcaatcaccaactagttctttcttaaattcttaatttctatgttaatttctattttagttttgattatggatgttattatggattttatgaactaaactcctatttagggagatgatgaatgttgattgaaattacttttggttaatgataatttctatttctcctttcttgattgtgaatttatccatatttgtgtttaattacatgtttaagattgatcaccttctacatgttctatgatcctaattcaaaatctgaaaagtgagaattgggaatgctaaaattggataaactaggttttgatgtgaaacgaaagtatttgcatagcctttgtgatatttagattattgcttaatgttgattatatgttaatctatctcaaagatgattagatacatgtgatttaggtcctaaaagatctgaaaagagttaggttaa

SEQ ID NO: 284803 - DNA, 808 bp, Cannabis indica
aatttcatttggaatagtactttgaatattgaacctcctacaggcagagaaataaattatatgaaaatatgtttggaacgtatttcaatgtacgtcagaagctggatctcccatatctcaataatttcaagtttgaaaataacgtacatcaatatatgtgcagagtacttcacatcgtaaagacagtatggtgcacttatgtttactcaatatttgaatataatgagataatgagatttcttttcaaatgtaaactataatttcagacatatttattcgtacaatactttattttaatacagtttaaaccatttcctatttaggagttgtacgaattttggactactacccattcttaatagtctccgttcttaagttgttgggaattatttaaaaattgtccaaataatgtaatcttcttaaccaagtatggactatttgctgtaattttaaattgtagatactcactaaaaaaaccagaggatgtcttatcactatttaattttctgtgtacattatgacatgcagatctcatgggattccctgatttgagttaattaagataatatatcaaaacacgaaacctacctatattacttaaggagatttaatattttttgggttctaatatactaatatgacctttttcttattaaaaattggacaaattaattaggtaagaattaatacgatagtagtccctatgatagtattacccaacaaaattaataaaactaagttaattaactatgatagtagtaccaacaacgattattatgtcaaattttattaaattattcactactga

SEQ ID NO: 284804 - DNA, 548 bp, Cannabis indica
agctcacgtttccccgaatgttacgggtcgtggtagaggtctcaggggcagggcccgtggtcggggtgatgataacccgccacaggttgcccaggctgcccaagccaatcaggaagcccagaattgggagactaggtttgctgaaatgcaagccagaatagaggagcgagacagtgagattcaaagattgaggcagcagggtgcttctgcggtgccggtgccaaaagttcatgtggcacctgcccctgttgctcaggtcgaaatagtggtaacaggaaatagaatggaacccttgtgtgaaaggttccggaagcaggcacctccagtttttcagggaggtccggacgtaatgaaagtcgagcagtggctgacggtgattacaagaatattgaactttatgggagttactgggaatgacagggtggtgtgtgcaacctttcagttccaagaagacgctctagtctggtgggacatggtgtcccagattcacgacgtcacaactatgatctgggaaaggttcgaggaactcttcaacgcgaaatactata

SEQ ID NO: 284805 - DNA, 511 bp, Cannabis indica
tttattaccggcgggacccgccggtattaataaaacggtcagaatcccctgactaataccggcggaacccgccggcaataatccgccggtattagtcttttcaaaaatttgggcgggattattagaggcagattttccgccggtaatactaaagttccgccgggaatactaaatttaaataaatatttaattaatttttaattattcaaaagtaataccggcggaatgccttttccgccggtaataaccccattaataccggcggtttggctctgccggtattacttccgccggtactgagtaaaaatgttgtagtgttagtttcagtcattggatcggttttatccatatatatttattgatctaatttatgtttattcaatattttagaccaagtattttttggatcagatcggatgcatttaatattttaggtccagtatctactggattagactggatccatccaatctaagaaaaaaagtaaaattttaatgttaattttatatat

SEQ ID NO: 284806 - DNA, 819 bp, Cannabis indica
ttcaggtttgtttttttttttctttatattagtaattaatttaatagttttgttataagttagtatgcctatacatgttagtgaagtaggttctgtgataaaatactgcagtctgatcggtggtgtgatttattgtttttcatatgttgttatcgaaagtttgtttgtgctatattgataggttttgaaaattttgggtttacgctttttaagccgttatgctgcccaaattttggtagatagttatgtaatgtaatttttaatttaaataaattaaataaaaatttgtaaaataatgtatatcataaaatgtcaaaagtattccaaaaaatgtatttgaaatttttaaactttataatattcaatttaaataaataaaatagaaaaatataaattagtatatattaaaaaatataataagtaatcaaaatatttgttttagtaatctttaatttaaattaatatatattataaaatataataggtaatcaaaatttcttttttattttaaaaaatttgtaatctttaatttaaataaataatattaaaaaattagtatatattataaaatataataggtaatcaatttttttttttaaaaaaaaaaatttgtaatctttaatttaattgaataaatgtcaaaattggtaattactaattattgtttaattttaaaaagtaagtaagtgatgaactttaaaaaggttgtaatttttaagtttaataaataaaatagaaaattataaatgaatatttattacaaaattgaaaatgaaagcaaatgatattttgaagattaaaaagtttgtaatttgtaat

SEQ ID NO: 284807 - DNA, 752 bp, Cannabis indica
ttacttttgaatgatattcaaaacacatgaagactaaaactaagtggaaattattttggaaactttaatttattttgaagaagattaacttttcaaaattaagttaagggacaaagttttatagtcatttgatatacaataattttactaaaaatatatatcatagttatattgacttgaattttcaattcttaactatttaatgtgttaaaaataaagtttaaatattttgttacatgtgtgtattttttaatttttttacgagtgaaataaattgtttgaatcttatattctatattgtaaattttttaaatttttttaaaatattttaaataattataatatatattatcatataagaaaaattgagattataattattttttatactgaaaatgcaaaaatttattagtgtacacaagcaccctaaaaaaattataattttaaaaagttcaaaaaaaaaaaaataacaaattaagttattaccttttgacgaggtcctgctcgtcgaaagtggggccctcttggaccgtccttctggacaacaatctatatagaagaaaaacaagtaaattcataactattactaattcgatattaaataaatataaagtaaaacgtaaataaataacattttggaatcaataaagtaaacgatgagaatattcacttacctgttgtgctaccgaatcatcctcaccaacaaaacattgcctgttcaaatgtcaatcatttaatggtttagttcattt

SEQ ID NO: 284808 - DNA, 743 bp, Cannabis indica
ctctctccctctctctcttttggctggtatggtgctttagggctgagatttcctttgattttcaagctcttttcctttcaatctaagtgttcttcaagtgcttggtaagacctttgtaccttcttcttttaatttcttgaattttgatgaaaaagatgatgtatgcatgcttgaattggttgtgtagttgctactgtgttttgatgttgatttcagaggtttagtcttgttattttaagtagattagagctagttaatgcatgatatttgctttgattcaagattgaaagtttttagctcaaagtttagttttcaaagagaattttcgaaatctgttgctgtgattgttgcatgagcttgtgtttattttctgcagctttagtgagcatgtttaagtagttttgggctcttttggatgcatgatttgttgcttagacaagttttgagttttgaactcaatcttgaagctttaatggtgaaatgagtttctgtggttgaagcttagtttttatgctttagaattgttccttagggtctaaatagcaggtctggaagttttggtatagtttggattggatttgtgcaatgtgtgaatttttgagttctgcctgcgaggaaccggaattccggttgtgcattcggaattccggatgagggttcaggaattcccagaaccggaattccggttgcagaaccggtctaccagttagggatttttctggaaccctagatttcctcgtttt

SEQ ID NO: 284809 - DNA, 625 bp, Cannabis indica
agaataggagtgaaggaatacttctcgaagtcgagtacaaccaatggggccagtgcattggggacactgcaaatgaactggttagccagattggcttgtatgcaagacgaaatcttccactggcatacaatgattggagaaaagttccaatggaatttaaaaatctattatgggagtacatcaaggtaatgctaatagctaagattaatttgcatatgtagttgaatattttttgccattctaactattattgctaatttttgcagtcaatgttcaagttaggcccagaagctaagcattctaccttaaaaactgctggacgaagatggaaagactggaaagcattcctaacaaggaacctaattttcaaatacaaagataaagttccagcaatgctcgatcgtcctccagatgcttatgcttcatgttacaagcccgaagattggaaagaatttgttgccaaaagatgtagtcccgaatgggcaaaaaagagaaagaaaatgcaagatatcaggagtcaaaatacatacaatcaccatgcgggccgaggtggtgttaagaaagttgaagaaaagttggagaaagagttgggccaccagctgactatatatgacagggcagactt

SEQ ID NO: 284810 - DNA, 272 bp, Cannabis indica
gaacgttcagaactcagtaccgtgttggacacggcagttaggggacgtcagtatcgtgttggtgtgtaggtaagggcaaggctagggctgatggaccgtgagcgagtcggtgaagattgtacatgtcggggcggttaggcctggagcgtacgatcatcgggacagcgaggctatttttgtaattagtcgctaggcgacaaatattttgtatagacagtaaacttttgtaaatggttttgtaaatgggatcccgagtatttggtataaatatt

SEQ ID NO: 284811 - DNA, 1208 bp, Cannabis indica
tttttttttgttttttatatttttttaaataatctcttttttttatgattttttagagcaaattataactattaaccatttttattttattttggataatatttcaagctttgaatttttaattttttttttgagagaaaatcattttatattaaaaaaaaaattagatttatcttttttttttttttgtgatttaagcgtttatatattacaaggactcgaactcaggacctccaacactcacacacccatctatggccacttgaactaacctcaagtggttaaaaaaaaaaaaaacttagatttatcgatcattacaaaaagtgttcacaggtataaaagataaatcaatcatatttgttaagtatttatattttgggaaacatgctctacaaatttaagaactcaatttttaaatttataatgaagccaaaaaaaataataaaaggtaagatactttatatatattataaataaacttgtaaaaacttatgttaaatttttataatttaaaatttgatgaaaataaggggaagccgctaaggcgtttggttggaaggaatgaaaatataggaatgagaataggaataggaatggaatagaataaaatttaaaatacaataaaaaaaaaattgaataaaaaaatcaataaaataagttttcttctgttacattggaatggtcattcctttactttttaaaatggaatagccattaccaccaaaatggtggaaagagcattccattggaatgctattccaatactttaaaatgcaaccaaacaaaggaatgaaataaaaattatttcctttccattccattccatttcattacctccaaccaaacgccacctaagttcttgttgaattaaagttagaattttgtgatttttggctaaattgattatgttagttgtggtgatgttatgagttgtttaattataagtttttagtgagaattcaacttattttggttgaaggttagtcgttgtagtagttttgagtgagtttgagttttagaactcaagctttactcatccatggtactttttgatttgatgtttaattgtgctgtttgagttgtataacatgtttagtaggttatatttttgtgttttggaaattttggtagcatttgggaaagtttggagcaaattttgtgggcttaaaaatttctaatttttgagctcttactccccagaatcgttc

SEQ ID NO: 284812 - DNA, 547 bp, Cannabis indica
acgagacgaatcatttgttaaacgcttagcgtattttcaacattacaatagctaagtgttgcccttaattttgcccaaaatacgtggaccaatacgactgcgacacgtgaatttgaggaatatggttctgagataatttgactaagtctttttagatcaaaagtatcagcatcaaaatacctaccggagaagatacgagggctccacgtactcccggaggacagagctatagcaaagcacctccggcaggcaccagacccaatttgaacagtcacctcgcatttaatgccgcatgggagaagtcgtattgaaactgccataagtattaagtctaacggtgtaaccactcttctgcagctattacgctatgattaataagcctagtgacggctactttatgagggatcacatcagtcaagaagggataaaggattatatccacctaacccctaagatacctaaggtataggccatgtatttcccattttatatttgttgggaatgtgtgcccctactgaaaatatacagaaagatatgtggttcggtt

SEQ ID NO: 284813 - DNA, 695 bp, Cannabis indica
tctaagttgattttcataatgatacttaaatattattattttcatgacatttaattaaatagaaaattattttaagttgggtacttttataacaacttaaatttgaataattttcaaaatatattttatttattttattaatcatttttcgaaattgcatttgattatgcaagatgattttgaatttatcttgaaaaatagattaaagttgtaaattaattattttaattaattttgaatcaacttaaatcaatgattttttcatttaatgattaatttaaaataaaggaactaaaatatattattagaaattgaattaattagtcaagaaaatctagatagatagtattcttgcttgaagtattttttctagtaaagattaatttatttttaatgtatttcgaaaattgtataattttatactttaatttttcgaaatacaatatatatatatatttatagaaaatttaaatttgagttgcaaattaatttaaattaatacaacttaaattaagtaattttcttaatatttattggaaaattaatactaagatggaaataattcattttattttcttaaccatctaagtttaattttataaatattaaattaaattttatttagagttttattctaaatttaaaatttaataaatatatatatttaaaataaataaataatagaagaaaataca

SEQ ID NO: 284814 - DNA, 808 bp, Cannabis indica
actaaatttttaaattacatgtttcaatttatgttttactttatttattttattttatcaacaattaatttattaagttattcttaatttttatttaaataattaattaatttcacattttacctactaaaatttcggcagcataacggcttaaaaattgtaaacccaaaattttcaaaacctataaacaacacaaacaaatattgcaagacaatatataaacaaaaaaataatccacccatccaacagcagtcaattttatcacagaacctacttcactaacatgcatatacatataaactaatatcaaaaactactacgtactaagcgaaagcaaaaaaatatacctgaatcgagtgcaaaaataacaacttgtggcagcttgcggtaatcccgagcggttgaacacggacctaattccataaaaaagtaaaatcaaattaaaaatttaatacctaaatacatatcaacacatacaaccacaaccacatacactcacatacactcacatacacttatacacacacatacacacatatatacatatatatttacatacatatatacatacatacatacatacatacacacatacatatatacatacatatacacatatacacatatatacatatatacacatatacacatatatacacatacaatatacatacatatatacatacatatatacatacatacatacacatacatatacatacatacatacatacatacatacatatacacacatatacatatatacacatcatatacatacatacacacacacacatatacgtatata

SEQ ID NO: 284815 - DNA, 676 bp, Cannabis indica
aacgagcaataaactctggactggtgaagaaattacaaagaggaagccaatcctctggagtaagatcactaggcgggtgggcaacagcgttatcaaaatcagcaggacttttgtagtattttttaaaatgcacatgtcttaacaactttcgtttcttatatctatctgccatttcagcccatgcaatagttactagtacgcaattttcatagaactcttaggagagaaccagtgggattgacagagacagaggaataaatcattgttcttgagaaccgttcatggtattaccacccattggcagcagttcaacaatacaatagcaatgaacggaaaccagcagatttgattcaccttatactactttcaaaaacaaaaactagaaacgatgcttgaatatctaaatcatcattaaatgcaatatcacaaatagtttagttagcacatctatatcagtagacttacacatatagcaatctgcattacaagctatgtttttaaacattatttatgtaagttgataccacttcctcataaaaaaggacaataagaataaattaaactaaaagctgtgtaaaaaatgaagctgcaggttaagctctatcaatttactgtgattgtgattgtgattgtgatatatatttaatatatatatatatataatatatatatagta

SEQ ID NO: 284816 - DNA, 505 bp, Cannabis indica
tttttttgagaaaaaagacaataattgttagtagttttttttagctattaacaatatttagctacgatataaaaatataaaaataattatatatataatttaaagaatctacaaattttaattactgtaatttaacgtacaaacaacgtgaaatcaacatgtttaaaaaataacgaaattaaacaacgtgtttacaatttaaaaataactataaaacaacaaataatgttatttctaaatataaggaatttttcttcatatttacaatctatttctattaatgcccccactttattcaaaatcaacataatgtgtgttctcttattatttttcatatcattatgtaagagataagataaatttttattttaacatgtaaaaaatctattcctttaattattgaacaactagtgtagtgtatagcaatttataataaactttacaataacataaaaacaacttgattttattttcaagttgaaataagatgttacaaaaacaacac

SEQ ID NO: 284817 - DNA, 688 bp, Cannabis indica
aaatttgcaccaatcagcagcgtcgatctccgggtgcttttcagggacttgtgccagtcgtcccagatcattctctttcaacgcgggcattatgatgtcttttgtcatcctattcttgaagtctttcattaacttcccagctaggatgagacaatcatgtttgaaggtgtccggcacaatgaaccccgtctattttgaaggaaaacaaacacggttagagtcaacatttggagtaatagaaaaacaaatcaaaattctaacaaataatagcttacctgaatgtctttccaaactttatttttcagagtctggttgacttctttccagtttttataagccaaccctattgtctgccgacatctgactcccagagtggatacgagcttcgcgtagctttttccacagtattgacctttatcattaacttcgagggccactcttttgccctgatccattagtttggatatttcattcatttgcgtcggccctcgtgtaggtattgtggttggacactcattttctgctcccgaatcagatcctgattccgagttcgccatgtctacaccattaacaaacaaacttcaaagttagctacatatataacaagtagtgtatatgaaatattaaaagcataaacaaattgttaagtattcaggaccattcacaaccacaatataaagtaagctat

SEQ ID NO: 284818 - DNA, 369 bp, Cannabis indica
gaaccgctactccccctgctaaagcctgatacaggaggggtaggagccccgccactaaccggagtactagctgactccgaggtggccttgtcgtcagtggtgatcatcaagtcatgtttaatcttcgcatttaacccgtccaggtacttctctttcttgctgaagtcggttggcactattcccgaggctaaccttgccaaccgatcgaactgagtagtatactctgtcacgctcatattctctcgctgggtcaggtgagtgaactctttcctcttggcgcttctgactttcccaggtcatggtggtgacgtcatggatctgagacaccatgtcccaccagaccagagcgtcttcctaaaactgaaaagt

SEQ ID NO: 284819 - DNA, 636 bp, Cannabis indica
ttttgctcggatctctccgggagctgtctttgtacaacggctgtggtctccggtagtgtgtattttgcctagtggcgaagtacacacgctcttgggagtccgatagctccgtgtattgagtatattggggggtgtacccccttttttggcgcttctctcccgtccgggtgctgcctttggaggaccttttactccttgatccctgggaagggcctgttaagctagcagccggagcggaatgtgaaggagtttgcccatttactccggacgggttgccaaaatgagaagatgctggtgccaaggcttggccctggctatatccgggggtagcagagaattgtatgccacttgcttgtggagttgcggtcggggcagtacccgagggcgatactccgggcatgtaccctgctatcccggtgggatagtagcctccataagccacgatttgggcttcttcgaggttgatatatttttggactctcttctggaagtcctggaggctagcagccccttcttgctgcaactcattccagaaaggagtcccagtacggattcctgcttggagaagtgcaagctgttgtccgtcatcaaccttcttggtcttcgaggcttcctctcggaacctcttgatgtaat

SEQ ID NO: 284820 - DNA, 674 bp, Cannabis indica
catatttcaatcttagtagttcaaattcattctgcatagcaaggaaaaatattttaagattaatttgtagcacatttcacaacagggtacatacagtgtagtactattttgcatagaacatagtataatttaatgcaatctattattacatattaatactaaatataatattattttaaaataacataatataatacaagtcaacacatagtgtaccaaacactccatacacgtatatatgagggaaagaaaatgtgaagaacataaataaacattttttctttgtaaataaattaaaatgaaagaaaataaagtaaaaaagaattcccatttatttttgtaaaaaagaatctttttttatttattattattattatatttttatttcgtatatatatatttctctctcatttcttcgaaactacccattttatatttgttggtgtggatgttacttcttacacttgcttttccttgctttcaaatgaatatatataatttctctaacaaaaaaaaaaaaaaaaataaaatatatataatatacatgtgttccacattttatacatcattttcctttatatgatttatcacacatggattttttttttttaataaataataattacatctcacttttttaaatcaactaataaatattaaaaaaaagaactctt

SEQ ID NO: 284821 - DNA, 593 bp, Cannabis indica
gttctatataccccaaagaacaataccaaagcaccaaaacaacccagaacacacatatactaaaaatgccatgtgagctccaagctttgagttcaaaactcaaacttggctaaagctcacctacaagcatcaaaactagattgaaactacataatcatgcatagaaaagctgcagaaaacattttctaactcatgcaacaaacacagcaaccaatttcgaaatttctctttgaaaattttagcttttgaatagaaattccataactttaaacaacaccaccaacaagcaacacaagtagctctaatctactcaaaagaacatgctttaaccttagaaacaacaacaaaatcacagcaacaacatcaacacaaaactagcatgcaacactcatctttttcatcaaaatttcaagaaactaaaagagcaagatgaagaaactttaccaacaattaaagatcacaaaatcttgctaaaatgagcttgaatcaccaagaaaaatcccacttccttgctgctcaaggaggccgaatagagagggaaagagagagagctttttcttttctaattttttctaacttttgaaatcttgaat

SEQ ID NO: 284822 - DNA, 547 bp, Cannabis indica
aagttaataattctataaaattttataattacttaacggttaagatttaagtaaattgatatgtggtaatttttaattggtccaagttattaaatttttatttttttttaaaaaaattaatttaaatataccaataaaaaaatggcacatgataataacttaacatttaatggtcaagtacctacatagttccaaaaatataacttaagtattattaccgccaaaaatcaaacttaaatatttaggggataaattgaggaatatctcttttttgtattcattattcaaaaataccctcatattatatttcattaaaatatgtacccatttttatgaatgagttgcttaatataccctttaaggatgtaaacggggcggggcgggtgcgggaattgctcccccaccccatacccgcttcttaaattcacctcatacccgtcccaatacccgtttaaattaaagcaggggcagagcggggatatacacgacgggggaagaattctcatcggggttcccatacatatatattaaaaaaaaatgatatcta

SEQ ID NO: 284823 - DNA, 591 bp, Cannabis indica
acctgattatgccttgagcacatactccctaaatttcatttcaattaacatggcatggtatttatacacatatatcactagggtaataaccctaggctattagaccgttcctatcagggtaataatcctaatctcgattactaaacattcatacatatcattctcaatataagtgccactgcacatactctacatgctaaccactgtcttacctattgtccagcaatagatagagattctgaatccccaagtactcctaatcaggtgccggtaatcctagtcacacaaatccgggatatttcacacttagggttaacccctagttttcaactcataaaattcaatcatggcatgtaaaattcaaataatcatacagagctcggaacgagctttccaacaatataaagaactcccaaatcagagttaagaatcaaaagttatgaattttcaaagttcgacacaaaactgcccaaaaatcacaagggcgggccgcggcatgcccaagccatgccgcggcacgcccaagccatgtcgcggcacctgggacgaatgttaggttataattagcctatgtttcgggtctttaaagtt

SEQ ID NO: 284824 - DNA, 253 bp, Cannabis indica
atcctgatatggttaggtttgacctcaagagtattatacatgttctttgatttttaagttaaacttactttttggttagggtgatacgtacatttttggaacatggtagtgcgattgagtggaagcgctaaacatagatatggaatctataacttttatctagcaaatagaagttgaatgatgatttccttcgagcttggctaaacagagataaatggttgagtactcatttcagttcactgaaatatcattt

SEQ ID NO: 284825 - DNA, 627 bp, Cannabis indica
ttatttatttaaggaaggaaatgaataaaaaaaaaaaagtggaaaacctcattttttttagaaagaaaccttccaaggcaaggaagcctcacttcttctccttcttcttctctctctctctttcgtgacctagagctagccaaaaccaggggattcattttgatttctctcagtttttgagcaaattggatacccaagatcatcctagaagctttgaaggtaagttcttttccttgaggattgaagacttcactaatttaggttggttttggatgagggttgtaggatttcgtggctgtaggtttagtctgggttgtgatggtgtttttaggtctcttttggggtgtgttgaagttagtatcatgtgattttaatggctgtttagtttgaatgtatttgattaagcaatttgagcttgattttcatgtgagatggtgattttgagttaagtggtgaattgtgattgaatgatgtgttgaatatgttgtacttggtatattgaactgttctggaaatgcaatttaggtctgaaatggttttggttcgagctgggggagaaaaaccagaaattttctggtctgacagcaaccggtcgaccggttggttctgctgtatcagaaccggtcg

SEQ ID NO: 284826 - DNA, 501 bp, Cannabis indica
cgttgacaaacaaagatggaccttagctttttaggtgatgttgtcgagagatgctgacttacgtcaagcagactgaataggaagagggggtggctttgacgagggaaatgaggctaaggtgtcgaggatgaagatgaagtgctctctaattctcaaactatgtggacttagttttataatattatattttgaacaacggtcttctggccgagacaatatctggccctttgtggcatttatgtttatgtaattaattctattttacttgttggatggacaacttagtttttttaatcacacgatgatttattccatttcaatttaaatgttttgttaattttttgtgagaaaattttattcgagttttaattttaaagtgcgaagcaaaaaaatacaccaaaaaaaaatttatatatcaatcaaaaatttgtaagcggccatggtgtaacgcccgtattttatatttactaaacacgagagataactttaatatattatatc

SEQ ID NO: 284827 - DNA, 503 bp, Cannabis indica
taatgatggcattaaatgcagcgattcgctttttgcagaggtcgattcgtttcatgcccattgattgatgcggcgcattaatggtgtcagacggatactcaaacgtttccaccgcctttattgcaaatcaatctggcccgttgatctttgggtatttgaatcgtgcgtttcccccaccgttcgattggtaggtggtgacgcctgttcctcatgcacttttgcctataaaagccaccacctttccttcatttcggttactttccatttcttgccaactttgcttgaatttcctagagagaaaattctcaaaaccagcacgaaacctttgaacactttgccattttttccagttcttccttgcttgctgctatcggtccttctcgtctttactcgactcacaacaggacccccagttcaacacttcactgtaagtttcttgcatcctttggtagtgacatgcttttactcgttctgtttgttcttttctgggttcgcattttgag

SEQ ID NO: 284828 - DNA, 767 bp, Cannabis indica
tgtttaattaagtgagtttagtttgatgcatgctagttatccttgctcaagtttgtgaatttttaactcaaaactataattttcaaggtaaattgatgtattttgttgctgtgtttgttgtggtcgatttcctgtgttttcagaagtttttatatgcatgattgagtagatttaaactcatttttatgcttgtgggtgagctttagccaagtttgagttttgaactcaaagcttggagctcacatggcatatttagtatctgtgtgttctgggttgttttgatgctttggttatgttctttggggtatttagaacaggtctggaaggtttggtatgatttgggttggatttgattgagttatggaattttgaatgtttcctgcgaggaaccggaattccggttgtgcaaccggaattccggatggggttcaggaattcccagaaccggaattccggttgcagaaccggtctgccggttgggaggtttttaggaacccttgattttctcgtttttgtgttgattagggtattgccatgcgttttatcgatagggaaacttttagtttctagtttaagtcctcgggaagtgatttcgtgtatcacttatcagtgttgtgattgttatggtttaggagcctgtaaactgccgtgcagtttgttccacccaggttgaccggcacacctgaattcagaattgaggtaatattagtataatagtatgcatatgtattacatttttagcgtgcatgttagcaagcctgttagat

SEQ ID NO: 284829 - DNA, 577 bp, Cannabis indica
ggtttatacctaccaaacaatgaacataaagtgtgtaagttgaagaaatccttatatggattaaagcaagctccgaaacaatggcatgtcaagtttgacaatgctattctttcaaatggctttaggcataacaatggagacaagtgtttgtattcaaaaacttgtaaaaattatgtgataattgtttgcttatatgtggatgacatgttaatccttagtgataacatgaaaggaatagaagaaactaagaggtttctttcttcaacctttaaaatgaaagaccttggagaagtggatactattttgggtatcaaagttacaaggcatagtgggggttttgctttagggcaagcacactatattgagaaagtgttgaataagtttagccatataaaggctaaagaggccaacacaccattcgatcatagtaaaccactagttaaaaatagtggtagagcagtggctcaattggagtatgcaagtgttatagggagctttatgtacgctgcccaatgtacaaggcccgatatatcatttgcggtgagtaaacttagtaggtttactagtaatctaagtg

SEQ ID NO: 284830 - DNA, 766 bp, Cannabis indica
gctcagttggagtatgcaagtgttatagggagctttatgtacgctgcccaatgtacaaggcccgatatatcatttgcggtgagtaaacttagtaggtttactagtaatccaagtgtggatcattggaaggcaatagggagagttttgggttatctaaagaaaaccaaaaacctatgccttcactactccaaatttccttcaattttagaaggatatattaatgcaagttggatagccaaccttggggataatttgtccacaactggttgggtatttaccctaggtggaggggcggtttcttgggggtccaagaaacaaacttgcatttctcattccacaatggaagcggagtttatagctctagctgccactgggaaagaggccgaatggttaagagatctcttagttgaaaatattccattttaagttaatggccttgtgcacattccattttacagtgttacaatgaggtatcacaaattttaatctagtgggggaatgttatattatttattatataatataatgtttaagattaaaattgtgatatgttatatatattattacatataatataattgggaattttatgcatgtaataatcacaatattatgtgattgggagttacatatagttgtaacatataagaggtgaagttaatattttgtaacttccacatgatcactaattaagtgtgtaaagagtggttacacaacttaatttttgaaattcaaaaactagaattcaaatatagttgttggggat

SEQ ID NO: 284831 - DNA, 569 bp, Cannabis indica
agtgcgaccagttcacattattaagtgcgacaagatttatgtaaacctcttatttatcattttagataatagaaacaataatatatttattataaatttattataaacttattataaatttcactggagtagctttatacatcaaaatataatttttgaaatttactgttgatttactcttaacaatttttaatttcttaggttgaccataaaagtgaaagaactatcgatttcattgcattatgttgtctttccattgcttagaagtcaagggacaaacgtttctccatccgtatgcttaaggtattttattgattaattacttaagttttttttcaatattttttatcattctacttaaacaattttatcaaataggtaaaatataaagaagcactccataacataacacagaatatgtgtttagttttggagtttcaaatcctcaatgcccttggatgtactacgacgagcgtacaaacaacgctaacaattgattcctgacaaacattttgaattagctgaattttttcatataaatttaccaagatttatgtaaacctcttatt

SEQ ID NO: 284832 - DNA, 1080 bp, Cannabis indica
agcttttccttcaacgggccaagaccttcgccacatatgacaagaaggcctttgacgtcggggagttggtcacgacggagaactgccggaaggccaagctgatccaggggcatcagtcggtggatgactctaacctttccaaagtcatctgtccgaacgtgagggttccggccgcagagaaggtactccgggaggacatcatcgccacggcggaagataagtactagaagtacctcttctagaaggcccaggagtaggcttataataaggctcaggcggccgccgggaggccctttcgtattgggagctcggtggagagaaggacccccagaccaaggcctaaggtccaggtgccgaatacgggggctcccgatgccagcatttctggttctggtaagtctactttaatgatacattacgtccctcctgttgatgaatatgctagccttaggcctatagggtttgatgaacatctccataggttcaggatgccctccactcggtggagggatcatgcaaagaagtattagttctctaacttaggcgattatttaggtcggtctcggatgggttctggacctccggtgcccgttcccttggattcttcagcctatctgtcttctgctggttccgtccctcggacagctatcttggggatgatgcagccagtgttaagattcgggactttgctgggctgaattgagagtcagggtagcgctgcttgattgcttttttaggtgtacgctgctttcagagatattctaacactttgattcttttctcttgttgcagcagccgatcccatggatgcgatcttggccacccttgctagagcccacagtcctgatgtttcccctcctcctacttcttcccagttggtcacccccgggaaagcttcttctagcgcccctccgaacactattgacttagtggacgaggaggaggtacttcttgaagaagctgaagaaggtgaagaagagcaaggggtacttcctgaggaagttgaagaaggtgaagagagcaagaggttgctctcgtgcgcaagcataaaggcaagatggtagctgaggagtcttctaa

SEQ ID NO: 284833 - DNA, 457 bp, Cannabis indica
atttaagtggttgaattggaaaaatggcatttttgagaaaataagaaaaaattggaaaaatggcaaaattgcaaagtgggggcccacatatccatggccgaccacttgaaaaggaatttaccatttaagtttttcaatattttaatgttaaataattctaacctaaacctaggtggatgcctataaatagatagtgatgcctcatatcaaaagatgatgaacacttgccttcagtaaaatttttgagccatttattctataccatgttcgaaccactctcctctcttcctctcttcacattttctaacgctatagtgatagagtaactgcccacacacatcaagtggtactcaatcatagtgtgtaaggctgtgaagaatccagacacaagagaaggagatttagactcagatcttggtgatactctactacagacatgatacaagggttagagatc

SEQ ID NO: 284834 - DNA, 1028 bp, Cannabis indica
ccatttttacgtaccctgagacccatttttacgtaccctgagacccatctaactgctgcagtacatcacgaaatacattccgtgaaagtacaataacgagacaaaatctgtccctatatattttttcttttccaaaactttaaaaagttttttagctaaaccatttattattttgactcaaaaattacactattataatctattttttatgaagatcattttgatatgtgggaagcatatatttttttgccgctacaaaaataaatgacccgaaagagtaacttttaagtttcttttctacgtatctagttaacaaaaataattaaactttcaacttaaaaggaaatttaatatatcaaccaattttataagttactaagtaataagcttatacacttagcttattttgtaacaattttgatatgtttctaaaataaatatatggcaatcacatagtacttaaaattcaatacaacaaccacatcacaagttactctatattttttagaattaattacatctcaacatgtaaatatcaaattgtttaggaaattgttgttgttggttctaaaacatcatatgagttatattaaaaaaaaataaacctcaatgtatctttaaacaataaaataacatattataacttgaaaatataaaaataaaaaaaaaacaaaaaaatttcttttaatattagttgtctttttttagagatagattaacatatatttctcacatattaaaatgattatttattatttatatatgtataaaattctaaattaaatttttttaataaaaaaataaccaactcatattttattcaaatcaaaagtaactaaaatgttactttttttcaaaactcccaaaaagtgaaaatttttgtaaatgagatttttcaattttttccattttcgataatttttttagaattcggtatgtatactgatgtggcacaacgatatttgtgcaaataattttcttaaaagtatttttataaataaaattatttttaggtataatattgaaaa

SEQ ID NO: 284835 - DNA, 533 bp, Cannabis indica
ctgtcataactgacagttaggtaataccgttaggattagatgagcttagttagttgatgtgtaattctctattagtggccaatcataacaattatccaccttggtcattaatagagggattgattagatgatgattagggactgaactggtcttgaatcctcacttagcaattgaggatgtttagcaagtctaggcaaagcctaaacttggctaaactaacatattttgtcatcatatcagcagggttctcctttgttccaattttcttcacattaacctccttttcagcaatgatatctctgatgaaatgcagcttgatatctatgtgcttcgatctttcatggaacatggggtttttcatcaaatgcagtgcactttggttgtcacagtgcactgttatgttttcagatttgaaccccagttcatgtgtgaatcctttgagccaaattgcttccttaatggcttcagtagcagccatgtattctgcttcagttgatgacagagctacaaccttttgtagattcgatttcca

SEQ ID NO: 284836 - DNA, 628 bp, Cannabis indica
aaaatatacatgaataaaaaataactaaaaaatagctctggataaaaaaaaaatctgaaaaccactttaaaacaactaaaaaacaactaaaaacaacaaaataaacacaaataaacacacatacacacatatatatatacacaattaagtttttctttggaatatactaaaaaaatacaccataataagtgcacataaactagaaaaataattgcacaataaaaaaacacataaaaacaactatagaacacctaacaataacataaaaaaaactaaaaaaaaagcgacaaaacaacagaaaaatgataagacatcaacctcgttgcaacatgcaaatcattcataaattaactttgaataaaccacaaaataatttaaaaaaaaaataactacttttattaatcatggaagagagagtgttaaaaagttttgagaaaaggtgttgttaacctcgcatttagccaacgacggtaagtctaaattaaagtgatgagaataattaaataacagttttcaaagagtaataagtaaagaaaataccaaacttatagatgttcaaccccttatagttggtaatagcctactttcttttttgttgtattgacttgtgaaaagagtgagcaagaat

SEQ ID NO: 284837 - DNA, 625 bp, Cannabis indica
aaaataaaacaaggcttgctcaagtgcttccggttgactcctcggtttcctggcacgagctttgagcgcgtgagggtgtatttaatgatggcctttaatgcagcgattcactttttgcaggggtcgattcgtttcacgcccattgattgatacggcgcattaatggtgtcagacggacactcaaacgtttccaccgccttaattacaagtcaatctgatccgttgatctttgagaattcgaatcgtgcgtttccccaccgttcgattggtaggtgatagtgcctgttcctcatgcagttttgcctataaaagccaccacctttccttcatttcggttacttcccatttcttgccaactttgctcaaaaattctttgttgaacactttgcgatttttcccagtccatcttcgttcactactgtcaatccttcttatcttcgtttgatctacagcaggacccccagtctcaacacttcactgtaagtttcttgccccccttgctttactgttaacgtacatggcatgcttttacttatctgctcgttttttctgggttttgtatttgaagtttctgggaatgcaaacttttagatttttcacgtaacaggtctagattcaccatttc

SEQ ID NO: 284838 - DNA, 517 bp, Cannabis indica
gatgccagaaaaggaaaatttatcaggcacaaaattcttaatctagcattagaacaactattagaaaaaacaaacaaacagaaacatttccaacccacaaggaagaaagcataagaagctaacctttacgaaaatggggcgtaagcgaatagttagagcgtaagaatagacctattcctctctgcaaagcacgaatcgccatggccgatttggggctgccgttaagaataaagtacgctgcttctgtcatacaaattaaaaccttgtaaatgtacaacacgtgtttatttccaacactgacgacatgtcgttttggtttagaatggtgtagtagatttttgaatggaagtgcttcataaatccataaaaacagattaatttgcggcgagatagctatgttttaatttttatacacttagggctcgtttggaatgccgtattaggtcgtattgtattgtattatattgaattggattatatattatatttttatataatactatgttaaactttaatt

SEQ ID NO: 284839 - DNA, 530 bp, Cannabis indica
tcatcaactgacattgattttatctcagacatgacagccttcccttttccggcaaaggggggagatggccaaacaggtgaaatgggctcccttatgtgaattgcatgttcaataggcctgggcgtggctgggagtttcttcttcctcttcagtggggtcaccagctcgtcctcgacctcatcttcaagattcaaaggcttggccctgacacctcccttcaacttagcttcacgcttcagttgaatccactcattctccggatgagcttgttcaggccggccagcataagactttctcttcttccccaccacagacttaggagaaaagtcctcaaggtaaagcccgtacttcaccagattatcaccggaggtcaactggataatatccctgtcttcccccagcaactaggcaagtttctgagctctaaccctaagagcaagagtgaggggaggatggtgatatgtcagaatttgctaaaactgagtctgggtaatgcttggatccttcaccatgaagtactcatcagcaaa

SEQ ID NO: 284840 - DNA, 554 bp, Cannabis indica
aaactagcataaaatcacctctgaaaactattaaaaacaacagcaacatcacagaaacagattcactatatttcttcaaaaatcacatattttgcttagaaaaatcatggctttaaacaaggtactatacatgcatttctaatagcttaattaacctcaaaataacatacatacatcccagaaattaaccataaaacccagcagtaacaacaactaagaattcatgcatgcatcaccaacttttcatcaaaattcaacaaaacataaagagaagctacaagtgatcaaaccttgactaggattacacaaagatgagttgaaaattacaagctttgagcagaaaaatcccagccctagcagcccaagctttggccgaaaagagagagagagagagctttgagtgtttttgaaaatttcttctaattttgactaagtgtaaaatttgagagaaaaagagttttaatacatatatcacattatttcagccaagataatcaattaaaataaacatttattccatttaataactcacataagacaaaacactaatgggg

SEQ ID NO: 284841 - DNA, 898 bp, Cannabis indica
aaaaaaaaaaaaccaaaaacatgctaactttaaaagatatgttcacaagtactaaccaaccacaactccccctggaaaaagggtccagagttgggcaacaaacaaattaaaaataaatatctctccccctttttgtttatcggagtgccaaagtaaacaaagaaagaaaaatagatataagttcaatcaaaaacaaagaagaaacaacttagtctcggtagagtttaatcaaagaagacagttgcttggacatctcatgctggacttcttccattgctccaaggcgattatgcacattctgaagttcggacttgacttccaggagttctgctgcagcagaacctgaacttgcagcagcagaagcagcagcagcaccagcctttggccgtttttgaaacacaccatcaaagtattcagagggctggaatgtaggtccactgatgggaggctcaagtgtttcatgtgattgggccacattcttctgagaagataaaaccttataaattagatttggaaacacaagtttaaaggttggctttttacctcttcggaaggagacaatctggttcagaatgtgggaggccaaatcaattgaagtgccagaagtgatgcggtataagagtgaagccacatcttgagatactacggtcttgtttgaattaggaacccaattgcttaaggcaaaccgcataagagaagcatgagcaaaagtgaggtgagtgattcgaagactctcccctggtttcaactctgaacgagcacccgtgagttcagagtgcatcaactcacgatccatggacatcactgcattggatacattctcgggcaattgcaaagcttgagcaatatccttttcagaaaaagagaaccaatgaccctaacataaactcttcgataa

SEQ ID NO: 284842 - DNA, 395 bp, Cannabis indica
aaaataatttccaacaaatccttgtctagcttctctttttttagtttcttgagattttgatgaaaagatgatgtttgcatgtttgtttgaattgttcttgctgctctgttttgatgttgatttcagaagtttatttataatttaaaatgttgattcaagcatgttaggattggtgattacttgattttattgagacatgaaattttggctcaaaaactatggttttcaaagagaagtgttgaaatctgctgctgttgttttgttgatgtttgttggggttttcagaggttaaattatgcatgtttaagtaggtttgggctgaattgattgcatgttggtgttgtttaatcaagtttgagtttggaactcaatgcttgaagctttaatggtgattt

SEQ ID NO: 284843 - DNA, 708 bp, Cannabis indica
acccaagccgaacaagaaatggcgagtgtgtattgatttcacagacctcaacaaagcatgccccaaagactgttttccacttccaagaatcgatcagcttgtggacgcaacagctgggcatgaaatattaagcttcatggacgcttattcggggtacaatcaaatcaaaatgcatccaccagaccaagaacatacaagtttctgaacagatatgggtctatattgctacaaagtcatgccatttggtctaaaaaacgctggagccacataccaaagattggtaaataagatgtttaaagacctgatcggatgaaacacgaaagtatatgtggatgacatgctcgtcaaatccaggaaggttgggggcatatagatgacttggacgaatgcttcaaagtcctcaggaaatacaacatgaaactaaatcccttaaagtgctcctttggagtcagctcgggaaattttctaggctttattgtcaatgcctgaggaattgaagccaatccagagaagattcaagccctcctggatatgaaatcgccgacaagaactaaggaagtacaaagtttgactggtcggatcgccgcactcagtagatttgtttcaaaatcaacagacaagtgtgttccattcttcaatatcctacgaggaaataaacaatttgagtggacagaggaatgttaaaaagcttttcaggagctaaaaatg

SEQ ID NO: 284844 - DNA, 475 bp, Cannabis indica
tagtaatgaaaattgtcaaaattacaaaataccaagtggggcccattaacaccatggccgaccactttgaggctttttccaatttttattttcattattttaatgcaaagtaattactaacctaaatctagtggttacctataaatagatagtgatggctcacacttaaataagtttgattcaagagattcaaaataagaaaaattgagccactcactatccttctatagccgacctcatctctctctcttttcttcttcaattttcaaaaaccttgagtgataaagtagtgcccacacacatcaagtggtatctcaatcatagtttggaagatcgtgaagaatccaaactgaagaaaaggacattcggactcagatcttggtgatactctgcgacagaaaggatacaagggttagagatctcagtagaaggagacatattattccgctgctaccaatgtaaggtttcctaaact

SEQ ID NO: 284845 - DNA, 633 bp, Cannabis indica
atttatttatcaattaaaattatagcaatattaaaattctgataatttaattatttttttatatgattgtgcgtaattttttttgaataaatttagcaactttattaactagcaatcgttaataacaatagaacacactttgttggaacaattctccaattgaagcacacgacttggagagaaacaagaatccctggctaaaacataagccaactcgtttgcagatcgtttgacaaaacacaactcaacattatttaaagatcagagaagaatacaaacattatgaactaatagaccaaaagaggatggcaaagtaatttggctatcagtttccaaaatcaattgtccccacaaatgacggtcaatccagcttaaagcttcttttatgccaataaattcatctattttaggttgcacctgtcatttcggcataaaaatctctgccattttctccactgcctccatccgctgataactactcgacgccatggacacccgaacgaacccagaaccaagaactagtaactaacgccagaaaccaataaaccaaactcaatgagagaaattatagaaccatgtcaaaagacaagactactgggaaaacctaattagtttcaacacatgaaactaaaa

SEQ ID NO: 284846 - DNA, 846 bp, Cannabis indica
gacttacatcattagggaacttgtcaagagagaagccagccataccaataactgcatgaactggtgcactgtagttattatgatcatatgaatcaacaccattttgatccttattaggcatagccaaacaagaattttttgtaaacagaacaagtcctctcatagttatggacatgtccaaacagaaccaaatcaacctacatacatacataaatatcaaaattccatttgtaataataatcactaagaacaatttatagtaagaaaagaaattaaggcttcaatttttactttgttggccaataataaggattcaacttctttagcaaaatctgtatcaacactaaacagtccagttgaggaagtgtacattggtctgtgcctgaaataatatgagttaaaagagtacatattagatttgtacttataatcaaatattggttttcaatgattaatagctaattatttaccccataaatattagccaaggagttttagctctattgatagaagccatgtccttcttcatccataggtactattaagaaaagataattactgccttgttcaatggaataccaaggcttatccttggcaagtgttggcatttgaaaatatggaattcattaaaaaataacaaatgccaaattaataagctcgaaataacaatgtcagcgaatgatgggtatgcaacctgaacaatggttgatatgtccgtggaattcagagtaagtatgttttttatattaataaatgtaacaaactaatggatcgattagtgagttgactgaattaacatgttttgttctgtagtgatcactggttgacaattatgattcatgccaa

SEQ ID NO: 284847 - DNA, 550 bp, Cannabis indica
cagtaacattaattgaagtagaaaagttaaaaaaagaaaattgtagaaactgtcaatctaaaataatggagatgaaaatatgctagtgtactaaaatcattgacttttgaagtaggtagttttgttgtatttagagttgttttttttttttatgtagcagattagatatacccaacccaagtccaatcacattctatacaaatcttttaatttgtcggtggtgagtggagggttttcttatgaatctacttctactttaatttgtttattcttgataaataataatagttaaagaaaatatttgtgcaaacaaatttattgcactgtctacacacgtgtctggttggtgttatttgtgctctgcttaactcttacacggttacaccaatttacaaaaagagctaccactcatcttccccctaaaactctttatttatgggtaatttattaatgagaagtgctattttcaaccatttataataaattttcagttaatttctatatttgaaaatatttgattttttttttcatgacagtattttttaagtta

SEQ ID NO: 284848 - DNA, 733 bp, Cannabis indica
agagtaataaatagtgttctataatataaagcatgaataacatcctactcttagtttacttctttaatggcgcgtttactaaactgtaattggaatcagaataatcaatgggagaaatgtatcggtttaaaatagaaaataatcggaatcaatattttattatgctgtttactaaactgtccggaaagaaaaccagaatcatattattttgtttacataactaggaaaggtaatcggaatgctttaatttgacaaaattgccattattagaatatgtaattatttttttgtttatagatttttaaagggcatatttgtcttttttatttttaattaataaaattaaaattagaatgaattaagctaggaaagggaaaggtattccctataaaaatggggggagaacctttccctttgttttctcccaaatttgtgtgggtcctactactttctccctttccaaaatttagtaaacaattgtatgggaatcaataccataccattcattcccattccctttaagtaaacatgccataaatattttaaaaaaatctctattttttttaggtagaattattcctgtttttttatttttttttctaaatttacggtttgtttttctaaggtggttgcaacactagttacaataggcgaaaaaaaaatattttaaagtataaaaattgttataaaataatataaaataatataaagtagatgagaagaaagaagaaga

SEQ ID NO: 284849 - DNA, 568 bp, Cannabis indica
tatctccattgatagaattaaaaggttggtaaaagatggggtactcaataccttagattttactgactttgatacttgtgtggattgcattaagggaaagcaaacctccaagtctgtcaaaactggtgtccataggagttctgaaatattagaaatcatacatactgatatatgtagtccagatatggagtcacatggtcagaaatacttcatctcattcatagatgattactcacgctacatgtatatctacttacttcataataaaagtgaagcattagatgtctttaagatatttaaagctgaagtagagaaacaatgcaacaagcaaattaagatagtgagatcagatagaggaggtgagtattatggtagatacacagaagatggacaagcacctggtgcatttgcgaagtttcttgaagaaaatgggattgttgcccattacaccttgcccggtacacccgagcaaaatggtgttgcagaaagaagaaaccgaacattaatggacatggtgcggagtatgcttagtagcaactctaaccttcctaaatccttgtggactgaa

SEQ ID NO: 284850 - DNA, 528 bp, Cannabis indica
ttgcattgttgatgtcgatttctggatccagttttttactggtgttttcaagttgttctaccatttcttcagcaaccagatttgcatagtcaattatgtcgaatttgtcctcctcatcttctattgtttctgacttttccccttcttctgtttgctgtcccgttgtgtatgattctgttgttgttatgttgttttcaagcgttgttgtgttgttttcgatcattgccacattatattcattcggtgttgttgtggatatcgaatttggtgttgcagcaggtgttgtgttgttgttttgctggttgacacatagtggatatgtcgtgaaatctgtttccttcattttcaattccaagtaaaagtagaggcttcgatcgttgcatattttgatcggtggtattccttctttagcttggtactgtatttgtagtgttgtgctggtgttttcgcaccccaatgaagtaaccagtatttgcagtagctcttcgtacttgcattttgttggtatgaattctccactagccacat

SEQ ID NO: 284851 - DNA, 523 bp, Cannabis indica
aatactccaagtgtgtgtgtgtgaaatgtcttttctcaaaatattgcttgcaatttagatcaatttatgcaaatatgaattaagcacaaaatctctaaaatgacaaagtctcataggtttgtttttcatctctctctccactaatttagacaaacacaaaaccaaagatcaaaaggacttttttaagcttttaatgtaaggcttaggtgaaggtggttcagagaagtcatttttgactcaaatcacctcaaagcaccttaatttttcttagaccaaaatgagacttcacacttacttcctcaaataatatcccacaaaaaaatttgaatataatattgccattatttattgcctcaaaatttttcaaaataacgtgctcccaagagttataacaatgccttagcataaatttttttttctgtctctgctccagaatgatataacacctgggacttcaagcttctaaaaaaaaatcacgctctttttttattattaatttttttttatgcaacgggtggcacac

SEQ ID NO: 284852 - DNA, 254 bp, Cannabis indica
aataaagatcagaaatcacattttatgttgcatggttcacatgatttatttcatgattatattatatattctattaagtccagaacatatgtatttgttgatgattatagtgttgtcaggacagtagaatataatcatgtttatatgttcgaaagttaattttctgatttgccaattcactggatttagactggcatcataatcagcgataggtatacttacaccttggagaagtgttatgtcctttctagggc

SEQ ID NO: 284853 - DNA, 495 bp, Cannabis indica
acctggagcgagtgagataggatggagaagagagagattaggtaaggtgggctggtgcaaaaccctacactgcactctgtctcagagaaaaagatcacagttgtagaaacatttccaattggcccggttagtgagggcgggaggtgctattagtttactataaaagttgggtcgggtcttagtgatatgatgggtcaattgatccatgggtcgggttgtgctgcttcctttactttttttattgaataattatcttttttacccctgtagttatgacactatactattatgccccttaatctattcagcttgttacaaatagtccttgtataattttatatgcatacatttagtccttctgtttattttgtttaaaaataccgtttgtattgatgatgtggtattataacaaaggatagagtagtaatttcatctccttttagagggaaaattgactatgaggtggcataataactgacaatgaaagatgattaa

SEQ ID NO: 284854 - DNA, 553 bp, Cannabis indica
tggagcggttttacgcttgattttccttgtctcaggttcccggggtatcaaaagtcaaattcagtcaattgatgaaaagacgggacaaactagtgaaaaatcggagaaatctgctcttcgggtgtcagtagtcgcgacccttttctatggtcgcgaccacggtcgcgactaagagttttggcagaacctatgatttttgaggttcgccggtagtcgcgaccagcctttaaggtggtcgcgaccaggtacggaaaacgcagtttttgacctaattcagatttttttccaattggaggcacacctttcattcctatataaggaacacgattcagaaggtcaaaggaagcgaaaatagacctgaatagtggatgaaagtggagaggaagctatcttgaagacccgaagcgataccttctagtttctttcttttacccttattctttcttttatgtctagttttgtttcagatttaatcatggatgttattattgtttttatgagctaaatttcccattaagggaggatgatgaatgttgtttaagtttatgcctag

SEQ ID NO: 284855 - DNA, 899 bp, Cannabis indica
ttaaatgttcctcattccaatactgtggtacaagaatgagttgcattttttcatcatacttacataatttgtatgctccgaattcgagaacttcgaccacttgatatggtccctcccagttaggtccaagtacacctgccgtactgtctttggtgtttaaaaatattcttcttcggaccatatcccccatgaagaatctctaagccttcacttgtttgttgaaatatcgagctactttttgttgacgggccatcaacttcaagtttgtagtggctcgtctctcttcaatttcatcaagtgattcggccaagagtacgtgattggtatcttggttgtacatcaatcttctgtgggatggtggctcgagttctacaggcagcatagcttcatatccatacgccataacgaatggtgtctatccggttgccgttttctcagttgtccgatatgaccaaaaacttcaggaagtttttctagccaatttcctttggcatcgtcgagttttttcttcagtgtatccttcaaggtcttgttgactgcttcaacttgaccattcgcttgaggatgctccactacggagaaacttttgatgataccatggttcgcacaaaagtcagtgaaggattggctgtcgaactacttgccattatctgaaactattttgtacggtagtccaaaccggcagattatgttcttcataataaagtgttgaactttctttgatgtaatggttgtgagtggtttggcttccgtccacttagtgaagtaatcaaccgctaccactgcatactgcactcctcctttgcctttgggtaattctccgatcaggtcaattccccaaatcgcaaagggccacggactctgcatctgagttaactcgttaggtggagctcgaggta

SEQ ID NO: 284856 - DNA, 668 bp, Cannabis indica
ccgagcttgtacaagtcttccgggttctgacagtttgtgaacctatcttggagtgcttctgtcttcacactaccagaccggttgaaatatttgttgatcaatcggtctgagccttcgcgagcaacctgcgcagccttctcctcttctgttggcccggtggagaagtccaggcctgtaatgagtgcaaactcaagcactccgaatctgagctccttccgaccaacgtaaaaccgcatcctcaactcctcctgagcatcaaccttcatcttgtgcagcatcagctggtgaaataataccgaggagaatgtcaggggtacggcattccaaaagttgccgaaacggctttccttcgccgtgttattcaaatggaactcctcaaaccgagccttgatttttgcaaaagtcccagtgcctctgtaagtaacgcggccagtaaaatgctcggatgctggaattatgagtctgggagccatctgaaaaaataaaaacaaaaaaaatattactgtcaaaaaatttaagaaaggtcgacataacatcgacatcatgtcaatattcagtcgacatcatccaaaagtaaacaacaacacaacttgttcgacaacatatcgacatactgtcgacatgtaatcgatattccaataaaatcaacacaacacatcatcacacaa

SEQ ID NO: 284857 - DNA, 525 bp, Cannabis indica
attcttttgacaatttattgcatatgattgatcatgtcaaaataattcaattcatgaacttcaggttcactataatttgtatttcaatgaaactttcaaaatgtaatgtaaattcattacaacataatcattacaagtttcatttttatatacacgaataatataattatattattctccaaaacatatacactcttcaggaatcactatcatcaattcaatgatgtgtataatttaaaagatacatgacaacttcatcatgttattgtaatggtcaaatagatataaccataacatatcattcatttttcctgatatctttttaacaagtcgtctaatttattaatagactattcatcagtctaattatcatgacttgatatattatatatttaaatgtacaacaagtacatataataagttatttattatcactttcataactagataaaagttacacatctaggtacatacaaagatattttactactcaaagtagcaattgtatgtaagacttcttcagga

SEQ ID NO: 284858 - DNA, 519 bp, Cannabis indica
ccttataccttataggttcatccttagttctgccttctttctccttgaataatcatttgcaatcaactatgcttttgtctttaggtttaggcaccacaatccaggttctattcttcttaagagattccatctcttcatccattgcacctttccatttcctggaatttggtcctttaatggcctcttcataagactgaggttcattattgaccatttccaattcactcataaaggcatatgcaatgtcttcatcccatatattaaagctgtacttaggattaggtcttggaatccttctgcccctgtccctgaccaattgataatcccccaagtcctcttgagtcccttcatcaataatgtcagtgttgtcctcatcaggttccacctgaacctgatctccctggttctgttcaggtgtgttcactgtttgttccacctgaatagagccagttccttcatttgcagtgttacctgcattttcagtgtcttttgtacctgcactagggttagaagaaatag

SEQ ID NO: 284859 - DNA, 650 bp, Cannabis indica
tttttacgacgataacaacttcgagcaaatattctcattctattttttactttttttttgcaactaatattttattttagtggatatataatgactatttttggtagtgtagtgggttgatggttaagtcttagagcttttaagaagtttgtatatagttttattttggtattgtattcgatttgttcaatatttcatacaatatatagaatacaagcatgtataatttatttataatttttggtatctgtaactggttttttttttcattaagataacaactctagtgaatataatcttattatattttctacttctttttcggttaatattatgctttagtgaatagtgaatattttggtagtgggttgatggtctagtagtagattttctaagaagtttgtaactggttttaatattagtattgtattaatgatcaagtttttgaacttataaaaaatatgtaaaatttatatgagttttggtatatgtatagctggatttttcattaagaaaatggttttgattatataaaagatactgttacttaatttattgccttaacaaaattatattactattattttagcttttgtaggtttttttaaaaaaaataattttttatagttacagttgttgaccgaggtttt

SEQ ID NO: 284860 - DNA, 529 bp, Cannabis indica
tggttagtttgtgtaataaattttaaacatttcgtaatagttgcatttcagtttttttatagtttcataacattattaaaacaaaaaatgacaaaaacagggttcagaattagaaatacaagatatccattgtgtgtgaatgtcatcaacagcccaccaacaaccatcaatccatcgttcttagaaaatagtaactcattagttgcacagacaaacacatttgaaacgatggaatataatgcagcaacaaaagaagactcaacaaatcaacaacatacagttaaagatacaatactggaagatgggggagaaaatttcgacttcatggactatgcaaaacttgtggcagaggaaatggttgagcaactgacgaactactaataaaaaatttgcaacatcctgaaatagaagaagcacaaataaacaagaacaaagaaacactccaaagtgtgcttggtttctatgcaattagaaacaactttcaattcaaagtgaaaaagtcttgcgcaagaacatacaaaatttgttg

SEQ ID NO: 284861 - DNA, 584 bp, Cannabis indica
tccctccaccaccttgggtctgagtaggagacatagcacgaaaagcctcggccatctcagcggcttctgctccgaggagagagaagtcgaaatctgaaactttggaaagagtggtgtaaatgtaatcagacactgcctgatcatattgtttcttcccgttctctttctcagcctccaaatcacgggtcatctcctcgatcgtcgcccgcgagttcttgacctcgagctccgcctgctccttagccttgctaagctcttcaagctccttctccttcctagccgcttcttgcttcagcctcttcatgttctcctaaagctgggcattgtgcctcttcagcgagtcggcttccttcgaacctgtggcagcaacttttatgtacagagtcatcgactgcgcggccaactccacagagcgcgtaacaagctcctcagaagggatctcagccaggaacttctcctgcatggctaagaagtcgcgagctcgaacagttggatcgattaggactttcttccccttgtcctgtgcggtcttggccagcttcttggaagagtctgtggcaagggtagccatcacatcgctcttc

SEQ ID NO: 284862 - DNA, 631 bp, Cannabis indica
tttaatgaccttaaaagttcaaaaagcataatttagtacatgtcaaagttcaaagggagcaaaaaatcctaataactataaaatataacttaactaaattttacaccacaataaatactattttttttttatttttcttttaccacttattaatataattactccaccgccaaagccaaaaatcgtaaggtggtgtttggtttggtgtaatgtaatggtaatagtaatagtaatagtaatggtaatgtaatggagtaagaatggtaataggaattgtttacaatgtttgatttgtagttggaataaacattgtaatcaaaattattatgttttgtttagtatgagaatgtaatggaataaaatttatatggaccaaaataaccctattactttatttaaattataaataattcaaaaaaaaaaaaaaggtttaataagactttgtacatttttactacattttattaaatattatattttctttgtaatagtgtaattgtaatgggattacattggttttggtattgtaatcatcattacataactcaatgtaatagccattacattgtaatggattaccaaaagttaaagaagaaaagacaaacaaatgtaataggctctattcattact

SEQ ID NO: 284863 - DNA, 631 bp, Cannabis indica
ttcttcccatttttgtgttgtttagggtattgccatgctatttatcgatagggaaacttctagtttcgagtttaagtccccgggaagtgatttagcgtgtcacttatcagtgttgtgattattatgatttaggagcctgtaattcgccgagcagattgttccactcaggttgaccggcacacctgaattcggaatcgaggtaagattagtataatgtcatgcatatgcttatacatgtttagcgtacatgtcagttgccatcagattaacatattagatatatgttaggcaaattttatatagccgtcagattagcatatcagggcaacagtgaggtgtacatagagttgcaccgagatgccaacagatatatgctaggctatcagatagtatggattaactgctaccacatcggtacgactagagtaccgagtataggctggattcgcggttaatcatactttgtcatggacgtccctgattcagttagggttatggtcaggtgtatgggcgcttgattataacccgggatttagtatgtttattatattatgcttttcttactgagtctgtcgactcacagtgctatgtttatgtgtaggtaagggcaaggccaaagctgaggaaccgt

SEQ ID NO: 284864 - DNA, 517 bp, Cannabis indica
ttgaggggtaaatgttgcccctgattttgcccaaaatacgtggcccaaccggatgacgacacgtggataggaaagggttacatttaaataaaacaactaagtcttctttgagcaaaggattatcctggacatgcctcccggagaaggcatgtaaggtctcatatgctcccggagagcaagatggcatcaaagcatctccgggtggtgtcaggcttcctctgaacagtcatctcgcatttaatgccgcatgggaggaggcgtattggaactgccacatgcaataaagtctgacgacacaacccccgatctgtacctactaggctatgaccaataaagtctagtgacggctattctgtgaggaatcacatcagtcaaaagggattaaggactgccctcataaaatccctacagcacctagggattagaccatgcattacctatgataaattcattggtaatgtgtgactttactgatagttacagaaatgcatgtaccttaattctagggatcacccca

SEQ ID NO: 284865 - DNA, 1165 bp, Cannabis indica
ggttccacggagactacgaccacgacactaacgaatgctataacttgaagcgggaaattgaatttctgataaggaaaaacaatccacacctgcagaagtatgcccgaaataaaacaacctagacttgctacctccaccagtagatggacatctgcaagtgattattggaggccctcatattgttggagattcgagcaaagcttgggagaagtatgcccgaatagtgcgaacaagaagaagttatcctggtcgtggaagaaaggaagcccaaattttccacgagtaggagagccgaccatatccttcaacgatgaagacgctgtcaaaattaaatttttgcacaacgacccgctggtcatggaggtccaaatagccagtaaaatggtggctagaaccatgatcgataatggagcctcttccaacatcttgttcaaaattgcttatgaaaaaatggtactccaactcaaggatctaaccccatgcctccagcctatctatggtttctccggtcaaggagttgcacctctaggacaaatccgtctacccctcactgttggaaaagctccgacgagcataactatcatcgcattgttcctaatattggatgttccttcagcttttaacgtaatgcttggtcggccaggcttgatgacttaaaggctgtcacatcaatatttctctcgtgcctgaagttcccaacaaagaatggggtagggtgtctgagaggaaaccagcagtctgctcgggaatgctataaccttgcagtggccaagtctaagaaggaagtatcctccagccagagcatagacaagggaaaaaacattcccaagtagggaatttcccaaggcggggatgaagatgtggatcctcgacttggggacccaagcagcaatgttggacctgtagaagtattataaaagattgagatcgatccagctatcccgaccagaaagctaaagatcagaaaaggtttattgctcaaagtaaaatcagaattgataaaatttctgagagcaaacctagacatttttgcctggtcacatgcggatatggttggaatcgattcttctattatttcacatcttctaaatatcgatcccaacttccggtcagttcaacaaaaacgaagactgttggacaaagaacgagcagtagccctgaagga

SEQ ID NO: 284866 - DNA, 541 bp, Cannabis indica
atcctgagtatacatgaactcatgtttgtgttcattgagctctttgattcatttgttaaagtttctcagagaagatgattcttacaacctctattttgggagcttaataacatgagtggttgggagcatgttatacactagtggaatccaagctttcctaacggatcgaatattagtacccttatagtgattaattctttgagtgctaacagttgattgaaatctaaaataagttatagattaactgttcacattgaattaatggtacataaggaataaagagataattagaagggtaaaataatattttgaccaactccagttatgaactaataattgaagggcgaactgcttatattgattatatcaatggactacaagtaacaattctgtaaacataattctatatagtcaaagagcgcgatttcataattatttaggagtaataatagaattattaaacaggattattctattgatgagatcgataataatcaagtattattgaagctttgaaatataggcccatggtcctcgagtc

SEQ ID NO: 284867 - DNA, 666 bp, Cannabis indica
gcctccttgaccgagaaatctcgatcaggtgcagcatctgtgtgctggcggatcgtgtctaaagcgagggacgagacacgacttaagacaagaattttgtctaagatgcgcgcgcgtaggcgtgccttgtccgagggcctggtgcactcgatgcacctactcgacaccatatgcattcgatttttaaaaccttcataacttcttcgtttctctaaaacaatgaaataaacacataagggtttaagaaaaccttactgttgacctcacttttagccaacgacaacgagtctattttataagtgataaatgatttataataacaaatatatgataaagcaataaagagacacaggaattttatagaggttcagcctcgagcagttcggtaatagcctaatcctagttatttgtattgacttaagatcaaggagaaagattcattttcttacagctcttacaacagtatctctgaatatataattcttagataatatatttagggtatagtcttagctcaactgcttttcgaccgatcttttgcccaatgaatatgctgttgggttttatgccctaaataaaactccaattcaatgtaatctaatttattcaatatcaataaagaaacagaagaatttttcattcatttgtgtatgttttggttcatct

SEQ ID NO: 284868 - DNA, 470 bp, Cannabis indica
tcaaattatgccattaaagctcaaagcttgagtttcaaaactcaagcttgcttaggactaacatcaagcatccaaaaccagttgctagggacttagattaactcaaactaaccctagaaattgaaccctaagcatttcaaaacccaacagccactaaacctagaaatttcataatgaaactaaactacaacttcaaaaacttaaggggaaaagaaactagggttaccttgtcttgattcctcttgaatcccttgctgaaaacacagaatttcagctccaaaatccctttgcctcagctggtttcgaagagagagagggaaggaaaagagagttcttcaattttttgatatttcttttaatttccaaaaatgagataaatgagttaacaaagttgattctttgctgaaataaaagccacttgtcacctccctaggcagccactacaccattccttaaaaagacttaaatgc

SEQ ID NO: 284869 - DNA, 621 bp, Cannabis indica
taaacttttgaaacatataaatctatgattatattccactatgctgagaatactataatcatgtacaaataaataaatatgtttggacttaatagattatacattaaacaataatcatgaaataaatcatgtgaaacatgcaacattaaaatgttatttctgatctttattaacttgtaaatctgattatattgaaatgagttttatttagggcacataacccaacactctaatccttttatcctttttgtagcagagtatcaccaagatctgagcccgaatctccttctcttgaatctggattcttcacagccttacacattatgattgagtactacttgatgtgtgtgggcactcactcattcactataggctcagtttagaagagaggaagagagagagaaggaggtttcggctagggttagtgaaggaggctcaaattttatctgaaggaatgagatgcatcatcttttccctaaagccatcactacctatttataggaaaccacctagggttaggttagatttatttagcattaaaatattagaaaaataaatggtaaaatccatacatggtgtccggccatgggttggataatcggccccactttgcaattttgc

SEQ ID NO: 284870 - DNA, 593 bp, Cannabis indica
tattatggtattatattagtccaccacaaataaataattctaacattctcccacttggacaatataattaaccaccataacattgtctaccacacataaggtaaccaattaaaaacgtacataatatcatatcgacgggatacatatattatgtatgagttgaccttgaagacattttaattcaataacaatcattaacaatcaaaccaaacatgcatgaggtacaacaaaattgagactatgcgcattcatctccttttgtacctgtcacttcgatgaataacacatatatgcacacatatgtcaacaataactagaagtgactacaatatcattatgcatgttcaaaacataaatcataagcattccatacaagatactagcatgtccgatacataataataaaactcccactgagctcaacaagctaggctcctaacaatcccattcgagcaacatgctctaaaaatacacatatgggtaagcctttcgttagtgggtctgctaacatgccagtactgggcgtgtattcaatggaaataagagactctgtaactttctctttaacaaaatagtacttaatgtcaatgtgt

SEQ ID NO: 284871 - DNA, 741 bp, Cannabis indica
tttttttttaaacaatgaaataatgtgcttaacgagcaaacctcaaaacaaactcctaggctactcaaaattcaaaacaaacaacccctaaatgttgtgcaatgagcaaaaatgaaaagaattaaaatgtgtgtatgtgttttgtaaaagttaccaatttggaccttctgttttgttaaatgataatatggaccctgtattttttaaaattgtacaaataagactctgaactgcttttttgtaaaaataaaacttaataataatctaatctagagatgttatgacaaaactgcttatattttctgtatctgttcatattagaaattatcttaaacttagttttattaaaaaataaaattgttaaaaaatgagcttagggtcttatttttattattttgaaaaaatatagggtctattttgttattaacaaaatagaaaatccaattaataatttttgtaaaatataaataaagtctaaaataacatttagcctaatagatattagataatagaccaaaaatagagaagtataataaattatcaagtataatataactaaaaactatgagaagttagtaacattattgaccaacttgcttaatatatatccaatagggggtccttaaacttaaagaaattaatgatgaaaacatcatgagataataaagttaattaataagattcgaattaacatgttttttttttttcaataaaagatttcttttttttttctaaatattt

SEQ ID NO: 284872 - DNA, 547 bp, Cannabis indica
taggtatttttactatacaataagcataaaatttcagtgaaaaaaaaatgagtttttattttatttatagaataaaaggaaattactaggggtgagcaaaaaatccaagaaaccgaccaaaccgagtaaaccgaccgtccgaacaccgaaaaaaccgacaccaaaaaccgccttcggttaaaaccgctttaatatggtcggttttagtgtcaatcgcaaaccgaccgattaaaccgagaaccgaccgaacatatatattatatgtaatatatattatttttgtacatatttaatatacaattttattaatctaagtttacttatatcttttttatttaaagtctcaattattcattattttattttattataatttgatgcatttacatattatatacacacattcataaaataatactagttttttaatataactcattaccatattagtagcacaaataatttgaacaaatttaaaaaagttattttacattatttatttaactaagaaagttttatttttaaattatatgatatttgatacaat

SEQ ID NO: 284873 - DNA, 661 bp, Cannabis indica
atttacaaaaatagtgaaaataggatcacctagccaactctaaagtatgtttagccaaactatatacagcatggttagcgtttctcctaacataagagatacgtgcttatttttttagtgtagcgtaatggtatttttataattaattaatagcttgtaccttaaaagtcttgggttcgaacccatgacctctctcttttcccatccctccctccccactaagctagccttagtggcttagagatacgtggttcaagaaaaaaatgataaaagacaacaaacatccaaaattaaatcagagaaactagacaaatcagtggatgtagtagttagagcatgaaaaactctaagagcatcagtctctatgttgatgatattaagtttttactatactccataattagttagtcctttcactcacacattatttatttaatattaaaatgcattaataataatatatatgttataaatattaataattatgtggatgtccaaatcttttatttattaccattaattataatcaacattccttttttcttaatttctctttttcttaatttcttaatatttcacttataaataagggttcacccaataagcaactgataaattcccattcatttttctttctctcttcatcttcttcttatttctt

SEQ ID NO: 284874 - DNA, 454 bp, Cannabis indica
ggaaagttctatacatttttggcattgttccaacatttaattaactactagtgttactttctgactaacgcaaaagtagttgccaaaagtaaagaatcaagtatccctaaaggagtagacatatagagaagaatttcacaatatcaaggattttgtgattaagaaaatgtaatggtggaggaaaggttgtattaaatacaacctgtcagatcctattacagagagtatactacatactacacttgatttggatatcaaggtgttgagattatttgaaatgcactgtaatatcccaataagcttaataattaataattagggtttatatttatattatgagttaaccaggtaatgagtgggattatgatcctactaatttagttcaacataaaatgttaaatattctataagtggataaataagcgtgatttttaaattacggagatttatatag

SEQ ID NO: 284875 - DNA, 800 bp, Cannabis indica
gaaattaatatgttgaataggcaaagtcagaaaagcctacttttttattactctcatcaatccttaccgaattttttatttcttaaatgatgtgatagtgttatcattgactatcatttattgggtaattacttttaaaatctaaaactatggcatctttggcaattcaccctataaatttggtccattgccctataaattttcttctgcaaatgtcaccatgtgacaactgcattgattttatcactaagggtaagggcggccattaaaattctagcaaataataataacatattgaatcttaccattgacattcttataaaattccgcctacaaatatacgagttatttgagtattataattatttttattttagtgctgaaatataagtaatacactattttttttttagtatttctattgatgatatttttacgtgataaatttacatcacaatttaatacattattagagtaaaattttgcatagtgaattatattaatgcattctatagcttattttttttataatcgtgtacgttcagtgacgaaaccagaaatttagttgagtgagggcttgaataaatattaaatcaaaactaataaaaataatgataaatgtatctttcaaattttcatcttcaacaaaataaaataatactgttgacaaaaataaaataaaatattgtcaatggtattattttattttttaataaagtattattttttttattatttgtattggactacttttaaaatgggcttgattagaataagagtaggctcatgaatcatgatta

SEQ ID NO: 284876 - DNA, 503 bp, Cannabis indica
atacatggtagtaaatatagatcctggtaaaatatttccaacaacatgttcccaacattatggcaataaagaattatcttccttaccatttgccctgagcccagatagctcgctaattagactatttgactgcccttactgcttaacttatcacacatttaatccacattttctaaccatttagaactcagacagatatcaatatcaatatgcatataccatacacatattcttttcacaatcatcgcaatgctactttttccaacatactttataatagcctaggcaggtaatccaatagcaaataatataaatacttactatataccatgagtcgacttgtcctcgcagcaaatgtacatatttgaccaatcttccggacctttaaaaccatggctgctctgataccaagttgtaacgccctaatcaatagggacgccacgtgtgtgattttataaactattttaatactaatggattaattaattattaaaaaccgtgat

SEQ ID NO: 284877 - DNA, 507 bp, Cannabis indica
tatttttgtaaatatttgtatgtgaactgtataaatgtttaatggccggcccatagtatttttgtaattttttttttccttttttgtatttttttttaatttttttcccttattttatatcgttattgtatcccttttatattatatagaattttgtatcatgagcttattttgatttgagcattgctattaggcatcagtggtgcctagcaccttctcgacatgtgattggttagcgatactccctaaatgctattatattaaattatatgacacctgatactcagttagaccaataacgatattgacacataagagggtgttagacaccactggtaccctttagcatttctcttttgattttctaatattttaactattcaagaaagtgaaaagccaactaaacaatagaataccatcctttagaatcatgcatcatgaccttgcagaacttttcagaaactatcatgatgtatctgtaatgtaacaccctaactaccataggcg

SEQ ID NO: 284878 - DNA, 325 bp, Cannabis indica
agggtatatatggcgttggttttttaaaaccctttagcgtcgccctgatcaacgtcggtagcgaattttaccaaaatcgaccctgaaagggcttaaaaaccacctctaaaggggttttggtagtagtgttttaatttatatctaatgaaatcattatagtgtaatgtaagtttctaatgtatgcatgcattatgtaaaagcaaattaaatgtaagttactaatgcatatataatgtaaataaattaaaaagtgactttttcagtttttagaatgtaaatatagaatttttaatagagtatagaaataaaataaagtcaaaaaaat

SEQ ID NO: 284879 - DNA, 671 bp, Cannabis indica
atatatattgcttttaaaatactaagttttgcaatcacatgctcgtaatatatgaaaagtttttctttctcttatgatcatccttacatgccattaagagtgaaactatttattcttctatgagcatccttacatgccatttaaagtaacactaattattctctaaatgaacatccttacatgtcacttgagaacacattatacaatacaaaataacaaacacaaagagtagggtagaagaccttatgcaaacttgtctttaatcattcccattctttagttgaatgttattacctataaaaatcttacttctctacttgattttctactataaggctacaatgtcattctttcaatttcataggtgttacccactcatcgatagacacttgttccatgacacttggaaataaacatttaagctctttaaaaggtcttctatatataaatatttaatgatccatttcgaccacctttttgtctaacattcacctcttgatatcctttatccatgtattcattgcacttgtcacgccttcccattttcctaggtaaccactgtcggttccttttgtagtctctttcttgtatcactatattgtattttctttgctaatctctcctatggtgcttggtcctccattacccccttcaatcaagttgacttgatt

SEQ ID NO: 284880 - DNA, 741 bp, Cannabis indica
tttacatgtcaattggtatcacaaatttttttattaatatttcttttatcttattgtaaggtttaaaaactttactgttcattctttagttaagtaagatcttaatttagatgaattacatgtttagtgaccggatttccctagttgtttaatttttgaggtttatttgttcttgacttatatttatttgtgacttttaatgaaattattttgtttcaaaaaaaagggaaaaattctcaagacatattatatatgtgtaacactaaaaacatgcagcatgcatactttaatgagagaacgtctgaatttgtagttatataattacgataattattattaatgacatgtggcacgtggtgtccaacgcactacacatgtttgaggggttaaagttttcaagtagaatattattattaaacacttgtatatatatagtactatatctactgcatcgatatgaaaaggtactgttatctatttttctaaagtatatatatatagaagagtgagatttacatttaagatcgtacgtagacattaagaagaagtatgtagtagctaatataattactatgatcagattctcgatctgaaactaattttccagtcttataaatatatatcgttttttttttatcacgtgctatatatgtatgaatattcgatgcaaattgagatctcgtattcattcatatatattataatatatgtagtcattgtataattctatagtttttaagt

SEQ ID NO: 284881 - DNA, 186 bp, Cannabis indica
tatttttgtaacgttttttatatagtattgatcaccctaatggtgacgactgtataaaacttacaagagtatatcgaataaaaggttgctagaacgttgatcattttagatgagctgacaactctattcaatggatggtatcactgactctcgcctaaacgggaacttgatatcaatttgttgaag

SEQ ID NO: 284882 - DNA, 412 bp, Cannabis indica
ccaaaaattcagtttttgtggttaggtgttacaaaccgtaaagttcaggtggtttagccgccaatatcccaaaaagtgaggcccattatccttgtcatggccggccactatgcaagtaattaccatttatattttcattattttaatgccatacaattctaacctaaacctagatggctttctataaatagaaagtgatggcttcaggaaactatgacatgcatattattccttcagagaaaatagcctagccgccactttcccttctcttttcttctcttcaatttcgaaatgccttagtgatagagtagtgcccacacacagcaagtggtacctcaatcgtggaagattgtgtagaatccaaccatcaaagaaggagagaaagagatccaggttcagatcttggcgatgc

SEQ ID NO: 284883 - DNA, 502 bp, Cannabis indica
attttagcgatacattagcgagccacttcgcgatatatagtgttgagtgtgtaggtttcatgattttatcgacttgtatgtgtttggcgacatgtttgcgattcggttagcgatatatgacagtcgtacctaggattcatgtgtttttatcgtcctgtttgttgttagcgatatggtagcgacataatagcgacatagttagcgatatgattagcagtaacctgtattatgtttcacgataattagcgacatagtgcgacatctttaacgacatacttctaacaaatttgttgacaattttgcagatggcacctgaacttaaacttccaatttcctctcatttcacgggacgtcttacctatcggggtacagataggttcagatatatcaaggccaagtttactgagatggatttggttgagacagtgaaggctagtcctttcggacacttttgggaagctggagagttgactttctccggcgcgttggtccacagcctcct

SEQ ID NO: 284884 - DNA, 529 bp, Cannabis indica
aattttcaaaacccatccggaattccggttcctcgcaggcagaaaattcaaaaattcataactcaaccaaatcaaatccaaacaacctcaaaccttccagacctgttctataggacccaaataacatttctaaagcaataaaactacccagaatgcacagaaacaaaaagtgccatgagagctccaagctttgagtttcaaactcaaacttggctaaagctcacttacaaccctcaaaactagattaaaaccacataatcatgcatactaaagctgcagaaaaccaaaacaaactcatgcaatactcacagccacaaatttcgaaaattctctttgaaaaccaaactttgaactaaaaacttccaatcatgaatcaaagcaattatcatgcattaaactagctctaatctacttaaaatagcaagattaaacctctgtaaactacaacaaatcacagcagcaagaacacaacaaaatcaagcatgcattacaccattttcatcaaaattcatcaaacttaaagaagaaa

SEQ ID NO: 284885 - DNA, 594 bp, Cannabis indica
atctcactaatatatattatattacatgctctacagatatataatgtatattactcatatataaatgttatatattatatatctcacatatatacatagaataacatgatataaaattcaaatattatattatatactactatatatattaatatgatacaaacacataatcacatatatataacccatatataccatatatattactatcatataattaaaatagtaaatcacataatatacaccaccaggctcacccataattaatggtttccacaaaatcccttatccttgtattctcaaaatcttgatttatcacctcttccattgaaaagggataagcttttgattgttagagattttattacaatggaagataaatcaagacatatacaactcaattgtaaaaatagtacaaggataataaaagagattgattaaatatatgttataatacacatatatatatcacatatatatatgaaaggtagaagaataatattaatagaatacacgatattatataacatatatataatattaaaaagaaaaagaagatcactcactcacaaccttgagtgtagattagtaggg

SEQ ID NO: 284886 - DNA, 730 bp, Cannabis indica
tttttttaccgatggaacaatcttagctcatatgatataaaaatgagagatttttttaattagatagaaaaattaagcataaaaactcaaaattttctaattttatccattcatgggtaatacctattgaaagttcacccagatatatatatttatatgttgaatatatagtattatatataaactatttatatctctactatatatcatctattatatatatcatatatatactctattatatatatgtgtttttatatagtttacatttacttgtatctttgagttttgagttgtaactcttttcttttatttgtattttgtgttttgggattgtaactctttatttaatatattgtccttgtaatattttgtttagagttgtaattgtcttagtcttttattcatcttattttattcttccattgtaatctctctattatttctaacaatcaagaagattattttttgttttcaatggaaggagaaactatcaagatgatgaaccaagacttggtgagattggaccgctttgatggcaccaatttcactaggtggcaagacaaggtgaggttcctcctaaccacactcaagattgcctatattcttgagtccaccttggagcccttacccgcacctaccgacaaggataccgatgaggtcaaggcacaaaggaagaagagagaagatgacaatcttctatgtagaggacacatcctcaactcactct

SEQ ID NO: 284887 - DNA, 538 bp, Cannabis indica
aactaagaagagaatcaggacacttgaagacacgccaagcttgctttgctagcatagcttggttaaaatgaattcaagatctaaatccaagacccccaacaaacttatagcttgattaaaatgaattaaagatctaaatccaagacccccaacaaacttagactgacacaccattctccaatttttccagtgtatttttcgagcttcaggagaggaaccccaccagaatttagaaataagagactcaatttctctacaaatcctagtaggaatgcgaaagcaagacattgcataagaaggaattgcttgaaggacagctttgattagagtctccttaccagctttagaaaaccatttatgatgccaggagtgaataatagaagaaactttatcttttaaaaaaataaaagactgatattttgcccgagaaagacattgaggtaatcccagatatttagtgataaaaggcttatcctcaagctggaaagtccgaaaaaatagatctttaatgtcattatgagtattaggagaaaacaaa

SEQ ID NO: 284888 - DNA, 454 bp, Cannabis indica
aatttataggaatcgccgattttcgtattttagccataacttttcactcgggtgtctgttttagacattctatataccgtttcgaagcttatgaagagctctacagtatgagacatagtttagagcaaaaatatatattttattttagggtgattttaccataagatttggtagaaaaccttaggttattttatgcgaattttagacagtgttttggaatagacccttattaatttaccttttccgcgatataggactcgaaagtgtcgggcatcattccactcaggtcggcccacatacttgactttggacttgaggtaagaaaagtattaaatactgtataaggttaatgttatgattgttacagtttcaattaagattgaaatcttgttatacgttgttgtgacttaatcttaatcgaggttaatgatatgtattggatgtgactcgatta

SEQ ID NO: 284889 - DNA, 496 bp, Cannabis indica
aaagaattaacctttaaaggtatgagagaattttgtaatacaaatccaccaaaacagaattagaacatgcctgtaaaagagaaaaaggaaacagagagagagatgttcagcctcatatgcaactacacgagtatataaataagaaaaaattcacaaagattcaatcacaaactgaaaacatacacatataatacccatcaaagcataaaacttaaatacataataataaatttcaccaaataaaatcatatatacatgaaagcatgatttaagtatacatcaaaacaagtctatataatgattcagtaaaccaaacctgagagtttgaagaagcaaacttctatttcttaaaacagtttatttgataagtttgatcatgttagaatagcatatttatactaacttttaaagagagagtaactttcactcatataacacgtatgtataatgactaagcagtaatataccaattagctcaacacgtagcaaaatgtaa

SEQ ID NO: 284890 - DNA, 909 bp, Cannabis indica
aagttctggaattgcatgactgcggtcggatgggtggtaatatttgtactgttaattatagttttgtttgtttgtattattgtggatgttttaatagattagttgcatgtttaaaattttcgggaacgtccgaattatagatgttatgctgccgaaatttcggtagaaatttcagtaggattagtattttattaaattaattaggttaagttgatatagaattattttattgtattaattaggttaattaaattgttgttttgttgttttgttagaagtttcgaaatggatagagattggatgagtgcgaataggttaacggtaaaatatagggaaggtgttgacttctttttggagttttctgcaaagaatgcggataatcctgatttggttcattgcccatgtctcaaatgtggtaacatggagcgtatgaaaattgcccaaataagagaacatttgtttaagaacggtatagacaggagttataaggtttggtatcaccacggagaaaaaattagaagatcgggcgagggaccctctagaaaggataagattgttaataatgtggagtatgaagatgatcacatcgcagagatgattaacgaagcagagtttgaatctcaagttcgtcctgaaacatttcaaactatgttagaagatgctgaaaagccgatttaccctaattgtagtaggtttactaaattatcgacgcttattaggctatacaatttgaaagcaaaacacaggtggagtgataagagtttgacagagtttcatgacggttgttaatcctgcaagtttttttaaaaatcatgtaaacatgaataattactcttctttatttagtttgtattctaattatatatacttttaatataatgattaatgttttttttttaattttttgtt

SEQ ID NO: 284891 - DNA, 616 bp, Cannabis indica
tatgtaattttatagattaacttgtagttatatttattaacttattaatattttaactaattttacattagtgtttgtgtaatatttaattacttttatgaaattaaattatgtattttaccaaaatttaaataatatttaatttacattttaaaaataaatatgtaatttaaattaaataaaataatatataaattaataaatatataattaaaatgtaattaaaattatataattaaattaaaaaaaaatagaaaaaactgaaattcgcgtacctatggcgtcggttgctacgccacatatggcgtcggttattggctaggaaccgacgccataggtacccctatggcgtcggttcccagctaataaccgacgccataggggtacatatggcgtcggttcatataaaccctttagcgtcgccctgatcagcgtcggtagcgaatttcgcgaaaaccgacgctgaaagggcttaaaaaccgcctctaaagggggtttttgtagtagtgttaatatactaagcacctttagtacctttaataccttttagtatttttttatttaactagtgaaaataacacgtgctacgcacatggaacaaaatatttatgaaaaa

SEQ ID NO: 284892 - DNA, 458 bp, Cannabis indica
tttggggtcaatttgttaattaagagactttgtatggtctaattaataaattacataaataacaattttatttagtaattaattattattaaataactagttttggcatttacaggattgaattagaaaatatggtattattgaaaaaagaataagtggttgaaataaagtagcaaaattgtaactagaaactgctccactgaagtgtacgaccatgaagtttattttacccaatattttattcttttttaatccatataattcagccctaattctaattgaaacactataaaagaaacatgatactttcatctcatcctcttgcttgtcaacttaaataatgtcaatttaactactgccttcaacctagatgagagagttccttcctaagtgatttcagcatccttcattattcttccatgttcaaaccttgagtgaatgagtgtcatgcccacaca

SEQ ID NO: 284893 - DNA, 667 bp, Cannabis indica
ataaaaaacaacaaaaaaaattacaaaaatacggtttcacagaattttaaacaatttttacgatttttttgattttatttacagaaaatacgatctttttatgttgtaatcttgttaatttgttgttaattttttgttatttgtatgttattttttgtagttattttgatattattttcatgttacttttatgtagtttttttgttgattttatattgttttcgtgttgttttagaaaaccgtaaaaatagtaaaaaaaaaaatattctttaaacgtaaaaatgtaattattttatgaaaaaatagtattatgtaattattgcatttttaattgtgaaaaataggggtgtaatccaacctagcccagcccataatgcattgagtagggttgggctatacataaattggattgggccattaaaataccctcaacgtgcctaattcaactcatgcacaacactattttatacacgtacacagtttgtcactaatcataaattttgtgtgaatttataacacatttaggttgagctctttaataattatttaaatagttatttattaatttttcgtttaaataaaaattctcattttaatattaccattaagtagtgtgctaattaaattttatatattttatataagtatatttttattttactcactt

SEQ ID NO: 284894 - DNA, 522 bp, Cannabis indica
aaaaaaaaaattgacctgaagcccagtagtcgcgacttcctgattttccagagaggcaggaaattttatcgtaagctagtcgcgctagccttaggccaagtcgcgacttgctcaccaaaatttctataaattcacactttccccctcattcaaccctacacaaacaaaattcaaatttcaaatcctctcagccgaccctaccctcttttcatctcaaaaattcaatttttcatctccaatcttcaatcttttcatcttttctcaaatttcttaaacccaatctaatcaaaaacccaatttcactcaacaatctacacatatcatcaaaacccacaccaaaaataacccaaatccaaaaatcaccattgttttcaccttcaacttcaagctttcaagaacattcaacaatggaggtggagtaaagctttttcgggtttgtaagtatcactttcttcattctttcaagaatttgattgatttttttttagaattttgagtgatataaatgtgtgtggtgcaaaa

SEQ ID NO: 284895 - DNA, 563 bp, Cannabis indica
gcaaacaatggaggaacaacggtataatggtggtgccgttgaagataaagctaatggtcgtagcttgagagattacattctccctactctaacgggagtgcagtcatgtatcaggccaccggcagtggatgctaataactttgagatcaagcctgccatacttcaaatggtgcagtcctcagttcagtttggtggcctcccttctgaagatcccaatctgcatctatcaaacttcatagagttgtgccagactttcaaagtaaatggggttagtgatgacgccatctgattgagactgtttcctttctcactcagagaaagagccaagagttggttaatttccctgccacccaactctattgccacccggaatgacttggcaacgaaattcttgtcaaagttctttcctccagcaaagtctgccaagctgggaggagaaatcaacaacttctgtcagcaagaaaacgaatctctccatgagtcttgggagaggtttaaagagctcatcagaaagtgccctcatcatagtattgagaagtggatgctggttcacaacttctaca

SEQ ID NO: 284896 - DNA, 673 bp, Cannabis indica
atttttgtaaatagcccaatattgaatgtctataattggcctaatatacggttcatctcaatcacatggttgacaatggattaatatatttatagacatttattataatttacttcaattaatactatttttcattacaattttataaattaaggtgtatatggaacaatgaacattttgtctttttcttgggggattatttgttctacaagcaaaatctaacacaacacattaataattacatattgcatgtcaggataatgtaaattatatataaattatattgatttttgacagatttattttattctttttcaacgcaggtaagatgttggtgttttgtttacaattgttatttgttccagatcagctgtttttattctcaaatacaaaatatatataactatccaatatttatattacatattattgatatttgttgctttagagaaggggcgcagtcctgctagctataaaccaatttaactccaccgacactacttgtcttcgaaaattactttattgtcttaattgtaattgtgattttttagcatgattgtacttatttactcatttatttgtaaagttataatggatttttgaccaaatgttaaaaattttaggaatttttataaaaaaaaaattatattttatttataattttatgatttaa

SEQ ID NO: 284897 - DNA, 646 bp, Cannabis indica
atagtatcactgttaactcagtccacttagtagagcgatttttttttattaataaaaaggttatatgtgtcactaaatgttacttttaatgtgttggcaaaagttggtattgcgctggtaaaatagaatttacttatgatgtgttggcaaaaggagttggcaaatcaatgttggtattagaaattttgccagcataaaatgaaaaacgccggcaaaaatgacttttctcagcgcgtaaatgcactggtaaaagttagattttagccactgcaaatgtacgttggtaaaattttgacttctttgccagcgcagtttgcgaaatacgctggtaaaaaaagttacttttactagcgcagtagcaaactgtattggtaaaagtgacatttcttgtagtgtgtccctttaaaactaacgcaatcaatagattaattgtgtcagtccaacagtgcaaaccattatattaatctatgcaaaacttttttttcaatagtgactaattttttttttttttttgtaaagaagatggaaattttatttaacttgaaaagcaatcctctcttacaatagaaagtaaatcagatatggcagtagcctcatcaaacatacggtctgacgtgaaacaagattgtcttgcaatgcaatgagc

SEQ ID NO: 284898 - DNA, 645 bp, Cannabis indica
attaatgtctccttccgctcagatcctctaacccttgtatcctgtctgtcgtaaagtatcaccaagatctggagtccgaatgtccttctcttgattctggattcttcacaaccttacacactatgattcagataccacttgatgtgtgtgggcactcactctatcactcaaggtatgaaaatatgatgaagaaaagagggggctggttcgaattctatagaaggaatagatggctcaatttttcctgaaggcaagaaatttcatcatctttaagtgtgagccatcactatctatttataggcaaccactaggtttaggttagaatttattaggcattaaaataatagaaaaattaagtggaaaaacccttgcaagtggctggccatagttagtgggccccacttgggtattttcccaattttgacaatttttccttattttctcaaaaataccacttttccaattctaactaattaaatctcaaaaccaattatttaataattaaaattaattattaaataaaattgccatttaatatatttattaattagacttaatcaagtctttgaattaataaataagacttagaatctctttccttcacaattaagccattgcttagtgaaaattcataaagtagacata

SEQ ID NO: 284899 - DNA, 724 bp, Cannabis indica
agtcgatcaacttttgatgaaaggctcaattttatggctgaagcttgcatctctcacaagtattcttttattagtatataaatgctaaagaccaaggatttgtgagaagttagttagattaattttttaaaatatctctattcaaaactgtttagaaaaatagggatttagttcaaccacctggtcagtatttttatgtatttattattttaaaattttgaaagttattgtttaatgttaaatttaataaaaaaaaataaaatctattaaactaaaaaatatggttagataggcacttttaatgtataaagacttaaaatatccatttaacaagtttgtttttacttttgtatcaccaatataataattaaatatgtattttataatttttgtagtaacatgtaaaaattaatgatatatattttatcataattatttatgaaatacaaattcaataaataaaaatataaataaaatgtattaaagagagctaggcacatcagaggtgctaatttctataaaaatacgagagaaaaataactctatatattagaagtcctgaatttatatatatatgtggaataattcttaatggggttattaccctttaatgaataataaacaaatttaactataaatattaattttaaaaatatattaaaccattagattttagtccgatagcgaataataaaaaagaaatttgagtttctatacttaattt

SEQ ID NO: 284900 - DNA, 633 bp, Cannabis indica
cacaataaccacaaacttttccttatctgaaggaagagttaatactagagcggtaatcaagcattgatttaactctagaaaacttttctcacaccaattagtcacaacaaacttcaggttctttcgggatagctccgttaagggtaccacaatctttgaaaaaacctcaacgaatcgacgataatacccagctaagcccagaaagcttctaacatcagtagctaactctggtgttggccaatcccaaacagcttcaattctggtcagatccaccatgatcccatctttatccactatgtgccccaagaagaagacacgagataaccagaattcacacttttgaatttagcatacagcttatggtcccgtaatcgttgcaaaatcgatctgagatgcaactcatgttctttatctgattcacattacaacaagatgtcatcgataaacacgataacacatctattcaggtaatcctggaacgtccgattcatataatccatatcaaatatactacgcagccttggcccatcattcaccctgatggtgattcttacatttcggacattcaagatatgacttgaaagaggatctgtgaccttgacggccacctcaatttccccgatgctttctatt

SEQ ID NO: 284901 - DNA, 622 bp, Cannabis indica
ggtttgaggagtaaaagatcctcgaaaggaagcacccggacgcaggagaaacgtcagaaaagggggtacactccccagtacacccagaacacagagctgacggactcccaagagcgtgtgtactttgctactaggcaaaatacgcactaccagagaccgcatcctttgtacaaagatagctcccggagggatccaaacaaaagatgcgagtaccacaacgacattggtcatagcaccaacgaatgcaaaaatctcaaagacgagattgaaaacctgatccgattgggccacctctatgagtggatcaagaataggctgcctcacctcaatccgggccaggcgacaggggttgtgccccagggaacaccggggggtgcagcaggagtattggctccagctgctcccgcgggcgatgcccagcacatccccggtctgccgcccagcctaacgggagggtagccatgatctccggatgtccccatattggaggaaatacccgcaaagagctaaagcggtatgcgggggccgtaaagcacaatgaggtttgggaagttactaaactcccagctcagaggccccggctgatggaccaacccatcacgttcacggaagaacacgccaa

SEQ ID NO: 284902 - DNA, 546 bp, Cannabis indica
aagccgaggcgtctaaggttcctttatgtacagttccccttttgcctataaatactcgaattactggcacattactcattttatcacccttcgttgttaagtaaacttcagagcgaaaagagagaattttttggcttcagagttgtcgaagtgcctatagatgattgtcggcttgcttgaacccggacattcgaatctttgagtaagtttctgattccctttatgctttcctttgcatgtttacgcttgaatgtaactatgttgtagaaagaacgcttaggaaaccctagggtttgaaacttctgcgactcttcttttccatgtccttatgttagctttcagctgtagggcttattttagaactgcattgtgtctgttttccatcttgcttattccaagcttcatgaactttttttgccctaactcaagaaaactttctgacttcttgagtttagacatttctttgaacatggtcgttctttaatttgttaggtactcctggtcggcatatttgcttgttttccgtttgatactccgtccaacact

SEQ ID NO: 284903 - DNA, 1362 bp, Cannabis indica
tgatttacgtgaatgatgaatgactatattatatgattttcttttatttccaagcatataaatctatagcaaatccaacaaacgactcatttttctctcgattatattgtataaatagatatatacacttttggaatttgaatgattggaaattgtgtttgtctaattaatatatattaatgtccaaaggttttgtgtacgttgtctattatgatttcacttctttatttatttcttttgaagtaactactctgtagagtggtagagatatcaaattatttaatttcaattactaagcactttattaatagatttgcattttcttccagctcaattaatattgaaaaaattccatttgcctgtactcgaaaaaagaaaaaaaaaaaaaaaaaaccaaaatttagccaggttgtacgaataatgagcttaatgctctttctttcttgtgtgacattgttaaagctgagactgattaattttaatgaacatatctttattaaaaaaaaaaaaaaccatttgccagttacatatatcatgttaactaataaatagtaaacggtatagttttaattcaatttttatatgattgtatacaatattataattatttaagtgtttttgtaagaaaaaataaaataatctaaaatacaggaaatagagttaaaaacttaaaacaattctattttacatctgtataatacattttttttagtcaaatataatacaatttattgaactttaatatttttaacattataaattatttcaaaattttcatcctaattatcaacaatgtaaatctgtcatataaaaaagaaaactaataattataacttttcaaatactgaaaatatagaaaaatgggaacacacctaataaaaaatgttgtgtagaagtaacattatttggaaaataattaacttttaattaagagtgtacaattttataaacattaaagttcggaaaatatgattttatatatagacaattgctatattaataaaattaagttctgataaaaattcttaaatttaacaatttaaatcatttaagaagttttttaacaaaataaaaagtttaaaaaatataatttaataagagacaaatatactaaatagctaaactaaaaaataattattttctgagcgatgttacttccacaacattatttattaggtattatagtaaattaagatactttagtaaaatgttaagtacaagttcatacattcataattctgattgatgtcatattcattaatgtatcttatgttatggtcaagaatgttaacaaaaccttttaaaacgcggttttgttttatatggtcaaagatgtagtgaccaggctggttcacaacatat

SEQ ID NO: 284904 - DNA, 632 bp, Cannabis indica
cacccttctgaacatcgatcaaggcttggccagttgccaagaatggtctcccaagaatgattgggacgttgctatcttcttccatatccagaacaatgaaatcagctggaaagatgaacttgtcaactttaactaacacatcctcaatgactcctctatgatgagctagtgatcgattcgccaattggagagttaccgtggttggctttgcttcacccagctgcaatcttttaaacactgatagaggcattaagttaatgctggctcccaagtcacatagtgcatttattccttcagttcttccgatagtataaggaatagtgaagcttcctggatctctgagttttggagggagtttcttctgtagaatagcgctgcactcttcagttagagccactgtctcctaatcctccatctttctcttctttgacacataacttggcatctgctctaaagcttcagcaaagggaatgttaatgtgaagtcttttgaagacttctagaaacttggtgaactcttgtctaagctcgactttctaagcctttgagggtagggtattttcacatggtgatcaatgctaattggtggagactgttgtggttgtgctgagctatcagtagccttctctgatg

SEQ ID NO: 284905 - DNA, 590 bp, Cannabis indica
ttaggtattgcagtcacaacttgctcttactcatattgaaacggatgcctcaagagtctcctctgctttaaatttttcatctacaaatttatcttgcttttctgatcttattatggatgtttgttgtcttttatcatttttccctcaagtattagttacccatgtgaaacgaactgctaatcaagcagcacatggtttagctaaatttactttaggattggatgatgacattagttggataggagaaattccctatcatattttctctgttgttgtaaatgactttgatttataataacagtgaaatttctctataaaaaaaacatataagggcataattgtaaatataaagtttttgctattaataatggtaaattttatttacactctgttaggctatttttagcctatgttttggatccaatttatgtgcatctttagctgtgttgggacggaattacgcttgttttctatgttttcaggttctttggagtaaaagaggtctcgggtgcagaaattcattgaaagacgtgctgaaccgaagaaaaacttaatttttgagtttttccatatctggccgcggcgatgaa

SEQ ID NO: 284906 - DNA, 546 bp, Cannabis indica
attatatatgagtacactcttaatgagtattactcatgaataagcattattaagaaaatttgagtttttatgcttacttttactatctaattaaaagaaatatttcctttttacattaatatggttaaagttattctttccgactaagagtagataaaaaaagtttgagattgagttagagagtaaggataaaataatgctgaatataagaataattttgggtaaatagcggcataagtacccaaagttttatgtttgtaagcgacataaacctaatgtttatttttagcggcataagtacccaatgtttgtaaaactgtaattttttctttaattttgtcagtacagactctattattgtcttaaatagggcacatataaagcttgaattctagatcattgggtctaaattataggaatatgcactatcagttacttctaaatattcttttaataaatttaaaacagactctgtattgacgaatttggaagaaaattacagtgttacaaaaattggatgcttatgtcgctaaaataaacattgag

SEQ ID NO: 284907 - DNA, 355 bp, Cannabis indica
attaccgctaaaaattaaacttaggtttttatttacaactagaagttaaatttaagtatttatgtcgcaaattactctaatacataagtcataatttgaagaacaaaaatcataaatagtctaaatattataataatacattaaagaagaaataatactactaatcaaatttgaaagaaagaaagaaaaccataattgacatataaattggaaattttaattttcaaaattgttaaaagaaataaaaaaaattcttttgacgaccaattatatgtgtgcatatatatctaaacaaaaatattcaaaatttcaaccagaatattataatatttatcataaaaaaatattcaaaatt

SEQ ID NO: 284908 - DNA, 651 bp, Cannabis indica
ggtccagcatttcgatcccagtctgggtcttggtccgagtccaggttcatatccggatccctatctacgtccaagtctatgttagggatcgtgtcccaaattgaggtcgaggtccgggtctcaattccggtctgggtacacgaccgtgtcctggcccgagttccagtctcggtttgggtctaaggctaggtctgtgttcggtttttaggtgtgggtctgggtcctggtcacggtcctagtcttgttttagggtcctggttcggtgattcttgttcaggttctaatttttggtcccagttctaggtctgagttcgggtttggttctttgtctgggtttgtgtcctaatctgagtcctagatctagacacagacaattggtctgttccaggccccgttacccaaatcccgagttaagatctggatcactgtcacgggtctcgatcttgttctgttttaggtccaggtcccatttctgagtttgagttcgggatcgagactttggtgcggttctaggttccgacccttgttctgtgtccctagtctggttacatgtttgggtatgagttcaagtttcggttcgtgtcccgagtcatgtttttggttgggatccgggtccccacccaattcgagtctaggtctgaattggattcc

SEQ ID NO: 284909 - DNA, 349 bp, Cannabis indica
gtaaaatatttccaacacattggtccttttgaaatccttgagaggataggccaagtagcgttcagggtggctatgcccccagcgctgggagctgtacatgatatgttccatgtagcaatgcttcggatatatgtctcagactcatcccatatcctgagctatgaagcattggaactccagccagacttgtcatatgaggaacaaccggtgaagatactcgatagaagagagaaagtcttaagaagcaagacagttgccctggtgaaagtattgtggagaaacagtaaagtggaagaagcaacctgggaactagagacggatatgcagcagaaatatccggagttgttca

SEQ ID NO: 284910 - DNA, 551 bp, Cannabis indica
aagaaatagttgaaaacgcctcaattaatcggccatcacagccacgtgcaacaaaaccagtcccgacctcatttgtgtcttcaaaaactgccccatccacattaatttttaactgtctagcagccggtttggaacagtgttctcctgggtcaatgcgattagaagccaggaaaatcgagtcaagcctcttaaactgagcacacgtcaattgtcgaagagtggtacgagccatccaaaaaacatcagcagcactacaacttttagcattccaaagcatatcatttcgagccttccaaattgcccaaccaaccatgacaacttctttaaccaaccccatattgcctactgccaacacttccataaacgagtcaaaaaaattggtagctacagaatggccaacacctaacgctgatcggagccaacaagagcgagcaaaggagcattgaaccaaaacatggaaaattgacgcttccctataattgcaaaacacacaatgtaaaatccacagggacatgtttactatgcagctgagaacgtgtaggcaaacaacc

SEQ ID NO: 284911 - DNA, 439 bp, Cannabis indica
tagaagagtgacaaacctataataaaatatttttgtattttttacaaaatctcatatttcatttaattttcacaagataatattgttgatagaaagattactcttttggtaacactcaagagaccaagtatatataaagaagggattgaaaaatagataagaatatgtaaaggaccagttgctgtaaagcatctattgaactcttcatcaatcatcatgttatcacccataatgacatggactcaattaacagaaaaaccgttactacttgacttcatttggtaatagggttttggttgtcaaggttatttttgtttttatatttttatcgttatttttatatatctattctatataaagtgtgcttatataactgaatttcttggtttatgagaaattcatgggtgactttttatttatatttaataaaataataaaa

SEQ ID NO: 284912 - DNA, 703 bp, Cannabis indica
ttaaaattttttacccatcttcatttggttgacacttgtgataggaacttaagaacactactgagaaagcaaatctaaccattcatgtggatagaaataacttatcagaattatgagaataagatagaagaattcttgcatagtctattcgaatgacttgagccaagatttctaatcctcataacattttatggtatcttaatttgattacttaatctctagcaagtattttacacttcaaatactagacttgtaaagaccgcatatgattaatactttggattattaaataattagggttatgtatgagattttgttattattaataaaaatacaaattatgagaatttaattgagttcatatatgtttttatgctattttatgttaattacctaatttctgtgtggtgttcggaagctgtggaaagcggcgttggggcctttagagagtcatatcttatatattttgatgtatgttatttgttcggggtattttgttaagtattgaattgtcgggtttagtaatgaccaatttgcccttgggagttggtaactagttttaatagttagaggggtaattaggtctttttctttcaagactcttgttttggcttttagtgattaatggctgccttttattattatgatattgatatttaaaataaagaaaaaaaagaaagaaaagagaagagttagaggaagc

SEQ ID NO: 284913 - DNA, 721 bp, Cannabis indica
aacacgaaatgtgagttaatggtcggtgatgatgggttttaagaggggggatcaattatttttgaacttttcctttccagtccgcttgatttggtagcgaatgatgatgggttttgctctgcttcttccattatcaactctgcttcttagtccactcatttgtatgggaaggttacgaatcccaccttctcatctacaaaggtcagttaacataaaaagattgatttttttttttcttcatgagttccaattttaattcttatatccagattgtgtagtccttgtggagtatctattattaatgtattatgtatagtaattttacgtatcaaagcctttagtctttacaaaattggagtaacataattcaaattaagtaatatcgagtattatgtattgttcatgtattgttcatgtattatgtattatgatatcataatacaaaatgatgagtattgagttgaaattaacgattaaaataagagattaattctcgtacgatttggtctgttgatgactttgattttggtagggcgaagtgataaattatggtgagctctaattttgtaaatggtaataaaattgaagaagagaaattaaaaattcattaattaaacaatgtgtttctttgcagacttgccaaggttcacatgcatatagtgtttataaaagagatcatgctttggtacacctaaagttaggttttcagccctttacagag

SEQ ID NO: 284914 - DNA, 508 bp, Cannabis indica
ttgttaacttcatgaaggtagatcatgtgtgtgttatattctcaccccaaaggggagcttataatgaccagttgactctacaatattttctaattgcttggcttatatggcttgatcaagttttaatttttggattttttggtctcctttctgagaacaacaataacgtttttatctgaattctgaatgcttccaactttaagacatggaaacgagatgtgaaaattactttaggcataatagatttggacttatgccttcgagaagaaaaatctattgatcttactaatatcagcattgttaactagaaaattcttcatgcacaatggaaaaattcaaatcatcttagtctcattgctatgaaagttcaattccataacattcatttaatggtttgccaaacacctcaaatgccaaagagtttttcaatgctgtagaaaaactatatgacactggtgaaaacgctgaagctggacatcttatggatgaaatgacaaccattaagtat

SEQ ID NO: 284915 - DNA, 717 bp, Cannabis indica
gggagcactggctgatagttaagagatctaagtgccggtgtagaggaaataagaaactttagtccaacatctgtaagccggcatgccccacgaattgataaagactagtgcaggcaataattgctgacttggctaaggtgtcaaccaaaatataaatctggcagacagcgtccacactgatcaagttgaagcacctgattcaagacacaaaaatacaagcttaaaaaaaattcaaacaaataaacaaaccaacagactttaattttcaacatcctgctgatgatactagaaaatgtagtccaaagaatcttgaaactatttcgtgaacaagtatttgcaagaacaaatatacagcatgtcaaacaaaccaagaacaatgtaggtaaacacaagagtaacagatattagtaggaattacaatcaagtgctaacattcaaataactgtaccctgcttctgtataaaaatagcattattatgctactatttgagaataagacatggcaatatactaaatcgccttcaatccaaaacagatcaaactccttttttaggggaaaactcattaaatttaagtatcttctaagtttagactattttaaagctccatgtaaaaaataaaagtaaaaactcatcataagacttttgcaagagaatcaactacaaaacgcttaatttcaatatactgtatatactaaacatacaatgacgattaaat

SEQ ID NO: 284916 - DNA, 578 bp, Cannabis indica
atttttctcaactattttgtctatttgtcacaaatactactttttgcactttcaaccctatacatgtagaaactatttatttaataattaagataattatcaaataaaattgtcatttataatatttattaattagactccagaaagtctcttaattaacaaagaaaccctaaaatcatatttcttcacaataaagccatatcttagtgaaaattcttaagctagacatagtctaattttagaattacaattgattaattaaaattaattaactgagtctgcaagtagtattatctcaactagtgaggggaccatgggcctatataactgagctttcaataagtggatctagaattcaccaagtaaattccctaacatattaattccgcattgcgccactatagatttggaattgaatagcactctcaattacttagaacgcactatatgtaccacaatatagatacgttacgattatccattgttacaatcctaatagtcaaggatcctctgtggatgatctacactaaatagggacaaatttaacgttctacccttcaatgtattttatctataaa

SEQ ID NO: 284917 - DNA, 561 bp, Cannabis indica
aattagacttaataaagtctcttaattaacaaataaactctaaaatctcttttcttcacaaataagccctagcttagtaaaatttcataaataagatatagtctaattttaaaattataattgattaattaaaatcaattaactgagtcttacaagtagtattatctcaactagtatggggacatgggcctgtgtaaccgagctcccaataagcagatctaaaatttaccaagtaaattccctaacttattaattcttccttgcactactctagatttggaattgctctcccaattatttagaacgctctatatgttccatgatatagatacgctataaaattttcatcattgttctaatcacaataatcaaagatcctctataaatgatttacatcgagtagggataaatttaccgtttcgtccctcaatgtattttatccttgaaatacttatttttctataaatgatattttagtaaactaatacaattactgaaataagagctcttccatttatctctattaagccaacctcgatggaaatcatcatttcacttcta

SEQ ID NO: 284918 - DNA, 535 bp, Cannabis indica
ttttcgttgataaattgaatatggtagtgtcgacaaagcggcggtgttcctgcaaacagtgatgtattttcatttaagatgattagacatggtgtgcatagcttatttaattaaaaaaatcaacttatgaaaggcatgtaaaactattttattttttaaaaactacacctctgcagtatatttcattagttgggcagcagtacacgaaaatattttttccacaatatctgcgaacatgacagcagataggctctttgtattgtcacaagttcaacatatgctatagcactgtaaaatgcataataagattgttagtatcttttttattttaacttaatttcaataacatcatatgttttttgtaatataccgtggtgtaggaaatccttcctggccgcatgttggcttgtcacatataattttttcattgcgattgtataaatctatttttttatgacatgcgtcacatgacatgtaataaaaactctggacagtatcagttatttttattgccgcctcaatccaaaaatatttt

SEQ ID NO: 284919 - DNA, 393 bp, Cannabis indica
gagctctcgtacaccttgttctaataagtagtatgctccttctctattagttcttggtactcaaagaggacgactacatctctggaagagagtgaaagccatgtctgggtactaaagcaaaagccagagtgatataaataaaaaaaaaaggcttcaaataaaaaacacaatacaaaatcgttattttccaactatcagttggttcttaattgagagagtcgtccagctgaatttcactcttcttggaccacatgagatcactgttcacacacgaatggagattcaatgtgtagtgctcttgtaagtaccattgtcgatggggaaggggaatgatctgttgctctagttgtgcagttcgtgtgctctcagaaacactgttcattgatcagctga

SEQ ID NO: 284920 - DNA, 926 bp, Cannabis indica
ttaaagataaacaaatttaaacgataaggactacatatttcagcaaatacactatataaaaaaaaataattgaccaaaacacaatgaaaatcgtgcattgtaatcacctaaaatcacatcaaatcaacttaaccattcggcattgaaaaaattcagatttcaaacacacatttcatgcttcttgcatgttacacattaaagtacattaaaatgatgtgaaactcttttcaactaaatgatttccaatacttaaaaattatacgaaacaaaaagcattcccagaattcagacttcaaacacaccatgcacatcagataaaaacatatgatgtttgacacacaaaaaagtttgcttccaagcaattgatgaactactccaaagaatctaaaccttgcacaaccaaaacaatgaacaaaacaaaacttaaccaataactgccatacacaataatgaacagaaccatatttggcagaaccatatttatgaaataggtctaaacgggcttataaaaaaaattctcaaacaagaattaaatgtggtaaaatccaagtttttttacacacaaaatggactgaattgaacaacaattactaaatccatgaaattgtaagacttaattggccacaaattaaacctttttggctaacacttaaatcatcaagatcagagccaagaggggtcaatgacatgtactatgaatataatcacgggtttccctatctttgtacgaccaaagccaaaaaaaaaactcaacaatgcttaaccaatctcggtaccttgtacctcttaattcataatgaacagagtacaaaacaagttggaaaacatttaatatcagaattaacaaaacaatgcttaactactaactgtcataaccaatttcaataaattctccgataattgatttacacaaaaaatcaaaactg

SEQ ID NO: 284921 - DNA, 460 bp, Cannabis indica
tgggagaaaaatatggattttggcttttatgtgtatgagaaaataagaataaagcagttaatttaacagcctttttctttgttctcagcaggtggcagctggcgagctgtgattggaggagaagctgacgaggcggttgcgtggcgcttgctgattcgctgaggcgctgacggaagtggggaccagggggacaggtggcgcaagctggtagagagagggctggcggctgggacccgtgtggaaggagttggcaggcttcacttgctgctgtcgggtgtgtatctcacgcacgcgtaggggccattggatcagatgacgaacggcgtggattgggtcaaagggctgaccgagagtgggccttctaaagggctgatctgattttcttttgaaaattgcacttttaactccatttctctaatatttcatcaatttaatcccaatccttttcttctaaacacac

SEQ ID NO: 284922 - DNA, 593 bp, Cannabis indica
aaccgaaaatccagtttaatttgcataaaactaatgtcctgactttaatttttagatctatgaaaggcatatctcaaaaagtttttttgaagttcccaaacaatccaactcaagtataatctaaaaaacattacgtcaatactatagtaaaatatttatcctggtgtattttcattgtttttttaaattcctaatggtgaatttgttcatattgaatcataaagagacatgtagatagagttatacgtacgtggaaacactattctgatttttaatgtttcacaacagttgcataaacatttttctaacagtcatttcattagattgaaacattcgtctgatgcaacttttggccaaccacccaataactacccagaaactttcgtctgatttaaccttcagccaactacccagcaaccaccctacaaccatagtttgattgaaaccttcgtctgatgcaaccaccgcgcaaccacgtagcaaccaccctgcaaccatcgtctaattgtgtaagtaatagtgtaagtggtattttggtaattaaaattacataaaaggtataaatattgtccacaccttatggagatattttt

SEQ ID NO: 284923 - DNA, 883 bp, Cannabis indica
  modified_base (730)..(730): a, c, t, g, unknown or other
aaaatcgcaccataatcgcacaaagatcgccagacaatacagaaacgagcaaccaaaaaacaagatcctgtcagttaacatcgcacaaaaatcgcacaataatcgcaggatatcgccaaaatacaaaacaaactacaaactagctcctgtcagttataaatcgcacattaatcgcataatgtcgcctaaaatcggtaaacaaaccaaaaaattattaatctaggagaaaaaagcacaatatccaacaaccagcaatacaacacatattcatttaaaaattggagaaatggttcaaactcgagctttgcatgtagctctgttgtgccctgaaccgtgacatagcgaacaatgacgaggttccactaccacctgaccactagacggtcgacgcttcgtcggtcttctacctgcattgctcttcctaggccgacctactggttttttctccactggtaccccgattcttatgttcttgatatgttccggtagtacccactcatcctcctcgccaacaatattaattgtggcatcgtaggttttcttccacgtttctttagtgtaatatggagagcaaagtgtgtacacgctcacattctgactaactgctgcggcacatgcatgtggacaagggattttcagcatttggaaaagtccgcaagtgcatgttctctccactaagttcacatcaccacctctctcaccttgaggactcgtaccaagttccccgaanaattgggcaccattacgaaggacactcctgaacataccatctttgtgttgatcctttaaatcatttttcaaaaagtagtagccaaaggagtagccgcacttactagccttttcgagcgaagaagcaaaccaattttgaagtgtgaacctgatg

SEQ ID NO: 284924 - DNA, 809 bp, Cannabis indica
ttaaaataaaatactaatttttaaagttatgccttcctttgttcaatgtattcctttaggtattttacccaaaattaagactaataagcattcttggttactcccagcttctctatatgtgtctttagtgattttcaaattttcttaaattgatcaatattgttatgaagcaccagtaacattactataagatacattaataaatattagatactagagatatttgtaaaaaaatcctataatatttacagttgttacatatatatgattctaataaaaaacagtagtagcaaaatatcttatctaataatttgttacagtcgtacctttaagtgttaaccagggcatactcaagcaatttgggaaaatttaaaaaaaacttaaaaactaaaataaaattaaagttgttatatatatatatataacatttatctagtatatatatgggttgttatgtggattttgattgtaatttaagttgttcagttagttgctatgtaagttgttatatggatatttataaaaataaaaaaaaatttaaaatataaaaaaaaaatccaaaaatattttgaaatttttacattaaaaatacaaaatattaattttattaccaaaaaaccactacacggttacccaaacatttatacccttttcttttaatttttttacatttgtaccacatgcacacacaataaatgctttcttgattgacacgtgagattgatatgtaccacatcaatctttctatatatcatttctctcttttttttctcttcttttttctttttatttttcatttcttttcagtt

SEQ ID NO: 284925 - DNA, 527 bp, Cannabis indica
tatttaaaggtaacgtaaaaattactagtaaaataaaaattataaagtacgtacatgtatttgatcaacaatattatataactaagaaaataaagtaacataaatgtatcttgattgacatacctaaaaaaattagaaaatagaaaattataacttagaaatagaaaaattaactaaccgaagtagataataataataataataatatataaattaatattatatcaaaataaagtttattaaaacaaaaccaactagtatcttagtgttgttttttttttaataacatctactaaattttaatatatttcctttgttaacaaaatataatataaactatagtgttgcttttcatctcaaatatcttatctgataatggttaaaaatcatatgtttcccgcacattaaaatggatcacattaaaaagtaaattataatgatactattcttaatttaaattattatgatgcagctacaattttttttaaaagtatggtaaagattaaaaaaaagaaaaaacttaagtt

SEQ ID NO: 284926 - DNA, 867 bp, Cannabis indica
aagaccattaaattaggtaccaataaaatttaagtttacaaatttgagaaccacttggaggctagcttcaagtggccataagtgggtgtgtgcgtcttggaggtcctgggttcgagtactagttaaaacatgattgtaatatataaacgcttgaatcaaaaaaaaaaaaaaaaaagtttacaaatttgaggatttatgctactacaattttcgaatttcgatatttactatcaacaaatttaatattttaagtatttatgtcacaaattttttaatagtaaagttaaaaattttaatataattttactaagtaattattattaattaaaatattttatacatttgtcacgaaacgcgagatatttactagttctttaataagttgttttttttttaattgattatcaaatatatttttatcacaatttttttttaaagtagtagctagcttttaatttttttaaaagttgtaccaaatagaaccttaattaattgacttttattatttgggcataaataaataaattaatgtaataaattttaaataaatgtccacgcaaatataattataataaaaaaataagaaattcaaccattacagctataaatccagtagtactactatttcaccctaatatagatctcatttctctcctctttccttttcctaattaaaagttgactaacgttggattggatgaccttgatcttcttggtcaaatcacatgcccaactcaacttaacaatcactaatatttaagtgtacctttatataaatgatcaccactagaggtcttcagtcaacaactgctaattaacttaggcggcgtttggtaatatttttttaattagttttctgtttttaaa

SEQ ID NO: 284927 - DNA, 922 bp, Cannabis indica
atgtccttagcatcgcccaagtagtcaaaattggcctggggattagccttccagaaatcgaagaagagctcgaggccggtagtctccaaagcattgatcttctccttcaatttgtccgcctcggtcaccttggtgtccctctcctcctttagccgaagaagaacttgccgcagagaactcgtctcatcctgaagactgttaacttcagcagataagatcttgatggtctcctcaaagcgatcagcagccttgaggtcctttgttagcgtggagatcttcttctcagcagcaaacagcttcttgttggcttcgcccagctcatgctgaacagctccagtttccgccctggcctcctcagcttccttcttggccaagtccgcctccgccctcaaggtgtcggacagagccgcactcttggaagtagcagatttagcccgggagtaagtgtaggccaacttcaaaccagcctgcaaaaaggaaaagtcagcatatggagctaagtgtgaaaagttaaaagggaagtatcaaaaaagactaaccctggtgagctccttcaagactccgcccaccaacacatccagagatgagtcgctatcagcaccagccagttgctcactgaccttaggaaccagccggttcatgtagtgggccagcatctccttgccctttttggcctctagcagcacgggcaaaggtggagttggtgcctgcacccgctcagggaccctcctgaccagttcagacccagtcgttggtggtccagactccttagacttggcagatttgggagtagaaggatttgcagcagtcagctcctcggaaaggtcaataacctctccagaaggtctcttctccgaggacccctctccgcccttaagcttcttggccggaggagaggcgctagagcttccgcccatcctct

SEQ ID NO: 284928 - DNA, 849 bp, Cannabis indica
gcagccaataatccatctaatatttgttcgacatcatcttcatcaatgaacgaataccccatagtctcttttataatggactctttcggtagtattttagctttttctttgcctttgtcatattttacaaaggtagccattgattcatatgacatgtcgttttgacgagctatttgcacctcaacattacttgctttggaaacgagctcattgaaagtttcaggttctgtggagcataagtaaactgctatctcaggaatgagattttgtctacacaattgaactgcagatagctcagataatttttctggacattgaagtcgaacacttctccatctagcaataaattattgacagattcatctggtctttgcttagtttcagctaagtcactaagagtgacttcccttattgagcttacaaactgagcaatgaaggctctttgcatgtcatcccatgtgattatcgatcctggtggtaattgcgtataccaagtgaatgccacccctttaagcgattgtacgaattgtcttatgagtaatggatctgactgagcagattcaccacatgccgagacaaagtacgccagatgttctttgggggacccatttatcccatcaaacttttcaaattgtaagtttatgtaatttgggggatatggaacataatcataatgagacgggtatggtttatgatatccaagaataggcatgtttgttgtttcataacattctcggatgctttccatgattagtgctttcaattcctgatgaggtattgaagttgatggtgtaggctcttttgaacaattgcattggcaaagttattgacacttgcccctgttccact

SEQ ID NO: 284929 - DNA, 631 bp, Cannabis indica
caagaaaatgatcaattaatatcaaaaggggtgactagggatagaaatcatatcatggttggcttaaaaggctcaaacggtccaaacatagtctaaatcatgtacttgatttagtttcgtctaggattttttttcaagagagaatcaaacaaattagaaaacttaaaagatcacaaaatcacatatgtgcataaacttttactaaatcacatacaattcaatgatcaaggcatatgtgcttaataaatgacatattccaatcaaataaaactcatgcaagaattagtcacaatctaaaaaaatagttatatttttcaaaaagttatgttcaatatcaatcatgtattggaatgtagaaaaattttccaaataaaagagacatatgcttacaatatttttttaaacaagacaaaatattaataaaaggaaaaatttaaattttccaaaactttttaaacacaaaattctcaaatataagtgagcaagtttaataataaatatagaagagttaaaagatgaactccctttttcaataacgtgcaatcatgctagtgccaactgccataagtgttcaatttctatttgtctcaatggatgtacctacaagagagaaaaagaaaagaaagaagaa

SEQ ID NO: 284930 - DNA, 505 bp, Cannabis indica
aattatggtactacctaagaagatcataagggatattaaagctatatgttgttcctacttgtggaaaagccataatgtgtctctgggggctggacctattgcttatgatcatgtttgccaaccaaaaatagctggagggatcagattgaaaaagattgccgaatggaatatgttgggattttatgccttaaataaaacccattacaatctaatctaatttgttaacaataaaagattagaagtcatttatgtttgcatgttgttttcatgtttgtggtttaatatatatacaaaatctgttaagtccagaatatatagtcatttacaattacagttatgtcaacacagtggaatgtgattgtgattatatgcttcgaaagacaaagtgcctgtttcatcagtgcattggatttacattgatgtgataatcaacgatgaagtgtacttacacattgcataagtgttatgttctttccagaacattggcaaagtatactagcttcga

SEQ ID NO: 284931 - DNA, 624 bp, Cannabis indica
aagcttcatggatgcttattcgggctacaatcaaatcaaaatgcatccaccagaccaagaacatacaagtttccagacagatatcggtctctactgctacaaagtgatgccatttggtcttaaaatcgccggagctacataccaaagattggtcaacaagatgtatggaagtgtacgtggatgatatgctcgtcaaatctacaaaggttgggggacacatagacgacctggatgaatgtttcaaagtcctcaggaaatacaacatgaaactaaatcccttaaaatgctcctttggagtcagctcgggaaagtttctaggcttcatcgtcaatgctcgaggaattgaagccaatccggaaaaaatccaagccctcctggatatgaactcgccaacaaaaaccaaagaggtgcaaagcctaactggtcgaatcgccgcacttagcagattcgtgtcaaaatcaacagataaatgtgtcccattcttcaacatcctgcgaggaaagaaaaatttcgaatggacacaagaatgtgaaagagcttttcaagatctaaaggcacagctcgcaaaacctcctgtcctttctaaacctctggacggtgaggaactggggatatacctagcag

SEQ ID NO: 284932 - DNA, 729 bp, Cannabis indica
tatcaaaggaggcgtgggtaaaaggctcaagggcaaaggaaagaaaccaatccctcaaactcaatcgacggtgcctcccccaccaactactgaaatgatgagcactgtggcagaaatattctcagctatgcgtgccacttgggggggtaatttgacgcctgaacaacgtgctcatatatttaacccacgatttgagaattttattcaaacgtatagtcagtcgcagtcgcctggtggttcgtcttctcagagttatgccgctcctccggaacagcaacaacaacctcctcaaccacaacagccgtcttcgcaacaacaattccaaagtttgtcacagcagcaatttgaaaattttttgcagcagcaaccccaatcttttcctcagcagcaacaacagtctggtccgccattgggaaatcagttcttataccgaacaccatcagagtctcctccgctcggctcaaactttgctgattttggattatttgggagttcatcgcaggagaaccaattttattcaactcccattttcaaccaagctgagctcggtaatttaacactgggtttatcatcagaccaagcatatgtgccttctccgccacgggcttcggggactcgtaacgaaaataatccggatcaagactttataattagagaccttaatgaagatgttaatgaataatttatttatgttttttaataatttagtttaattttgtaaaaaatatt

SEQ ID NO: 284933 - DNA, 795 bp, Cannabis indica
aacaattaacaaaaatccatttcattgacttcccattaattccaactctgccatcctcaccaccaaacccaggcgccagctctggcggcacatagttacctttaaagcatctccaatgatacactaaaattagtgttacactatcactaaatttagcgttttcattccaaccacaacaccaaaaattacactaaaaaatatttcttattattatattaattttttaataaaataaaaaaattaatattatattaattaacaaaaatgactacaatcgttatatttaaaagagtcgcgtgacaaaaagtttgaattttattttcggcgtgttaaatttttctaaattttttgaaattttgcaggatgtcttaaataaatataatgcacactaccataaaaaaaaaaaaaaaaaaaaaaaaaaaaaaagaactaaaaaaatctcacgaatgccgaaacaggtaggagtatatcagtacgctaactttaaaaaagtgtattattttcggcgtattaaatttttcaaaattttgcaaaatgtcttaaataactataatatacactactatataaaaaaaaaataagactaaaaaagtaatgtcgggtgccaaaacaaataagagtagagtcgtacatcacttttaaaaatgtgtattgtaaaatttctaaaaaataattcttaatttataattataataatatacatatataaatattaattaaattatataaaaaaaataatgcagtgactataagtgcacggcatatatgtcgtgcactgtagacaaaactttaaaa

SEQ ID NO: 284934 - DNA, 646 bp, Cannabis indica
tttctttcacaactaggaactttatgtcaatatgctttgacttggatgagctcctattgttattggaatacagcactgctgatttattgtcacaaaatatcttaagtggtctttcaacattctccaaaatacgcagcctagtgacaaagtttctcagccatattccctgatttgatgcctcataacacgctacgaattcagctgccatagtggaagaagctacaagtgtctgtttgacacttttccaggatatagctcctccagctaacaagaaaatgtagcctgatgtagaccttctgctatcttggcatccagcgaaatcagaatcagaataccctacgacctccaaatgatctgatttcctgtatgtgagcatgtaatcttttgttctctgaagatacctcataaccctcttggctgctatccaatggtccataccagggttgcttaaatatctgcctaacatcccaacaatgtacgcaatatctggacgcgtacatacctgaagatacattagactccctacaactgatgcatagggaatctttttcatttcctgaatttcaaggctgcttttagggcattgtctaagactgaatttgtctcctttagcaacaggggtatcacctggtctacaatcttgcat

SEQ ID NO: 284935 - DNA, 529 bp, Cannabis indica
atcaccatcagccactgttcggccttcatcacatctggacctcccagaaagaccggaggtgcttgcttccagaaccgttcatacaaaggttccaatctgttggccgcctgagcagcaggggcgggtgccacttgaactattggcacaggcactacaggagacccctgctgcctcaatctctgtatctcgaggtcttgctcttcaattctggcttgcatttcagcaaacctaacctcccaattctgggctccctgatcggcttggggagcctgggcagcctgtggcgggttctcatcaccccgaccacgagccctgcccctgggacctctacctcggcccctagctggcgggggaaactgagctccctgaccttgatttgaccccactgaattgccctgactcctggtagtccgcctggcgtccatctagtcggaaccgcctgcaaaaccaagagttggcatatcaggtcatgttcaaggagagcttactaatgccgcttaatttggaaattaaaaacgaaacatgcgcc

SEQ ID NO: 284936 - DNA, 643 bp, Cannabis indica
aatagcttaattgttaaaataattaagctaaaggatttatatataaataaaaaaaatatttataaattttaatttctaaaaaaggttttcttgaatatttatttaattacttaaaaaattattaattataattaattaattctaaaatcgaatttttacttattggtaacctgctattatagggaaaaaaatataaccatatagttacaataaaaatgtaaccattgaatagtcacccatatatatatatgtgtatgatgaattgaaaagagaggaggggtggatagaaagaagaggaggcaagaagaaaatgaaaaaaaaaaaaaaaaaaaatagagagttttatttgagcaatatttaggattttaattttgtatttttatttagagattgggaaaaattaagaggaagaagaagataattttggcaaagaaagcttggagtattgtgacaactccaatatgagtttttcttttcatccttctcttatttggaactttgtaatttttgcacaatctattatgagttaatttttattttgctagaattattttgttgacttgaattgtgatttggtattttgttgctatgtttagtgaatgcttttgttcattcaagagtacttatgtaacgtccccgcttc

SEQ ID NO: 284937 - DNA, 682 bp, Cannabis indica
atgggtaactaacttttttttaaaataattttctattcaaaaataataattttttttatgaagatgtattttaatattaatttttaaatacattaatattacttttaaattttaatcgtataaacctaaccggaaacacaatctctgaaaattctcaataaaataactaaccccaaaaggatgagcaaccaatcgtgattatttaggataatcatttataatttctttttctaaatctcaaaccctcaaaccctatattgctattgaattattgcctcatcttctatgccgtgattcatggcctctctgctgcgattcctcactttttgtttatttgggtgtaatattcagtgttctattagcgagttatcctttgttgctcaagtaattatttatttgagtaagtcttctattcccttgctatattgctttacttttaaacagctttgggatatgcgaaatataatgtcatccgttagagagtttgttgggcacaccaaaagtaacaagatatccttttcaatttataatccttgaatttttgatgatgctcattttgaaaggctaggtgtaattgtaatgtcggagtagctagatttttcccagaagataaaactcacatcagcaccgccattgctggcacccattctaacgaatactattcttctaagctcatatctaa

SEQ ID NO: 284938 - DNA, 453 bp, Cannabis indica
acgttcattagcaatttaatgcctcaaaagataagtattatttgtaagtgttttatttttagtatggatcaccctaatggtggcgactataagtaagacttacaaaagtacgaaacaatggtagaagctcataagaaagaaaggcctttactctcacctaaacgggacaacgctggattctcatcttgatcgaataaaaagttgctagaatgtttatcattttagatgggctgacaactctattcaatggatggtatttttgactcttgcctaaacgggacactgatatcagtatgttgaaaaccttggaaattatttaggattgtatgtttttagtattttcgcttgtcattcctatttgctaagtgctaataaattctgaatatgattttgtgttgaaccttacttgatttctatttattattatttgtagtatctgttgggttttatgcc

SEQ ID NO: 284939 - DNA, 713 bp, Cannabis indica
atttttttttttttttttttttttttttcaacaagaaaataattacaaaaaggctccctaataagatttgtctatagaaaacttatcccttaaagcaacatccaatcaaaccctagtaccatgtccaaaataattataaccatttctaagaatcaatgaaaattcaaaagttgttttctcaaatctcgccactcacaaaaatataaacacttaaacttggcaaaatttctaagcaaatatgtgctaacaaccatcttaccacaaagtttggcatgtgcattttataactctagaaaaattctaagtaataaagatagtaaaaattggcttgaaaataatattttacaagaataaatgagtaatttttgaaaaatttgaccatgaaaatatgacaagaattaataagcatgcttgaatatgctcaccacccccaactaaaatcaaacaatgtcctcattgtttaaaaatatatacatgaaatgcatgaaatgagaacacttagagagtgagccaatgcaaaatgacatgatattgattcttagaaaaataaaactaaaggaagaaataaacaaacaaaacaaaagttaaaacataccgaaaataaaagaaagcaaggaaagatagaacctgattagtcttggcaaaccagagacaagtctcctcaggtgggcttaccaactcaatattcttgactatccagtatcaaaaatgaa

SEQ ID NO: 284940 - DNA, 690 bp, Cannabis indica
ttgcatccacaagttgatcgattctcaggagtggaaaacagtctttggggcatgtcttattgaggtcggtgaaatcaatacaaactcgccatttcttgttcggcttgggtaccagtatgggatttgcaacccaatccgggtagaaagcttcaattgtgaaattattgttgcgtagcttttttacttcttccttcagggctagagctcgctccttgtccaacagtcttcgcttttgttgaactagtcggaagttgggatcaatatttaggacatgcaaaattacagaaggatcaattccgaccatatcctcatgtgactaggcaaaaatttctaggtttgctctcaaaaattttatcaatgctgattttacctcaagcaacaaacctttcccaattttaagctttttggccagaatatatgggtcgatcttaatctcttctagttcttccactggtccaacattgttgcttgggtcctcaagtcgaggatccacatctgcatccctccttgggaagtttcctatttagaaatgttttttcccttgtttgaactctggctagaggatacttcctttttagcctttgctatggcaaggttataacattcccgagcaacctgctggtttcctcttagacaccctaccccattctttgttagaaacttcaaacatgaatgaaatatcgacgtaac

SEQ ID NO: 284941 - DNA, 549 bp, Cannabis indica
taagctcatttctattaagtcagcacttaactctctaccgtcaattctgatcggcatagacctaatccacctttttgagataactaactctccgccacgtaaaagggttccaaaccctgattcatatctattatgcggtctatcaaatttactaaagattctggctgccacataagaatgtgtggccccagaatcaaacaatacggagtaaaacgagttgttaactgagagctcacctgttaccattgaaggactggcttctacatcagcctgagtaatggcgaacaccctagttggagtgggtctcgccggagcctttggtgcttctgttctaagttgagggaaatccctcttgtagtgtcctggcatgccgcattggaagcacccctgctctctacactcacccatatggtgccttttacaacaggggcactctgggtacgaaaaacgggtctcggaacaacacggacgactgcctcggttctggttcccccggaacctcttgttctgattcgagccaccggttgcagtggatgctttcctattctg

SEQ ID NO: 284942 - DNA, 483 bp, Cannabis indica
attcattgacgacattcttatcgactccaaaactatggaggaacatgaggaacacctgaggatgactctaaaccgacttaaggagaaccaactatacgccaaattcaagaaatgtgaattttggttagagaaggtggcattcctaggccatatagtttccaaagatggagtcgaggtggatcctacaaagattgaagcggtcaagagttggccaacacctaagactgcaagtgaagtaagaagcttcttgggtctagctggttactatagacgcttcgttgaaggattttccaagatcgcaactcctctaaccaacttgactcgaaagacgcagaagtttgtctggtcagaaaagtgtgagggtagcttccaaacacttaaggacaaactaataacagcccctgtattatgtgttcccaataataaggataagtttgtggtgttttgcgatgcatcaaaacaagggctgggatgcgtgctgat

SEQ ID NO: 284943 - DNA, 114 bp, Cannabis indica
tgatgtttagtgaactaagatataatcactgaaacaagagctcatccatttacttctatttagctaagctcgaagagaaccatcaattgacttctatacaccagtagaagctat

SEQ ID NO: 284944 - DNA, 696 bp, Cannabis indica
gggatcacctggataaaaagaaatacggacccgcagtctctatgggagcgttaaacgaaggaatcatggcagagcttgccatactccgaaaagacatctcccgagtctctcgaagacagaaaggcgacgactccgactctgactgtgaggatcaggagccatgtgccaagcacatcctggaagcagagctccccaaaaattttaagatgcccgaaatggcatcttacaccgtgaactcggctccaagcgatcacctgtcatggttcaaccaagtcatgacaatcatgagggtcagcaatgacaccaaatgtttgtgcttcccgcttactctaagcagatccgcggaagagtggttcaagaaactggaaccaggatccgtggattgctagaataagttgcaaaccagcttccggagacaattcgccgccgcaagaaaagtcaatctagaggtcagtgccttgactaacatcaagcaactgcctacggagacattgaagaatttcataaagaggttcaaggaagaagcctcaagaaccaagaaagttgatgacggagagcagctcgctcttcttcaggcgggcatccgtacggggactccattctggaacgagttacagcaagaaggagctttcaaccttcaagatttctagaagagagtccaaaagtatatcaacctggaagaggcccaaatagtgg

SEQ ID NO: 284945 - DNA, 294 bp, Cannabis indica
gaggactcgtacataccctaatgggggaaataggaaaaatcactctcgggaggaaggaacagagcatgaagaagcaagtgtaacatcgaagcgatccagaacccatagtcgatcaactcagagaggagaaagtactcaacaagctaatgattgagaaagtatgggaaccagcaaatctgcaagccactcaaagataaaatctatgagtaggacgtgatctatgagtaagataagatctgccagtaattactcccaactggatctgcaagagcacttgaatcagaagaaacctga

SEQ ID NO: 284946 - DNA, 518 bp, Cannabis indica
tttagacacataatcgacagccaatagaatgtactgactgctaaagaatgaaggaaaaggacccatgaagtctattccccacacatcaaacaattccacttctaaaattcctgttaaaggcatctcgtttcttcttgagatattacctgtccgttgacaacgatcacatgccttcacaaaggtagtagcatccttgaatagcgttggccaaaagaatccactttgcaacaccttcgcagctgttctatttccactaaaatgtcctccacatggtaaagcatgacaatgatttaggatagaatacatctcctcttcaggcacacatctcctaattatctgatcagcgcagtgcttgtagaggattggctcttcccaataataatgtttcacctcagaaaagaacttcttcaattgttgacgcgaaagctcgggaggagttatttttgcagccaagaaattaacatagtcagcgtaccacggtaccatcaggttttccctcacactaaagagttgttcat

SEQ ID NO: 284947 - DNA, 516 bp, Cannabis indica
ttttttcaatcaacttaagtttttattattatattttggtaaaattggtgccttaatttatcattataatagtaaattactatcttaaattaaggtaaacatgtcattttaggtaaactaaatgtcttaaataaagtaatctaaaacataatttatcattaaaatggtgaaccaccatcctaaaatgtgttttttggactcattgttatctttttcaatgatattggtgttcatatctatattagttaacatcgatgcctattcccaatctaatattttattatgggttttgttcgttattagtgttgttacataattaatacattataataatataatttctttcacttcttctactatttgattaaatataagaaaaagtttatgcatgatttgatgataagcttagattttgttaagacttaaagtgtaggtaaaatatctctctttcggtcatttatgttacaacgacaaaatatttctaaatttaattttatttatacttacaaattcata

SEQ ID NO: 284948 - DNA, 467 bp, Cannabis indica
aggcaagtattttcatcatctttgaattcgaggtcatcactatctatttataggaaaccaactaggtttaggtttgaattatttggcattaagaaaatgataaaataaatagtaaaatccctttaagtgggcggccatggatgtgggccccactttgcaattttgccatttttctcaactatttatcttattttctcaaaaatgccatttttccaattcaactatttaattatcaaataaaattttcatttaacatatttattaattagacttaataaagtctcttaattaacaaataaaccctataatctcttttcttcacaattaagccctagcttagtgaaaattcataaacaagacaaaatctaattttagaattataatttattaattaaaatcaattaactgagtcttacaagcagtattgtctcaactagtatgggaaccatgggcctatacaaccgagc

SEQ ID NO: 284949 - DNA, 632 bp, Cannabis indica
aattggattgattatttggcatttttatttgatatgtgaaatctgaaatttatttgggaattaaatgggtgttatgtgagaatgacattttttttaccctagggcattattgtcattttgaccctttgtattatctacaacaaaaagaaatttttaaataaagtaaatgcatttttttcagtttgtttctcagcccccataccgattcccctctctctctttatccatctttatcaacttgtgaatttgttgagaaatagcttgggttcaagcttgatttgtgggaattctttggagcttgaattgttgaagatttggaggtagttttcttactgttttaatttgaaattgttgctgaaatggaagtggataaataggtctttgagttttgaatgttcttgagatgcatgtatgttgatattagtgtaatttttgatactttatgcttgattgtgttgaagattgatgtaagatgctttatgttatgttttgagaggttttagggttggaatttaatgttcaaattctgggaatttactttgaagttgtgggttttggctttgaagattttaatgtttgaagtgtcaaaacttttgagattttgtgctatgtatggttgtgtagcatgcttt

SEQ ID NO: 284950 - DNA, 705 bp, Cannabis indica
ctcctttgaccaagtgtgggaggccacatactaagaagaaatcgaagctcagtgtggaggagcaaatggttgaagaaatttctggtaaaaaacctactgttgctgccgaagttcgaacagaggttggttttcaatttcattttcgtttcccccttttagaacattttagtgtgtttccagattttgcgatttttggttcattctattttctgagattttagggtttcctttttaaattttcgtttgatgttgtttaatcttttaggtctttattgttggttttgagcaatttattttgttcttttctgggttcggtttttaaatttcatttttaggttctgtatttgttttcgttttagtgtgtacaatcaattgtctgtagtttctttttagtttttttttatagtttaatgttgttatgtttgatgtgtttttgtattttcattaggtctagttgtttgctgttagtttttaggtatcaatatgatttcagatttttacagtttatatttgtatagttgtatctgttttgggtagtttttttttttttttggctttttttttagtgttattttagttgccatactgcattattcacaattaataatttattgtggccatttttggttatgttgcaaggccgggaaccaaaatttagtccatctgattactatagatctaaatgtgtttgcactagtctttttt

SEQ ID NO: 284951 - DNA, 627 bp, Cannabis indica
aagattcgagagccatgtcaagaagtgcgacaaatgccagagattttcaatgataccaagagctccgcccaacgagctgacacagatgcaaactccgtggccctttgctatctggggaattgacctaatcgggcagttacctaaacgtaaaggcggagtgcaatacgcagtggtagcagtcgactattttactaagtgaactgaagccgaacaactcgcaactatcacatcaaagaaggttcaagactttatagtgaagaacattatatgccggttcggactaccgtacaaaatagtctctgacgacggtaagcagtttgacaaccaatctttcactgatttctgtgcgaaccatggtatcgtcaaaagtttcttcgcagtagcacatcctcaagcaaatggtcaagttgaagcagtcaacaaaaccttgaaggatacactaaaaaagaaactcgaagatgccaaaggaaactggccagaacaactccctaaagttctatggtcataccgtacaacgaaaaaaatagtaaccggtaagacaccaattgcaatggcgtacggttatgaagctatgctgcccgtcgaactcgaaccaccttcccacagaagattgacgtacgatcaagg

SEQ ID NO: 284952 - DNA, 531 bp, Cannabis indica
taggcctgacggaccgagacctctcacccagtggttcccaactcacggtgtttaatggaacgacgcttatcccaatgggaaaagtgagacttccagtcaccttatgtccggacaccccccagagcacattcaagtactgcacttttgtggtggtggactgcccgaccgcttacaacgcgatcctcggccgaccggccttggtggattttggcgcagtcacgtccattcggcacctgtgcttaaagtttcctacccaggaagccgaaatcgggacggtgagaggaaaccagggggaagcaaggcaatgttacaatgttgcaacccacctgcccgtactgatggtccgggaaaccattgaaccagaaatggctgaagaagatgagttggatccccgagtggggtctgaaaaaattgtggaaccaatggaggatgtcgaggaaatatcagtgtgcgacctcgactccaccaaagtactccggctaggaaagagcctagatccggaggaaaaagaaaaaataataaaaacactga

SEQ ID NO: 284953 - DNA, 614 bp, Cannabis indica
acctggattaagtccccaacccctgtggcaataagtttggccaattcaaatgacttacacctaaaaggaatgccataaatttgaacccagaaaggcacataatgaagttggtccagggtaataggaaaagaggaatcaggcgcaacaaagattgtcagactctgggcaaaatgccatggctggccatcaagaatcctacgcttatcaccttcacagccaaaggtgacaagaaaaagaccctcagagtgatcagacaccacaacagggaaacgacactgggagtccatatttgggataaagttttgatcaaagacaagcggctaaagtgtttgacagtacaaagcttaagaaggagtttaatttcctgggaggtctcagaagaaggatcatcaagagtataaaccgtattttcatcagaagttaaagtcagaggttggaggggattgaaaccaaggtcatccattttcacacacacactaagaaaaaaaatacttagacaggaaaacagagagaaagcagataaacaaaatagaacctaaatcttactttatatagaaaaaagaccaacttacgatagataaatctcgagaagtttctgatcatagcctctattg

SEQ ID NO: 284954 - DNA, 507 bp, Cannabis indica
gaaattgaattcgtaataaggaaaaacaatccacaccagcagaagtatgttaagaccaatcagggtcaaagagacgacaataaccatgatttgctgcctccaccggtagatgggcatctggaagttatttttggaggcccaccctggagattcaggcaaagctcgggagaggtatccccgaacagtgcagcacgagcaagaagaggttatcctggtcgtggaagaaagaaagcccaaagttccacgagcaggagagcctaccataaccttcaacgatgaagacactgtcaaaattagatttctgcacaacgacccactggtcgtggaagtcaaaatagcaaataaaatggtggccaaaaccatgatcgataatggagcctcttccaacatcttgttcaaaactgcttatgaaaagatgggactccaactcaaggatctaaccccatgcctccagcctgtctatggtttctctggtcaaggagtcgcacctctaggacaaattcgtct

SEQ ID NO: 284955 - DNA, 1185 bp, Cannabis indica
taatccacatcatgcattatttttcctgaaacaaatgctacacattttgagctgaaaccttccataattcaacttttgccatctttttatgggttaggtaaagaggatccatacatgcatgtgaaagattttttagaaatttgctctacttttagatttcaaaatttttctgatgaatctgttaggcttagactttttccattctcattaaaagataagtctaaagcctggttaaattcactcccagcccgatctatttctacttgggatgaattagttaataaatttttgtccaaattttttccaatgtctaaaacggataatattaggagagaaatctccgaattttatcagaaagatcacgaagaattttatgaatgttgggaaagatttaaagatttattgctaaaatgtccacaccatggttttgagaaatggagattggtaaaatacttttatgatggattatctccttcaaaccgacaaatggtacaatcaatgcacactggaaaatttttgcaatttagaggggatgaggcttgggagtctcttgagaatctttctgtaaattctcaacagtggaattgccaagatcctagatcgaaagcttccaacacacctaagagaggtggaatttacgatgtcaaagatgacgtagatataaaaacatcattagcaaatctaactaggagagttgaagctatgtcattaagtcaatccatgaatactcctatccataggaatgaattttgttctctatgctatagtacaagtcatactacccagtcgtgtccatcattgcctatataccaagaggcattttctgaagatgtgaatgctcttcaaacttatgggaattcatttgatagcccatttgctcaatcctacaatccaaattggagaaatcatccaaatttttcttggagacagaaccagcctccaatgaaccaggggcaccaatacaactcacccaatcagagtcatgcccaacctaatatgccatatcctcaacaacaaagaaaaccatctttagaggataccctacaacagttcatgcaaaccacccaacaagatttacacacaagttctcaatctatgctaaggcttgagacacaaattggtcagcttgctactgttgtagttgaaagggaaaaggaaaaacttcccagtcaacccattcccaat

SEQ ID NO: 284956 - DNA, 555 bp, Cannabis indica
acccaatatcaagcatcccctgaagctgtaacttaagctccttgagttctgatggagccattctctatggagctttagaaacaggttcggctccaggtgccagatcaattacgaaatcaatttctcgttacggtggcaatcccggcaattcctcgggaaacacatcgagaaagtcttttaccactctaactacctcaggcccaaatgttttgggtctgttggagtcaatcaccaacgctaaaaatcctacacatccattgtgtagtagatctctagctcttaatacaaaaataaccgggatcggagacccctgaacttatccaacataaacaaatggatcttcaccttctggctgaaaaagtcaccattttttgcttacaatctatactggcagaatacttggacagaaaatccatcccaagcatgatgtcaaactcagttaattctagttctataaggtcagcactcaactccctttcctcaatcctaaatagctagacctaatgtgcctattagagataaccagttccccgctaggcattagggttccaaacc

SEQ ID NO: 284957 - DNA, 679 bp, Cannabis indica
tgtaaaacatgtttatttccaatgtaattagatttaaacatgttatgcatggttatgcatttaggtcgaatgtgaccttttactccacaaaaatggcaaataggaatgaaacgtcttcctttccctttgaaattgtcaaacttaccgtgctgcttcttttctgtaacaacagagtgctttgctgtcgagacagaaacctgcgaggtagaaacagttcttccagaaacaaaactattagtggtattagacacaggttgatttggaacataacccagcccagcatgattggtttggccagatttttgaattttttcaaagatggtggaacctggatttaacattttaacattctttttaatgttatcaatttccttggttaaagaaataatttttgactcttttaaagacaattcagattcacaacatttgagtttatcttccaactcattaatgttgttacacaaaattttattatctttaaccagggagcgattttcagcactagtttccaaccacttaccaaacattaccttgtaggattcaatcatggaatcctcatcaatttctgactcatctgattcggatctggattcttccttgttgtcattgatcaggatattgttcaagcaaatgctttttcctttttcctgcaaatttcttgacaaaacacttgttagga

SEQ ID NO: 284958 - DNA, 487 bp, Cannabis indica
acccccattccctttttcttgacttagggtttggtatgggacctaactgctggaattttctctttcttttttgtttttcacagaatagaaaatgtctgcctctggttcgaagtcctcgaagaagagcgggaaacgcatgggagcgagaaaaggtttccctaggacccgttgcccaggaagggtataagtcccgagcaaccgggtgggaagcggctgagcttcactccaccttaacctgtccccatcaactggagaacattgtggacgttgctgggatcaaaccttccacttcggggacctatcaccggccacctcgcgactcggagacgcctaaccacaattacggcggcttcggagcctggagccagacgcacctgatggccggtgccatgctcccacttcaggactattttgttaattttcttgtttttgtcggccttgcgccataccaactcattcctcaagcttaccgcctgctctcaggctt

SEQ ID NO: 284959 - DNA, 580 bp, Cannabis indica
gggtaaggaaaatgttcccaaaagaaatcctcttgagaacttcaggcatggtcagcaaccaagtgacaataagagcatgggcattcagtgtagagaatgtgatgggtttggacacattcaggccgagtgtgccaacactctaaaaaagaagaaagcccttgttgccacctggagcgatagtgacgaagaaaaagattttgttgccactaaaagttttgatgaggataaataggtagtggctttcatggctcaaagtcatcattctattgaatctgaggatgatggagtctccactgtgtctaaagccgacagcaatggaagacaaaatgcgtatgaagagatgtttgcttagtgggaatatatgacgaagtagattagaggtctaaatagtgccaaggagcagatagagtctgaaaaagtcaagctcgaggacactattaagaatctcaacaaacttcttgatgagaaggacaacgagatcgacaagctttcagctgaactcataagagctaaacaggctttagagtttatccctccaggaacggctgccatcaatcaaactcttcaacttcaaaaacct

SEQ ID NO: 284960 - DNA, 643 bp, Cannabis indica
aagccgacctggaagcttcacgtggatggatcggccacagatcagctatctagtgcaggaattgcccttgtcacacctcgggggcaacacctgcatgcagcggtcaaattcggattcaaagcctccaacaatgaggtcgaatacgaaaccctaatcgctggactgaaactagcgaaggaaatgaaagccgaaaacatcgagatctgcagtgactcacagctagtggttaatcatgtatctggcgaatacgaggctcgaggagaaaaaatgatagcatatctgagcaaaatacatgatctgctcgcacagttcaaaagctacagcctcaagcagattccaagagaggaaaatacaacagcagatgcgctagcccgtttggcgagcaacaatataagtgacaaggcgaacctggtcccgatccagtttcttgaagagcctagcatcacaggcacggaagaaattgaaatgatcgatacatctctgaactggatgacgccaatagcagcctatctcaactctggggaactcccagataactgaaatgaagctcgaaaaatgagaagaaaggcagcacggtacatcatcgtagacgggatcatgtacagaagaggattctcaatgccattactcaggtgcgtcacac

SEQ ID NO: 284961 - DNA, 855 bp, Cannabis indica
tgtagtaagtagatacaataatagtctacaataatcaaatttgaaaaactttgattgaatgacaatttaaaggaaatcaaaacaaacaaaaggagaagccaattaaatttatggcactattaactacaaaggataacagaaaaattgttttggtatggaacaaaaatcggccaatcaatcacaggaaatgtcactctccttctttctttttttttttcttttgtttgagtattgatattagataccaataatatccaatacttaatataaaattatattttatgagtacttaatattaatgaatatttattaaaaaaaattaatatttagtatgatattaaattatatcaatatataaaagacacactaaggtggtgttgtatcgttttgcaattctctaattgttttgactcgtaaacttaggccaactccaaaagagttgcatataatggtgcttgtgagtcaagtgagacccaaataggttctcataaattaatattaaaccctgctattcatctcgaatatcctgactaccttgatctacgtgacagatgcgagttagttggtaggtatgcagttagatctactgaccaactagcatctgccacgtagactcaatcatccgatactcaagatggacgactttattgaataattattttattgggaggagataagaaagagtgctcactattagcaccgtgtgaagcttaattttttctttttttaattgaattaaaaataaattgcgggtccaataggtagggtgttcatccgattcaatccgcacttttttggtcaaactacatccaatccgcactaagtgcggatttcatattttggatccaatccgat

SEQ ID NO: 284962 - DNA, 788 bp, Cannabis indica
atagtctggttccatgtttgggtctgagttcatgttcgggttcgggtctcgagtccaggtttgggttgggatccgggtccgattcccaattcgggtctaggtctgatttggagtccgggtcctggttcggttacggtttaagatctaggtccaacttcagttatgtttccaagtccaagtcctagttccagtcccggtcaacttccggttttggttccaattttgggtcacagggtacgggctcgggtccacttttgtgtttgggactgggttcatgtccgagtgagggttcggatccttgtcaatgttggggtccagggttgggttccaaatccagacaccgactacaggttttgtccaagccctggttccaaatctggatcccaatctcgagtcccagtctggttccatttcttgtgccgggtcacgagccgggtcctaggttcaagttcgggtctgggtcgggtactatgtcccggtcctagttctgtttcccaggtctctatcctgattctggatccaggtcccggttattgtgtgggtttgtgtctcggtctaggttcgggttcaagtcctagtctcggttcgggtttaggtctctaattaatacaaaagtgaataaataagcaataaaattaatcattaactactacatttaatcttaataaaagaaataaagaaaacttatctattactagttatgggcggacacgtgcaacgcacctgctctcacacaattagtaagaaacaaataaatgttataaatattattaattatgtggatgtcc

SEQ ID NO: 284963 - DNA, 527 bp, Cannabis indica
tttaattaatcaattacaattctcatgttagactgtgtctatttgagaatttatcacttattaagggcaaaacagtaaatagagattttgaagggcatatttattaattgagaaactttaattagttttattattaataaataaatgacaatatattacttgataattaattttaattattaaataattagatttgacatttatgtggttgaataaaggaattggcagtttttgacaaaacaggaaactagcagtgtaggaaaaggaaagttggaaaagtggcaagccttgtttccacaatgcctaggccggccactttgcttcccttttcacattgttttttcaactttttaatgccaagtaattcaaccatagctctaggtggtcttctataaatagaaggtaaaggcttcagtttttgtaaaattttttttgaccgaattttctatcacacaaaaactctcttcaagccgccaccctctctctctctaccttttctatttccgaaattctctaagtgatagagt

SEQ ID NO: 284964 - DNA, 569 bp, Cannabis indica
ttataccttaatgaacgttgagattaaacgatttctccgctaaaatcggtggtcggagttaaaccaccacctttttttaaaataggttcgggtacagtgtaaatgggtgaaaaaacaaaacttttttagtgtatgggattagatattgaaaatagaaacttttaagacaaaaatgaggtgaaatggtgaagaaatgagagagatatgtgggtttttagaggtggttggcgagggttttcgtgggtttttcgtgggtttctctctgctgtagaagtggctggtatgctggagaagaagaagtgaggaagaagaagacgatgcagaggttattaagggagaccctatgccgtcggttcctagcaaagaaccgacggcataggtgcacacgtgtcaataaagtgtgcacctatgccgtcggttcattgctaggaaccgacagcataggaaccgacggcatagggtcttccagaaacccttaaaaaatcccaatttccaaccgacgggatagggtttactaatatttatacctacggtttttaccaaaaaaaccgcctctaaatgtcaatttc

SEQ ID NO: 284965 - DNA, 752 bp, Cannabis indica
atactaatattgcattatgtactcaataaatatccctaataataaagactcgtggagtatgtagattttaactacaaaaccacgtaaaatatctggtttttattaattatacatttatttatatggtatatttattgaaaagaggctataaatttggttaacaaaaatttgcgttaatagtttggtactctcattgagagccttggtgataaaaaatcaaaaaaaaaattctgcttataaacattatctacccatatttaatgggtgatgatgatcaacacaacaataatcaaaatccagaaagaatgagcgaaagtggcgataactctgccagatacgtgcctaggagtgaggatgcttataacctaactaggtacgtaccgttggtggagttggaaaataggcaactttgacaacgtttggttgaatcaaactgacgaaatgctgagttagagtgagaggctgcaacagccagggctacacaagggacagttccttagaaccaatctgatcctacagtaagaagaccgcgaggaggaccttgaggttctaaggccaagaggcaggaaacaaaccaggggaatccccaaaacacccgaagaagagaaaccttgggatacaagggatatcccaagggataatcaaacaaatcctaataatgcaaggaatcaagaacatcgacgagatgttccacaaacttaccatggatttgctaaccagggaatgaatgaactgacatgccagaatcatct

SEQ ID NO: 284966 - DNA, 550 bp, Cannabis indica
gaaatacaaataaagaaaagctaaacaacaaaaggttcccaacccccatgaggtgcttggtgcaagacttgactaatgatcaagcaccaaggcatgctcatgttacaaaataccccaatgaggtgcttggtgcgagacttgactaatgatcaagcaccaaggcatgctcatgttacaaaatggccctagtgtgggtgtgccatggggcagcacgccacacactgcgctgatcagataattagaagatgcgtgcctgaagaggagatgtatcctatcctaaatcattgtcatgctttgccatgtggaggacatttcagtgggactagaactgctgctaaggtgttgcagagtggattcttttggccaacactctttaaagatgctagtacttttgtgaaggcatgtgatcgctgtcaacgtacaagtaatatcttaaggaggaacgaaatgcctttaataggaatcttggaagtggaattgtttgatgtgtggggaatagacttcatgggtccttttccttcatattttagcaatcagtacatcttattgg

SEQ ID NO: 284967 - DNA, 582 bp, Cannabis indica
cttagacccagaactgaatccagactcagatccagattggaacttgggactcggacctaacatagaccaagacccagcacgtgaaaccgggaactagaccaaaatcaagatagggacctgggcagcaaaactaggaccgggacctagtacccgactcagacccgaaaccagaaatggaacaagacttggacccaaagattgggatccagatctggcatcagggcttggacaaaactcgtagtcggtgtctggatttgggacccagccctggacccgaacccttataaggacctgaaccaacacccgaacctgaacccaatctcaaacccaaaagtggacacgaacccttaccctgtgacccaaaattggaacaaaaacgggaagttgaccgggacttgaactaggacttggacttggaatcataacagaaattagacctagatctagaactgtaaccggacaaggacgcagactcaaaataattcctatactcgaattgtgagccagacccagatccaacccaaacctggactcggaaccgaaaccagacaaaaacatggaaccagactagggacacagaac

SEQ ID NO: 284968 - DNA, 499 bp, Cannabis indica
ttttcgatcaacaaatactatgcaaggtaatgtttttcttgtgtcaaaaaaaaactcttgttagcatttatattgaagaaattaataaattattctacatatatctatctatctatgcaatctatttatctatctacatatatctatctatatataattctgatagtacaattaatggatgagatagcctatcaattattcttcttatctcttccatttatttttctttctagtctttggttcttttctaattacttctatttatcatttactaaccaataacaaaaagagaatgaaaagaggtattaatatatattcagtgtgatgctattaactttttattgataatattgttaattgaagaagaccacccaccagtaatcattaaaaaaattagaatttttgttctctaattttaacacatattaaattatatccttaaatttttaaggtcgttattaagaattctcactgaactattaaaattgtttaatttaaa

SEQ ID NO: 284969 - DNA, 1019 bp, Cannabis indica
aggccttagaaattgtctcccctctaaataaaaaacagctacataaatgtattgtctcaaagtagctgtatataaacaaatatatataaaaaaaaaataataagagaagtgggtgaaatcctggttgtactgggttaatctcgagcggcctaatcaatgcgcggagggagacgaggtccgatgcgtgcctccaccatggcatcaagcttcttcttcttctcccgaaatttggcgatcatctcctcaggtttggggtagaaggtaagcttgatattttggtcattggtagaccaagccatgaagactccatcatcgaagcgcttagggcaccggccgcaggaaacgggagaaagaagctcagctctttttgccttctttgaggcttgttccttgaagtccctgagctccttcagctccgcggctagagcggccctggactctaagtttgcctggtgagtttcctctaaggatctcaccttggcaaccatctcgtccaaggcttccctggcctcccggagctcccgcctggcctttgcagtggcctcaccttccgccctcagctcctcttggtgcttggcctccagcctgtctctccgcagggcctcatcccggatcatcgcctccgcctgggcttccctccgcttagcctcctcctcattggctttggcagcagcctcccggcgctcagcagcctcctggtaaagctgcctctccgcagtaagatcctgaagaaccttcctgacttcgttcatgtccccaaaatcagacaggacgaagccatggttgattatgttcttggagaggcggccagcttcagcagcaagctaaacaacaatacaagtataagaaagaatctccaaaaaagaataaggggaaaaacaaaattacaaaacacttaccacagtgagggagtggctgagatcctggacttggaagatggagttcagggatgcacaagtagcgaaccgcttaggcgcgcaccgggtaagctgagacgcaaactcgccagtcatctccgc

SEQ ID NO: 284970 - DNA, 522 bp, Cannabis indica
tgttccatgctaatctcatgctctttaagtctttcaccaatatgcgcccaatcactaaagccttcatttgttaacatgcctctaccaatcccacttttaaaaactttgcaacaaaaacaaaatactctatctaactcttttgaataaacaagccaatctcgatcacacttctctccatttgataaaactctagtatacaaattagcagtgaatcgtctagaaaatttagttttagaaccactcataacagaataatctctttttggacccttcatcactaataaatcaatcatttttgaatcaagagcatcccaatttcttggatcaaatatatcaagcaaatgttcaaatgggtttgattgctctgcattgttatcatcattatcctctaaaacatcttcttttttaagtgaattattcaaatgatcatcatcactatttgtagattatgattttgattttccatattatcatttttttttgacaaagtgattaaaatcactcatgaatttacgacgccca

SEQ ID NO: 284971 - DNA, 843 bp, Cannabis indica
ttaatttaaaacattaacgtaatagaaaaaatataaatataaatgaataaacaaaaacaattaatattaaataaaataaaataatataatactacgtaaataaaactaaaaaattaaaaaaaaatattaagtaaaataagtttattgttttggtttttccttaacattttataagtttaaaaaattatagtagatattttattttattaaattattttatgattttaaattcttactatcaaacatgatatacttattataaaataattattttaggttattaatataaataatacaaaatttgagatcttttatgtaaaatatatttattttgtagaatttttttatgtgaattattggaattgttatattaaaaataaaagattctataccaacttagtgtgtttattaaagctaagaatatctttgatcaaatacaagatacatctgcaaaggaattagattgaacaacatgtgtacgtaaaaaaaagataataagtatattttgaccaaaggatttctctctattttgagagggttaatggattttccaacggacgtctaatgtttatttttgagtctatggggatgaatggatgatgtcctttcgctcaggtcttttatgtgattgacttactattttctgtttctgggtagtagtagtgatttagagcatgtttggtattgttttttgttttttgttttaaaaaattatttttagaaatgagaacaaaaaatagtttttgaagtttttaaaacacaagtcacgtttggttagtgatttttaaaaacaatattgactaaaagtgaattggtttttaaaacagaaaacaacattttgtt

SEQ ID NO: 284972 - DNA, 663 bp, Cannabis indica
caaataaatcaatatgaagcaattgcaaaggtctagtagttgaaatttctttcttggaatgaaaagatgttttaatttgttttccaaattggcatgcatcacaaagtttatctttaacaaacggaatagatggcaaaccaataacaagatcttttctaaccaattttgaaatagaatccatactagcatgtcctaatcttctatgccacaaccaagaattatcattcataacggttaaacatttatttttactatcaaaagaatcaacatcaataacatacacattatccttccttactccaaggaaaataacttcattggttgaaacattttcaatggagcattttgaggattcaaacacaacacgaaaacctatatcacataattgactaatactaagcaagttatgtttaagattatcaacaagaagcacatttttaatacatggagagtatatgttaccgatatcaccaatgcccaagatttttccttttgaattgtctccaaaagtgacaaagccactttccttgcttttaaagcttgaaaatcttgatggatcaccggtcatatgctttgaacatccactatccaagaaccataagctttggctctttcttgttgattcctacaaaaacaagttcatttgttggcttttggtaccca

SEQ ID NO: 284973 - DNA, 584 bp, Cannabis indica
aaaagaaaatattacttctaaagtattgaactcgtgacatttaaattattttaagagtgattattataaaattattataagttgaatatgttataggtttttataagtataattattgagttaaaaaaaaaaataaaaataaaatattttttatgtaaatttgaaataaaaaaatataattaaaactaaattttaaatagaaataaaatagaaagataaaaacattaggtttggagttaggtttagagtttgttagttgaacctacaattaataatattaaagattaattataaataaaaaaatatattaattttggtgtagttttcaagagttgatttgaaccattggattaaatcaagggctataaatcactatccctattgataggtaaaatacccaatccctaccataatagcccccaaagtggtatttattggtgtgacccttgcaaaaatgaatctgaatatcctattgtgaagtaagaaatttatatttaattttatcaaaatactaatttattatgttatttgtgttctctctaaatttgtttcatatttaatttttttttctctacttttttcac

SEQ ID NO: 284974 - DNA, 938 bp, Cannabis indica
cattctagaaggagattccagaagacattagagtttcctcagacagtgaggaaactgaacatgaaccagagccacctctgaccaaatctgctccaactcctgctcgatcctccagcagccaaggcttctgttgctgccaaaggcaagcagccaatgaaggaatcatcttctggtaacattcctacatctctctcttattgtcctcgtttctactatcgtgataatgagcgtgattggaatttgtatgctacccgaaagtttgagagtgaaaggaattacgatttgcatgctcatagggtgtatggaattgttaagttcattcaataccatcaatgggagaacactctcactggtttcaaagggtacattgcaaacattgtcaaagatttctatgctaacttatctgatgattttcttgatgagaattctagactttttcgaaaagtgtatgttagaggacattggttttcattctctgaaaaagatatttctcaagccttgcaactgccagagaatgtcccaaatgccataatgtctatggatcgccaattgatgctcactgaactcactggtgcacgggctgaactgaaatcgggggagagtcttcgcattacacatctaacctttgctcatgcatctctcatgcgatttgctcttagcaattgggttccaaactcaaacaagactgtggtgtctcaagatgtggcctcattcctctaccgtatcacctcaggagcatccattgacttggcctcccacattttgaaccaaattgtctcatttcgaagaggtaaaaagccaacttttaagcttgtgtttccaaatttaatctttaaggttttgtcctctcagaaaaatgtggcccaatctcatgaaactcttgagccttcactgactggaacaacattccaaccctcggagtattttgatggcatttt

SEQ ID NO: 284975 - DNA, 899 bp, Cannabis indica
cccaccatttggaatagcgattgatactctcgcaattcaacccacagcatataaaaatcctaaaagatctagccaacaatcaaaagtaagtaaatcttgtcaatacacgagtattcgaattgttcatctgaatacccgcgagtattcgagttgttcatctgaatacccgcgagtattcaaggcgtgaaacagtgcctattcaagtatatcgtatgcggttatgtcaacttacaggtcatattctatgaaattacccaggtttttacctaaaaaacatagcctcatgcatatcatctataaacattcatccttaaacaaccctcatgcacactaaaaacccagaaaatatagtccccactcaaacagaaaacgaagcatggtgaagattcaaaaaactaaccttttactttgataaatctgtttccacgaatcgcccttgacagcaatgtagaatcaagaagaatccacgaataaaggcgaaaatctgggcaatttacgaagatttttcttagtggtttctctgagagtgaaggaacaaagaagttaagggagttgaaggaaaatgagggaaaatggggatttttggttcgaatcagggggtttaaatacccaaatccctcattcattgggatcatgacacgtggcagttggaatgcctagagtcgcccaatccaacggccagagatggccacgcctacacagaaaccgaagagttttgtgacgtggcaccataaatgcaataaaagtaatgattatagccgtcatttttcgaaaccctcgaagggacaaccaaaggtcacctccttgtgacaacctttcacctgtctctcgaatgtagtttcccttgtgaccgcacctgtcacatcgcgaaactaggggcatgtgttatagtgagattt

SEQ ID NO: 284976 - DNA, 620 bp, Cannabis indica
tggatctaggtccaatttcagttatgattccaagtcgaagtcctagttccaatcccggtcaacttccagttttggtttcaattttgggtcacagggtacgggttcgggtccacttttaggtttgggactgggttccggtccgggtgtgggtttaggtccttgtcaggttcgggtccagggctgtgtcccaaatcaagacaccgactacaggttttgtccaagctctgggtccatatccggatcctaatctcgggtccaagtctggttccatttctgataccgggacacgagctgggtcctaggttcatgtacgggtctgggtcgggtactaggttcatgtcctagttctgtttcccaggtccctatcctgattcttggttcaggtcccggttattgtgtgggtttaagtctcgttctaggttcgggttcgagtcctagtctcatttcaggtttaggtctctatctgggttttgatattggttctgatttgggtttaggtcctggtcatagtcctagttcggttctagttccatttgagattctgagttcgagtttgggtttgtgtccggatttcagtctaggtccagatcaggctccgggtgtgggttcgcgtcctgggt

SEQ ID NO: 284977 - DNA, 597 bp, Cannabis indica
tttttccttctttgcaaaaattttccaccgcatatcttgcaaggtaatttcatctacctctttttcactttcaggtgaggtagattctggatcttcttttgttaacaaagtcatgcagcaatccgatacactgtcattacaactagttgccttgtcccgtaactcttttggtaaaaactcctccagagttactagatttcgtttggttgttcgaattcgttccttttggaaacgaccttttgcttgccgatccttttcttatcctttatatctggtctactccgaaatttgactccggagtttctagatggcttctgagatggaatttttgtcagttttttccgagtacatgtttgccatgtactttctaaatcctcttcactatcataccagtcctcccaaatttctagattaggctctgtcatgagctcatataatgtaggaatatttgggtttcctggccttggcatgtttgaatgggcttggactattgtaacttccttgtcgaattcaaatgccatagaaattatgtccctttgtgtaggatcatttggtatttggtcattctcggttaaggaagtcgtatttgttgtcact

SEQ ID NO: 284978 - DNA, 525 bp, Cannabis indica
tcagagaatgtttgactttttctatggttttgattctgtataggtatctctcggtgggtgggtcagtatgtgggtcgggcgcccgatgatgttactgaaagttcgtggcccatccaaaataaagatgggctgagacgaattgggccgcgacccatcttaattttttttaaggggtatattgagaaatacctcttttatttatcaattaactaaaattaactctaattttttatttaattgaaacatacctctttttatatgtattgtacccaaaataccctgatataagggagtcacatggagagtatattgaggtagcaagggtaaaatcggtaaagtgtttaaaaaaagaggtaaaaatgacagtttttaaaaaagagggtaaaattgaaagaagacaatataaaaaaggtatagagtctaatttcctctttttttaaaaaggggtaagttaaaaaataccccttttattaatcaattaatcaaatttacctgtaattttatatttatttgaaacatacctct

SEQ ID NO: 284979 - DNA, 503 bp, Cannabis indica
aactaggaactaaaagtttccctatcgataaaaagcatagcaataccccaaataacataaaaacgaggaaaactagggtttctgaaaatcacccaaccggtagaccggttgcccaaccggaattccagttctagaaattttcataacccaatccggaattccggatgcacaaccggaattctgattcctcgcaggcagaaaacaaaatttcacaactcattcaaatcaactccaaatcacacaaaaccttccaggcctgttctatatatcccctagaatatttctaaagcaacaaaaccaagctttaagcacagaaacacatttcaccattggaggctcaagattgagttcaaaaactcaaaacttgactaaacctccaaacatccactaaaacatgcataaatcaacatatttcaacatcatttaacaccagaaaacacaacataacaatagcagcaaccacagcaatgaaaatcaaaacttactttgaaaaccatagcttt

SEQ ID NO: 284980 - DNA, 654 bp, Cannabis indica
tttggcatataacttatgttctcgaagtcgctgtagaaccatccgaagatgttgctcgtgctcctcttatgattgagagtagacaaggatgtcgtcaataaataaaataacgcaaatatcgaggaaatccttgaataccctattcatcaagtccatgaaagctgggggagcattggtcagtccaaaagacataaccaaaaattcgtaatgtccatacctagtgcggaaagcagtctttgaggtatcctcctctcggattctcaactgatgatagcccgatcggagatcaatctttgaaaagacagtcttcccctaaagttgatcaaaaagatcgtctatcctaggtaaaggatttttatccttgattgttagcttattcaattcccggtagtcaatgcacatccgcaaagttccatctttcttcttaacaaataatactggagctccccagggtgacacactgggtcaggtaaaccctaagtcaagcaatccctgaagttgaattttttattctttaagttctgctggagccattctgtaaggagccttggaaatcggttccactcccggtgccaagtcaattatgaaatcaatttcccgctgaggtggtaagcccagaagttcttcaggaaaaacatctagaaattcccgaac

SEQ ID NO: 284981 - DNA, 504 bp, Cannabis indica
cccacacggtactgagtctagaatgttcgtacgatggtactattgaccataatatcagcctatactcggtacgttagtcatactctagccatattgatgtgatattgtatcagcctgtactcggtacactagtcatactctagctgtaccgatgtgatactatcagatagtacggtgctatcgaccataatatcagcatatactcggtacgctagtcatactctagtcgtaccgatgtgatactatcaaatagcacgaaagccaacatacatatctaatgtaatctaacaggcttactaacatgcacgctaaacatgtaaatggatatgcatactgttatactaatcttaccacgattctgaattcaggtgtgccggtcaacctgagtggaacaatctgctaggcgaattacaggcaatcacaacactgataagcgacaggctaaatcacttcctggggacttaaacttgaaactaaaagtttccctgtcgatgaataacatgg

SEQ ID NO: 284982 - DNA, 536 bp, Cannabis indica
caaattaggtaagtatgatgaaacaatgcaacttgttctagtaccacggtattagaatgggaaacatttaagaaaatactaccaataaagtaccaggtcggacgaccacactaagtactaaaagaacatttacttttaagtgaatggcctgctgggcggactacgctcaaagggttcgacaaaaatgaaaaagtactcaggtcggatgaccaccatttaaagtacaatttcttatttctgcaatttgttttatttcatgttaagctaaaagatcaaattagatcaaatagctttgatgtaagttactacggtaacaaacacattttcgattaataaatgaataaagatgtttatttcaaaattcaaattgagtcaaaattactaacatgttgctaatttaccatcttgtgcgtacaaaaggtctggtcgatctcaaaactccgaacatataaaaaagtatacttgtgagaaacaagtgaccaagagtcataagtctgcttggtcacttggggggcacctatacctatacaaagcat

SEQ ID NO: 284983 - DNA, 489 bp, Cannabis indica
ggttgttaaatcaacatacttgtaagtagatctaagttcctggtaaaataattccaacagaagcaactccatcattttagctctattcatgaggggagggcaaggctcatcccatttgtcatagttagtgaattcaaagttacgtctggtggagatattgttagttactttcttcattgcttcgtactcactactatgccttttttggtggaactgctccatggcctccaagcatgccttgtctccttccgtcatcgacaaaggcctaaaaagaatttaaaaggtgttggaggcaatggagctaactcagttctcagcatagaaaactgagtagaggtggctaaaataatctttcatgctgggtcgtggaggaggatcttgaatgtcccttgtagttttggtgcttcatctaggcggccttctaccatcagatacattagatccatttcgacactgagcatccatgtaacaccctaactatcttaggcg

SEQ ID NO: 284984 - DNA, 712 bp, Cannabis indica
tgagctttggggggtatttatagtgtttttgtggggtgatccccagaattaaggtacatgcatttctgtaactatcagtaaagttgtatattccccatgaatatatcatgggtaatgcatggcctaatccctaggtgtcatagggattttatgagggcagtccttaatcccttttgactgatgtgattcttcacagagtagccgtcactagactttattggtcatagcctagtaggtacagatcggcggttgtgtcgtcagactttattacgtgtggcagttccaatacgcctcctcctatgcggcattaaatgcgagatgaccgttcagaggaagcctgacaccacccggagatgatttgatgctatatgctctctgggagctatgaagctttgtatgccttctccgggaggcataatcctttgctttataaagacttagctatttaaatgctaaaccctttgcgtccacatgtccttgtctggttggtccacgtatattgggcaaaatcaggggcaacaagacccatgaagaagaagaagaacagaagaggagcaattacttttacatggtgaggtgtcgttggtttctcaagaaagctaactcttcacacttgtttgtttataaatgaagagaagttactgatttatataagaagatgagtagtaatatattggaaagtgagatttatataataattattaaatattaa

SEQ ID NO: 284985 - DNA, 698 bp, Cannabis indica
gaatatgtaaaaaaaattaaaaaaaaattaacaaacacaaactatgaagaaaacaagctagaactattaaattgacctaaaaaatgcaaagttgatataatggtgcaaatgagtattgttgcaaattgatgatgtcaactaggaatttaaaatgtcataatcctttttccaaagtatttatggtttgattctctaattaattaacatattcctatgcccaattaattttaagaataccaatttaagcacaattccttcaagtcatacatggtaaataacatattcctatgccatttacaaaccacatttttccaaagtgatattcatgcatcattcaagcaattccactaaccctattttttccaaaatcaagattagctactacttactaatggtgatcaagcaaaagtaagcaattgcacaataaacacacttgaatgaacaaaaccaatttactaaaacatagcaataaaatatcaaatcacaattcaagtcaataaaataattctagcaaaaagaaaattaactcataatagattgtgcaaaaattacaaagtttaaaagaaaagagagatagaaataaaaacccatttggagcttgtcacaatactccaagtttctcttccaaatttctcttcttcttcctcttaatttttgccaatctctaaataaaaatgctaaattaaaccctaaataaa

SEQ ID NO: 284986 - DNA, 623 bp, Cannabis indica
agtttaagttcatctagtagtccttaagccaaatggcttctttaatagcctctgtaacagctacatactcagattctgttgtagataatgctacaacaggctgcagttgtactttccagctgatacaatttccccatagtgtaaagaaataggcagaggtagattttctactatctctgtcacctgcatagtctgcatcactgtacccagtgatcattctgttgttgtcccttcttttgtagtttaatcccacttctgtagatcccagtaagtatcttagtaaccatttcatagcctcccagtgttgtttacctgggttagccatgtacttacttagtacactaatggcataggctaagtcaggtctggtgcttaccattaggtacatcactgatcccactgcactagaataaggcacttcactcatagattctttctctgctgtagttttaggacattgctccttgcttaggtagtactgattagtcataggttgcttagtttgctttgcattagtcatagagaaattctctaagactttcttaatgtagtttttctgatgtagccttagtgtcccatgttccctgtccctagagatgttaatgcctaggatcttagcagcc

SEQ ID NO: 284987 - DNA, 524 bp, Cannabis indica
cttaacaggtaagaaatgtgctgactttgtaaagcgatccaccacaacccaaactgagtcgtacattcctgtggttctaggcaagccaaccacaaagtccattgcaatgtcttcccacttccattctggaagtgttaatggctgaagtaatcctgccggccgttgatgctcagctttgatttgttgacaggttaagcacttagtgacgtagtccaccacatccctcttcatcccataccaccaaaaatagggtttcaagtcttgatacattttggtggttcctggatgcaatgagtaaggagtagtatgagcttcttccagaatttctttcttaagctcattgatatcagggacacacactcgtgctttaaacaataacattccactgtcagaagttgaaaagtctttagctttgcccgctaaaacatcttctcgaatcttaaccaattcaggatcttctaattgagccactctgaatctttccaacaaatctgactgaagtgacagattaaataatttctcag

SEQ ID NO: 284988 - DNA, 484 bp, Cannabis indica
attattattcaaaccacatctatattaatattatctcaatacaattaaagattattattgaaggagatgctatattaaaattttttgctctattaaatagaatgggagatagatttaaaaaaaaaaacttgagaagctacaaaaataaatttgcaacacaactacggttaaataaggaataaaatactaattatttaaagagatatatattttgaataataaggcatgtgatattaattatttttatttttattttttgaaaaaaagctaatgtaatttgatttgctacacggctaaatagttatatatatatatatatattagaagaaagtttacgtgcaatgcacgtatatttagttttattttaggtttatatatatttatttataaatgtcaaagttaaaataaacaatatttaatacatagtgctaagagaaaaataataacattaaagtaatttttttttaaaaaaaactttaaagta

SEQ ID NO: 284989 - DNA, 989 bp, Cannabis indica
aaacttacttaagattcgagtgtctgggttcgagcaacgtctatccaaccagtagttgtataaaggcactttggcgactttgaagccaagaaatttttcttttcgctctgaagcttacttagcaaagaagggtgatgaaatgagtttcagtgctaatgttgtggatatttataggcaagtcacaaaaagtggtaattgtctcaaagaaacctcagacgcctcagcttcctgccttgaaaatgaatataggaaatcaaaagtaatcgagtgcaaccctcagccgtggagagagaaaattggatttcaaaatattaattgtcagagcatttattaggtgaaaaccgaagggacgcccagtcaacttcacatctagtctcgaacggtcacgctcgacacgtgtccccacccaaaggcagattagctcggttgaagtctacgcgtaacctcagaggtctcgtacagacttggggggaaaatgtgatcccaaattttgcactctgacgtggcatcacgagaatggtgacacgtggagtccacttggagcatctgctagggaagataggccgagcaggatgcctcgcttgcatgtcctgagtaagatattcagcgatccgtgcaaagcaatcaacacttagcgaattcagctttcgcatcatgagtcatcagctctatccctataactcagggatcaatttacgtggatacggcatacacacgatcccactatcagtgtattcagcctcaatcccatgatccttgcattcaacattgatcccacgatctttctatgtatacgcattgtaacgagggaggaaactcttcctcctcaagtttcctagcctcataaatagtgatgcatattcactgggcaggggattggtcgaaaagcagctaagctaagactatatttgtaaagaccgcttagtttaatttggaaatttgcagttaatcatgtttatttatgaaaactatttatagctatttaaata

SEQ ID NO: 284990 - DNA, 589 bp, Cannabis indica
tataaaaatgttaataaaaatatgcgagtttttatttttttgggtgttaaatttaggggtgagcataaaattcagaaaatcgaaaaaaccgttcaaatcgatctaccgaacaccgttagaatcgaaatcaacgaaactgaaaaccgaaaaaaccgctaacggttaaaaccaccattaaacggtcggtttttttttttgtaataaaccgatcgaaaaaaccgaaaccgaccgttatatatattaatttattaagttttcttttgatgtattatagttactaataatataatgaaaatactatattattttttttattaatattaaagttgaaagaataaaataattactttttgaacaattaatttatatatttgtagttataaaatgtagaataatatatttatagaataaattggattattaaaaaaaaaatacggtttggcgatttaaacgtaccaaaccgaggttcaaaacgatcggttttaatataggttctggattggtcggtcagttttcggtattgcaccaatccaaaccgaaaatcgaattttagattttatatgaaaaaaaccgaccaaactgatcgatg

SEQ ID NO: 284991 - DNA, 866 bp, Cannabis indica
tatatggcctaaagaagctccagagcctggtatagcagaattgacagctactttaccgagcaaggattcaggaggagcaagagtgagccaactctttacatcaaaactcaaggtacgaatgatacactaattgtctctttatacgttgatgatctcatctacacaggcaataatgagaagatgataaagaagtttaaagaagacatgatgaaaaattttgagatgaccgacctgggattaatgcactactttctcgggatcgaaataactcaaaaagaagatgggatcttcatctcacaaaagaagtatacagagacactattgaagaaattcaaaatggagggatgcaagactgtatcaactccattagacaataacaaagctctcaagaaagaagatggctcaccgaaagctgatgaatcaaaatttcgaagtctaattggtagcctactatatctaactgctacaagaccagacataatgtacgcagttagtctcctatcaagattcatgcatgatccaagtcaagttcactacggagcagccaagcgaatcctcagatacttgcaaggaacaaaattctacggaatatggtacggagttacaagtgactcaaaacttgttggctacacagatagtgactgggcaggatccatggacgacatgaagagcacgtcaggatatgccttcacacttggatcaggaatattttcatgggcatcaaagaagcaagcaactgttgcgcaatcatcagcagaagcagagtatattgcagcagcaatgactacaagccaagctatatggctcaaaagaatacttgaagacatgggagaatcacagaaagaagctacaaagatatattgcga

SEQ ID NO: 284992 - DNA, 656 bp, Cannabis indica
ctccaagaagttggccaagactactcaggataaggggaagaaagtcgtcatcgaccctccagttcgtgctcgcgacttcctggccatgcaggaaaaattcctgactgagatcccttacgaggatctcgttgctcgatctactgaactggccgcgcaatccatggctttgttcataaaagccgcggctactccttcgaaggaagccgactcgctgaagaggcagaacgcccattttcaagaaaatataaagaagctgaagcaggatgtggcgaggattgaggaacttaacaaggccaaggagaaggagctcgaggaactcagcagggcaaaagaacaggcggagctcgaggtcaagaagtcgcagacaacgatcgccgagatggctcgcgacttggaggctgagaaagagaatgggaagaaacagtacgatcaggctgtgtctgattatatttataccactctttccaaagtccccgacttcgacttctcgcttcttggagctgaagctgctgagatggctgaagcctttcgcgccatgtcgcctacccagactcaaggtgggggaggcaaccttccggacgaggtcgagggcgtacaggctgaagaggtcgagaatgaggtcgtcagcaaggtcgcggacgaggctgctcctgatg

SEQ ID NO: 284993 - DNA, 510 bp, Cannabis indica
aaataagaaaattatatttatgttaaaaattaatgttagttaattttagaccaacatgaattagaataatttttccagttttattttattttattgtttttgatgaatttcgaaaatgtatttatttttttaatacattggatttcaaattccaatatatgtttatagaaaaattaaattttagttgaaaattaattttaattaattttgaatcaacttaaattaagtaattttcataatatttattggaaaatttatactatggaaaataaattttatttttcaaatcttcctaaagtataattttataggcaaaagggtaactgtacataaaggaaccttagacgcctcggcttcccgccttaaaagcgaatataggaaatcaaaagtaatcgagtgcaaccgtcagccatagagagagaaattcggaatttcagaatattaattgtcagagcattaattagccgaaaatcgaagggacccccaatctgcttcacatcgagtctcgaa

SEQ ID NO: 284994 - DNA, 525 bp, Cannabis indica
ttcaaaaattaagttgtgtaaccactctttacacacttaattagtgatcgtgtggaagttacaaaacattaacttcacctcttatgttacagctatatgtaactcccaattacataatattgtgattattacatgtatataatttccaattatattatatgtaattatatatataatatatcacaattttaatattaaacattatattattttaaaaataatataacacacaatatatatacacataatacatttctcattcataatatgtacacacaatacatattcattacaacacaatacatatttaataatatagaagaaccctaaaaaatttataaaatacaaaataaagcaatgtacattactaaaattagtagaaattagatttataccttaatagacgttgagatacaatgttttctccactaaaaacgatggccggaggtataaccaccacaaccactacctctaccttcggtttaccctaaaaaactgagaaaaatgtgatcttttcaggtatat

SEQ ID NO: 284995 - DNA, 674 bp, Cannabis indica
agcaacgagctgcacagtacgttaaaaatcacgtaatacgacctagagtagttagggtcgttacaaccctcgtctccaccatgttaagttgatacatcaactgaccatttaaacttttttaaaaaaaataattattttatttattagtaaagtaacaataatttaaaattaaataaagttaaacttgaaaataaaaaaataattaacttgaaattaataattgtatgtattacaaaataaagtgtttgaaaattaaatcatgcatatcactatcattattaattaaattatcattcacatcatcttcacaaaagtacaactaaaaatttcatcgtcagattctttagtagcatcttcgtcgtccatgctgcggtcctcttcgttgacatgcaaatttggttcagtgccaatgtcaagtaattattacctataagtttttctattgaattttattattacaaaaataacattattaattttaatattaattatttatttatatataagctactatattattaaatgattaactttatttttttatatttaattttttaattattgcttatatttttgttatattatatttttttattcaaaaaacatattttattatttcaaatattaacttattttaattattaaaaaattactttttaattattcatagaaat

SEQ ID NO: 284996 - DNA, 651 bp, Cannabis indica
atgtaattattcttatatagaggtatattttgttaatacgggacttaaaaaatatataactaattacaatttagatgttattcttatttataactggcccaaatcgggacttgatttttttataacaaattagaggttattcttgaatagaatattcttaaatagaggttctactgtaataataataataataataataataataatactaataataataatgcccccgacaagggtatgggtccacgcccaaggcattcacccaggtttaaaaaatggctatttttaaaaatataggaaaaattattaaagttatgataaatatggtataaaaagtaaatgcactaaatatggcattatctaaccaatcaaactaaaaaaaccatataaaacattaaaaagaaatctgaatttgaaattaataaaaaaaaaaaattaaataaattaccataaaaatattaaaattcccttcatatttattttttttaaaataaaacaaataaaactatagtgatgatcgccggagtgtcactcgtgccggaaaagtcaccgaattttgctgatggcaccgaaaaaggcgccggagttattgccgacgtcaaaaaaatcgtcagaattggcattgtcgctagcaaaatcactagaaaaatc

SEQ ID NO: 284997 - DNA, 1292 bp, Cannabis indica
tcattggatctgtcagcaagttaatcataacatttagatcaaataaataataagtttgttaaaaaagtttttgaataaacaatttaaataaacaaacaatatccatgtaacaaattgtgaaataagatatttattatataattaaattattatttaactaaccagctaaattttgaaaatttaaggttgttaaaaataacctaaaatatcttttcaaaaattttaaatttaaaataattttaaaatatctaggttttatttgaattattttatcaaattaaattaaatatctaacaagataaataatttgaaaataacaaaatatatattttcaatatcattttctaatcttataatttaataaaattaaaataataaaataaaccaattttaaatcagttatggttaggcaattattattttaagaataaaataataaataaataataattatcctaattatatgtcaaaatatctcaaattaagccttatttaaatttctacaaaaatatttaggttatttaaatatttaaaatactatttataaatttcagataagtaaaatgatataaaatataaattttctaacttataatttataaacaattaaaaggcgtgcgtgcttccccctctccctctcccatggcgaagaagaaaagggttggccgaaagccagtcagtgcaatcacagtgggcaatggagttgaggagaattcccttttaatccaagatgtggtaaccaaactagagataactgaagaatttcatgatttaagcaataatcttgtgattgagagtggagttgaatgttgcgaagcagagaaatttgttcgtaaggtctcaaatccaatcagctgggctgaggaagttgagcaagcggatttccaaaccagtgctagggatttatggagtaaattcaagtcgaatcaggtaccttctccctcgtccaaacttacatatactgagcctattagagttgttgatcaactcgtggccaaactagacctagaggagattgaagtggaggcttcttacttgaaaaatgctatagtatgtattgtgctaggtgctaaccccccatttaaggtgtttgagggattttgttaagaggatttggggtaacttgggtattgaaaaggttgttcgaatgcactcaggatgcacactggtaatttttcgagatgaagccactcgtgacctcatccttgaagcaggagtcattcacttcgatagaaaccgtggctctaaggccgtggacactgatcttgacttagttgaaatggttaactcag

SEQ ID NO: 284998 - DNA, 977 bp, Cannabis indica
aattacaacaaaatcagagcttaggttcaagatccaattgaggaagtcaagaatcaagattcaatcaagactcatctgcaaccagttatgacaggatcagcaagatttgaacttgagaagttcaatgggacaggggactttggcctatggagggaaagtttgaagggaattcttgttcatcaaaaagtggccaaggcattgaaacccaaggaagaactcactgacaagttgcagaaggaagaacttgaagatatggaggaattggcatattacactcataatgtacttgtccaatacagtgagaagaaaggttcagaatatgaagacagctcgagaactatggagcaagcttgaagagatttacatgaaaccctctctaactaacaagattaatttgttagaatctttatatggttttaaaatgtcttctcatttgtctttagatgataaccttgatgtatttaaccaaatcattatagggttggctaacttgaggttgatgaagaaagccaagctgtcattcttctcaaatctttgccacctacataccaagaattaaaggctgtgatcaagtatggaagagatactctcacccttgatgatgttcttggagccttgaagtccaaagaacaagaaatgtccaaggagaaagacaatgtcaaagatgaagcttacttggccagaggaagagacaacaataggggcagagatcactacagaaaggatcatttcaaaagccaacatagatcccaatcaagatcgaaatcaagaggaaaataccataaggacagaaaatgttattttgggaaaagaggtcacatcaagaggttttgcattgagttcaagaacaaactcaaagaagacagagaaaagaagcatgattcagcttctaatgttgaagaatcagatcgttgctcatctgatggtgacttgtacatggtttcagatcaaagaatcacaaatgaatggattcttga

SEQ ID NO: 284999 - DNA, 794 bp, Cannabis indica
cacagcagtcattaaaaaactgaagcagataaatgaagagcagcgtgaagggctgctgaatgacttgagaagtggtaatctaagcaaatttgtcagtgaaactgtgacttccatttgtgatgacaaacttagaagttcagatatacaatcagcagttcaggtaacttttgttgtatcaaactgatgatttctttttatagcagcaccattatacagaacaacaaaaaaagatatttgtggtatttattctacatctgacagttctccgtattttaaagatctgctctttgcttcatcaaagatacaaagacttctccccgagccttgttcaagggcttttgaaagtcttctttcctggaaaatcaggggatgactcagatacagataggaatcaaaaggctatgaagaagcgcagtactctgaagctacttttggaactttactttgttggagttatagaagacagtgctatttttgtaagcattatcaaagatcttaccagcattgaacacttgaaggatcgggatactactcagacaaatttatctctccttgctagttttgctcgacagggaagaatatttcttgggcttccactctctgggcaagaggtgtatgaagaggtatattttctatttgatgggatttccttacttcttttgtaagggtagcttttctatgttttatcctatttcttttttgtatgtatcttcttttaaggacttccctcttccatgttgtgctccagtctataccatttatgtccgttttttttttttttttttatttaactg

SEQ ID NO: 285000 - DNA, 625 bp, Cannabis indica
aacaggggttctaccagcagagaaaccagccccaacaaaaccaacaacagctgcaacaacaaagttctagtggaggctccactatccaagctgatttattgctccaattcatgatggaaactagagcctctattaaaactctagaaactcaaatggaacaattggctactcaagtggaaaaacaagctcaaggaaattcgcctagcactaatgatgcaaaaggaaaagagcaatgtaaagcaatttccttaaggagtggaaagaaatatgatgggcctgagatgatacaaccagtggatgaagagattaaagatcaaacaacaccaactcaagcatcatcagataagaagattactgatagtccagcaccaccacagcagtctccaccaatcagtattgatcatcatgtgaaaataccctatcctcagagactccgaaagaccaatctagacaagcagttcacaaaatttctagaggtctttaaaagactacacatcaacattccttttgctgaagccttggaacaaatgccccgttatgtgaagttcatgaaggagattctgtcaaagaagagaaaaatggaggactatgaaacagtggcattaactgaggagtgtagcgccat

SEQ ID NO: 285001 - DNA, 662 bp, Cannabis indica
gagaaagtgtgaagagagagaaagaggtttacaaggagaaagatgggtatggatttttgtgagggttttagggaaacagaggatattggacacgtgtcggtttgtttatgcaaaccgtgggctagttcttatctacaatttaccggcggtggccggttgatttttatttatttattgagaattgctaaaatggattaagggtgtctagtacttttctcgttgttatactataagggagtatttggaatgagttaatgttaacaagagaatgttaatgtgaaacattaccttgtttgttttgagtgtttagtcttggaatgttattcccttagtattataactactcttgaggaggctaatgttgatactttaaaaatggtaagattgaatcattaccttctattatatcaatttgaatagaatttttaaattaataaataaaattaaataccaataatattatcatttattataaataaaatattacggtatatatttagtttgtgagatcggttttttttaattgagttatttttatattattagcaataatatatgtatattcattatacataaattttatgcggatggtgtacacataaatgacatagtaaacaaaaataaataatatagtgatagaatatatagaaatattcatttta

SEQ ID NO: 285002 - DNA, 538 bp, Cannabis indica
actaattttccttattaacttaaatttgaatatcttttgaatttaatattaagttgaggaattctaggaattggttattgaagattcttaaaagatattttttaagttggttttaaacttaaaatggaatatctttaaattaggtagttaccacctaattttgatatttaattaaattttatttggaaaattttaagttgtaaattatagattctttctataataacttaaatcagatattttccaaatcttgaaaagatacttagttaaattgagatattttctagatagttatttctatactaattattatttctaatataggaaaatatcattgattgtgaaattaattgtttaataattaattttggtacaattcaagttaagaatatttttcctagtattaaattggaaattaataattaagccttctctacacttaattatttatttcctgaatttaatacatttaattaaattgaaaattaaatatctaagttgattttcataatgatacttaaatattgttatttttcat

SEQ ID NO: 285003 - DNA, 503 bp, Cannabis indica
ctgcagaaactaaaacctaactcatgcaacaactacagcaacaattcacccaatttctttgaaaactcaagctttttaacaagaaaaaccataactcaagcaacctaactattatgcatcactaacagctcaaatatccttaatttaacatgcttagatctctgaaaatatcaacaaaatacagcagcaacaacatccatttatcatgcatgcaatacaccattttcatcaaaaattcaacaaacttaaagaggaattgcttagaagctaacctagcttgaattgaacaccaaagagggatgaaatcacaaggaaaaatcccaagtcccttgctgcaccaagaggccgaaaagagagaggaaaagagagagagtttttgaaattttctatttttcttttctaactttgatttttgtaaatgaaaatgaaattaaatgtcacttactcctattttacttcagccaaaacataataaaataaacatataattcaactattaaaat

SEQ ID NO: 285004 - DNA, 765 bp, Cannabis indica
aagatattagtgaaatttgaagcttagaaaataggtaaaaatctatattttagcttaagattgttatctttatttttaaaatttgatttattttatcttatttttaaattaagatcagatatttaatattttaaattattataattttttttttataaaatgaccttatttgaaatttaaaataagattattttaatcatgaaattttaaattgaaataacatattttcctaacttttaaattttgttattttatttaaattaaattgtaaaaattaaaaaaaaagatatttatttatcattttattttattgaatatttaatttattttaataacatgaaatttgaaaagttggttagtatttttttaaaatgatatttaggttagttgatacctaatttttcaaatttataggtttaattttaaaattaataaattaattaatttaaaattaaagaaatcttatatccaactatccaactagtaacatgttcgtgtgttttatatattgttttaactattaaattttttgataaaacctattattgtttgatataaattgccatggtttgataggtccaatgatctgattttaaccaatggttcaattgtcaataggtcaaataaataaatttgtaacaggtaaattttgcaatcttatttcatctgtatataaacctagtaacatgataggatccatcaaaatcagtgtgcttagtgtgagcctatatgtttgctttgtgcttagatgcatataggtagccc

SEQ ID NO: 285005 - DNA, 656 bp, Cannabis indica
tcaacaaaatccctataacttggggatcagattacagagatatggcaaccccacgatcccacgatcagtgtattctgcatttatcccacgatcagtgtattctgcattgatcccacgatcagtgtattctgcatggatcgtgcaatctttctgtttatatccattgtaacgagaagggaaacacttcctctccaagttcacagccctataaatagtgatgcatgttcactgggcaagaggtcgcaaacagtttagtcgagactttaccctagagatattatctaagaattcatattcagagatactgttgtaagagctataagaaaaggaacctttctcctttttcttaagtcaatacaaataacgaggattaggctattaccgaactgctcggggctgaacctctttaaaattcttgtgtctttatattgctttactatatatcgattgctataaatcacttatcgctaactaaataagactcattgtggttggctaaaagcgaggtcaacattttggtgctttcattgagagcagaatcaagaatcgctcttcattcaaaatctaaccacaaatacaatggtgcagacttgtaggggcctggccgatccagcaaattcacagacggtggatcctgcattgcagaactcaggaaa

SEQ ID NO: 285006 - DNA, 752 bp, Cannabis indica
ctagagtagttattggatatgcccggaattcttcagtcacgttgttaaggctttctgcagcgttgtttgtcatgatgttgtacctgtctcctagacaataaggacgagcccatttttctaatcctatattgtcaacataagcagcgatgggaggatccatctgtcggagcacctgcaaatgtctatcacattccctcttcgaccatgcgtaagcggccaaccatatttgcgtgttacatacatcagtcttgaacttgtgggtgacattcatagaaatatgtttgtagcatgcacagtggcatgcttcggggaaaataacctcgacagcatgttcaatgctttgatgcctatccgatacaaacactaagttttcaacctccccaatcgcttcctttaacttctgcaagaaatacttccaagagtcatgattctcgctgtcaacaattgcaaaggcaatcggaaacagttggttatttgcatcgtacgctacagcaactagcattgtgcccccaaaccttgtcttcaagaacgtgccgtcgatactaatcacaggacgacaaaacttaaatcccctcctacaagcagccagtgaccagaaacagtacttgaacctgttatcctctgtgataatgtctgtaatagtacctggattcttctgttccagcacgtaaaagtaaccaggtaactgactataagctgctgctggcgtacccctcgaatacataagtcccttctctcggcacctccaagcc

SEQ ID NO: 285007 - DNA, 1101 bp, Cannabis indica
gaaacccaaaccgtaaatttgaaataaaaaatcaaaaaaatagttatggagtaattatcctatattaaatgactatcaatataattaattattatttttttaaactattaaaatattaattattttttgtgtattaaagaaaaataatcaatataattagtttaaaatataacacaaatttattttttgtgtcaaatttagcacaaattttaaatcttctaagttattgattttttataaataacggcttgcctaacttgtgaatgtgataaagtttttttctttccattcccaaaattaacacaaacgaaaaataagaaaaatgggtgatgacaggtgaatttaatctttaagatataaaagaaaaaggtcttaatgaaacttaagacttcctaaacccatcaagtaattttcacaaaccaaaattgtaaaaaataataataaaaaaaaaagtatttgtgaaaagtaactagcttgaaatagaaacttttcaattacaactaattgggcttatgtttttgttctatgaagaaattacaaattttataaaatttttataagatatatataaaaaaatataggctctttttaccaaaaaattactttatgggtataattcaagaaaaactttaaaaatatgtaaaaaaatagataaggtaaccagttactccctttcgataattagctatttttaaaattttccataaaataaatttaaaaataaaaaatccatacttttgcaaacatgtattgtaaaaaccataaaagtaaaaattttccttctttaattctagatcgatatatatggaaattttatttattattattattattattattattattattattattattattgtttttacgttatgagctaatgacactacttgatttaatatatactacttgttataaatatttttgtaaatatactatttacaataatgtggtccttttgttaaatttactctaaaaaatatgatgtagcaatatatcccataggtatttaatgaaaattaaatgcctccatgtcctttttaccctttaataataataataataataataataataataataataataataataaaacaa

SEQ ID NO: 285008 - DNA, 845 bp, Cannabis indica
  modified_base (66)..(66): a, c, t, g, unknown or other
atatatatatatatatatcgtttaataaaaactaaatatttaaaggacacatcaatgaatttttanatcacatatatatagtaagtgaaattgttaaaaaaaatccactagttcctactattttctttagtgtcatatggctattactgtaattaagtatcaagtcctatttaactttaaaaaaatagtttttagataatatcagtaactaattatagaatactaatgtagggtgtaaaaaaagctgagtactgctggcgctcatatagtaattatgaaatataatccttattattaatttaatctctaaagaacgttcggtagccatgcaatgacgaaatataaaaactgctatatcctctatctcgatctcggcacctagagctaccttaattaattattacctaaacaaattaaacaataagggctcgtttggaacgccgtattaggtcgtattgtattgtattgtattatattgaattggattatatatcatatttttatataatactatgttaaactttaatttatactaaaatattatatatttaggtatccataaaagttaataccacatatagttttagataaaaatattacataaaatacaattcaatataatacaatacaatacaatacgacctaatacggcattccaaacgaaccctaatagtattaggatgtgtggatagcgagaaatatttaatacatggtatggagtgagaccacgcggttccggaacttaaattaatcaatgtagagaatcagtaactttagtgaaagtttggcacaacaactatttgaaggaacattgttagcaaaaaaaaaactatttgaaggaacaa

SEQ ID NO: 285009 - DNA, 750 bp, Cannabis indica
aaacccaaaaatcataacctgcataaatatttgcacataaaaatgtatttggcactcagtgccccagaacagtccagaaaaatatgcagattaagttttcaattttttaaacaattttgtaaagcataaaaactagaatatgtctaatgttatacaacacatataaaaatcaagtccaataatcaagttgagtccctacctcttctgagtcgttaaactttttccaaaagacaatcttaagctcttaagtcctgagctccaattattttagtccaatcttacatattactctcacctataccattaaatggttaaataattatcattatcgcattctacattcaaaacccagtccaacgacatataatatgactatttaaaatttggagttctgaagcctcacctaagcggtgcacattaatattcggtggcggtaaaaatcggtgtaccggaaacgtcgccgaaaataggggtagtgtatatcaaaacgaccacctcgacgagtagatcacacccatgccaaccgtttgtcaaaacggtacacgatgtcaccgaaaagtcgccggaaaggggcggagctacaaaaatgtcaccggaaaaagtagcgaaccgggaaaaatggtttagtgtaggttgttctcctcgacaagctgagtttagtggtgaagacgattcgtcaaacggccgccggagatgaccggaaaattcgttcaaagtttgaaaccccaaactttgacttgcgatcctaag

SEQ ID NO: 285010 - DNA, 739 bp, Cannabis indica
aaaaaagaattttcaagaactctttctctctctcttttcggccaagcttgggagttgctagggctgggttttcttgcttgattcaagtgattttcagcaagttcaaagtagatctagtagaggtaaaccttgttctagcttcttttcttgtttcttggaaattttgggaacaaaatgaaggtttgcatgtttagtttaggttggtgttgctgctgtgattttgttgtcgtttgaagaggtttaagcatgattatttgagtagattagatctattttgatgcatgttgctttgattcaagcttggaattttatactcaaaactatggtttttcaaagtaaaaatgtgaaaatagctgctttaaagtttgattttgtttgagttcagtttctgtagttttttatatgcatgaatatgtgattttaatcaaggtttgatgcatgatagtgttgtttagccaagtttgagttttgaactcaaagcttggagctttaatggcatttttggtatctgtgtgttcttggctgttttgatgctttggtattgttctttggggtatttagaacaggtctggaaggtttggtttaagttgggtttgaattgaatgaattatgaatttttgaaggtaacctgcgaggaaccggaattccggttgtgcatcctgaattcaggatggggttctgaaattcccagaactggaatttcggttgggcaatcggtctgccggttgggtgattttca

SEQ ID NO: 285011 - DNA, 502 bp, Cannabis indica
ttaacatttataattattatacatatgactctaataaaaaaatggcggtaaaagtacattattttacgattttgttacagtcgtactattttttgtcattaagtgtcaactcagaaacacgtggagacatattattggactatgtattaaataagctaaagaaatatgtcctcgcgtatttttgagctaatacttaatggtcttaaatattgatacttaataaccaaataagggtatgagtcactacaagaaatgtcacttttaccagcacagttcgttactccgctggtaaaagtaacttttaccagcacatttcgcaaattgcactggcaaagaggtcaaagttttactagcgtacatttacagtggctaaaatctaacttttaccagcacatttacgtgttgggaaaagtcatttttgtcagcgcttttcattttatgctggtaaaagttctaataccaacattgatttgccaactccattttgccaacacatcacaag

SEQ ID NO: 285012 - DNA, 507 bp, Cannabis indica
ttaatttcattttaaaattaatttaagaaaatatagtttaatgaattatattctagataaactatatgtattttcttgttttaattaaatatagaattataaccaactagattctttctgaagcttaatataaattatttcatcaaatattcctatttaagttgaaaatttgttatttctaacaaatcaacttagatttgaatatcttttgaatttcctattataaaattaagttgaggaattttaggaattggttattaagattctttggatattttttaagttgatattttaaatatggaaaacttaaaatggaatatcttctaaactaagtggttacaactgaattgttaatatttaattaagtcattgattgaagaatatttaagctggatattttagatttctctaaaacaacttaaataagatatttttcaaatttattccattttcaaatttaattaaaaaaaaattttaactttaatttgtaatgtttcattattgaga

SEQ ID NO: 285013 - DNA, 540 bp, Cannabis indica
aaaaaggacaccttagggggatttttctttggtaggtcaaatccttcaaccttcactgaggtcctagcatggacctgcaacaaaaaagaaatacaaaagcaacaaatcttagatacaataacaatgaatatataaaaatgtagtaaccaaattacagccaataaaaaacctaaaaacaacgtttatgaaacccttacagtatgataaatgtaagagataaacaactttcaaaaaaatacagtaacaacactgtcacaacttaaaaaaaaaacaactaaaatattaacaacactgtacaagctcgttgttatgaaatttcgaaaatggtagtcgataatagtagtgtgacaaacaaccgagaaaaaactgacaataaacatatacaaaactaaagaataaacaacactgaaagatcttgttgcaattgaaattagtaaaatgcttctcaataccaatagtgtgtaaaacaaccgaaaacaaattcacaataaacatataaccaaccaatggggaaaagcaattcaaaactgtaacaaaata

SEQ ID NO: 285014 - DNA, 495 bp, Cannabis indica
cttgattcctttctgtagcaaaacataatcaagatgtgaacctggatctctttctctccttcgttgatgttgattctccttcttgttgattggattctacacaaccttccacactatgattgagataccacttgatgtgtgtgggcactactctatcactagggtattttaaaaattgaagagaagaaagaagaagagggtggcggttatggcttaggtttttctctgaaaagaaataagatgcaagtcttagtttcctgaggtcgtccctttctatttatagaaagccatctaggtttcggttagaattgtatgccattaaataatgaaaatataaatggtaaaatgcttgcatagtggccggccatgatagggataatgggactcactttgtaattttgccattttgttatttttcaatcccattttctcaaaaataccaattttctagttttaaccatttaaatgtcgattccaattttttaataactaaaa

SEQ ID NO: 285015 - DNA, 521 bp, Cannabis indica
atcatgaacactcttagtctttctaggctcttgaacactcaaaaccagagcaatttagccaatctagacttaagtttcatctgcataatctctcagatctctctctctgtatcttgtcttctctctctcttttctgctctcattcatcaaatgaattgagcctatatataacctgttagatgctgacatgtccagctcttaacagttcaaccgaagttagttaataacacaataactaacaactaacagatacaagatgaaacagttataactgaaagtaactaactttcaactaacagtggaggtaaaaactggtttagatttgagtggattatttaccacaatatatttataccttttttttttttactatactatatattctaatttttaattttgagccccaaaactatgagtctcgagcctgtcctgaataaaatttttgttaattccattttgggtatatttaaattgataaaatattttataattaattttgttataaatattaataattatgt

SEQ ID NO: 285016 - DNA, 633 bp, Cannabis indica
ttatatggaacatacattacatgaaaatatagactccaaaaaataaaaaaaaactaactaaaccgtttacaaaaatacaataaaaactttaacaacacctcaaactaaatgtctaataagccactggctcaccagtgatcaacccattcgaataattctagatttctagctcaatgagtacatgacaattcaatcctatcattgacaattagccaaaaatcttccgtagtaaaaattgggtaatatcaatcccattattcaaactataataaaatagaaaatattaagaccaaccatgtcattaacaatcctcgttaggaatcaaaacacaaactataaggccaataacaattcaaagatcccctatatttgaatatagagagaaatggtcgtatcacctgcacattggaaaataattaatcttcctcaccatgtagagaaaatagggatattggcggctaaaaccacctgaactttacggtttgtaacacttaaccataaaaaactaaaatttttggcggctaaaactacctaaaatcctgattccgttttgctctgcgcacctccgtccaaaaaatcactgttaagtgccacggtggactgtccacgcgtacacacttgtacacgtggcaa

SEQ ID NO: 285017 - DNA, 805 bp, Cannabis indica
aaagttgcatgctttgaggttttgcttgttgtagctgatgttaattcttaaggttgttatctgaagcttaaatatgtttagttatgtggattcaagtcaggttttgttgattgttagttacattttaacaaagtttgagttttgaacttcaaacttggagctttaatggtggaatttgattttgtgtttgggtgtatagaataggtctggaaagtttgaattggagtggggttgatttggtcaagttatgaaatttttggaaaattttttgcattgaactggaattccggttcagagaggcctgtaggaaccagaatttcagttggggaaccggtctaccggttggggcaattttgggaaccctagtttttcccatttttgtgttatttagggtattgccatgttattcatcgatagggaaacttttagtttcaagtttaagtccccaggaagtgatttagcgtgtcgcttatcagtgttgtgattgatgtgatttaggagcctgtaattcgccgagcagattgttccactcaggttgaccggcacacctgaattcggaatcgaggtaagattagtataacagtatgcatatgtatttacatgtttagcgtgcatgttagtaagcctgttagattacattagatatgtatgttggctttcgtactatccgacagtatcacatcggtacgactagagtatgactagcgtaccgagtataggctgatattatggtcgatagtaccgtactatttgacagtatcacatcggtacgtctagagtatgactagcgtaccgagtataggct

SEQ ID NO: 285018 - DNA, 971 bp, Cannabis indica
aattaaatctatgccaaagttcaatgtcggtcccttccgatgcatactccatgcacccaacctaagctttactttaaccaatgctctggaaagaacatagcattataacaaatgcaagtaaactctgttgtagattatcatatcagtaaaaccccgtgtctgataaatctaggaatctttattcacatagtcatgtttagtctccactgtgttgacaacacaataaatagtatcaagtatgtgaaaagggttccagatgaatttataaatcaaatagacaagcagttgataacatgaaccaaaacatataaatgaatgaaaaatacttcggtttctttattgatattgaataaaattggattacattgaaatggaattttatttagggcataaaacccaacaagttaaacaagtgagttttagagagagaatctctaactttatggagagattttagaacgtagaaaatgaacttagaggagcctcttatttataagaatagaggtccatttaaataaaatatatattacaaaatcgggaacatttcatgtaaagaccgcttagcttaaatttggaaattagcagataattagaatttaattatgaaaattagttattaattctaattattaaattttgatgatttatttgaattcagaatgtattttatatgtcatatatagaaatttcataattttgcatgttcagtgtccgacaacattggaccgcggtgtatggcttagttgaatcacatcatagtattttagtttagcggggtggtgtagttagacattgggaatgtcgagattagtcgggaatttagaatttcccaaaaaacccttaatacccttttatgttgtgttagtgtgggaggggcaaaatggtcattttgccccattagccttttgtcattttgtgactttagataagttaattaaatcaattttctaagttatgttatgctgatatta

SEQ ID NO: 285019 - DNA, 561 bp, Cannabis indica
gaataagcaagatgaaaggcagacgcaatgcagttcagagacaagctctacggctgtaaacccacatgaagatgtgataaagaagaatcgcagaagtttctaaccctagggtttcctaaccatttttctacagcacagtaaaagttgcattcaaaatataaacatgcaaagataagcataaaggaaatcagaaacttactcaagattcgagtatctgggttcaggcaacgtcaatccaaccagtagttgtatgaaggcacttcggcgactttgaagccagaaaattttcttttcgctctggagcttgcttagtaaagaagggtgatgaaatgaatttatgtggcaatgttgtgggtatctataagcaaagaggtaattgtctcaaagaaacctcagacaccttagcttcccgcctcaaaaatgaatatgggaaatcgaaagtaattgagtgcaactgtcatccgtggagagagaaaatcaaatttcaaaatattaattgtcaaagcatttattagccgaaaactgaagggacgcccagtcagcttcacatcgagtcttgaa

SEQ ID NO: 285020 - DNA, 552 bp, Cannabis indica
ccccatacttagacagaaaatcctttcctaggattatgtcaaatcagacagttgcaattctattagattggcggttaattcacaaccatcaatctagaaggacaaagaccgaatccacctagtggatactataaggtctcctgaaggtaacatggtaccaaaccccgaagcataaatatcacatggcttatgaaaacttttgataaccgtactcaacacataagagtgagtcgctcccgagtcaaataacacagtataagaacaaccattaatagacacctaacctgtcaccactgacgaactagcatcagcgtcagcctgagtcatggtaaaaaagtcatcccaggttttgagtagtattcttcttaggttcctctttcttggtctgaggaaaatctctgatgaagtggcccaccatgccacactggaaacatgtcttggcccgacattcaccctcatggtgcttcttgcatttaggacacctgggataagatcggaatgaagatctatggccttgacgaccacctctatttccccaaaactttctattac

SEQ ID NO: 285021 - DNA, 678 bp, Cannabis indica
agtttaatttagaaattagcaattatgtttggttatgaaaattatttatatttaaataattatttatactgttattatcgaattctgaaatgcattttatgtcatatagttaatttcatattttgcatttccggtgcccgacaacatggaactcggtgtttggctcagtaaaatcacaacttagtatgttagtatattggggcggtttattagacattgggaatgtcgggagtggtcgggaatttagaatttcccaaaaataccctttagtaccctttatgttatcttagtgtggaggggcaaaatggtcattttgccccattgttattttgtcctttagtggactttatgtgatttgagtatgtgatttatgtggctcttttggctgaaatgaaggtatattacatgcatttttctctcattttattaaaagtagaaaacttagaaaaaattagaaaaacactcaactcttttcctctctctctctctcgtcgggtggtgtggattagttagggcgtgggtagtttccttttgtattttcaagtccttttcattcaatataagttgttttacaaagtgcttggtaagacttccttaaccttgttcttggttatttttcttagaatgatgatgaattgcattagtttaaattgaggtgtgttgctgctgtgtttgtga

SEQ ID NO: 285022 - DNA, 476 bp, Cannabis indica
caatatttattcttttttaatccatataattcaaccctaagccctagttgaaacactataaaaggaacatgatactctcactcatcaacttgatgccttcaaccaagtcaaacctagtttcctatgttagacaactagttaatgagagagttccttcctcagtaattcaaacctccttcattgttcttcacctattcgaacccttggttaatgagtgacgtgcccacacatagcaagtcaagtactcaatcatagtgagtaagacgatggtaaccaaacccgaaggagagaaagcgatccctattcaaatcttgataatgctctgctacagaaaggaatcaagggctagagatctttaacggaaggagtcattatatttcgttgcaatcaatgtaaggttttctgaaacccttatgtgtttatttcattgttttagagaattcatatttaggatgttaattcaacatacttgttag

SEQ ID NO: 285023 - DNA, 108 bp, Cannabis indica
ctaacactaagaatttcaaaattcaaggaagaagagagagagagtggggtcggccaaagatagggagagagagaggctcaattttttctgaatgaaaagtcagaagaa

SEQ ID NO: 285024 - DNA, 500 bp, Cannabis indica
gccaatatttttttttccaaaaatatgtgaaattaagataaacattgaatcatggatgttatcagaggtgccttttattaaggacatggcaactcaaatgatgtccaagttccagaaatattggcgagagattcacgggcttatgtgtgtggcggttgttttgttcgaatattatttccctgtaatatatggagatgagcaatatgtaactgaaattgcgaaggttcgtgagctttgttacgagatactagaggagtatgggtctaagtttcctcatttgagagaaagaagggttcaagaagaaaatgtatcaacatcgtctaactttgacagatttgttagagcttcctatcgagtagagaatatgaagtctgaactggatttatatttagaggagaacttgatacctaggactgaagagtcatttgatatatgcaactattggaaggtgacgggcctcaaataccctttgttgagtatgattgccaatgatgtatttg

SEQ ID NO: 285025 - DNA, 823 bp, Cannabis indica
actgagtttgcaagcaatattatctcaactagtaagggggaacatgggcctatatagccgagctttcaataagtagatctagaattcaccaagttaaattttctaacttattaattccgccttgcgccattatagattaggaattcaatatcactctcaattatgtagaacgctttatatgtaccacgatatagaaaaattatgattatccattgttacaattctaatagtcaaggatcctctatagattatctacactggatagggacaaatttaccgttctaccctttaatgtattttatccttaaaacacatagccacctataaattatacttcaataaactaatataattactgaaatgaggcatcaatcatttttctctattcagccaagctctaagaaaatcatcatttcacttctaaatacttatagaagttataaattccatatctatgatcagtgctctcactcaattgaactaccatgttcccaagatgtaaatatctgctggagctttttgttagcacccacgaacaacttgaagaacataaataatacaactaagctgaacctaaccatattaagattaagatccatagacctaagatcaaccattgatattggcttagaaagatataatggtaagtttatgatttcttatccaagatcaatatcagtcccttccaatgtatacaccatacattggatactggtaaactttgccaatgccctggaaaggacataacacttatccaaggtgtaagtataccttatcgtcgattatcatgtcagtctaaatcaatgaactgacaaatcatggg

SEQ ID NO: 285026 - DNA, 502 bp, Cannabis indica
ggcgcttatggcatgctccgtttctctcaggtatatccccagttcctcaccgtccagagaggacgggaggttttgcgagctgtgcctttaggtcttgaaaagctctttcacattcttctgtccattcaaagtttttgtttcctcgcagaatgttgaagaatgggatacaataatccgttgattttgacacgaatctactaagtgcggcgatttgactagttaggctttgtacctctttggtttttgttggcgaattcatatccaggagggcttggattttttctggattggcttcaattcctcgagcgttgacgatgaagcctagaaactttcccgagctgactccgaaggagcattttaggggattcagtttcatgttttattttctgaagactttgaaacattcgtccaggtcgtctatgtgtcccccagcctttctagattggacgagcatatcatccacgtacacttccatatttctgccgatctgatctttaaacat

SEQ ID NO: 285027 - DNA, 763 bp, Cannabis indica
gtgaaagaagccatctggttaaaaggtttgacatctaaattggggataaaatctgataacttgttcatacattgtgacaatcaaagtgccattcatctcatgaaaaatcccatgtatcatgagaggtcaaaacatactgacatcaaactacacttcattagagacatcattgccagcaaattaatcaaagtgaagaagataaatactcatgaaaatcctgctgatatgttcaccaaagcagtcactggtgagaaattcaggctctgcctgaagctacttaacattggagaatgttaacccttctttcatgaagggaacacttattgatggaacggttttgcctagcctttttacttagagttttaacttgtacaagactataaaccaggtggaattgtggggtttatattctggtgcaagtgttgttgttggataattttctgttataactgttagttatattcagttaagttagttagtcatttgtactctttttttcagcctatatataaaggctattttgtaattctttggaaaaaggattgagtggtgtgagctgagagttctttgtaaaagagaatgagagttaaactcatgtctctcgagtgatctctgtagtgggagcaagactcaattgtgtacagtagttttctggtgttcatttttgtattatctgagttatcttcatcaagtaataaaggcaaagcctcaaggcagttcctcccaaggattagatctaagtgttattcacttgtgattgaac

SEQ ID NO: 285028 - DNA, 663 bp, Cannabis indica
attgtattgcgttggattgtgttgtattgtattgtattgtattagtattatttaatacaatacaatatttgggatcggcttgtattaattaattgtaggaaaattataatatacttttaatacactcgatgtaatatcccagaaaataaataatatttaaatagacatattttattaaatatgtaattactttggaaacgaagtaggattatgatcttacttaggtaaattgttgagaaattatttaatgaaatacgttattttcgggcccggcaattgtgagaatttagcgatgtggttagtaatgtcacgacattaatgaaagaattattttgagaatatcccggattaagttagaattttattagaatgtcgggttggggaattagtgaaattaccaaaatgcccctaggttttttttaaaaaaaaaattaaggaagaggggtagattagtaaattcatggtgctttgacttttctttttttagctgcctattattttaaaaaaaaaaaaaaaaaaaaaaaaagaccctatttaaagagtttcctaccaagacaagaaaaccaaaattttcaaaacatcaagcttctctttttcgtttttccttctgctgaaacctagagggcagctggggaaccaagtgaatttcatcttatttcaacc

SEQ ID NO: 285029 - DNA, 584 bp, Cannabis indica
tgataagtgatacgctaaatcaaatcccagggacttaaactagaaactagaagtttccctatcgataaaaaagcatgacaataccctaaacaacataaaattggaaagaactagggttcccaatttttcctcaactggtagaccggttctacaaccggaattcaggttctgagaattcctggaagccccatccggtagaccggatgctgcaggcttcactgaaccggaattccggttcagtgcaggagacactcaaaaattcatatctcattcaattcgaacccaaatcataccaaaccttccagacctgttctaaataccccaataaacatttccaaaccaataacacagcccacaaaacacagaataaaaaatcaccatgtgagctccaagctttgagttcaaaactcaaatttggctaaagctcacctacatgcatcacaacctgatttaaactacttaatcaagcatattataacctctgaaaacaatagcaaacatctacaacaagtacagcaacagatttcatcatttcactttaaaaatcatagtttgagtaaaatttcaagcttgaaccaaagcaa

SEQ ID NO: 285030 - DNA, 592 bp, Cannabis indica
ctagtgacacaacagtttttcggggatcgaaagttagcgattcgagatgcagatggaattggcaactagaggagaaaagatcgtcaatggcggctcgtttcagcgctaagagcctaagaagggcgaacccgagaacgaagaggaagcgtataccgtgtacaggcaaggaggtcattctagattagtgaagagggtaaatgtggaaactaataacgctaagggtgtgtttcggtcaatcgaccaatcatcagattacaaattcgcattgtgaattctttcataaaaataaaaaatagagcattgctatgagacagtggttagtgatactctctaaaagctattatattaaattatatgggacccgatacttagttggaccaatagcgatattgacatgtaggagggtgctaggcaccactggtgccctttagcatttctctaaaaaaaaaaaattattgcacttcgaatttaattgactttctatgtttcattgtatattttaataaaagcttaattaggatttttggcgaacttttatatatactaaattatgtttctaaacttttaatgtcattaaaaatgcttcctgaac

SEQ ID NO: 285031 - DNA, 608 bp, Cannabis indica
tattacacttaattatttaattttttatttaaatatttaaaaagtaaaaagtgaaacaagttgaagaattttttagaaaaaaaaatggcctatcgattgactagcttgaggcctcatacttagttcatctaattgtaacaaaataattaattatttaaaaatttattataagaagagaattttaatttgtgtaaaaagaagtttaatttttgtaaaaaaataaattttattgtaaatattataattaaatagcttaattgttaaaataattagagtaaggatttaaatataaataaaaaaattatttataaatattaattgctaaaagaggtcttgttaaatatttaattaattattttaaaaaatatagttaattataattaattaattctaaaaaaaaaaatgtttacctatatagtaacctgctattacaggtcaaagaaaaatgtaaccatgatggttacaataaaaatataaccattaaatagtcacccatatatatatatatatatttctcttgaatcaatgaataaacacatacactttaattactgttttgattggacatgtcacttttgtgacaatttttatttatttttttttttttt

SEQ ID NO: 285032 - DNA, 588 bp, Cannabis indica
tcttagatatgctttgcttggtggcatgaattacatagaatccatcgtgcacttcagataggaaccgtgctgcttcttcttgagtaacacatctgagcaatggcatcgagaatcctcttctgtacataattccctctactatgatataccgtgtagctttccttgtcatttttcgagcttcattccgattgtctgggagtttctcagagtcgaggtaggctgctattggtgacatccaatttggggaactatcaatcatttcgatttctttcgtgctagtgatgctaggctcttcgaggaactggataggaaccatgcttgccatgtcacttacattgctgcttgccaatcgggctagctttagcccagcaattaaagcttcatactcggcttcattgttagatgctttgaatccaaacttgactgcagcatgcaggtgttgcccccccaggcgtgacaagtgcaatccctacaccagatagctcatctgtagctaacccaactctacatgtagtttcctaggtcgacttatcttcatttgtactttggctgaggtgtttgtactggcttggggttgcattctggtat

SEQ ID NO: 285033 - DNA, 518 bp, Cannabis indica
ccatcttgtcgaagctttttcttgtagcaaaccgggctttctagaggctgctgtggtggaggcgataggcattaaggaggctcttagttggattaaagacaagaagtggaatgaagtgcaactggaaaccgattgccttcttgatgtacattcttcgattctgttgcgttctccttttggaagggtgattcaagagtgtaaagagttgcttgattctttaaaatctgtttagattcaatttgttaaacgttctgctaacaaggctgcacattatatggctcataactcttgttttcattcagttcgtatattcaccgagagaaatgctccggcggatatttcgaatattgtattggttgatgcaatttgctaataaaatgtcaccattttaatctaaaaaaaaaaaaaaaactaccaaaagtatgtcaatatagagaaattttattttttacgaattgattttttttatttaaaaacatacgttcttcagtaaaaatagtaaattgttcgatattttt

SEQ ID NO: 285034 - DNA, 657 bp, Cannabis indica
acttcaggcacgagtgaaatattgatgtgacagctttttaagtcatacagcgctagtcgaccaagcattacgttaaaggctgaaggaacatccaatattaggaattgtgccatgatagttatcctcgtcggagcttgtccaacagtgaggggtagccggatttgtcctagaggtgcaactccttgaccgaagaaaccatagacaggctggaggcatggagttagatccttgagttggagccccatcttctcataagcagtcttgaacaaaatgtttgaagaagctccattatcagtcatggttctggccaccattttttttgctatctggacttccacgaccagcgggtcattgtgtggaaatctaatcttgacagcatcttcatcattgaaagttatggttggctctcctgctcatggaactttgggcttcctttcttccacggccaggatgacttcttcttgctcgtactgagctgttcgggcatacctccctcaagctatgcccgaatctccagtgatgtgtgggcctccaataatgacttgcaagtgtccatctacaggtggaggtagcatatcctggttgttttgaccttggttggtcttgacatacttctgcaggtgcgggttgtttttcttgatcagaaattctatttcc

SEQ ID NO: 285035 - DNA, 568 bp, Cannabis indica
tttatgttgaatattgtcataggaatggttatggatttatttctgaactaaatttcccatatagggaggatgatgattgttgtttaatgttttgcctagttaatgtttaattgccattcctccattcttgtttgtgaaattatcttaatttgtgcttaatttcatgtttaagattgatcaccttgtgcatgctttatgatctcaattcgaaatctgaaaagtgagaattgagaatgctaaaatttggataatcgatgttctatgtgaaacgagagtattcacatgacttatgtgacgagtagattattacctaatgctgatttcatgttagtttaattaaggaattaattagataacatgtgatttagaacctagaagatctgaaaagagctaggttactttataatctgtcattcacttcaagaataggatagcaattaggcattaacgatttgggtaaacaacaacaggattctcctccctatcatctcatcttgcttaactttaaactgtgttattaagttttctgaattactttaattcttttaaatcataaatacttttgatt

SEQ ID NO: 285036 - DNA, 703 bp, Cannabis indica
aatcagtcgtatgtagtttcttattagttttttttatagtttaatgttgttatgtttgatgtgtttttcgattttcattaggtttagttgtttgctgttattttttaggtttcaaaacgatttcagatctttgctgtttatttttgtatagttgtatctgtttggtagtttgtttgtagtttgtttatagttttattgtagttttcatactgtattattcacgattaataatttattgtggttattttgcagttttgggactacaaatttagtccttctgatttctatagatctaagtgtgtatgcactagtattttttctgtgatagataatattaagaacactttgtctgttaatttgctttctatgtttcgtgaaactcagtttggccattttctagatatgcctgagtttgtttttcatccgcaagttgtccatagtttattactgagggaagttttccagcccaatcctaaagagttttgggctaaggttgctggccgttgcatacggtttagtgctgaggaattttatttgatttctggaattgattgtttcggtgattgcaacaagttgttgttttcacaggaaacaaatcagttggtagaaatctgttttcgtggtgtaaaaaccattgaccacaaagccattgaggatgcttttttgggtagtcggtggggtttggatgagtcccttggtttga

SEQ ID NO: 285037 - DNA, 684 bp, Cannabis indica
caaaacaaataaaaaactaggtgtaaacataaaaaaactatcagcaaattatgagaagccgaaaaaaaaatgagtttagaaaaaataattattttttaaaaataaataccaatataaaaataattcaaagtaacttttaaaaaagaataatttaaaaaaaattataaattttttaattattaatattaattttttaaaaaataaaattaaatattattataatatgtttaaagttttaattatatacaagcagtcctatcgtaagagtatacacctttcatcataataaccacatgatctaaaatcaatggtcaaggtaacttttgctaagtcctaccataatcttgccacacatatatatatatatatattattgtttaaatttctagctgtatagctttcgcaaggccatgtggtttgttagtattgtcaaggtaattctacacctaaccatatatgtcatttacaatttggtgagaaaaaatccaataattcagagatatagatagagaagtgagaaataaagataacgtccttgaaatcaactaaaagtctcaaatatatttatatatatatctattctatataaagtatgcttatataaccgaatttttggtttatgagaaatttatggaagatttttatttatattaaaaatgaaatgatttattattaaaaataaaa

SEQ ID NO: 285038 - DNA, 535 bp, Cannabis indica
tgtcaacccactcgaaaaaatcgcacccaccattcctctgaaaaaccaaacaatcaacacccaaaataagagggggaaagtttcagaaaattgaaaaaaataccagtttcacacactaaaccctaaaaaccacatatttcaaaaccaccgtcccattgtgttactgtcaccttcgagcttacaacaatggtggaaaagttttgcctcagattttataggtttgagttatataaaatatttatttattttttagtttttgttttttccaagttatttttattttgattttaagagggtttaattattattagggtttttaatgtatgttgtggcatggtttagttttaagtggtgtgagtgatgtggcatatattttaatgacatggcacgacacctggcacattacaatgcaaaaaaacggagaagtacctacggaagtttcagagtagtgacagaaggtattttaacgccaaaaataagacttaggtatttatctgctactctgcataaaacttaggtatttatgccacaaatt

SEQ ID NO: 285039 - DNA, 520 bp, Cannabis indica
ctagtttttcccgtttttatgtaatttagggtattggcatcctatttatcgatagggttaatcttagtttcaattttaaatcctcgataagtgttttagcgtgtctctcatcaaattctgaacattatggtttagggccctgtaaagcgtcgagctgcgtttccactcaggctgaccggcacacttgagcacggaacgaggtaagatagcataagaatatatatatatatatgaatatatgcttgttttagatatttgcactactagcactagtttaaatgtgatttatagagtgttagtatagtgttgtttataaatgtggttacggtgttaccaacacgagtaccaggggtacatcgtgcatgtggtacaacacttagtagcttccgggagtacagttatggccctaccaacacgagtacaaggttggtactttagtgcatttggtacagtggtcgtacttcccttaagaacgttcttatccatttggtgagcttaattattgagcttagggcggctt

SEQ ID NO: 285040 - DNA, 740 bp, Cannabis indica
tggctatattttcacttttgttggtgctgctatttcttgaaaaagtgttaaatagactttaatcgtatcatctactatatatgttgaaatttgttgtatgttatggggcatctttgcaagctttatggttaaagaatttgattttagagatacgactagttgatcctatttcctctcctatactaatctaataatattgttgttttcttttcaaagaataatgagattagtagtgcttctaaatataaggaaataaagtatctcactattaaagacttggttaagaaaggagacattgtgatagaatattgaaagaccaagttgatgtttgcagatcctctaaccaaaggattaagtgccatattgtttgataaacatgtttttgatataggcattttataatcttttgctcctttgggttagtgggagtttcttgctttatcttttgagattacatttatatgtaatttacttgttgatgttatgaactactttgtgggccaatactttttgattattggatgtttatgctttcagttaggctttgttatattctcgagaataattgaattgaaagcatgtagttcatatcttgttgtgatcattgtattttaagtatatttactaaatgacaatgatattttgttggcttaatgttttaagcaagtttagtgacacttacttatttattaagtagtgtatgtttaatttcactggcttatttattaagcatcacggta

SEQ ID NO: 285041 - DNA, 637 bp, Cannabis indica
tctagttgtgacatattatcttagtctaaaactgtaagttcaattaagataactcatcaacatagcaatctagtattttaaatgaagtataaaacacttgctagagattaagtaatcaaattcgagataccattaaattttatgagaattagaaatctttgctcaaatcattcaaatagactatgcaagaattcttctatcttattctcataattctgataagttatttctatccacgtgaatggttagatttactttctcagtagtgttcttaagttcctatcacaagtgtcaaccaaatgaagatgggtattctcccactcaattaaggtagtgtgatacattatcaaagaactttattggtatcaatttctattacaacagtaaatgtaaactggaacatataatcaagatcaagaatttattctgataattgctaattcattatattacttccatgtttaaaattatgtgtgacaaggagtactgtggtatatagtccacccctaagtatatagagattaggatccacccctaagggatatagacatcacggttctcttagtgtgatagagatcatgtggagtttcgaatataatcaagaattcaatagatataaaagatcgttgaactgcat

SEQ ID NO: 285042 - DNA, 728 bp, Cannabis indica
atttttaagtatattctgttaaaccaagaatgttaaaccaagaaatgccgttagataggcacttttaatatataaagatacattttatcttttctaaataattacagaaggggcaactcatattcagtctcacatttatattatcacattttatctatatttttcttttttaaaaaataaataaaaaattattaatattctcccaagataggtttgttagagagatatgtggctaagatgatttttttaatttaaaaagagattattaatatttaaaagattgtttaattttttgggtttaattattgggtttatttgttaacgggagatcaaacctaatcgttaaatttaacagaatattcttttatttttaagtatattctgttaaaccaagaaatgccgttagatagacacttttaatatataaagatatatgatatattacaattatattgttacacggcagaatttataaaaatactgctctagcttatttttattatttttatattgtatggacggaataatgtatatacacctccacttttaaaacgaagaatagaaccaaatgatcaacccagaaaaaactattaattcgagcgatacaaaggaaaaaatgaaatcgacaacaaaacaataacaaacagttgcatcaagaatataaaacaacgaatcaaaaaattagaaatttaaacccaactaaattaattttaaatacaaaattaaaa

SEQ ID NO: 285043 - DNA, 780 bp, Cannabis indica
tcttatccaacagaggtgtatcagacacagtgtcctcagtttcttcatcagtatgaagggcagctgacttttgaccagcaacatctggattgcgttgggggacctaaaaaacaaaaactcaaattaaacagttgcaaaacaaacagaaaacgattaagcaactaaaaagaaacctaattttcttacaaacaaattaagataaacttgcgtggattttacgaacagcctccaagccagccaacacaacttgatcatcatctatttcaagctggcttaacccatcaaagaaatcgtccccctttaatccagactcattgccctttggcttctctacatccttagccttctcatcactgcttccaacagcctcagatggattcacatcagaaggaggagcatcaataacaaccttatcagcatcatcagcatcatcagcatcaccaccatctttaaccaactcatgaccatcatcggagtcgaaatcaatattttcaggatcaggcagttccttctcatcatcctcagcatcatcatcatcatcatcaccatcatcatcatcagaatcttgagttactaattcatcagatgactttccctgattcaaacaacacaaatgcaacttaaatgaaacagtaaagaaaccaaaaacaaagtaatgaaaaaacaagaaacaataaactaatgaataaataacctcaatcagaaggacgacgatgaatggcattaaccttctcctgaaatatccttaattacagtcattacggacttgaaattaaagat

SEQ ID NO: 285044 - DNA, 519 bp, Cannabis indica
ctgctaacatgcttcctaacatgcttttcttaaatcatactattaaataaactactaaaacaataaaagcttactaaactgtgaaatgagcttactgctgatgatgattgtacatgtagtgacgatcttccgaaaacaacctggcggctctgataccaaattgtaacaccctaactagcataggcgtgttagcgtgattttaaacgtactgtgcagctcgttgctaatcaacgaggttaatgaaaaacgtgattatttaaaaatttgcttatttaattaaaaacttaaagtattacatatacaatgttccgagatcccatttacaaaatactttttaaaatttgttatacacataaacgaaagtttgtcgcctagggactatgcaacaaaagcctcgatgtcccaaagatcgtacgctccagggctaactgccccgacatgtacaatcttcacctgctcgtactcacggatcctcatgtaacgccctaacgctaaggcacgctacagtgctttttcaat

SEQ ID NO: 285045 - DNA, 641 bp, Cannabis indica
agcacatccgatcaagatactaaccaaccacccactccggcaagtcctccaaaaacctgaggcgtccggaaggctcctcaagtgggcaatggagttaagtcaatttgacttgcactatattccccgaatctccataaaaggccaagccttggcagacttcattactgaatgcaacgaagccgaggcaaccgcgaatatgccggtaccgccaatccccacatggagagtatttgtggacggagcctccaacgaaaatgggtccggagccggagtggcgatgatatcaccaaccggactgcgactccaggcggccctacggttcgacttcgcagcttcaaacaatgaggccgaatacgaagccctgatagcagggctgagattggcaaaagccgtaggagccaaaagagtggaagtctacagtgattcccagctggtcgtaaaccagatatcgggagaataccaaacacgcggcgagcgaatggccgcatatgtaacaatagtccgggagctgctccacgagttcacggactacaaaatagaaaggatcccccgggaaaagaacgctcacgcggactgtctggctaagttagcttcagacagagaaatcgaagagttgggggtagtaccagtggaacgcttgg

SEQ ID NO: 285046 - DNA, 586 bp, Cannabis indica
agttgtaaaatgaatggtctttgggagaccgaaataccattggtggatcgcccaacctccagtccaagaaagaaccgcaaaggaccaagatctttgagtttaaatttggagtcaagctgtcttttaaataattcagcatcactagaattattgctagcaattaaaatgtcatcaacataaactaagacagcaagaaaaatgttgttagaagatctaataaaaagagagtgatcggaagaggattgtttgaatctttcacttaccaaagtagaattaagtttggcataccattgtcgagaggcttgtttgaggccatagatgcttttatgtaacttgcatacagcattgggaggaaggtctctgtaataccctggaattaagaaaggattagcaaaaccctaattagataattatgaataattgaggaattatattattatatagttcaatatatgtgaaattatatgaattttaatatgttaaagaccccgttggtgagtcaggggcattttggtaattatgactcgagaggagtaatttgatgaagttaatttaattacgtggttaatagaactatattatcata

SEQ ID NO: 285047 - DNA, 417 bp, Cannabis indica
gactggtttcactatgcctgtgaaaccggttaaccggtttcccctgctgtagaaaatggaaactcgagtttttggctccaaaaccaaaccaaatcttctccaaacctgttcaaaccttacagaacagtataacaaccataatacaacatatctcaagcttcaaaacacaacaactcaatcactaactcaaaatcacatgttcaagtgaagaaattcaacttttagcttcatccaacacatttcaatccaagcagccaaagaaacctctcaaaaccattctcaacatactcaaaaacctagcctaaacataactcaaactcaatctaatccctacagccacagaaacacaaaaccctaaccttaaaccaaccaaaattcataaaaaatcacaacctataaggttgtaaacttacctca

SEQ ID NO: 285048 - DNA, 625 bp, Cannabis indica
acaatggaaagtaattgtgattatatgcttcaaaagataatgtacctgattcatcagtgcactagatttacactgatgtggtaatcaacgataaagaatacttacaccttggataagtgttacgctctttccagaatattggaaaagtatgctagtttcggatgtatggagtatacattggactaggaccgatattgatcttagtaaagatattataatcttactgttgtatctttctaagtcaatatcactggttgatcttagattaaaagatcttaatcctgacatgcttaggttcaatctcaagagtgttattcacgttctttgatttgttagttaagcctactttttggtccgggtgatacgtacattttgggaacatgatagtacaattgagcgagcgctaaacatagatatggaatctatagcttctatttggacatagaagtgaagcgatgatttccttcgagtttggacatagataaacggaagagctcttgtgtcattgattacattagctcactgaaatataatttatgagaagctaagtgttttaaggataaaatacattgaggggtgaaacgataaatttatccctactagttgtaaatcatctatagaggat

SEQ ID NO: 285049 - DNA, 969 bp, Cannabis indica
cgcacaatacatgtaccaggttacttttagaagaaaaattaaagctaaaaattcaactaccactttactttttcaaaatgattaatttattttttaaaaatacagtcacaactcaacacactcaaccatattttatgatacatgtattagatgacttacaaacttatatgttactttatgcaaaaataaaatcaaaattaacaaactatacaaaaattataggtaaaagtaccaagttacaatttgaagcaaaaacaaagtctaaaatttaacaactacgttactttgtgcaaaaatgcaattaaaacttaataaagtataccaaaatcaaaagtaaaagtatcaggttacttcctgaataaaaataaagtctaaaatttaacagctaggttacttttcaaattaacacgttactcaactaggtatattactaaaacacatatcatgatttatattgtaaataaatagattactttcttcataaaactctatcataactcaacaaattcaacaaaattcaatttgcaaggtagcaagttacttctattatttacaacttaactcgtttactttaaaaagtaagtagataattgtatttagcatttttattatgcttcataaagccaacattctcaaccaaattcaattttacaaggtaacaactcatattaagttatttctacacaaattcaattttgattgtatcaggttactttataaagtggaatgtaatgtcaacatacatacattaggttacttttctacataaccagactactttataaagcataacaaacatagcaggttactttttttttttattcaaattcttaagattatgtagttagaacatgtacaccaatcatacattaggttacttttctacataaccatactactttataaagcataacaaacatagcaggttacctttttttttattcaaattcttaagattatgtagttaga

SEQ ID NO: 285050 - DNA, 512 bp, Cannabis indica
taaaaaattattaaacatcccgtgcttcgccgcggatatataaaatattttaaattatatataaaaaataaattatatattttaattaataataattctttagtaaaattatattaaaatttgaattttactgttaaaaaatttgtgacataaatacttaaaatattaaatttattgctaataaataccaaaattcaataatagtagcataaatcctcatttatggtttaatttttattctgatgtgtgtgttaagttttgggttcgaattttattgtgtgtgtttttaatatttgagttttagtgttttactggggttctaatatttgagtttatgtttatgagatctgtttttatttatttattttatagatttcgagaacttgaaatacttgatgttgtttctattgattactgaaatttgaaattgagagtttgatttttcatacgggaattaaagtttgccttttcgtttcattgattgaaaaatattagtagaaaatttatggaat

SEQ ID NO: 285051 - DNA, 554 bp, Cannabis indica
gtaacagttagcttcgaaaggtcaataacctccccggcgggtgccttttccttggaaggggtcgcctcaccgcccttggatttcttggccggaggagatgagcttgagcttcatccaactctcttcttcagagcatcgagcatcttttgagacatgtctgcacggaacaaaaacaacatggttagaagaaaaagacataagaagcataaagcatagagctactttttgtcgatgggctatcaactttaagtttgcagtggctaatttttcttcgatttcatcaagtgattctgctaggagtttgtgattggtaccttgattgtacgtcaatcttctgtgggataatggctcaagtttgacgggcagcatagcttcatatccgaacgccattgcgaatggtgtctgtccggttgccgttttctcggttgtagggtatgaccatagaacttcaggaagctcttctggacagtttcctttggcatcttcaagttttttcttcagtatatccttcaaggttttgttgactggttcaacttgaccattttcttgaggat

SEQ ID NO: 285052 - DNA, 707 bp, Cannabis indica
ggttatttttggctagaaatggaggaagatgctgcaagattgcaaaaagattgtccgcaatgtcaactcttatttaataaccatgaggcaattttgataaccgaagattacgattggaggagaccatataaagaatatttacgggacaaaataacaccatgtgataagaaagaaaaagaaaaactactcagacacattagtaagtatttcttgaaaacagatgatgacctctaccgcaaaggattcaatgggaagttattgcgttgcatttgcaaggaagaagccaatgaagtaatggaggaagtccatcgcggggattgtggtgaacatcaaggaggaagaaaattatatgaagaaattgttcgcataggatattattggccgaccatggaagcggacgccatgaaattcgcaaaagaatgtcaaaaatgccaaatttttggagacaaaatccatgcgccagctatccctctccaatccatcaccaccccttggccttttcacacttgggctatggacctcataggtccaatctcgccaccctctcagggaagaatttggattttagccgcaacagagtgtttcacaaaatggtcagaagcaatcccattgaaaaaggcctctacagaagctgtggccaccttcatcttagaacacatcatttgtcgtttcggcattccaaaaagaatcttgtcagataatggcac

SEQ ID NO: 285053 - DNA, 775 bp, Cannabis indica
gataacaagctttgtctcagacacagatttttatcattagaagcaagcaaaatatcatcaacatacagtaccaggaagatgaagctgctcccactgaccttcatatatatacattgatcaactttgttttcaatgaaaccatttgcagtgacaactgcatcaaacttgagataccactgtcttgatgcttgtttaagtccataaatagacttattgagcttgcaaaccatatgctccttgccaggctcctcaaaaccaacaggttgagtcatgtagatatcttcatataaatctccatttagaaaggcagttttcacatccatttgttcaagttccaaatcaaaatgagcaaccatagccatgatgattcgcaaagaatctttggtagagacaggtgagaatgtttctttgtaatcaataccttctctctggctatatcctttagcaacaagtctagccttatacttcactggttgtccacttgaatcatatttgatcttgtaaacccatttgcacccaatgggtctgcaacctttcggtagaacaactaagttccatactttgtttcgcgacatggaacttgactcatctgtcattgcattcaaccataacttagattgaggacttctcatggcttcttgataagtaactggttcagaagcgtctcccacaacataatcatgttcttgcaaatagacaaggtagtcatcatgaatagcaggtttgcgagctctctcagatcttctcaatacaacttcaccaccctcaatatcag

SEQ ID NO: 285054 - DNA, 693 bp, Cannabis indica
gaaagcatttagcactttatgcataatgcttgaaactaggggtgggttaaaagcatctaaatatttacaagtagatgaacaagtggctatgtttttacatgtaattgctcatcatgtgaaaaatagagtcgttagatttcgatttatgagatcgggtgagacaattagcaaatattttcataatgtgttacattcaatcattcggctacatggagagttattgaaaagacctgaacctgttcttgaaaattcaacagatgagaggtggaaatggttcaaggtataatatatatttcttgaatttcttgaattaaaatggtttaggtggaaatggtttgtttgtttgaaatactaatgaaaaaaactttgtttatgatatggtagaattgcttaggagcactagatggaactcatattagagtgagagtacctatgaatgataaaccaaaatatcgtactcgaaaaggtgaaatagctacaaatgtcttaggtgtatgctcccaagacttgcaattcatatatgtgttacctggttgggaaggctctgcagcagatggtagagttttacgtgatgccatacgtagaacaaatggtttgtgtgttccaaatggtaagcttggtgttttagattgttcattttttatttttgattagtagctcatttaggagacaacttaatccccatctttattt

SEQ ID NO: 285055 - DNA, 801 bp, Cannabis indica
gtgattacagaacacttattttttcgttttttaacaaaaaactaaaattttttaaaaaattaaaaaattttactttcattttgtaaattaaaaaattaaaaaataaaagtgttaccaaacggcacctttattttcccacactaataataatataaaactaactctaactctaatatctttgaacaaaaaggaacaccttccttatatatgatgttaattaattgcgagaggctcaatcttataacatcactgtcattgtttggtgtcataccatggtaatatcagaactgactattgctttctcgatagccttcaagctgaaatataacatccaagcaactgaatttgagcaatactcttctaagtaaatgatcttccatagtacaacatctacaaaggtaacgagtcaaatctttaaaatttcaagtgtgtagaattcgtataacatccaaaaacacaattcatgtaaaattctataacaaacatttagcacttactcgataatgcaattacaaacccattgctcctttctcaaataaccaattcacatgtatttagacatttagacagtgtattaagtcagaaatgcaaatacaataacacatttctgggtaatattaattgaactctccatcacttccaaataatcagttattcactaaacatttaattatttatttaaaaaaatatatatcaattcaaaaatttcgacatcaataggaaaaaaaaaaccaaaatttcattgggaagaaagaatattaccaaaaaaaaaaaaagaaaagaagcgaaagaaaaaccttg

SEQ ID NO: 285056 - DNA, 705 bp, Cannabis indica
acagattgagctgcacgcagagactggcacccccgtcggcaaaaacggaaaaaaattcaacaatatggccaaatggatgactcggatgtctatccccattaataaattcaaatgggaagatgtcagtagagctgacatcaacgcactctgggatagacttgaggtatgccttaataatttttttaatttctaaattactatactcttattaaattgtaattaatgtattaatgtgtaactttttgcagaccaagtttgtcctcccacgagataaccctacattcgtagactacggtgagtacgagatgtcaaagggtttacgtgactggagggcagactgcaagaagaagtggatacaaaacattgaggagcttggacaggagagggccgacatgtcacctcctgagggagtaactcaagaggtgtggagtgactgcatcgcttattggagcacagacaaacaaaaggtacattttttaaaatttctaattttggtaatgtttaatttatatagtcaataataaataattaattgttagaaaaattattaatttcaggcgagagcagcgaaaaataaagaaagtcggggtaagatgaaatttctaggaggctggggctccaagcctattgtttcacatgttgtcgagggggtaagtttatatttaactatcattcatttaaatttttctagtaaaataacaatac

SEQ ID NO: 285057 - DNA, 828 bp, Cannabis indica
agatctaataagtcatgtttaaagaattatgcttgagaaaggcacatggcttagaaatcagatcttgtaatgtagactactaaattaaattaaattttttatttttgacttatttgtaccacagatccttaaattatatatcttttggcaagttggttcttaaactttatttaaaaaaaaaaaattgctcccgatctatataaattttggcaaattagtcctcaaactttatttattggaaaattggttcccaaacttttattttcttagaagcataaaatactcactcttaaatgatgatattttattatctatatattttaaatctgttttatattaatatatctttttatttttttaattattcatatagtatatataactataatatttaacttttttaagtaaaatatttaaaatatattttaataagaaaaaaaaagtgtaatcagtaggactcatataatggctagtcccttcattttttttttttttttatattttaatatttattattgatttatgaatgtatagtattataattttaataattttttaattatatatatttattaattatttaaattttacatcaaaattagtaaaattttatagattcacggcggagcataagttaaaaataaaacttttgaatataatttattttgatagtttaataaaaaaataaataatattattatttaagttttttcaaatgttcttttttctttttattttggtcatatttaaaaaaatacatataaataaaaataatatttatttaatttaataatatattaatataaaacagatttaaaatatatagat

SEQ ID NO: 285058 - DNA, 717 bp, Cannabis indica
ttttaaaatttttgaggtataaataaaattttcctaataaaaaatatatgacatatctgtgtacaaaaatcaaaagtgaaaatgagggtaattttagagggttagagtctccatcatagattagaaattaaaggacctttctttaattaaccatagttttgatagttttttctttgccttttttatcctaactactcactagtgactagtcactagtaactagactctactactttgaattttcactaggtactagctatagcaacttacacaaatttgtgtcttgtttcaacattcatagatttgttattgatataaattatgatcatcattgtgactgttgaaagtttagatttgattgtaaggccaagtcaagtgaaagccattttacagccaacctcagagtcatactaaagaggaaggatgacatttcttttcaagaatatttgttcaagtttactttaaccaatgtaaactatttagaaaatagagcttttttttaaaaaacttcacaataattttaaataattacaagatgtatggtcttaaaaaaaaatgaatttataaactttccaaaataccaaaattgataaaaagaaatataggaaaattatacaatatacccccttaaaatggatatattgatgcacccttatttgtttcaatacccgaaataattttttagtcaaattttttttcatggtcatgtacgttata

SEQ ID NO: 285059 - DNA, 666 bp, Cannabis indica
cccctctcaaaccagaaggaaacccagccaagttaccatttttcttgtgatttcagccatagattcaaggggaatcaacctaaggtaagctctaatgaaactcttctttagttttcaagttttaagtttaggttgaatatgtggaattgtaaactaggggctgttaaggtttgaattgcctagggttcgaattttagggtcttgatgagttgattttaagtcctagatgctggttttaatggttgatttaagttttgtgcaattctaggtttagagttcaaagctttgagctttaatggcaaattgaattttaatggtttgttctgtgaattgctggctggaatatattgtttatgccctaattaggtactctggaaggtttcatggcatttggtggaagattgagcattgaatgaaatgctttggggaaactggtgcaaaccggctagccggtttgcagggccacaaaaaccggctagccggttttggcagggttccccgggcctttcattttctcaatttttgccatttcgatgcctcggatgggtgtttccccatttccagagttagaataacccattaagagcatagcagaacctagggttttggttttggatttcccgggattagggttttgaatcatgtaacttacccggtttcaaaatg

SEQ ID NO: 285060 - DNA, 521 bp, Cannabis indica
gtcggtcccattactgacattactactagcaggagggtttgatgccatgacaacatcctttgcagcctgctctttcattacttgctgctcggcctcctcagcaattcaggcgaagtctaccactctcttatatagagtgtcatgtgatgtggtaatcttcaaatcccgactaattgtagcatttagtcctcgaacatatttctgctttcttgtgaaatctgtaggcaccagatcaccagcaaattttgataaccggtcaaactccagagtatacttggccaccgacatttttctctgagttaacttcacaaaatcttcttgatgtgaagtgctcactgcaacattatagaacttttcctcaaaaatcttcttaaactcttcccatgtcatcacactgacatcctgagtttgattcactatgtcccaccggacgcgggcatgatcttgaaacataaatgccgcacaattcaccctctcagttcccgtcacccccatattatcgaggatacgggtaacagtgc

SEQ ID NO: 285061 - DNA, 645 bp, Cannabis indica
aaatgaacaacttgcacctctcactaaggaaagttcccatgatgataaaagggaatttgagagttgggatcgttcaaatcgcatgagtctaatgattatgaaacacaacatttcagaagccttttggggcacagaatccgaaggggtcactatggccaagaatttcctttaacaaattgaggaacgttttgctaaaaataataaggttgaaatgacaacactttttggttctttaatgaacatgaagtataaggggtcaaggaaatataagtgagtacattatggaaatgtagcatattgtctcaagattaaggacacttaagattgaactttcggatgatgtacttgtactcatggttttgttaacgcttcctccacagtttaacaaatttaaaattagttacaactgtcaaaaggagaaatggactctcaacgagtttatttcccattgtgtgcaagaggaagaaaggttgaaaaatgacaaaactgaaagtgcccacttggccacacccctaaggataagggcaagaaaggaaatttgagaatgaagctgctaaggttccagttcaaaagaaacaacagtaggattctaaaagttatttcttttgtaaccaacttggacatgtgaagaaagattgtgccaaa

SEQ ID NO: 285062 - DNA, 501 bp, Cannabis indica
gaagacaactccgacgaatttttcgatgataatctgacaacgataacaacttcaacgaatattttcattctattttctacttttttttgtggctaatattttattttagtgggtaatgactattttggatagtgtactgggttgatgattaagtcttggagcttttgagaagtttttactaattttattttggtattgtatttgatttgttcaatattccatacagtatttagaatacaagcatgtaaaatttatttatagtttttgatatccataacataactggtttttttttcattaagataacaactctctagcaatttactcttattctattttttacttcttttaggactaatattattctttagtgtatagtgaatattttggtagtgtgttgatggtctagtattggagtttctaagaagtttataactggttttaacattattattgtgtcagtattagttttggcattagttttgatagtgggttgatgat

SEQ ID NO: 285063 - DNA, 620 bp, Cannabis indica
ttatataataagaaataaataattataccttgtttgtcaattgccaaccaactttgagtacagaccaatgcctccaaagtagtaggatgaagcttgctcgatgtggactcacgtgtctaccaccagtactgaatgaggactctgaagcaacagtgctaactggcacagcaaatatgtctctggcaatcatgttcaacacaggatatttagatcctgttatcttccaatagttgcatatatcaaagaattcatcagtcctgggtaacacttggtcatctaaatagagatccaactctgacttttcattcattgcaccagatgaagctctaacatataagtcatagttagatagatgatcttgtgttgaagaagatgatgacccttccacaagtgaattgttttcacttaaagtaggacatttagatttgtactcattgaatagatcaacacaaagcctacgcacctttctaatttcaacctcccatttatcatctccatagagttgaggaaaataaaattggagcaacaaaaacttgtatctaggatccaaaaccactgcaatagtcataatcccatgaatctgttcccaatacttttgaaacttaaacatcatttgagtt

SEQ ID NO: 285064 - DNA, 833 bp, Cannabis indica
aaatttcaagtatcaagaagagtaatataatagtgttttaccttgatgtccatgtccgtggtactttcctttcttcctttcttcgtagatcctgtttgtctttatgtcccttttcgtgatcgatcaaattcagtgtttactataaaaaatctcaacccaaacccagaaaatgattttatcatttcaaataattagttaaagggtgtcatcacaacaacaaccactatatttgctttcattttgaacacattttctcaaagaacaaacagtttaaagacgccacatgccaatcatttctggctgtattagtgatcaacatataaaatttgggtaattagaagaaaaaaagcaacagagtagtcagttaccttacctggagtagagtgaagttgaagaacagtaatggtagtgttgaagagtcatcaatggatggcgctccaagctcaagcaggaaaagcaaaagtcttttctcttttcttcttgagaaactttttatatgaaaatcctcaaacttggtcaagaagaaaattcattaagacataacttttttttaggacatttgaaagccaacatagggaatttgtaaaggctaattatgattttgtcctctaaatttaatcatgctccttgaactttatagccgttaaaaattttcttaaactattgagattgttagatttaaagactttttatctaatttcattctattttactgattgtttatgcactaaactatactccccaaactttgatatctaccaaatcatacccctcgaacttttatatgtactaaaacatgttccttgaactttcatctatgttagacctttttt

SEQ ID NO: 285065 - DNA, 414 bp, Cannabis indica
aatcaaagaagagctcgaggccggcagtctccaaagcattgaccttctccttcaattggtccacctcggtcaccttggcgtccctctcctcctttagccgaagaagaacttgccgcagagaactcctctcatcctgaagactattaactttagcagacaagatctcggtggtctcctcaaagcgatcaacagcctcgaggtcctttgttaacacggagatcttcttcttggcagcaaacagcttcttgttggtttcacccaactcatgccggatagctccagttttcgccctgccctcctcagcttccttcttggccaagtctgcctccgccctcaaggtgtcggacagagccacactctttgaagtagcagatttagccagggagtaagtgtaagccaacttcaaaccggcct

SEQ ID NO: 285066 - DNA, 509 bp, Cannabis indica
ataaagttacaattttgttgaaaaaaaaataaatatctctcaagtaattagaaaaaggggtattgggattgtgtgaaaaatattttgggtgacatgattggagaagcttatggtatagacaagcctaaatgaccatttcaactacctttaccctaagcctaacattacaagcctagaaagaccttctgattcttagttgtgcattaatctatattagtggagaatagtaagtattgcaagcatatggaattttgggttagtggattgatgattgtaattggcatgcataaagtggtttaattgttagttaattgcattatatggttttatgagctaaatgaaaataaattgaaatctgtcaagggtgtaattgaactgaaattctggattatatgcataagtgaattttttttttcataatcatgttattgaagctacttaaaaatactcatgttttggagattgacttgtttaatgtttatttagtgtcttactcgaggacgagtaaa

SEQ ID NO: 285067 - DNA, 710 bp, Cannabis indica
tggttcctggatgcaatgagtaaggggtagtatgagcttcttctaaaatttcctttttaagctcactgatatcagggacacacacccgtgctttaaacaacagcatcccattgtcagaaatggagaagtccttagctttgcctgctaagacatcttctcgaattttaaccaattcagaatcttctaactgggccattctgattctttccaacaaatctgactgaagtgtcagattaaataatttctcagtcaccaactcaatgtttgctctagtcatttccgaggctagctgagaggaaatcataaccatgttggatatctgatcaggtccttttctgcttaaggcatcagccacaacatttgcctttccaggatgatacaggatttcacagtcatagtcttttaccaattctaaccaccttctctgtctcatattcaaatccttctgagtgaagaaatacttgagactcttgtggtcagtatagatctcacacctttcaccatacaagtaatgtcgccaaattttcaaggcgaacaccactgctgcaagttctaggtcgtgagttgggtaacgctgctcataatctttcaattgccgagaagcataagctatgactttatctgcttgcattaacacacagcctaaaccctgccttgaagcgtcacaatacaccacaaacttttcttgatcagatggcaaggctagaaca

SEQ ID NO: 285068 - DNA, 673 bp, Cannabis indica
ataggaagcccatttatttttaaatatttaaatggactaggttgctaaaatgaaatatcaccattgatagttttatttaggcccaattagtattgggcttattcaatgaataacagttatttaatgaaagattaaattcctctcttttgggccttgtgtgagagttatgggaccattagtagtgggtaagacatactgaacacaatccttcctcacatgaacaaccccaattgtgaaggctcatttgccttaattaaataattgtattatgctaattatactagtttaacctaattaaaattgaattagcaacataattaattttgaaataaatagaattaattattcattggattattttaaatttaatttagaaaaacacacttagtttaaagaaaagattctagatagtgaattctagtaactaatttatattttctaagatattaaattagaattaataattaattttatttttattcaagataattaattatttgtttctattttaataaatttaattaaacagaaaattatatttaagtcaggaatttttgttaatttcacatcaacttaaattagaataatttttcagaatatatttttatttattttcccacatagatttcgaaatgcattctttttaaatgtagatatttcaaaaattttcaat

SEQ ID NO: 285069 - DNA, 870 bp, Cannabis indica
ctacaatttaaatggaaatctatcttcgaaaaaatcagcgtcattagattccactatcacatgcgcattaagatcatagaacctataggctttgctattaacagcataccctaaaaatacacattcataggctctacttgctagcttaattctcttaggatcaggaatacgaacataagctaaacaaccccaagttctaaaataggaaatatttggttgtctatttttcaaaatctcatagggagaaatcttgcttttagatttaggtactctattaagcacatagcagacagttaagagaatttctccccaccaatgagaagcagcaccagaattaagtaagatggcaacaatagattcagtaaaggttctattctttctttcagctttaccattcatttcaggtgaatacggtgcagttttatcatgtataattccatgtgagttataaaaatcaacaaaagcagtagaatcatattcagtgcctctatcactacgtagtttcttgatttttctactaagttgattctcaatttcagccacaaataacttaaacatatcaagagcttcacttttatttttcattaaatacacataggtaaaatcagaacaatcatcaataaaagtgataaagtatcgttttccatttctagttaaaacaccatctaattcacaaatatccgaatgaattaaatctagaggctcactttctctagttacagatttatgtggtgtttttgtgatcttagcctgactacaaaagtcacatttttcaaaatcattcaaagataatttagggattaaacctaaactactcatatttttaattattcgtttgttaacgtgacagagtctagcatgccaagtatt

SEQ ID NO: 285070 - DNA, 919 bp, Cannabis indica
ttttcaaagcaagtctaacacaccttatccattatctgctgtgttgtcttatcacaggttgtcccctgcctttcgagcaactgttatggccatttcgagtcactttgaacctgaattttttagtcaagcacatggcatacccgaatgggataatgccatggacactgagatagatgctcttgaaaggaatgacacttggattgtggtttcattacctgagggacaacatgtcattggttgcaaatgggtgtacaaaatcaaactcaatgctgatgggagtgttgagagattgaaagctcggttggttgccaaggggtacaaccaacaggaggggattgattacactgatacttttgctcctgttactaaacttgtgactgttaaatgtgtcattgctcttgctgcaattaagggctggcacttacatcagttggatgtaaacaatgcattcttgcatggtgatctcaaggaggatgtttatatgactcttcctcaaggttataaacctaagggggagcttcctcacaatcctgtatgcaagctaaagaaatcactttatggtttaaagcaggcttcaaggcaatggtttgcaaaattctccactgccttgtttgatgagggatttaatcactcggctacagaccattcattgttcattaaacactttggtagccatttcatattcttgttggtctatgttgatgatgtaatacttgtcagcaatgaccttcaagaattggaagctctaaaaatcagattaaatgcccgattcaaattgaaagatttgggaaatctaagtacttcttggggctcgagatagctagatcacacaaaggcatatttgtgtcacaaagaccatatgctttcagcttcttgaagacttaggataccttggatgcaagcctatgaacacacctat

SEQ ID NO: 285071 - DNA, 625 bp, Cannabis indica
taaaaatattaaaaaaaaaaatctttacatgtaaaaatgtaatttttttattaaaaaattgtatcttatgtaattattccatattttagcccacaaagagagtctttcttattcttcttgtttaattgtttgttttaaatatagggaaatttacacagtttactgtgttttcccattttctttcttttatactgttacactcccaaaataactttgtactgtttttctttttttttttttcggtctgcctaacttttttttttttcggctgcctaactttttttttttttcggctgccaacaattttatgttattgtttttgtttttttttttagtattgattgggacatgggctcaattatttatttaattttttattttaaatggatataaaagttattatttattatttttaatatttaataattattattttttgagataatttaataattattattttgatgaaaaggttgatgggatgtgtcataaaagtgacatgttttacttttcttttatttaaataaatttaaaaatcacaccccatgtcttcattcttttttttatttaaattagatttaaaaatcccactcccatttctcactattcatcttcttcatcatct

SEQ ID NO: 285072 - DNA, 359 bp, Cannabis indica
tggttgttgcatgcttgaatctttgtggttgttgctgctgaaatattgttgttgtttctgagatttaagtatgttgatttgtgattatttaggttgttagtaatgagtgttaattgctttgctcaaaattggaagttttagctcaaaatatggttttcaaagagaattgattgaatctgttgctgggttgttgttgatgtttttatttgatttcagaagcaatggtgatttttgtttctgagtgttctgggtgattttgttgcctttgaatggttatttgggacatatagaacaggtctggaaggtttggattgatttgggttagaattgatcaagttaggaatttttgaaaaattcct

SEQ ID NO: 285073 - DNA, 684 bp, Cannabis indica
aaagttcttcacaggtctcggagtgtgcctgcctggaatcggaaaaacctctagttttgctttgttataacactgaagccataaccaacagtaaggagcctcgaagccacaagagaagcaagcatatagaaaggaaatatcacatcatcagagaatatgtggcaagaggggatgtactggtagaaaaagtggacacagaggacaacttagctgatccattcaccaaagtcttggcaggaactgcatttgaaaagcaccgtcagaatttaggattaattgagatgtactgattagttttatattagtgcaagtgggagtttgttgggttttatgccctaaataaaactccatttcaatgtaatccgtattattcaatatcaataaagaaacagaagtatttttcattcatttgtatattcttttggttcatattgtcaattacttgtctatttgatttataaattcatccaaacccttttcacatttatgttcttgtttattgtgtcgtcagcacagtggaaagtaatcaagactatgtgattaaagattcctagatttatcagaacactgggttttactgatatgacaatctacaacagagtttacttgcatcttggataaatgctatgttctttccagagcattggttaaagtaaagcttgggttggatgcatggagtatgca

SEQ ID NO: 285074 - DNA, 285 bp, Cannabis indica
tcttatttaaaacgaaattatacctaattcctcttagcttattcatttcgaatcagcttaaataacatatcattggagagttagatcagtagtggtaggtccaagatagaagaatactcatgtatatttggtataaatttaagtctttgactttaaattttagattccaaatagagattttatatttctatttacagaatacaatacagttacactttctacatggattcaaactgtatgttagtagggaatatgaagtttaatattctgtgaccaaatccactt

SEQ ID NO: 285075 - DNA, 341 bp, Cannabis indica
aagtctcaactattctagaaaagataaagccatgaaagaatttcttgaaacctactgttgagtgggagtaatgagtaggtatcagattaatccaggaaaggaacattggaagacaatcaagtaaatcttaagattaagaagaggaactatatatagtcaataagggtgtgtttaaaactcttagactacaccacatcagatttcgagacttgcctttgtgctagaaagtctgcttataagatggtgattactacatttgtggcaccgttccaacatttcttaactactagtgttacatcctgaataaccaaaaagtagttgccaaaagtatagaatccagt

SEQ ID NO: 285076 - DNA, 555 bp, Cannabis indica
ttcatggaatccatttctgaatccatgcccgctgaccattgtatctgttccggacttgccattgcctgtttataggttaatggatcatcatcaataccgtcaccaacgaccatattgatttcacaatccaagccataacgagatggttttgtggaaaccctcccactacgacgaggagccgtgatcttctgaacacgaacattagtggtagatttctcgattgtatcaacttgcaaaggttcaaccgaggaagtggaattatcctctacttgtgtaaaagtggatggaacattggaaggagttatacctgaaagtattttctccagtactactttgctttgtggcttgaaattctaattatagtcatcttcatggaaagtggcgtttgtggaaacgaacattttatcatccttgcgactataaaatagtccacccctagtctctttagaatttccaacaaacatgcaaacctcagttgcttttttagtttgccatctttctttcttaagacatgagcagggcaccccccaggcataaactaggtagacgaccatt

SEQ ID NO: 285077 - DNA, 684 bp, Cannabis indica
catcctaagaagaaatcaaagctcagtgtggaagagaaaatggttgatgaagtttctgggaaaaaagctagtgttgctaccgaaattcgaaccgaggttggttttcagtttcatttttcgtttcccccttttttgaacattttattgtatttcccccaaacttacttctatttctttccctttgttcaagtcttgtatttccagtcctgattcctacttttgccatttttattttattttttttactgttaataaactattaggaaactaaaataaaactattaagaaacgttaaaaattatttcagaaactaaacatttctcaaagtgttttctccttttctcttttccaaaataaattcctgcaaaaaatagaattaaactattataaaatgattatgcaactgtaaatcaacttaaaaaccacaactatttacttaaattaacatagttgttgtcattgtgccttttcatcatgtttatttgaatcagatgaatttccaactattataaaactaatttgccaccatttacataaatcgtaccttgtatatctgctagtttttggtacacgtcaagtgacactccttcataatttgtaaaccattttaaaacgatattgcaactgtaaggcaacgcaaaaaattaaaacagccttatctgtaacatgtggttccttaattag

SEQ ID NO: 285078 - DNA, 507 bp, Cannabis indica
aaagcatcaccttcgtttgaactgttgagaagaatgggacatcgttcttgtaacgccctgaccctcaggaacgccacgtgtgtgtgtgcttttataaactcattattgttaatctataaattttagaaaagtgtggtttaatttaaatctttaattaaattcaatataaagactttcattttaaataatgtcgtaatatagggatcccctgtttataaaataaaaatattcttttacaataaattacatttccaaacatagaaaggaatttcgatcctgcttcccagaagccaagaccccaggctgatatgtacattgctggagacctctgactcatggccgaacacagcttccaacttccatacctgcaccacgaagcacccgtgagtcacaatgactcagcaagaaaagctactaattagactttatggaaagtgcaggcagatttcataataatataatatacataccggtaggccttacatatgtcaatctacatatacaaaa

SEQ ID NO: 285079 - DNA, 492 bp, Cannabis indica
ttggacactcagtctgaggttaatactgagtcaaaaattcccatcattctcggtaggcctttccttgcaacagccaatgctctcattaactgtaggaatggtctcatgaaattatctttcgggaatatgactatggaggtcaacatttttcatgttgcgaaacaaccaccagacgaggaggaagattgctatcatactgatgtgatagacacaattgttgaggaggaagttcttttgcatgatgattctgattctttaaatgatctcctccatgactttgatactgaaaatatgctttatccacctgaggaagctaatgtttcttccattcttgagatgtcccaagatgaagcatcaccgtcacaatatgagaatttgcgattccagacccgatctatgaaacgcttcttcgggtccatgtgcgatattgacaaattctggtaagagggtaggcttacctcaggagatcacctttgtgactctggcctaccc

SEQ ID NO: 285080 - DNA, 755 bp, Cannabis indica
tgtgttgtcttttgtatatgaacccaggtgagtcttgggagcccgagcatcaaatcgaccaggagctgcttcaacttctgcacgaagtccacccttgtcttcgtgctaactctccttctgattccgtacccagccataggatgatggctcgtacgaagaaaactacgcgtctggctgacgcttctgatccccaggtggctcggctcgccactctggccgacgccgaacaagacttggcggtcataatggaggaggaccgtgagggggacgccgaagtccagaaggttgaggagctggatgaggcgcgtccgagcagccctcccactgttgagggagaggaagagattgaaccccctaactatgaagagtacaatgaggttgggcaaccagtcgatgctgacggggacgtcctggttgagggcgttgactacgtcagtgaggagcttgctgaggcggttcctcacaggaggcagggtgccttgggcgccaggtgggtaagtcttccgtccaagatttcagaggcacgcctccgcactcttgaccaggacggatacctgggcgagctggactagtacattcccgcccacgacaatcgtgccacaaaccctgataaggggattgcgcctggtcgggggctcatggcgagcaaggggcgctgatgcccttgcataagtacttccgggatgtggcggacttcttcggcctctgcccggcccagattactcccaagggcattaagtatttgtccgctctct

SEQ ID NO: 285081 - DNA, 573 bp, Cannabis indica
taaaaaataaataagcctgagagcaggcggtatgcttgtggaatcagttggtatggcgcaaggccgacaaaaactaaaaaattaataaagtagtcttgaagaggaagcatggccccagccatcaggtgcgtctggctccaagccccgaagccgccatagttatggttgggcgtctccgcatctcggggcggccggtgatacgtcccggatgttgagggtttgattccagccacctctatgatgttctccagctggtgggggcaggttagggtggaatgaagctcagccgcctcccatccggtggcccgtgacttatacccctcctgggcaacaggacccagcgagacattctcgagggtagccagacgcttaccactcttcttggacgactttgaaccggacgcagacatgttttgattctgaaaaaagagttaagattccagcagttaggccccataccaaaccctaaaccaagaaaaagggatgggggtcccctaaccgctggaaagaggccccctccggacatctgtcaatcagaaaaccctagaaggatttcctggacaaaagtcgggt

SEQ ID NO: 285082 - DNA, 549 bp, Cannabis indica
aaaaaattattgttgaatatgatgacgcagtcgcctcagacgtctcatgtgtcagagcctcggatgccacaaatgtcacggatgccacaaataggttagcagacttctcagatgataccgacacaacaagggcagcagacatctcagatgatgccgacacaacaagggcagtagacatctcaaatgatgccgacactacatgggcagcagacatctcagatgatgacaagttcgcaaatgccgccatactacccacagatgtcggatgttcctggagatgctactacaaacttcttttagaatttttattttaatttaacgaactatcggtttaatgtttattaatattttatgaacacttatttatatttaagtatgcagtattgtaatgtttatgactcactttttattgtaatattagtgactctaaatatttacttttagttaaatgatttcatatcttaattaattaaataattttatatattaattaattaattaaataatttttataaaactaaaaaaattaaaatttaaaataattattta

SEQ ID NO: 285083 - DNA, 781 bp, Cannabis indica
gtataatataatttaatatattatttattattgctataatagtataatattgaattctaattaatttattaatttaaatttaattattttatcgactaatagttataaagatttaaaaacatataacaatttctatatataggcattaatgaattattttatgacaggataaataagttaggtgtaatagctttttattttgtgtcttattttaagagccgggtttttattagatttgataatcttattaattatttattaatttatatggatataatgtagtttataaatatattttaatttggtgtttgaaacgatatttattgaaatttattaagtccattaattaagtgattttattaataattaattttatactttactatattattgttatttttttttttcctttagttttacattaagtcataattgtctttatatttatttatattattattttctgtaagcaattattattagtcaaataatcagcgaattaatattttatacattgtgaagatttgttgcgccacaattttgttggctttgatgcctttcaaggcttttgcgcttatttttatagcttgcccctaattatttagggcaatatgattaattattccatattttaatgagaaataaaagttttcaacggaaatttttgcggtgttgagcaccacgagcttagttggattaggtgctgttatattgtcagaagagccacgttgcgtagagcaaactcctcaaaaattagttattgtgggtacattaaaaaata

SEQ ID NO: 285084 - DNA, 325 bp, Cannabis indica
gggaagctcaactttccaaaataaacagtttcctcatttactgagtaattgattaactgccttatttggtgtgatccaccactttccaattatagataactgctaggtttaggttagtaattattttgcatttaaaaaatgaaaataataattgggaaacacacaaccatgtggccggccatggtgtgactgggcctcacatggattttgcagtttccacaatattatttctattttcccaaaaatgccatttttccaattctaaccatttaaatgccaaaacttctcttaattaataaataaacctagaaacccttttatttac

SEQ ID NO: 285085 - DNA, 530 bp, Cannabis indica
gacgaaggcagttacacagaatttcctctagacaaaaggctgctgatcatgaagctgagatcaccgcccaaaaagaacaaaacaaaaggatgcaagaggtatggttgccatgcaaaaagccacgtagacagcagggatccacatacaccctaaagccatccctgcaggacttgaggaaacaccggaagagtcctcaccaagcactcagaagcataagtccaggaagcctagtcccatacgatatccctctgaaggaaaccgacggcaaaatcctacttccatcccggggaagaagaaaaaggtgcaggatctgcgaaaggtccgctcagatttcctgaaagggaaaggtccgtagaggggtaaactccaaaaagggagtcttggccctcaggatcgagaggactgaaagaacgtttctgtgcaccaggaacccggagagaaaggagggaggggacggagataccctcccgttgatttgagacatcagatcaacgggaagcatggtgatttgcgggatcacttggacaaaa

SEQ ID NO: 285086 - DNA, 561 bp, Cannabis indica
attgagaaattctcaatgaaaggctcaaaattgctagccaacctataactactcaatacacattgtcaaagaaacaatgtcctgagagcaaggcataaaaagaggagatgagtaagattccctatgctaatgccattggatctgttatgtatctaatggtaagcacaagacctgaccttgcttatgccattagtgtacttagcagattcatgacaaaccctggaaaaacacattggcttgctatgaaatggctactaaggtacttaattgggacaactaaactaggactcaaatacaaacaacaacagggaaagacagctatagaatgcttcagtgatgcagactatgctggggacagagacaataaaaaatccacatctgcttacatactactattggggggaaactgtgtgagttggaaggtacaattacaaccagttgtggcaaccagttgtggcattgtccacaactgaatcagagtatattgcaactacagaggctatcaaagaaagtatttgggtaaaaggagtcctagaagagctaaggttgctagacactaaa

SEQ ID NO: 285087 - DNA, 522 bp, Cannabis indica
gcgacactaacatgcttgcagcagagaaaatattgctctttcacacttggtttagcgacgaaatttgctctcagaattagatggaatggaattgtaattggtagtagtgaatatgccttgaacttgtgtgtttcaacagaattttgcatgctatctaagtccttaaaacttaccgagagtaattcaatcaataaagtgtgcaaatacttcccaccaacaacttgaatttctataacaactaccatcgatcctcaagtttaaaagtttgcttccataagttgaactagtgcaatcctctccactaatgtagcttagctttacaacttagatcaaaaggacttgaataggtttgaaatgtgaagtttaggctcgggtgtggtaaaggatgacatttttaggctcatgacctaactacctcaatttatcaaggactttttcttgatctctcaagcgctcacccaaaattttattttcaacccaaaatgttcactccatctaattcccactctcttgctatatgta

SEQ ID NO: 285088 - DNA, 1099 bp, Cannabis indica
acatccacacgagcttgggcagtagcaagatcagccaaggcagacttcaaacgattagaatcttgctccttagcatcaagttgagttcgtaactcttctctgacacggtcaagctctttcttgcagctctttagctccttaatctccccgcgcaaagtatcacgctcagtcctcatgtccttcatttgctccttcatgttcttaatcttatccaaggcgtacataagtccttgcataccctgtcatgcaatataaagtaccataatagtcagacacaataatatcgcgagtttgtccacacataaattgtaacatgggaatgcatgcatacctgaaaggagcgagagatggacaactccatggaagctatttctccgatgttctcaaaacgagctcgatcctctggaaataatagcttactggcctcaccaaggtgtaggccaaactcagaatgtgcagccgctgaagatggaaaagaaagatcaactgtattactcaaccaatcggtcgactcaaccggagacggtctcttgttattcttcttctgagccctcgcagaaggacaagaaggagcagcagtagtaacagcctccttctcaacactaggagtcgtcctagtcttctgtttgcgtgagcgtaaacgttccatagcaccgtcaccagccagaggaagagtgaaagaagattgggccatgaatcgatctgcaaaatctcgtccgtctgatgtcaattcaggtagaaataaaggttcgcatcccaaaatctccaaacttctttggagtatagtaacttgagacttagcacgattcttaggatgagatataccttcgggttgacggggaacgtgatcccacaaagtgctgtctcgaagagaagaatcagacaatagaacgttccaatagcgctcctcctccgcaattcgaagaacttgatcaactctccctggcgcctgcccacacacccaactaaatggaaggccaatcctacctacaaagaagacaaatcaaccagttaggcatgcatcaataaaccataacaaataagggcgtaattcaacaccaaaactatgacactcactagcaggagaccacgaatgggg

SEQ ID NO: 285089 - DNA, 342 bp, Cannabis indica
tctagtttaatactaggaaaaatattcttaacttgaattgtaccaaaattaattatacaaacaattaattccacaatgtataattattttcctatttaatattaagaaataataactagtctaaaaaataactatctagaaaatatctcaatttaactaagtatcttttcaaaaatttgaaaaaatagaaagaatctaaaaaaaaacttaaatattttcaaatttaaattcaattaaatatcaaaattaagttgtaaccacctaattttgaaaatattccattttaagtttaaaatcaacttaaaaaataactctcaagaatcttcaataaccaattcctag

SEQ ID NO: 285090 - DNA, 668 bp, Cannabis indica
aaaatgtggcccaagcacataaaaaaatggcattttttgaagcacaaacaaaggtccagcccaataggcccaaccggccctttttgcattccaagggacagccccgccacgtggcgggctgtcattcgtgcggcagaagcataaaggagcagcagctcctttttccctctccctccctcacgcgcgcgtgaagcgcacggcccgtcctgggcctttcgtttgctccactcgccagccacgcggctggctctccttcggtccggcaccccaacaacacaccaaaagtcaaacttgctccactttcagccaataagagcgagacacgtgtccaatgacacaacaaattcagccaacaccacctttctccacttgccacgtgtccacatgcaaccaatccgacagtgacacgtggcagctccggattagtttattttatttgcaaaaatacccacatgcaatttgtaataagtttaattgcgcattagtccttttacccttctataaatagaagcttaggtttttagaattcagttacagtttcagtttcagacagaaaaatccagagaaaacgctcagagcgctcagtgttagtttaccgctttcttagttaattttcttatgggtttctaagttcccttattattaaggaggacgatgaaacctagtgt

SEQ ID NO: 285091 - DNA, 188 bp, Cannabis indica
gcttcaggaaaattacacttttcattcagaaaaacctgagcctctctctctctaccttggccgaccactccctctctctcttcttccttaagatttcgaaacacttagttggttgattgaggatgtttgaaagctgtccgaaccgacttcactgtcggagtgatgtattgctgacactcatttgaaat

SEQ ID NO: 285092 - DNA, 555 bp, Cannabis indica
gtggtccattgactcatggtttgggtataacgatttcattctccatcatcgttggtttccaccacccttcttctatggacatccaaactctttcatctacagctctcaagaaagcacgcatcttggttttccagtatggataattggctccttccagcatcggaggtctcgaggtggagcctccttctctaaacatttccatcctgcacacagaagtggtaaacagacacacaaatgttctgtagttctttgagagagaactcagaggaggttagttacgacagaatcgatcgttaaggttgactcaagaatcaacgatcaagaatcatacaggagtaggatctaacacaaatttttataaaatttcaagctctgataccaattgaaagtgcaacttgtagattttaatgattcaaattaccaagttgtatatctttagattgattgatttcaagatatgaattatgaacatgaattaaaagtcaagctgtaaatcacacatcaatttacaagcttcatctgcactgagaacacatctcagccgactagtgcttg

SEQ ID NO: 285093 - DNA, 556 bp, Cannabis indica
attaatacctaaaagaaaaggtaaaaatcatgcatcaattagaagggttcaactaggtcttacttttccaagtaagatctagcttgctaaatgttaaaaatggccaaaaattaacattcattcaacatttcatcacatctaattgaacaaagacaagattacttcatcattgcaaagccaaaacactagtccatacaagggtttttaaccacccaaatctcaaaaaagtttagttcatagctgaaatttgaaactcaaaaccagaaagtgtattgttcatgaagttaaagaaaagcttaaagtgaagaaaatgatacaaaacgaagtggagagcaagagagatgagtgttgagctcaaatccttctttgaatgttgccttcttctccttcttctcaatcttcttcttctttgtactcttcttccttctttgtacttagaaactttcttttctctgctgtatttttcgtactggttattcaaagtgcagccaccatcttattctctatccttctcttttctttttgctccccaattagggtaccaaagtttacccta

SEQ ID NO: 285094 - DNA, 608 bp, Cannabis indica
cgtactgcactccgcctttacctttaggtaattgaccgatcaggtcaattccccaaatggcaaagggccacggactttgcatcagtttcagatcgttgggcggagctcttggtatctttgaaaatctccagcatttgtcgcacttcttaacataggctctcgaatcttcaatcatcattggctagaagtaaccttgccttagaattttcttagataaagtccggcggcgtgatttctacagaatccgtcgtgaacttcagataggagtcatgcagcttcgtcttgagtgacacatctgagtaatggcatcgagaatccttttctgtacatgaccccttctactatgatataccgtgctgccttccttctcattttccgagcttcatttcgattatctgggagttccctagagttgaggtaggctgctattggcgtcatccagtttggggacgtgtcaatcatttcgatttcttccgtgccagtgatgctaggctcttcaaggaactggatagggaccaagtttgtcttgtcacttacattgctgcttgccaatcgagctaacgcgtttgcagttgtatttcttctcttggaatttgtctgagccgtag

SEQ ID NO: 285095 - DNA, 634 bp, Cannabis indica
tatagtgtttttgaggatcacattttgaaaatcaaatcctttcatcacatggctgttaccaacactttaatttgtgtttaatgggataaaaacgttggataagagagctggaaacatgctcaattaatttatatacgtttatgaacgttttcaaaaatctggttccagatgttcgaaaacaaccataaaataacataaatataactattaaagaactgtttccagagaactcaaaatgtaactcctctccgagttaattcttttcccagcgtcccaatacccatttaaatgatataattgagtattgtaacagtttctaacagcgcctagaaacttatcccattaatttcataactcccatatgtaacaactcacataattacatatttatcaattgtgatccttaagttacaatctattttcagatttgtaactcatcatatgttacaattttatgtgtattattatactatatatgatataatataacctccaacacataatatatattaatctcctattaatatataatttgtcacatttatatatattaatctatattatattatatcaaataatataatattcccccactagattaaaaatttgtgacacaccattgtaacattattta

SEQ ID NO: 285096 - DNA, 595 bp, Cannabis indica
acgggtccatcaacattgggatgatgaacgtaccattatctggagctggagcgccacctgtggacgtcattaacggcggagtagggagaagcaatatcagacctctcaacctattcccagaaacgactgaccctcaagttggggacgcatccacgccaccagcaaccatgcattttccccccgtcactccggcggtggtatccgagggaatgatccagctcaccactgatcaatatgctgcgattcaggatcaactgcgtgcactacaggccgaagtagatggacaaaaccgagcccgacgccctcctcgagttcctgctattcgcaccgataaccctcaggtaacaacttctagacgtcatactaaccgtgtacgcagggaacgaagaaccaaccctgaaggtctggacctgaaccatccaacgacgagggatcaatccgcaaggtatccaaaccaaagcacacaagtcgatgaagatcctgaacgccgtaatcctcgcagccgaccatcaagagacaacgacgcagagtcagcctcttcgtcatcgcatggtcgcactccaagcaggtacacaaggtccggctctgtacagac

SEQ ID NO: 285097 - DNA, 789 bp, Cannabis indica
atttttatgtcacatatagaaatttcataattttgcatattttggtgtccggcaacattggaacgcagtgtatggcttttagaatcacatcttagtatttttagtatagcgggacaatagttagacatttggaatgtcgggaatagacgggattttagagtttcccaaaatacccctaagtaccccttttatggtttttagtgtgggaggggcaaaatggtcattttgccccatttggccttttgtcttttgtgaaattattaagttaattaaatcagttttttttaagttatttggctgaatgtagtatagtaaaatcaaggtttttctcatttatttaaaaaaaaaatagaaaattagaaagttggaaaattctctctctctctctctctctctcacgaaatccctaagcagctagggttctggattttttgtcttcaatcttgccattttacagcagttcttagtgattcaagctagggtaagcttcttgacaatttccctttagtgttcttgaaattcaaagttatgaattttgcatgttttgagagtttgagttctttacttgctgttgatgtttaaattaagtttctgcagttaagatatgttagaatatgttaatttaagcatgaattgttagttgtttgaagttttagacaagctttgagttttggaactcaagcttgaagctttaatggtgaattttgattctaagctttgaatgttgttttgttgcttggaaaatgtttattggggtataacatgcaggtctggaaagtttggttgagt

SEQ ID NO: 285098 - DNA, 566 bp, Cannabis indica
ctaaaagtatcttgtgcgtgcaaatcgtgggactaataccccttatgtccgccatagtccacccgattgctttcttatgctttttcaacacctctagcaaagcaccttcatcttcaactaccaagtttgatgctataataactggtagcgtgtcattctcccccaaataggcatacttcagatggcttggcaatggtttcaactccaacttcggtggttcttggatggagggttttggaggcttaaaattactttccttcaactccaaagattcaaagggcttcttgaagttaggaataggttgcaatggctccacccaagcaacttggttgtcttcatcttcactcaagtcttcaagctcatcaaaagaacttataaatttctcatccttccaagcttccttgtgaaatttttcagccactatcgagtcaattacacttatgcgggagcactcttctatctcatccggaaatctcatagcattgaacacattaaaggtgactttttggtcattcaccctcattgtgagctccccattttgcacatcaatcagagttctcccggta

SEQ ID NO: 285099 - DNA, 501 bp, Cannabis indica
ctaggattactagcacctggtcaggagcacccggagatttggaatctctactattacgagacatcaggtaagacagtagttagcatgtagagttatgcgtggtggcgcttatattggaaatgggatatgtgagtaattaataactgagattagggttattaccttaatgtgagcggtttgatagcctagggttattaccatagtaatatatgctgtgtaaatgatatgccatgtttatatatatgaatatattgagatttagggttatgtgttcaaggcataaccaggttggactcggtaactagaaccgagaggaaccattctaaggccttattgtaattagacgtgtgagcgcaacacgtaggtctacgctacgtagatataaataggcatgtgagcgtaacatgcaggtctgtgtcatacaggcatatgtgaatggcattactgattatatagtgtgataaatatgtttatcagtgttttatactgtcttgctgggct

SEQ ID NO: 285100 - DNA, 628 bp, Cannabis indica
ctcggctgatggaccaacccatcacgttcacggaagaagacgccaagacggtgcgcttccctcatcacgacccgttggtcatagagacccccatcgcgaataaagtggtggccagagtcttaattgacaatgggagttccgtgaacctgctcttcaaagaagccttcaccgcgataggcttgaccgaccgtgacctctcgcctagtgggtcccagctcacagggtttaacgggacgacacttatcccaatgggaaaagtgaggctcccggttactctgtgcccggatactccccaaagcacatttaaatattgcaccttcgtggtggtagactgtccgacagcctacaacgcaatcctcggccgaccggccctagtggactttggtgcaatcacttcgatccgacatctgtgcctaaaattccctacccaggaggccggagtcgggactgtgagggggaatcagggggaagcaaggcaatgttataatgttgccacccacctacccgtacttatggtccgggagtccgctgagccagagatggctgaagaggatgagttggatcctcgtgtaggatccgaaaggatcgtggaaccaatggaggacgtcgaagaaataccagtgtgcga

SEQ ID NO: 285101 - DNA, 652 bp, Cannabis indica
ttttttttttaattttagtaacctccattgctgaacattccctctccacgatcccaccattttccctcctctttgtgttcttcaatttttttttaaattcccagtaaccgaatcccataaccgttttccctctttctatttctttctcaatccgtatatatatggctattacctgttcttcatcatctccttcccccgttcaaaagaaaagctctaaaatgggtttgaaatccttagctaataagaacaagggtaaacgacctgttatggaggaggatgactctgattttgctcctccattatctaagcgtggtcgagctcctcctaagaagaaatcgaaggtgggtgcccaagaaaaaatggctcaagatgttgctgaaaaaaacgataatattggtggtggtcttcgaactgaggtttgtttaccgtttctttttagttttcccctttttctagattttgttgtattttgcatttttctcggttttgtgtatttcgtttgtgctattctaggttttcccccatttttgaaattttttcatattcaacttttgtgggttttgtgtttattgatttctcattttgtaatagttttttaatagtgtaaacaccttctgtatgtatttttttttaatatgttttttatctagtt

SEQ ID NO: 285102 - DNA, 1788 bp, Cannabis indica
gactcgtctcctaagtttggtagtagtacttaagggcgtaggggcgtgtttagtgtgatctaagccaaacttctcaagcattttcttaacatatttgcattgtgaaataaaaataccctgatcagtttgcttaatctgtaaacctagaaagaaactcagatcccctataagactcatttcaaactcactagtcatgaggtcaacaaacttgacaacttccttttcacaagtagacccaaagatgatgtcatcgacataaatttgagctacaaagatacctggttgcaagagtttaataaagagagtattatcagcagtacctctggcaaaaccatttgctagaaggaatgaagttaacctgtcataccatgctctaggagcttgtttaagcccatatagagctttcttgagtttatagacatgctcagggaacttcgggtcctcaaatccttttggctgtttcacatatacctcctcctgtagaaatccattgagaaaggcacttttgacatccatttggtgaagcttgaatttcagaaagcatgccacagccaacagtaaccgaatagactcaagtctagccacgggggcaaaagtttcttcaaaatcgaccccttcaacttgattgtagccttgtgccactagcctggccttatttcgaaccactgtcccgaactcatctgatttattcttgaagagccatttggttcctataatgtttactccatcaggtttaggaactaagatccacactttgtttcttttgaactgccccatttcatcctgcattgcattattccagaattcatccagaagagcctcagttacattttgaggttctaccagagacacatagcaagcaaatgcaattacatttaacactttgcgacgagtgaccatagttgcattcgggtccccaatgacaattgtgggaggatgagctttttgtatccaagacggtggacctttcttatataatcgagagtgaggagaagacactgtatccttgctgttaggctgaggtgctgagatggcttcatctcccatagaatcaacagatgaggtaccaccattttcagatgagactggttggctttcagatggtgttatctctggtgtttcttgattaagtggagccagagggagtgatgggatacatgggtcatgggaatcttcctctccagatccagacccattgtctgacacctccaaatcatcaaactttacattcattgattccatgactgtgaaagttcgtttgttgtacaccctatacgcacggctgttagttgagtatccaagaaaaattccttcatcactccgagcatcaaattttccgagatgatcacgatcattcagtatgtaacaggtacacccaaatatatgtacatggctcagattaggagtcttgcctttccacagttcgtaaggagtttgagatgcaccagttctcaaatgtactcgattgcaaatataacatgcagtattcacagcttcggcccaaaaccggatagccactccctttgcacacaacataacccgagccatctcctgaagagttctattttttcgttccactatcccattctgctgtggagtcttaggtgcagagaactcatggctaatacccattttattacagaattgagcaaatatgtcgttttcaaattccttcccatgatcgcttctgacccgataaaccttgccaatggtgacacccttttcattttgcagctgcagcaaagagaggagaaggccccaaaggtgtctgacaatgggtctggatct

SEQ ID NO: 285103 - DNA, 849 bp, Cannabis indica
ttttttttttaaaaaaaaaacataactgaaagacagcacccagataattacaagtgaatcataaatcaaactaagtaggaatgccaatgttgttggaagtcttgtgctgccaaaatcgcataccttttcgttatggcttattttgtcctgaatgttgtttcgagaaagcaaaccttccaatattttagcaagaagtggggtgtagtttggatattcggactgccagagaatgaaacagcacatgagtttaatgacttgtgtgtgccagtgccacatcttcaaatgtaaataaaaacaaaaacaaagtttcagagacgcttttatatactcagcacccttggtttcactacaaggaaaataacaaaggtctcaggtgttgaattttagacctctacccttaaccccatcattccctcacactttagcttcattggcttaaatttccaaagacaactccatccatttgtgtcaatccatgatataataaatttgaatacttcaggaatgtacagtctataaaataaattgttacagattgataaatactttagaattcggcaatgaaacttcagggtttgcaactatttggtcttgttagaataaatgagctgtacattaagggtgtgtttggaagtaactgtgtaattactaggtagggtaattactagggtggtaattacacagcgtagtaattacactatattttaaaatgcacggtgtgtttggatatgaggtagtaattacatatgaattcataatatcttgtttgacaaaatagtagtaattacaagggaaaataatatttttttagtggctaatatttaatatagaaattttttagtaattaca

SEQ ID NO: 285104 - DNA, 579 bp, Cannabis indica
aaacatacacaagtgaatgaaaaattacttttgttactttattgatattgaataatctggattacattgaaacagaattttatttagggcataaaacccaacatttcattactacataagttctataaccaacaatgcagtccataaatttgtttaaaatgctatattttaactttattttttgtgtagctcaaggaacatgtataataaaactaaaggtcgatgcaatattggtccaatcacagtgatgactctagtaagtccacaatagccagatgatatacaatgtggatactatgttatggagttcattaaaggttacatgaccgaaccagatgcaatgcaccgattaagagaaggggtaaatcaattaataagtagtcttaagtttgttttaaaaactttattttttgttttgtttcaataattttgacggtactaactaataaattattttgttttacaagtcaggttttgcatatcgtgcactaatgatgtgataaatgctaggggtgttcatcaaatcggtcaaacagcccgcaccgtaaaaaaatacagtttgaaattctttgtgatgcg

SEQ ID NO: 285105 - DNA, 589 bp, Cannabis indica
tactgtgacacacccaccatttggaaactcagttaatgctctcgcgacttaattcacagcatataaagtcctaaaagatctagccaacaatcagaagtaagtaaattttgtcaatgtgcgagtattcgaattgttcatctgaatacccgcgagtattcaaagcatgaaacagtgcctattcaagtatttcgtatgcggttatgccaacttacaggtcatattctatgaagttacccaggtttttacctaaaaaacatagcctcatgcataccatctataaacattcatccttaaacaaccctcatgcacactaaaaacccagaaaatacagtccccactcaaacagaaaacgaagcacggtgaagattcgaaaactaacctttttctttgccaaatctgttcccacgaatcgcccttgacagcaatgtagaatcaagaagaacccacgaagaaaggcaaaaatctgggcaatttatggaaatttttcttaagtggtttctctgagagtgaaggaacaaagaagttaagggagttgaaggaaaatgagggaaaatggggatttttggttcgaatcagggggtttaaatac

SEQ ID NO: 285106 - DNA, 565 bp, Cannabis indica
atcaccatcatcttatgtctatcgatccaagtagcttgatgtatttgaggtaagaaactctacatttacttatttattgatcacaataggagaattttcgtaggtctccttttcttatttttcagaatgaaacatgtctcagtaaaactgtcatatctctttaaatactcatctgattctcgcaatcttggtgtctatagaaagcttattaaatttcctataattcttatgaagaaaggttttactgaatcgaaatttatctatgtcaaaaattagtatttttacgctgtttgttgtaaatcgtttttcatattttctatataagttgtttcagtaaaatccgaatatctctctgaataatgatccgattctagcgatcttggtactgttgaagagataattcaattttctaaatgttttatgaagaaaccattcactaattattgattattctaagtcaaaattattgttttattgctgtagttcgaaatccatttgtttcaggatttctagaaaactgtttcggtataatatctatatctcttacgttataactccgatttta

SEQ ID NO: 285107 - DNA, 366 bp, Cannabis indica
gcgcccttcagtgtttttattattttctctttttcctccggatctaggatccttcctagccggagtaccttggtggagtcgaggtcgcacactgatatctcctcgacatcctccatcggttctacaattttctcggatcccactcggggatccaactcatcttcttcagccatttctggcacaatggtttcccggaccatcaaaacgggcaggtgggttgcaacgttgtaacattgcctcgcctccccctcatttcctctcaccatccctattctagcttcctgggttgggaactttaagcacaagtttcgtatggacgtgactgcgccgaaatctaccagggccggtgttggaaattattttacc

SEQ ID NO: 285108 - DNA, 54 bp, Cannabis indica
taagttctttatctgcttattggaagctcggttatatacgcccatggtcccccc

SEQ ID NO: 285109 - DNA, 828 bp, Cannabis indica
cctctcaaaagggtacatccatctcataaacacaggtccaccaaaattgcttttcaggcaaatgtaagaccaaatgaatcatgatatcaaaaaaagctggaggaaaaatcaactccaacttacacaatatcaaaataaggtctttttgtgcttcctccatatctttaaagtttatggttcttgaacatacttgcctgaaaaagttgcataattcagcaatagttgtcgatacatctttagggagaaacttacgaacaccaattgccaataatctttgtataattacatgacaatcgtgagacttcaatccaagaacatttgataaatcattgttcactttcttcttcaaatttgagcaaaatccatcaggaaacttcacgtccttgataaattgacaaaatttcaatttttcatcagctttgaggacgtaaggggcgtgtggcttcattaacttgccattatcatcttcataaatccacaaccattcccttattcctaatttcttcaaatcatgtctcgcgttagttgtgtcttttgatttatcgttgtccaagattgtgcccaacagactgtcacacacattcttctcaacgtgcatcacatcaatattgtgtttcaaagtatttgtacaccaatactcaagctcatagaagatactttttttcctccaattttgatcttctgcaactcgtctgcgtttcacacctccaaattgctcatgttttcctggaatttgtggcacaagtttgtttacttgttcgagaatttcctcacaagtaaaacgtcttggtggatgtcttctttcaatttctccatcaaagttggtgt

SEQ ID NO: 285110 - DNA, 566 bp, Cannabis indica
aatttctaaatcacattttgtttaactaagagaacaaaattggaatttttgaaatcggataatcgagtaaagagttatgcacgttttagtgccgaaaaatgcaagttttgaacctacctgattttcggcctacctatttaaaataggtagtccgttttaaaataggtagtccgtttttcccaggattctttttgaaaaatgtgctaacggctagtttttgttcctacactatataaacttgtttttcactcaaaaataaaagttggttgagcatttatttcaaatatctaacctatctaagtgagattaatgagcttccaagtttgaaatccaaacaaacacttttcacacactttgagccaaaatttgattttattcatcttgagtgtgcttgcttttcactctaggtttccattgtatcatcatatttctagagtgattttagcttgtaatatcaaacacatttccatattgtgattgaggtgaggttggcaccggtattgtaaacaacccggtaatagtgagattggcacttcaacaatccgagaaagaggttaatagtcctc

SEQ ID NO: 285111 - DNA, 360 bp, Cannabis indica
tatcagaaagtataattagtactagaaataactatctagaaaatatctaaaatttgaaaaagtatcttatttaagttgttatagaaaaattgaaaaatattccattttaagttgatgtatattttaaaaaatatcaacttaaaaaatatcttaagaatcttcaataaccaattcctagaattcctcaacttaattttgaaattcaaaagtatattcaaatttaagttgataaataaaattagttagaaataaccaatgaaaaatacaatagtttttctagaaattaattcattaaactaagtgtgtttttcttaaattaatttgaaaaaaaatgaaattaattatgctcctaataaattt

SEQ ID NO: 285112 - DNA, 1214 bp, Cannabis indica
cccgtgctgcctgaggtcaagaagggcagggaagcgatggctcatcacatgaaccggctggttcctgaggtcgatgagcagctggctggtgcggaccactcatctctggatgtgttggtgggcggagtcttgcagaagcttaccagggttagtcttttcttttcgacacttcccttttagcttttcatacttagcttcatatgctgaccttttcctttgtgcaggccggtttgaagctgggttatgcttactcctgggctaaatcttctgcttccaagagtacgactctgtccgacaccttgagggcggaggcggacttggccaagaaggaagctgaggaggccagggcgaagactgcagctattcgccatgagttgggtgaggccaacaagaagctttttgctgctgagaagaaggtcaccgtgctgacaaaggatctcgaggctgctgatcgctttgaggaaaccatcgagtccttatctgttgatgttgatcgtctttaagatgagaggacttctctgcggcaggtcctccttcggttgaaggatgataaggacgctcagacggtcgaggcgaaccgcttgagggagaaggttgatgctttggagactgtcggcctcgagctcttctttgatttttggaaggctaatccccaggccaacttcgactacttaggcgacgccaaggaaatgtacctcgagtactgcgcggcccaagttgcctatggtgggaaagaggtggctgcttcaacttccagccaagcttctgactaggctgctgatgcttctcctgctcaaataacagatcctcctgctccagttggctcagaagaaccaaatccagggcctaggactccagctgtttgaacattgatctttttatccctcctatttatatatatattatatggctggaagtcctttaagacatcatgaccggccaagcagtctttaaacttggaattaattttcattttttggacaacgggctgaccgggcagcttttaatcccgatacattttgctcttgttatccttaatgaatttcattctctgtttataattgtagtgcaattgtttttgttttatgtttacctgacgtgctgtctttggtgtttaggaatacccttcttaggaccatatctcccacaaaaaatttccgagctttcacttgtttgttgaaataccgagctactttttgttgatgagctaccaa

SEQ ID NO: 285113 - DNA, 556 bp, Cannabis indica
acttactatcttctcggcaatttccttgtcgtaattagtgacaagttttgttctcttggtctgagattcgatccaaacacggtggcatgggggatcttgaacgtcaagatcatttttctacattattttataacaattaaatgagtacaaattacattttaaagcacattattagaattcaagcattacttaccacatcttcccgtacgttcaccattccactccgaccacttcgaagtctggattggaacattaacgaacgttccttttgcaccttactcaatacctacaatgccaaaaaaatacattagatacatgaacttgtatttaagagtttatcttagtacaaatataattagcgtacttaaaattcaggagtcaaccaatcagtaaggtcgattttgagatgcttttcagggacttgtgccagtcgtttcacatccttctcttcaattgcaggcattataatgtcttttgtcatcctattcttaaactctttcattaacttcccagcaaggatcagacaatcatgtttgaaggaatccggcacaatgaa

SEQ ID NO: 285114 - DNA, 821 bp, Cannabis indica
tttttcctgaagaatctaattatcatctcaggaacagaagaaaaacctctacaacatgatcataaacatagaccgcctaatttaccagaatccttcccttgggtttatcaaaattagcaaactatcatcttagataagttatacttatatatttaattgattatttattagttttaaaatagaaactaaattaataaattaaaattttgagaaaatatataaaattaggaattctagtatttttaaaagtatatttcactcctttattcaaaaaaaaaaaaaagtatatttcactccttataaaaaataaaattaaacatgactaaaattataattaggagacattttttactatttaaatgattagatggtccttttaagtatttatgataacaagggatccaaattagtctttagcaaaattacagggaattaaaacggtattaattaaagttcaaataatttactttgttaaaaaagagtccaaacaaatatttagttttacatgtataaagcagaatattttgaattctaactttggtcacgtcaaaaaaaacaaattctaactttgacactctaaattattattattattattattattattattattattattattattattgaaattggtgccatcatattgtaacaacactatcttactagaaaataggtggtgccaaaattaaaaaaaaaaaaaaacaaaaaaactacctaataacgacaaaggacacgacaactatataggtagtcttaaattatatgagtataaatagtaaaagaacgaccttcatagcttcggcagtacagtcagagac

SEQ ID NO: 285115 - DNA, 657 bp, Cannabis indica
gtgaagaggagttttgactaactagttactaatttgtatattggaaaaaaaaatatagaaattttattataattactaaaaactttatatgtaaaatattaattgttatataatatgatttttctatgtaattaccaattattttgtcacaatgtaattgtaatctttatatttaaataaatgatgcattttaaaatataatataattattagatgttataattgaataattaatatcatagtaattatacatttacattcaaactcaccttaataaataattggacattttacattcaacacttttaattggatctagtttacaattatgatactgaaaagcgattaactctataacatctgataaacagtagtagctaatgaatatatggacagaaaataaaaagagaacactaaaattatagtagttcattttctgtagcacgaagttaatgaagataagtatacttagagcttttattattactaaatgctaattgccttacaagagaattcaagaaaaaaataattaagtctagtttcaacacaatttttaaaaagagaaagtgtgaatagagagaaactctaactttgtagaaaaaaagtaaaatagtgtaaaataaatgaggtttaattaaattacaataaaataataaa

SEQ ID NO: 285116 - DNA, 392 bp, Cannabis indica
taggagattctaagatcgaggattatatcatttcgggatagaatgtcgggattatagtcatctgtgccattcaatttcataaaaaaaatagaatgacattataagcagatgatttataaaccattcatccaatgatatactatgtaagcaaattcaaaatgaataagctaagaggaataagtaaaggataatttcgatttaaaataagaatccaacgatgtcccggtaggcgagagtcaaagttattcttatttatataaacttcttgtttcatattgtaaatacttgtctaaggtgtcatctattgatgaacagctagatgttgcatttacaaatatttatctatcgagatctaacactattatgtttgtctaatggatgacaattcatta

SEQ ID NO: 285117 - DNA, 780 bp, Cannabis indica
cacactatcaatcggaccatcggaccccccaaaaattgattggtccgatggtcttgtccttgggtccgatgggattgggggtctgatggtcttgacgagtatgttgttcttggatccgaccaatgtatagtcggcaccgtgcggtctcgatcggagtagttttgtgggtctccgtcggaggcgtctcggtcggaggtggcggtcgtctcggtcggaggtggcagtcgtctcggtcggaggtggcggtcgtctcggtcggaggtgggggtcgtctcgtctcgtggtgggaggtggcggtcgcgcggttcggttcaggcgaagtgggtagagagagtttgtttgagaaggagagagaaagggttagaaattatgagggtattttaggggtttgggtaaaagtatcctattttaaaagttaccctaattattggttctcctaaccaattatcccttataaaatgcataaaaagtcaaatttccctaaggatatctgtttgtgtgaatttaccactaaaacagagaatgaaactctagatgagaggagacccaatatatatatccaattgaaatttcttgctaattcattaaaaagggtgcgtttggaaagccacaatgtaaatggatttgtgtgtaattggaggtaattatacaatttgacatgttcgtctgaccatgtaattacattgtaactgtgtaattgaaagtaattgagggattccaattaaactctctaattctcatggcctcccatgagaattgaatgtaattacactgtgtaat

SEQ ID NO: 285118 - DNA, 55 bp, Cannabis indica
tttcgaaataatgaaggaagaagagagagagagagagtggcggccaagatagaga

SEQ ID NO: 285119 - DNA, 545 bp, Cannabis indica
agtgagagcctgttaggctcggggtaggtggtgtgggtattaatcttccactaccacagggctgagagcaaatgaatgctatgaggcaagagattacctgagtggccaggtagtagaatttacatagttggttccgggcagcgcggtgatggaaactgacactaagctggactgattggtaaagttttgttttgatggagtagttgctaaggctgctagaagggttaaatctaattaaatgtgggaagagtatctcattcaaaatgtagatttaatggctaagcaactagaagttgtctggttttgtgctcagatggttgagctaacccttactgttgggggtgcaagaactaaatcacgaaagacataatacgaaaggagattcatgaaggtaaatgtccagcgttagattggctaaaggatgttaactttaatgatcttagaaaaaaaaaaccccaccagctatgggtcctagtgggagaattcaaggtaaccaaagtttccgacatggtgggaacaaagatttgtaaacccattcagagggt

SEQ ID NO: 285120 - DNA, 498 bp, Cannabis indica
cggggattagggttatggtcaggggtatgggcgtctgatcataagctgggatatatgtatgttatatgatttatgcttttcttattgagtctgtcgactcacagtgctatgtttatgtgtaggtaagggcaaagctaaggccgaggaaccgtgaggacgagcagatgaagattgtacatgtcggggcggttaggcctggagcgtacgatcctcgggatatcagggcgtttgctgttagtcactgggcgacaaatattttgtaaatgaatagcaaacttttgtaaagtgttttgtaaacgggatcccgaaatattttgtatgtaataatataagtatttaattaaataagcaaattttaattaatcacgattttcattaacctcgttgataagcaacgagctgcacagtatgtttaaaatcacgttaacacgcctatgctagtaagggtgttacaaaagcacttgaaagaataaagcatggatcatcacagatctgcct

SEQ ID NO: 285121 - DNA, 613 bp, Cannabis indica
atctatatgttattttttgttgttattttcttgttatttttatgtattttttttattattttcgtatagtttctataaaaaaacgtaaaaatatatatatatatatatataaaaaattaaacatagaaatataaattttttaaaaaaaaaaaaatgtatttttatgtaattttgtcttttatttttacatcaaaatctagggacatcctaaagttcagttaaaacataaagtgggatgacctatttatttatttgggaccattagatttttggtgaatttaaataaatggtctagattttattttaaatagtcaaataatttttgagtatcttataattaaggtattcatgtcatttgagttggtgtacttataaccgaaggaaaaaaatattctttctcattttctttatcttaattttttttttggtgattctacaatgcaccccaaggaatgtactgatgcacccttaacttgtttcggcatccagaaaaatttttagtctaatttttttttcatattcatgtacttatagctatttaagatatcttacaaaaattttgaaaaaattcagaataatttacaatatagaaaaacaatgttcaaacagtcta

SEQ ID NO: 285122 - DNA, 628 bp, Cannabis indica
aatcctttaactgacgggaggcataagcgataacccgatcggcttgcatcagcacacaccccagaccctgtctggatgcatcgcaataaactacaaatttctcgttgtctgaaggcaaagctagcactggagcggtaatcaatctctgtttcagctcctgaaaactagcttcgcacttatctgaccagacaaaccgctgattcttctttgtaagttcggttaagggtgttgaaatcttagaaaacccttccacgaacctacgataatacccggctaaacccaagaagcttctaatttctgtcactgtcttcggtctcggccaatccctgacggattctatcttcccgggatccaccttgatcccatctttgctaacaatgtgccctaagaaggacacctgagatagccagaattcacatttcttgaatttggcgtaaagcttgtgttcccgaagccgttgcaaaaccatctgaagatgtaactcatgctcctcttctgactgagagtacacaaggatgtcgtcgataaacacgataacacagatatcgaggaaatccttgaataccctattcatcaaatccataaatgctgcaggagcattggttagtccaaacgacataaccaagaa

SEQ ID NO: 285123 - DNA, 540 bp, Cannabis indica
aattataaataatttttatataaatttctattataattatttttaatagttaagtcatttaattataatatttacaatgaaacttaatttttttttacacaaattagaattctcttcttgtataataattttttaaataattaattatttttaaatgatattaaattattttttttataactagaagaactaagtatgaatttttctattcgagtttgaggttgcttcattttctaggggagcttgactttgttttttgactctggtttggttttttgagtaaatgactacttactaaaaaaataaaaaaaaaatggaggagtttagccatttttttttgaaaaatacattcaacctattttattttctacttttaaaatatttaaataaaaaactaaataattaagtgtaataattttaaattaaagttataagtataataaaattttaattatgaaactatatatataattttaaattataaagaattttctataaaaattttaataatttaagggcaaaaaaaattactaaaagatt

SEQ ID NO: 285124 - DNA, 613 bp, Cannabis indica
acgtaaataaatagttaacgatttaaaccagattacggaccgtttataataaataattcatttatatatatatattttatatatgactatatgtataattttgtatttttttttttgatgtcaaggtttttattgcatgaatttttagattttttatgtttgactttttgagtaatatttttatattgttatttatatgttatagatttgttacttatcatgttaagtatatattttgaaaaataaattaataacttaataaaaatagtagaattactttaaaaaatatgaataattataaattccactgaaactgtggtttcgaaccaaaccaaaccgttcttaatagtttagtttgagaaatttattagtctagtttggtttctaatattgaaaaaactgttatactgatttgattcaaaaattataaaaaatcagaccaaattaatccgtgaatacccccaaatcttattttagaggaatttttttaagagacgatgtatatcaaaaatactaattattttttttaaggtaaatagcggcataagtacccaaagttttaagtttgtaagtggcataaacccaatatttatttttagcggcatagtaccaa

SEQ ID NO: 285125 - DNA, 614 bp, Cannabis indica
agcaataatagtatacataaagttgtactgattattgataaatgtatgttggctagaatactgatcgatgctgtcacattaatatggctagagtatgactagcatattgagtataggctgacattatggtcgatagtattgtcttatgaacgttctagactcagtaccgtgtgggacacggggattagggttatgatcaggtgtatgtgtgccaggttataacctgggttagttgtatgtttatgttatgcttttcttgctgagtctatcgactcacagtgctatttccatgtgtaggtaagggcaaagctaaagctgaggagtcgtgaagacgagcagatgaagattgtacatgtcagggcggttaggcctggagcgtacgatcctcgggacatctgagcttttgttgattagtcgctgggcgaaaaacttttaataatatgtataacaaacttttgtaatgtgttttgtaaacgggatcccgaaataatatctatgtaatactttaagtttttaattaaataagaaaattttaattaatcacgattttcaataacctcgttgattagcaacaagctgcacagtatgtttaaaatcacattaacacgcctatg

SEQ ID NO: 285126 - DNA, 674 bp, Cannabis indica
agttttttttttaataagtggagtgttatttagtaagtttagtgggtatagtaaatagaacctaccccttaaaaaaaattatatagttatctgtaatttttcctcactaaattaattatatacaattttccctttaatttgtaactcctccctccgcctcccggtgttactaaatattatactatctcaaatagttactaatttagtgtaaaatttatatcaattaagtatataatcttttacttcataagtctaataattcatatcacaatattctacaaataaatatattttacttaaacaatttcacattttatattatttatattaataactaaatataactaatttatgaaataattaataagaattatatcatagctactagtaagaatttaaaatcttaaaataatttaataaaataattattcattaaattaattaaacactacatattttttttaaaaaaaaaaatccttattgacactactataaatatgggctttagatgcactttttaagacctttcaatctcattttttacaaaattcgccactaatgcttttccagacaacactgtaaagttaaacataatcgacgttacagtgtacattatagcgtcaattattattaaataataaccgacggtatatgcacactatggcatcagttat

SEQ ID NO: 285127 - DNA, 751 bp, Cannabis indica
attatatattaaactcttatcttcttataattattaataacgcaaatggtcacttaaagtgtttttttttttttccaaatcaaatctgatacataaaagttgtaatgtagccttatacatcgttctttttatttttatttttttctaaatcatttatgtggaagtgggaaaaaaaaaaggagaactaattccctaaaatctacttggactccctaccaatgtttccctaaaatctacttggactccctaccaatgttcaaggttgaaatatttgatccctacattgatgtcaaagtcaacaaaatgggtcctatcctaccacacaaagtggattagatagaagcccatttataaggaaggacaacttcaactactccctatctctccttgtgtccttgttctctcttttgttaataaaaatcaattcaaagtttatttgtcacattttaatatgagtgatgatacattacattttctttaaaaagatagaaatttttattgatctcacttttaatcaactgcaatgaattaattaaagcgattaaaaataattaataataataattaagcaataagatcataaatttgttatagagactcgaccccgtaatagtggtaatagtctactttctttttatttatattaacctgtggaaaagaaatcagaagttcttgatcttcctcgaaagcttttataaaaatttagcagcgtaagtactctttcgaatgaataattctccccttggataac

SEQ ID NO: 285128 - DNA, 587 bp, Cannabis indica
caagaaagttaaggccctattttcaagctcttcctgttcgggtgtacaatgaccagccatttacgctaaatattgcaaaagttagatgcctttggacagctactcaagtgggcagtggagttgggtcaatacgaaatttctttccaaccccgaacagcaatcaaaggccaagccttagcagactttgtggtagaatgcacaagcaaagcagaaagcataccagaaagcaaccccgagctggtacaaatacctcagccaagtaacaatgaagacaagccgacttggaaactacacgtggatgtgtcagctacagatcaattatctggtgcaggaattgcccttgtcacacttggggggcaacacctgcacgctacagtcaagttcagattcaaggcatctaataacgaagccgagtatgaggctctaatcgctggcctaaagttagcctaggagatgaaagtcgaacacattgaaatctgtagtgattcacagctggtggtaaatcatgtatccgaagaatacgaggctcaaggagaaaagatgatagcatatctgagaaaaattcatgacttgcttgcacaattcaa

SEQ ID NO: 285129 - DNA, 802 bp, Cannabis indica
attaaacatagaagaatagaagcaatatgatataatggaaattagaaattaacattcaataataaaattaagaattcatgtcttgggttttgaaataacccttaactaaaagaaaactactcagaactagacattataacgaaaatcataatatttagtaagagtagaaggagaagaaaagaactagaatgaagaacactttgaagccgatctccgtctcttccttgctctctctctctgagtttctctctctaatttgtagttttagacttctcccattgttagcctaagagttcatagttatagtgcttgaaaatatatatgaatcctattagaattaggattctatttatagtggatagataaatccccttagaattaggattctatttataatagtattaggaaatatctcactaaaagaaaagataactcatcttttaaacaaaagataaaacaaatcgcaactcttcttgaaaatttatctttttttattcgctatcttattctctttcttaaagttaatatgtgtgattttacttccatgaacatgtgtagctaaacactttattaggattagatggatattgtttgatattgctttatgatcattaatatgatttattttcctcccagtttctatgtattctatttcattcgtgcttaattacttttaattgtttgatcaccaattaattgtttatgattttgatgcgagatctgagaagtgagtgtcaattatgctatagtgaaatagaactgaatttcaatataggacgagagtacctatatggtttagata

SEQ ID NO: 285130 - DNA, 521 bp, Cannabis indica
tttgatgctagttaaaatatgacaatatatataaaaagaaattaattgtctaaatttttatacatctctaacccatatgaataaattttgaaattttatttttaacaaaaatattgtataaatgaagcataaatttcacaactctatctcgttaataatttttctatttgcctcgtggtatatttcgccatggcagccattttctaagagagtgggtgtgaaactaaattgtgagtggtttcaaaaaaaaaaaaaatagcttcgattatggtgtaggttttcatgatagatactcatttgcttgattttttaatatagaaagcttaactagtttagtttacagtattagtaaggggataatgttgtgaaacttttgcttcattcaacacaatatgtttttgttaaaataaaattttagaaattataacaaaatttatttaaaaataactttggtataaaaaaataaataataataataaaactttaacatacggtatatatttgcatatattcaataataa

SEQ ID NO: 285131 - DNA, 660 bp, Cannabis indica
atgtgaacactcttagtctcaagcttaacaaatataaatctaattaattattaagtattaattattaaagcttgtacataacactgcattatgagtttaagtacttagggttggtttggtacaacttttagaaaaattaaaaaatatttataaaaaaatatgtgacaaaaaagtatttcataaacaattaaaaaacaaattattcaaaaatttatgaaaaaactatcattaaaagttaaagctggtacaatctaacttttttttaaaaaattattttgatcaaaatgctccataatatatttatttatactaaaatatatttacttatttattatatattataataaaaaaaataatatttaaatcaattatttcttattttgttttaaaaataatttttatttttatttttaatattaacagatcagattagcctaaagtttcctacatgagtttttaattttctttacacgttgataaaatataatttaaaaatactataaattattttttattcatatacgtataatttatattttaggaaaaaattattaaaaatatattagtgttgtcagaggaatttagataataccatattatgcgagtattcaaataaagttagaatactcaaaaacatatatgcgagtactcacttagaac

SEQ ID NO: 285132 - DNA, 523 bp, Cannabis indica
ggttcgagtttaggtctctgttagggttttgatctgggttcgggtttgggtttaggtcctagtcttggtcctagtcctagttcagttctagttccatttgcgattctaacttcgagtttgggtttcagttcaggtcggaattcgagtcctcgtctaaattagggttctggtccagatttcaatataggtccagatcaggttccgggtgtgggttcgcgtcctgggtcctggtctaggttgggtccgagtcccaagttccattcccgatatgagtttggattcagttcttggtctaagtcgttggttttgatcctggtctgggttcgagttttggtccaggtttgggtctagctttgggtctgattttaggtgtgggtttgagttcgggtccgagtctgtgtccatgtttgtgtcctggtctggaccccaatctgggtctatgttcgggtccaggtccaagttggggtctcgagtgcgggtccaagtttgggtctgggtcaggatctcgatcctgatctaggtc

SEQ ID NO: 285133 - DNA, 1095 bp, Cannabis indica
gagctgactttacatttgaatgggtgacacgtgtcgaatgctgatgcgtgtcgtaagccacaacaaatttactatttttttaattccaatacttccaattattttagtataatcgtaagtaagggtcgatcccacgaggactatgtttattcaattattcacaaattagtaagaattaggaaaaagaggggttttgaagattagaataaaaataaaaattaaagaaaagaacaaatttaaagtaaagaatacgatatgagaaactagttaaaggttattcgccaccctcaacaatcattcctaattcctattaaagaatgtaattttcagtttccaatcaaactattaatcccgcagataacgctgaagcagtcaattatcccaatctccctattgtatgtaatcaaggcgaagcgctcaataattaactcttttacctaaagcagtaaatccatgaagcatgcaatttatttaacttagataaagcattgagatttatggagatagactaatctaggcaacaaatcaatgaagcatataattcatttaacctaggttctattcttcatcacaaattgtaatttgtcacaaacacttagaatcctagactattaggtgaatagtaatcctaagatgacggtagattaaagtaaaacctaatttagcggccgtctaaacaagattaaaacaataatcataacattgaacatagaagaatagaagcaatttgatataatggaaactaaaaattaacattcaataataaaattaagaattcatgtttcgggttttgaaataacccttaactaaaagaaaactactcagaactagacattaataaaaatcataatatttaatttgtagtttttggattctccctccatttgtagtctaagaggtcttatttatagtaatgggaaagttagttgaatcctattagaattaggattctatttatagtggatagataaatcctcttagaattaggattctatttataatagtattaggaaatatctcggataaagataactcatcttttaaacaaaagataaaaaatcgcaactcttcttgaaaatttatctttatttttgg

SEQ ID NO: 285134 - DNA, 582 bp, Cannabis indica
gagtattcgatggagtatttgggttgttaaagtgggcgaaaaatctttagggcccgtttggtacgcaggattggactggattggactgaaaaggattggactggattggacaagattggattatgctgaaagtaatcctgtgtttggtttaagaatggactggactattttatttatttacttttagaaaaaaaaaacttaaattaaataaaaatatataataataaattaaaattaaaatatataataataaataaatgtaaataaataattcgtcaaaaaaaaataatatatcatatataattaagaatacatcataaatatataataaaatattttgtcatattttttatttaataaataataaaaatagtaaaataaaaatacttgaataatataaaattgtttatcttaaacactaatttaatataaatattaattttctaaaacatttatataaattttttagtaatttaaaaataatatataattttattgtcatatattttttttcatagaatcaatttaagtaactattatttaattaataatattctaaattttaaaaacttatgtataata

SEQ ID NO: 285135 - DNA, 574 bp, Cannabis indica
gtgacactcaaccattcgtactactcacaatgttacttgcggaagtcatcttcattgataggttctacaatctagtcaaatcaggttttatatgtaaatatttaatattaatttgaccaacacggattcataacatcttcattgtaatggtagttggttgttcacttttattattggaaaattgtaatgttgaatactttattgtaatcttcttaaccaagtatggactatttcttctaattttaatttgtagatactcactaaaaaaatcaattgttgtcttatcaatatttaattttctgtgtacgtctcacagtgtactcactgacgttaaatggagtatttcctatactttaaataacgtacgtcagcgatttcacagtgtaacttcaaatcaaactcactacattatgacatgcagatctcatgggattccctgatttgagttaattaagatactatatgaaaacacgaaacctacctatattacttaaggaggtttaatatttgttgggctctaatatactaatatgacatttttcttattaaaatttggacaaatcaattaggtcag

SEQ ID NO: 285136 - DNA, 702 bp, Cannabis indica
tgctcttttttgatgcataattttttctttttggacctgccctttgggtcaggatattttacttttggcttgtttttcatctatccgtgtggtatgctttagtacccccctgagtggcatgaaaattttgtttttaaggcactcggttttatttaaaatacagaggttgcatacacttagacaatacaaatcctttaaacaaagcctaagctatacattcggactattggtaatattttcggaggtgatcggcgttaaaggcccttggcacaatggttccatctatcctttttagcttataagttccggagccgatttcgtcctcgatttcatatggcccattcccaatttggcccaagtacccccactccgggttcttgggtggctgggaagactcttcataataccatatccccaatagcgaattttatgtttttaactttggagttaaaatatttggtcaccttcttttgataagcttccattcgtatttgtgactcgtcccggagttcttcaacttgatccagcgcttcctgtaataaagcttggttcgtagctggatcgtaagtcgttctcctgtgggacgggaataacgtttctaccggaccattgcttcacaaccgtacaccattgagaaaggcgagtgaccggtcgtggttctggggggtcgtccggtaggcccataacactcttggcaactct

SEQ ID NO: 285137 - DNA, 690 bp, Cannabis indica
atggaccgtggtgtgcatcagggaacacgagctccaaagcatgaacaatgctttgatgcctaactaacaggaatgctaagttatcaacatcactaatcgtttctttcaagtttctcataaaataggtccaagagttgtagttttcgctgtccagcgaaagctatcgaaaaatgtggctgcctgaatccagtgccattgcacacaatattttcctaccatgcctagtctttaagaaagactcatcaacacatacaataggtcgacaaaacctaaacccatgcctacaaggaccattgagaagtaacaatatatacttgaagcgaccatactctaccataaaatctgtgatagtacctaaatttctcaactttagcatgtgcaagtaaccaggtaattttgagtatgaagcttcaggtgtaccctgaactaggtgtagtgccttctctctggacttctaagccttttcataactcattgggatcccgaaattcttgtacatatctttccttatgtcagaggccaaatgaattgagccgtcagttacgaatttatccttaattaggtgggcaattattgaatttgatgcttgacgattatcttttctttaaacatcaagagaatatggatgtaaattttgaaatatagtcacctcaaacatgttagaaattatgttcttcttcgctcttaatc

SEQ ID NO: 285138 - DNA, 644 bp, Cannabis indica
tatatatatatatatgcatgtctacattcatcttacatatttatgattgattctgtcacttatataaatttttataagtttttttcataagctattttgtcttagttttggtattagtctttgttatattgtttagtttttatttattactggtctctttcagataacgacctaattattgtatagatttcattatagctcatataagtatttcttgttagaaataatagagagattacaagggaagaataaaataagatgaataaaagactaagacaattacaactctaaacaaaatattacaaggacaatatattaaataaagagttacaatcccaaagcacaaaatacaaataaaagaaaagagttacaactcaaaactcaaagatacaagtaaatgtaaactatataaaagtatatatataatagtgtatatatatgatatagaatatatataatagagtatatatatatgatatagaatatatataatagagtatatatatatgatatagaatatatatatataatagatgatatatagtagagaaataaagagtgtatatatagtatgtatatataatatatatagtactatatagtcaatatataaatatatgatagtatatatataggagtgttta

SEQ ID NO: 285139 - DNA, 700 bp, Cannabis indica
tctccccctgggctcttggtgcacggaaacgctttttcggtcctctcgatcctgagggccaagactccctctttggagtttgcccctctgcgaacctttccctttcgagaaatctgagcggacctttcgcgaatcctgcacctttttctttttcccgggggtagaagtaggatttttcttttggttcccttcagcgggataccttatagggcttggttccctagatttttgcttttgggtacttggcgaggattcctctggctcatttccaagtccagcagggatggctttaggatgcacgtggattcctgctgcctccatggctttttgcatggccagtatcacctcttgcatcttttggttttgtgctttttgggctgcgatttcagcttcatgatcgacagcatttttccttaagaacaccagttctaagtagctgccttcgttgtaggcgtactcatcgaggtttccttcgtaatcgtcatcaagaatcccttcttcttcctcagaaccctcggttgctcttgaggccacgtcctcctcattcggatcttgagcatcttgaagagggcgaggttgacgtgtgcttcatgtctccaccattgttgtaatgtagtgtgtgtttacagaagctttcttcagctctcaatgaaagcaccaaaatgttgaccgaggttttttggcaaccaataaaataata

SEQ ID NO: 285140 - DNA, 520 bp, Cannabis indica
accacacttccggctgggtcaaggctctgataccatttgtaacgtccccgcttcaagactccattgagcccttacacccacggactaatggcttgtggtgtacatcgaaccgctcaaatcgcccgcactacaaaaaaaatgcagtttgaaattctttgcggtgcggttgcggttattcccaaaccgcgtggtgcggtgcggtttgcggttttgaattattaaatcgcgattcaaaccgcaccgcaccgtatcttttaaaatttcaatttttatatttattttattaagcccatacatatgagcccaacccaagcctataaatcttagggcaaaatccataactcttcacaaaccctctcttcttagcaacaaacccaagcccatacatgtgtattaaaatttagagttggaagtttgtgtttgttttatttttaatctattgatgtaagtatgttagttgtacatttatattgttgttggaatttaattagtttcaagtttgttattttgatttaggtgt

SEQ ID NO: 285141 - DNA, 517 bp, Cannabis indica
cctggacacaaacccggacacagactcagacacgaactcaaacatccacacctagaatcagagccaaagctagactcggatccggaccaaaactcgaacccaaaccaggatcattaccaaggacttagacctagaactgaatccagactaagatcgggattggaacttgggactcggaccaaagctagaccaagacccaggatgcgaacccacacttgagcctgatctggacctagactgaaatccggacctgaacacaaactcagaccaggttatcgaactacgacccgaactcaaacctaaactcgtagtcagaatcgtaaaaggaaatagaaccgaagtaggactagaaccaggaccaggacctaaaccaaaacccgaacccagatcaaaaccaagacaaagacctaaacctgaaccgagaccagttatcgaacccgaacctagaccgggaatcaaacccacaaaataattgggacctcgacccaaaataaggatagggacctgggaaacagaa

SEQ ID NO: 285142 - DNA, 662 bp, Cannabis indica
actaagtggtatttgtgtaataaaagcaactttgtaagtaaaaatgtagtcataggcgtgtgtgagtaattttgtaataaattgtataaaatggatttttcatgtaaaaatttctatataaatatatatatatatatatatatctataactactataaaagtgagaatattgttttgggcttccacatattaaattactaaaaagtcctcacttctcacctttaatttattatgttgaggttaatcatatacaaaatatgtggtgattaattgctttttttattttttattaataactactataaaagtaacaattttgttttgggcttccacatattaaatttattatgttgaggttaatcatatacaaaatatgtggtgattaattgtttttttttttttactaaattatcatttatatgtgaatgattgagtttaattgattaataaaactaaattttactcaatatatgtaaaaacatgttttattgtttttttttattcaatatagttgcatatatatatatatatacatatttgtaagaataatagtatgcaaaaataaatatttagagtttttttttagcaaacttagccttaactttatcaccctatataatttactaagaattacatattataatttcacattaaaaaaataa

SEQ ID NO: 285143 - DNA, 489 bp, Cannabis indica
tgtaaaattcatgcaaacattaaatcacttcaaatttcttatattgataactaatcagattgtaaaggattttatttagggcacaaaacccaacacgactatctatcatggttctggctaccatcttgttggctatctggacttccacgaccaacgggtcgttgtgcgaaaatctgatcttgacagtatcttcatcattaaataatatggtgggttcccacgctcgtggggtcttcggcttcctcccttctatggcaaggactacttcttctttctcgtgctatactattcgggcatacctctcccgggctttgcctgaatctctagctatgtgcgaacctccaataatgacttgcagatgtccatctactggtggtggtagcacgtcttggttgttatcgcccctctgattctgatcgaccttgacatacttctgtacgtgccgattatttttccttatcaggaattcaatttcccgcttcagattgt

SEQ ID NO: 285144 - DNA, 800 bp, Cannabis indica
agcttttacttcactctgtctctcggtctcactcacattacatatatatatatatatataagacataacgattatcaggtgagtgcctttgccctgtttttatgaccataatatatattatttcaataataatacttagttgttgttgttgtgttttttttattaagtgataacagaaagaaagaaggcaattgtgtctgcttaccatggaatttgttatttcaatcggagccaaaatagctgagtatacagttgcacctgtgggtcgccagttgggttatctgtttcgctacacaagaaatgtagataacctcaaaactcaagttcaagatttgaaggatgccaaagacagattgcaacatcgtgttgaggaggcccggaataactgtcaagaaatcgaagctgatgttaagagatggctgagcagctttgatcaaatctctgaaaaagttgacacatttctcaaccacgaagaccatgcaaaggctgcttgttcttgtggatcccttcctcatttggtgactcgacatcagttgagtaggaaagcaaagaagttgttaatcgaggaggtattcgtgctcacagggaaatgcaatttcgatacgatttcttatccccctcacctacatagttcgtctacagcaatagcaacaacaacacagcagcagcaataacgaaagggtacgagagttttgattcaaggagagtcattctggagaacataatgggtgctgtgagagatgcaaataggagcaggataggggttgcgatgggaatgggcggacttggcaaaactatgc

SEQ ID NO: 285145 - DNA, 867 bp, Cannabis indica
aaaaaaaaaagattgaaaccataccatatcaactcccattactttaaccaaatgtaaatagacaatagcccccttaaatttggtttttcataacatagtaatgaggaaaatatggaatatagaacattctcattgcgctacttcacataacaaatacgaagatgtgaataacatataattttgcaacttcacattgaacccattgaggaaatttgctacagaaattagaaatgtagaaaacatataattttgagaacgtagtgggtactttataccaaatgttaattttgagaacgtagtgggtacttcataccaaatgtaattttcgtcatcatccacacgcatctattaagttctacacaattaagttaaacaagttttgagaacataagatatacaaaacatttgcattttgcgacaacccatatctttaacgcaatataagttggacaatgatgaaaaggcaaataaaaatgataaaaattaattttctaataacattctcattgcgtttcttatcttcttccaaaatcttgatttggtttcgcaatccaggtgtagcatctgtacttctcttaccatgtgatttatcgatccaacaaaagtaatcacatcctcgactttcatcgttctcctgagttgaaaataaccctattagtttatcatggctgcctaagtacagaaaacataaatgagaagtacttttgaatctaaaaagacaaaactcttacatagtgtggacatccgaagaatcgacgaccaggatttgctctactactagaagtccaaacataagctagatcaccacagtagcaatgggggtgtccctgaagtgaatttctccaaggcggaccacccccatcgaac

SEQ ID NO: 285146 - DNA, 624 bp, Cannabis indica
gatcaatcttagaaaagacagttttaccctgcagctgatcaaataaatcatctattcttggcagagggtacttgttcttcactgttaatttgtttaactcccgataatctatacacattcgtaaagttccatctttctttttcacaaacaaaactggtgcaccccaaggtgaagtactaggtctagtaaattttaaatccatcatcccctgtaattgaacttttaactctttcagctctgcaggtgccatcctgtagggagctcttgatacaggttctagtcctggtattagatcaatctctaaatcaatttcacatttcggtggcaaccccagtaactcttctagaaacacatccagaaattcttggaccactgggacatgctccagtcccactagtggttccctggtaatatccacaaaatttgctaagaaaccaatgcacccctcacacaacaaatcccttaccttaagtgctgaaattaagggaatccaggatccctgcatcttacccacaaatacaaaggggtcctcgccctcaggctgaaaagttaccatctttctcttgcaagcaatggtggcgttgtatttagcaagacaatccatccccaaaataacatcaaaat

SEQ ID NO: 285147 - DNA, 615 bp, Cannabis indica
aggccttgaggaggattttgcgaactgagatgcaaaattcccttaatgataagaattaccagaacccgtgggatctaaacctggaccccctgacggactagttcaatcgtttcctcgggcctaccttgggtccttttgccgcggagatgaccggtgagttcgtctcccagctaacccggtgcgcgcctaaacggttcgctgtttgtgcatccttgaactctgtctttgaagttcaggatctcagccattccctgactgtggtaattgttcagtggtttacctcttttctcattatttttcttaaggcctttactcactcttgcctctttttcagcttgctgcagaggccggccgcctttccaagaacctggtcaatcacggctttgtcttgtccgaatttggggacatagacgaagtcgtgaagaccctgcaggacatgtctgctaaaaggcgagcgttccaagaggaggctgcgcggcgggaggcccttgctaaggccaagtttgaggaagaggctaagcaaagggaagcccaggcagaggcgatgatccgagaggagatccttcagagggataggctggatgccaagcaacgggaagcactgagggcggaggg

SEQ ID NO: 285148 - DNA, 778 bp, Cannabis indica
actttttaagaggagattttgattcaataaagaagaggaaatgaaaaagttttagggtggggtttgccacgtcagagtggatatacctaaaaactggcgcagaaagaaaccgcgagggtatgtgacgtggcgatgtgtatctaaattaaactgacatatctgacctgtttcgccacgtggcgatgtgtatctcgaaaggggtcattttaaagagaaagagagagaatgggagatttcttaaacggcagggcaaagcaaacatcctcaaaagaagtgggacccataagaacagagcagccactaaattcatttttttaattaataataaaatattggttgcttttataatattttaatattttttaccttaattttttttttctcatatttgtatatcttataatttttttaatcttaaaaaataaaaaataatgtttacacaagtataaaatgaatagtcacgcactaatatattatttaaattctatttttaatatgtaaattttttaatattttataaaatatgttaaataattataaattatatgactatacaaattatttaaataataaactaaataagaagaatatatgaatgcatagcggtccataaaatttagtaaatattaattattgtcttttatggattttggccttttgggaaggaggagggcaagaaagaaagaaactgaagtctctgacagctgtttggttgaaattactattttacccatgtcagttggacaatattcccatatggctcagattctccacgtgc

SEQ ID NO: 285149 - DNA, 609 bp, Cannabis indica
gataccatgctcacatgcaatagctgtatttgcaaaaagaggattaagagcttatgactatgttgccgattactacaaaacagcaacaatgaaggcaacctatgaaagaactgtacatcctctaccaaatgaaagagaatggactatacctgagagcatggaaagaatagtgtggccaccaaaatcaagaaaaccagctgggagacctagaaagaaaagaataagatcaaaaggagaaccaaaagttgtcttgaaatgcacaaggtgcggaaaagttggccacaaccgaagaacgtgcaataacccacagctttacaaacctccaaaacagaataacaaaagcaacgagtcaaagaagaatgattgatcagctacaatagaaatagatattcattgacagttttataaaaactggtttctcagcattgaataaagttgaacagaatataattttttcagaaggatacacacaacaacatttttacactcttgaaattttatctgtttacacaatcattgttttaaatattttttcttaatatcatagattattttaaaaaggtacatgaaaaattataaattttataaaaacaagaaaccagttattga

SEQ ID NO: 285150 - DNA, 514 bp, Cannabis indica
taatgactccttctgttcagatccctagcccttgattcctttctgtagcagggcattatcaagaactgaacctggatctctttctctccttcttgagcccgattctccttcttgttgattggatccttcataatcttccatactatgattgagataccacatgatgtgtgtgggcactcactctatcactcaaggtatgaaaattttaagaagaaaaaagaaggaatgtggtttcgacctatagggaaagaagcttaaaattttactgaaggaatgtgatgtatcgtcaatctttttctcttaagccatcactatctatttacaagtaaccacctaggtttaggttagaattaattagcattaaaataatagaaaaataaatggtaaattccttagtgtggccggccataggatgttattgggccccactttgcaatttggccattttgtcatttttccatttcattttctcaaaaacgccaattttccaatttaaccacttaaatgccaattc

SEQ ID NO: 285151 - DNA, 628 bp, Cannabis indica
ttaataagttaggaaatttacttagtaaatttcacatctacttattaggagcttggtcacataaatccatggttcccatattatctgagataatatatactattgtggagactcaaatacttgatttaataaatcaactaaaattctaaagtagattatgacttatttaagaatttttggtaaatttgggctaatttgagaagaaaaaaaagtagtaagggtttatttgttaattacgatattttgttggtctaattaataaatatatttaaattataatttttttaaaaaaaattatgtataattattaaaaagataaaattaatatttaaataaaaaattagataaatagtatttttgaaaaagagaagatagtttcactaaatgaaattaaatggaaaaaattaaacccatcaagctttagtgaatttcggccttgggtttgggtttaaggttctattattttttctaaagacccatctattctaaaccctaacctagagagaacctatatataaaggaaaacttacaaaagtactgaaatttgagttagcttttataaaaatactgttacacggaaattttttcaaaaatacaatgtttttataaaataccagtaaaacacaaa

SEQ ID NO: 285152 - DNA, 756 bp, Cannabis indica
ggaggaggccctgcggagagataggctggaggccaggcaccaggaggagctgagggcggaaggtgaagccactgcaaaggccaggcgggagcttcgggaggccagggaagccttggatgagatggctgccaaggtgaggtccttagaggaaactcaccaggcaaacttagaatccagggccactctggccgcggagctgaaggagctcagggacttcaaggaacaagcctcaaagaaggcaaaaagagctgagcttctttctcccgtttcctgcagccggtgcaccaagcgttttgatgatggcgtcttcatggcttggtctaccaacgaccagaacatcaagcttaccttctaccccaaacctgaggagatgatcgccaaattccgggagaagaagaaaaagcttgatgccatggtggaggcacgcatcggacctcgtctccctcctcgcatcgattaggccgctccgagtttgacccagtacaaccaggatttcacttctttttttttttttatatatatatatgtttatttacagctatttttcttttatttaagacaatatcttacatagctgttttaaaggggagacaatttctaaggcctgtccccgggccatttgtatatattttgacctgccctttagggctaggatatttatacgtgatcttttttgatgcacatatttctcttttggacctgtcctttggatcaggatgtttatacttatgctttttatttttgtgcatactcttt

SEQ ID NO: 285153 - DNA, 1145 bp, Cannabis indica
cagagcatcaccaagatctgaacctggatctctttctctccttcctttgatgctgattctccttcttgttggttgattttccacagtcttacacactatgattgagataccacttgatgtgtgtgggcactcactcattcactcaaggatttcgaaatttagagaagaaaagaagagagaaggtggcggctagaaatttttctctgaaggaatgagatgtatcatcttttcctgaagccatcactacctatttataggtaaccacctaggtttaagttagaattatttggcattaaaataatgaaaaaataaatgataaaagcctacaatagtggccggcctgggctttggataatgggcctcacttatgcaattttgctgttttatcatttctgcatctcattttctcaaaaacgccaattttcaaattcaaccatttaaatgccaattctaattatttaataactaaaaattaattattaaataatattgtcatttaatatatttattaattagacatataaagtctcttaattaataaataaacctagaatctcttttcttcttttttttcttctacaagatctaatatggtgagttttctttctttgtctcttaaatttttgtgagttttctataatatttttttttttgatattttcttcctaataaggtttcataatattatttttattaattttcttttttaccctaaatccaatattagatggttaaattttttcataatttttttctttttttttttagatatttaattttgagtaagttctctattttattttttaattttttaatatctctttcccataatggcgatatctctactttcttctttaattttttttcctacaatgatctaaaaagtattctttatttattctgagttcataacttcaaatttaattgatttatgtataatagtactatactcttaggtatttcttcaattattattattattattattattcagtactcatatttaaagttttattttaaatcgtatattataacatcttcgtgttattttttcatcatatctagatattatagtggcatggtgttggtgtttatttaatattataaaaacttattcgctctttttttttttttttattttaaag

SEQ ID NO: 285154 - DNA, 711 bp, Cannabis indica
gcaactacagaatcatttcttcttgggcagctacaacttagtgacgacattgaagaagatgatctcgaatactacttgaatgatcgtcgtgagaagcttgatcctacatttgatattctccagtggtggaagcagaatggattcaaatatccagttgttgctcgtatggcaaaggaagtcttgactgttcaaatgtctacagtagcatctgaatcagccttttctacaggtggaagaatcctagatgcatttaggagttctttatctccgaggatggtggaggctttgatttgttctaagaattggtatacttgtgagtatgaggaacctattgtacttcgacaatacatggatgaaattgaaggtttagagacatgtgaacaagttattccaggtaacaaattactcaaccttatatattaattattaattgaaattattttgtagatgttaaattttatgttaatgaattttttttaggtgatggatcatgtattactactgttgagaatcttgacaatgcttctggaagtggaagtgggatagaaaaaatcaactaaaatctcaaggtaattaacaaaaaattgaattcttactttcaagttttattcatctttacagaaagcatatatgttgattcacttagcactctcacacacccaacttttttttttcagacagagatacgaaatgctttgataagaatatatg

SEQ ID NO: 285155 - DNA, 497 bp, Cannabis indica
aatcacgtaatacgcctatgctagttagggtgttacatggatcctccaaaaccctcaccatactcccatcatccactcgccaacgatagcccctcaaaataatctcttttccccatatcaaactacgccacacaaaggaggtatgagctccactctttgttgccaaaacatctttgttcgggaaatagcatgctttcaaaacccgactacataaggcataaggaaatcgaatgcatatccaaatctgcttggctagtagggattggttgaacaaccttaagtctaggaaccccattcctcctttctctttgggtttacataaataagtccatttacaccaatgaatgcactagttgtgatctgaggatccccaataaaagtgagcaaccatacggtgcaagctgttgatagtactcttggtgattttaaaacaactcatcgtatatgttggccttgcttgaaggatagtgtaacgccctaatgctaaggcacgctac

SEQ ID NO: 285156 - DNA, 587 bp, Cannabis indica
cttgaactagcctcaagtggtttttatttttgtcaattgatgatgtcttttctttctcccaattgacgagttcgtaattctccgactttagaagttactaagcctaattaaatcaattaaagattacgtacattgaatcctaacaaaaaagacaacacttttccttttacacgtaataagtaaataaacagcgacatatttaattaattaactaaattccatcccaaaaatcactttcaacaaattcttatttctttccaatcttctagacagaagtttagttgggttagggctaagatatagaataactttaaatttagaaattaagtgagtaaatatatttttttagaaatttagcaaaacagcaaagtataataaattagttgataaaaatcataaaaatacatttaatacatattattttttttttaaaaaaaaagatatataatagataaattaagttatacaaatttttttattattgcatattaatatattataaaaaaactaattataaatatattaaatcaataaatatatgttatattatttgatatatcgtatcactgaaaattaatataccgtag

SEQ ID NO: 285157 - DNA, 708 bp, Cannabis indica
aattattatgaaatattattggaaaagttgagtctacatgcttaatttttgtttttcctagctattccgttgatatgaataatgaaatactagtgatgaggagagaaggagaataagaagaataagcttggatattaagttgttgggtagaacatatcattatctcatatacttctatagatatagaagtttttgaagttcatatatgctatttgattttctttagtgatcttacaattcaagggaagctagatatttgcttctaattaaattgttcctttaactaattgatagttcttccttcttggcatatagtgacactgaaataagttacatttgtgacaaatgttaactaatttaataaatgtcacttaaggttagaaattgtaacattttcaaatgtcactgaaagtcaaattttggtgtagtaaaaaagataattaaaattactcttttaagaataataacaaatattggaggacatataaaatcaaacgatcacatttataaagttttttttttttattttttaaggaaattctaactttatttatccttcaagttcagctaccacacaggaagcaatcagttggaccatcccccatactgaaaatacgagtcaggatgtaatatagatgctctagcaaattcatgagcgactacattagctgaccgtttaacaaattaaatgaacatttctaacttgag

SEQ ID NO: 285158 - DNA, 666 bp, Cannabis indica
gcaataaaccattcacaatctcacaatgcattcctacatcagtttagatcacaaatagcccaatagagcatcaaatccttagttatacatggtagcaaaatattcctatttcactactaattaatacctaaaagaaaaggtaaaaatcatgcatcaattagaagggttcaactaggtcttacttttccaagtaagatctagcttgctaaatgttaaaaatggccaaaaattaacattcattcaacatttcatcacaactaattgaactaagtcaagattacttcatcattgcaaagtcaaaacactagtccatacaagggtttataaccacccaaatctcaaaaagtttagttcataactgaaattaaaaactcaaaaccagaaaatgtattgttcatgaagttaaagagaagcttaaagagaagaaaatgatacaaaacgaagtggagagcaagagaaatgagtggtgagctcaaatcctttctttgatagttgtcttcttctccttcttctcaatcttcttcttctttgtactctctttctctgtactttttctatcctttttgctgctgtaattttcgtactctattcaaagtgcagccagcctcctctaatgtcctcttcttttctttttgcaccccaattagggtaccaaagtttacccta

SEQ ID NO: 285159 - DNA, 599 bp, Cannabis indica
tttacaaagtcagcacatttcttacctgttaaggtaacctatacagtggatcagtatgctgatttgtatgtgaaagaaattgttcgtcttcatggagtaccgaagtcaatcgtttcagatagagaccctaaatttacatcaaagttttgggtgagtttgcaaaaggctatgggaactaatttgaaattcagcacagcctttcatcctcaaacagatgggcaatctgaacgaaccattcaaatacttgaagacttgttacgagcttgtgtcatggattttggagggtcatggagtaagtatttgcctctgattgaattctcctataataatagctatcaaagtaccataggaatggctccctatgagctgctctatggcagaaagtgtcgttccccaattcattgggacgaaacaggagaacggaaatacttaggccctgaattagtccagaagacaaatgaagcaatagacaagatcaaagctcgaatgcttgcttctcaaagcaggcagaaaagttatgcagatcccaagcgacgggatgttacattccaacctggtgatcatgttttcttgcgagtatccccgatgaagggaatcag

SEQ ID NO: 285160 - DNA, 805 bp, Cannabis indica
ttaaattattaccttccgatcatttgagtaatttcttcgggaattgggcggccacgtacagggtctaaatggataattttctttggcgtaacgacctctagcgtccaatgcgcactacaaaattatattggaatataagtaagatagtataaaaataatttgaagtcataatatagaaatgaacaattagcactaaagaattaaatagagtttacccgatattccaaggaataaagaacatttggtggttgttattcatcaatgataaccaatcagccaatcgtcttgccgcatcgtcaaaagactgactcttctcttcatcggttttcccatgcactacgagaagctctgggtcgtaaaacttgaaaaattttctcataccgttgatgctctcccagatgtgcctgccaaaaaattgttaagtattagtgtcttataataatttgactagaatttgatatataaggttaattagattaaagaagagtatacatcattccaaacagcattccctggttgccgatgaagtcacacgtagcaacctgctgcaaatcctctccagataacgtgatctgggtacgcggtgctatgaatcctcggggtacaggaattgtgattatatcacgtttatctttgaggttcaggaattcaacaaccatccattttagcgatttagggatcaagtccatcttctttttcgagaacaattcatcttcccgtgcaccaccgccttgtggagaaagcatcggagctttccccttcgacgcatcacgtcttgaaggcggttgagcgagtggaccctaaa

SEQ ID NO: 285161 - DNA, 714 bp, Cannabis indica
gtatgagtggttactcagtatgtaagttagggttattaacctaagattatatatgttgttattgatgttgaatacacgcatgtatgttaaaagttatgtgtatgtgggttagacctggtatatatcaccacgataaaccatcgaaagaacgtaatgtatggattacgtatatataagaatagggttatgcaagcaaggcataatcaggttaggctcggtaatcaaaaccaaggtaaaccctactaaggccttaatgtatttagacgtgtgagagcaacacgtaggtctacgccacgtagacataaataggcatgtgagcgtaacatgcaggtctatagcaaatagacaaatagtgcagtggcaccagtaattaggtgtttcacatattgagactaagggttatgcgccaaggcataatcaagttggactcggtaaccagaaccgagatgaactattctaaggccttattgtaattagacgtgtgggagcaacacgtaggtctacgccacgtagatataaatagatgtgtgagcgcaacacataggtctacgccacgtagacataaataggcatgtgagtgtgacatgcaggtctgtgacacacagacatatatggatggcattactgtttaaatagtataatgaacatattattgatatgatttatactgtcttgctggcttggctcacgggtgctctactgtgcaggaaaggg

SEQ ID NO: 285162 - DNA, 695 bp, Cannabis indica
cccttaagtcacaacatacgtaaaattgataagtgatacgctaaatcacttttcaagaatttaactcaaaactttaagtttccctatcgatagatagcgtagaaataccctaaatatcgataaaacacaaaaaactaaggtctaaaatctaaaaaatccaattaagcgaaaacccaaaatggttcaccattttttggggttctgccagaaaaaccagttcatcgttttggaaaagaccagttttgaattcttagtcaaatctatcccaaaacgcgccaaaacttccattttacctaatcaagacataataagcataatccaaccaaaaacaatagttaaaactccctggatacaaattcaccattaaagacataagtttgagcttgaaatctcaaactttggtcttcctcaacaacaacaaaatcagcttaaaaaaagcttaaacaactcataagcaaccttagaatcaaaccacaacatagcttaaaacttacagcattaaaaattcaaacttgcatgcaaacctattcttaaacttgaaaattcaaagataaaatagaagaacaagtttatcttgagctataatcttctaaatcctatgaatttcctagccaaaactcctttgaatcgctaagaaaaggatgaagaaaaatttaggtcttttgtcctaggtgatggagagagagagagagaga

SEQ ID NO: 285163 - DNA, 596 bp, Cannabis indica
tattaaaaaataaaatagtttatgaaaaattcatgggtcactttttatttatatataataaaataaaataaatctcattaaatctaaataaaaaatacaattgggttgttgctttgtacatctactattagcttttctaaatatatttatgttatttagttggattttattctaaataagaatttactactatttatatatatatatatatatatatactagatgagagttacgtggcgagccacgtaaatattagttttatataagttctagtggtttttgtttaagaattcagtaactaagcaacgacaacaacaatggtagatagatctatttaagtttttcatatttgtaaagattataaatctaaacttttaattttcttgatttgagattttgaattgttctgatttatttgtttatgaatttattgaaatacttgaatatttatttgttctgattttgaattgttctgatttattcatacttgaatatttatattgatgattgttaatgaaattagtctgtagctttatgtttctagaaaaaaaaagtattttttaatatagagtttaaattttatattgatgattgtt

SEQ ID NO: 285164 - DNA, 607 bp, Cannabis indica
ggacataaagtcgttggttgcaaatgggtatataaagttaaatataacgaaagtgtggctgttgaaaggtttaaagcttgtctaatggccaaaggctacactcaaagacatggaattgactattcctaaacctatgctcccgtagctaaattcaacaccctcaaaattttgttagcactagcagccatgaacaattggaatgtccgtcaattagacatcaataatgcttttcttcatggagatctccgtgaagaagtatacatgaaaatccctccggattataaagcacctccaaacttggtgtgcaaacttaacaaaagcacttatggcctcaagcaagcctcaagacaatggtttagcaaacttagtcaaactcttatttcggatggtttcattcaatctctctcggaaaattctttgttcataaagaagacaaacaataccttcttggccattctcatatatgtggatgacatagttgttgcaagcaacaatgacaatgccatatcacacttcaaaacatatctccatgacaaattcaaacttaaagaccttggcactatttcgttttttccttggtcttaaagttggtcgcacaaagaaaggc

SEQ ID NO: 285165 - DNA, 395 bp, Cannabis indica
tatgttgttgttgattcctgtagttgaattaaaaatgttgattcaagcatgatagggttgctgattagttggttttatcaagttatggaaattttactcaaagctatggtttttcaaagtgaaattgtgagttttgttgctgtgtttgttggggtcgatttcctatgttttcagaggttataatatgcatgtttaagtaggtttgaactgatttggatgcatgttagttagatttaaccaagtttgagttttgaactcaaagcttggagctttaatggaattttcagtatctgtgtgttctgggctgttttgatgcttttgtattgttctttgggatatttagaacaggtctggaagttttggtgtggtttggatttgatttgagcaagttatga

SEQ ID NO: 285166 - DNA, 578 bp, Cannabis indica
atgccgaaaaaatcaccggagttgctgccggtgccggaaatcactggagtagcagtcggtgcaggaaaagtcgtcgaagttgctgccggtgccgaaaaattcgtcggaattagcattgtacgccggaaaaattactgaaaaaaatactaagaaaccggtttcttgatgaagaaaacactctctttggtgatttttccgttgacaatgtcaattctgacgacttttctgacgctagcagctactccggcgacttttccggcaccgacagcaaacttcggaaaagtcattcgaattggcatagtcacctgaaaaattaccaagaaactggtttctagatgaagaaaacagtttcttgatgaagaaaccagtttcatggtgatttttttggtgatttttctgacgacaatggcaattatgacgacttttctggcgttggtagcaactctgacgactaatacaacggtagctactccgatgacttttcaataccaacagtaaactctaggaaattcgtcggaattggcattgtcgccgaaaaaatcaccggaaaaatcaccaagaaactagtttcttttctt

SEQ ID NO: 285167 - DNA, 773 bp, Cannabis indica
ttgggctaaggttgctggtcgttgcatagcggtttagtgctgaggaattttatttgattacgggaattgattatttcggtgattgcaacaagttgttgtttcacaggaatcaaatcagttggtagaaatctattttcgtggtagtaaaaaccattgaccacaaagctattgaggatgcttttttgggtagtaggtggggtttggatgagtcccttggattgaaaatggttgttttgtattttattcagtgttttcttcttagtaatactcctgataaagaagtatctaggtttgatctagatgttgtggatagcggtcggtgggacgagtattgttggggtagggaatcctttgaattgactattgattcattcaaaggtaaaattcagcatggtattataatgaaaaataagaaggtagagaagggaggccagtatgatggttggtatagggctttgggatgtccttgggtttttactgtttggttttatgaatgttgtcctgctatggtcaactctttctgtaaaagagtttcatccacgattccaaggattctgaattggagcaacaccatagtcaccaaaaatccaactcttcgagacttgaagggcaagatttttgatttgccgttgaacaaggtaaaatacagtttctttactgtttgttttcagttttattatgttgttaattttttgttttcttaattgtttttttttcatttttatattctgattgattatgatgttcagtggaagatcaaaaacatgtgtcct

SEQ ID NO: 285168 - DNA, 576 bp, Cannabis indica
tcgggtcataattaccaaaatgcccctggctcaccaacggggtctttaacatactaaaattcatataaattcacatatattgaactatataataatataattcctcaattactcataattgtctagttagggctttgctaatcctttttcttaattccgggtattacagtttgtgtccaggtctagaccccgatctttgtctaggttcggctctaggtccacgttggggtctcgagtgcaggtccaagtttgggtcaaggtcaggatctcggtccacatctaggtccagcatttcaatcccattctgggtcttggtccgagtctagtctcagtttgggtctgaggctacgtctgtgttcggttataggtttgggtccgggtcttggtcacagtcctagtcttgttcttgggtcctagttcggtgattcttgttcaggttctaattttgtgtcccatgtctaggtttgggttccggtttggttcttcgtttgggttcttgtcctactctgagccccatatctagacacggactattggtctgttcaaggcgccgttacccgaatcccgagtcaagat

SEQ ID NO: 285169 - DNA, 544 bp, Cannabis indica
ttaatataactaactttaagacattttctaatatgttaaatggcggcaaaacccccgatacttttgttttggtttcattaaacccccaaaacccaaatttctgcgggtaaacccccaaaatcagaaaactgttagcaatttaacacttccgtccaaatttagttgttaaatgccaagttagattgtccacgtggacacaatatacacatggcacaattttattggtccacgtaaataattatttaaaaaaataaaaaattaaataatttaaaaaataaaaaaattaaaaaaataaaaaaaaattcttttttttttctttcttctttttttctttctttctttttctttttctttgtcatgaaccctaaacctaaatccttcccagccaccacccaccatgagaaccctaaacctaaatccttcccagccaccagccaccagccaccaccattctcttccttcccagccatcgccaccatcttccttccttccttccttcatactgttaccaccaccaccaccatcttctttttcttcatcatct

SEQ ID NO: 285170 - DNA, 527 bp, Cannabis indica
cttttggagataactaactctccgccaagttccaaaccctgattcgtaactatcatgtggtctatccaatttactaaagattctggcttccacataagaatgtgtggccccagagtcaaacaatacagagaattaaaaattgttgactgagagctgacctgtcaccactgaagggctggcttctgcatcagcctgagtaatggcgaacacccttgctggagtgggtttcgctgaagcctttggtgcttcagttctgagttgagggcaatccctcttgtaattccctgacataccacattgaaagcacccttgtcctctacactcccccagatggtgccttttatagttggggccctctgggtaagtatattgagtctcagaactaccctagcgactgcctcgaccctacttccctcggaacctcttgttctgacctgagcgaccggttgcagtggatgctttccttttctgatctatggctgaaccactaccaccccacctaaagcctgatgcaagaggggtaggag

SEQ ID NO: 285171 - DNA, 472 bp, Cannabis indica
gcctaatccattgtattgattgttgtttgaatgaatcctgtttcaaaaataaaaaaaattacaatgtatatcaattaaatatgacttataaattaaacgcatgcttataattatatcattactaaaacaaattaataaattagcaatactaatatttaattaagtaacacatacgaactgtggtcttctacttcacacattcaaattgcatatgttctttgttgctttattcccgaacactatatgaacttgtggtttaaactgtgagttatatctaataaattaaatgaaaccttataatacataattaaaatcatggttcatatccatttcttttgcttaattattataaaatataattgaagcataattgctatacattgactaattaaaaaactttattatctgtcaaactcttcccagccgttctttgaataataagtatcttttaatatagggtaaataccatttt

SEQ ID NO: 285172 - DNA, 726 bp, Cannabis indica
ttttgggaacccttagtttttttccatttttgtgatgtttagggtatttcatggtggttatcgataagaaacttttagtttcaagtttaagtccccggaaagggatttagcgtgtcacttacctatgttatgattgatgtgatttaggagcctgtaattcgccgagcaattgttccagtcaggttggccggcacatctgaattcggaaacgaggtaagattagtataacggtatgcatatgtatatacatgtttagtgtgcatgttagtaagcctgttagattacattagatatgtatgttggcttttgtactatctgacagtatcacattggtacgcctagagtatgactagcgtaccaagtataggttcatattatgctcgatagtattgtacattttgacaatatcacatcggtacagctagagtatgactaatgtaccaagtataggctgttaccatgtcaaaaataccgtcatacgaacgttctagactcagtaccgtgcgggttacggggatagggttatgattgggggtatgggcatctaaccactatccgggttattgctatgttattgtttatgcttttcttactgagtctgtcgactcacagtgctatttccatgtgtaggtaagggcaaggctaaagttgaggagccgtgagtacgagcaggtaaagattgtacatgtcggggcggttaggcctggagcgtacgatcctcgagac

SEQ ID NO: 285173 - DNA, 596 bp, Cannabis indica
tttaccattctaccattcaatgtcttttattcttaaaacacttagattcctaaaaataatatttcagtaaactaatttaattactgaaatgatgcctcaatcatttatctctattaagccaagctcgaaggaaatcatcgtttcacttctagacacttatagaagctatagattctatatctaagattagcgctcccactcaattatactatcatgttcccaaggtaagtattcacccgaactattggttagctttcatgaacaactctaagaacataaataatacaattgagatcgaacctaaccatctcaggattaagatctattgacctaagattaaccagtgatattgacttagaaagatataatggtaagtttatgatatcttatccaagttcaatatcggtccaatccgatggatactccatacatccgatactagcatactttgccaataccctagaaaggacataacacttatccaagatgtaagtatactttatcgctaattatcatgtcagtctaaattcagtgtactaactaatcatgggacttaaacttttgaacatataatcatgattatattccactgtgct

SEQ ID NO: 285174 - DNA, 1297 bp, Cannabis indica
agttgatctaaaattaactaacaaattaattttcaactttaatcaaattttcaaaattgaaaatttcaaaatatctacaattgaaataaatgtatctcaaaatttacataaaaaaataataattaaaataaaataaaatatattatgaaaattatcctaatttaagttgatctgaaatttaaaaatttccagcttaaatataattttctatttaattaaacttattaaaataaaaaaaataattaagtatctaaaatcaacttaattattaaatctagtttaatactaccgaaagatattctaatttaaattggtctaaaattaataaataaatcaatttttaacttaaatatattttctaattaatttaatttcttgaaatagaagttaaaaattaagtatcttgaataaaaccaacttaattattaattccaatttaagttgtaagaaaaatgtcctaatttaagttggtctaaaattaattagaattaattttcaacttaaatatatttttctacttaattaaatattagaaaatataaattagttactagaaattactatctagttaactttctttaaactaaatgtatttttttctaaattaattctaaaataatctaatgtaaaattaatttcatttatttcaaaattaattatgttgctatttaaattttaattaggttaacctaatataactatcctaatacaattatttaaataattaaggaaaatgagtctttacaattagcgttgttcatgtgagagagggttgggtccagtatgtcgttctcactactattggctccctaactctcacacaagacccaaaagagaggaatttaacctttcattaaataattattattaattgaataagtccaatactaattaggcctaaataaaactattacatgtgatactttattttagggacctagtatatttatatatctagaaataaatgggcttcttatatgcatctaagcctaatagcaaacatatagactcacacaaacaaactgatttggatgagccctatcatgttattaggtttatcacagatgaaagaaattacaaaatttaccagttataaattatttattttatatataaacaattggactattattaaaattaggtcattggatctgtcaataagttaatcatagtaatttagatcaaataaataataagtttgtttaaaaaagttttgaattagacaataaaataaagatctgaaaagttggttaagatattttattttaataaataataaaatattattaggaaatat

SEQ ID NO: 285175 - DNA, 138 bp, Cannabis indica
aaaaaaaaatatactccctatttctcatttagggcggcaccaccctcaggtcaatataggtagaattcttacagtatttgttaccaaaatacttgttttccaaactgaattctattaaaggtttttaaaagtctaacc

SEQ ID NO: 285176 - DNA, 553 bp, Cannabis indica
tggcttcgcagtcgatgactctgttcatgaaagccattgccgctggttctaaggaagctgactcgctgaagaggcaaaatgcccagttccaggagaacataaagagaccgaaacaagaggtggctggtaaggacaaagagcttgaagaccttcccaagtctaaggagcaggttgagctcgaggccaagaactctcagatgaagatcgaggagatggctcgcgacttagaggtcgagaaggagaatgggaagaaacagtatgatcaggcagtttctgattatatctacaccactctttccaaaatcccagactttgacttctcaatccttggagcagaagccgatgaaatggttgaggctttttcgcgccatgtcgcccacacaaactcaaggcggtggagggaatcttcccgaggaggctgaggctgcggatgctgaagaagtcgagaatgaagccgtcagcaaagtcgcagatggatctgctcctactgctcccaatgcttgacttttctctcctatgtttaaactattttttgaatttgctagttactttt

SEQ ID NO: 285177 - DNA, 574 bp, Cannabis indica
atgtacaggaatcctctttcataacacatcttttagtgccagcgtgaacatgcataacattattagtggtattattttgtaaattaaggcagtaaagaccatcagacaaaataccatttccaacacattcagatttataatataaattgaaatatttgtctgaaaatgtaaaggaaaaaccaaagggtataagtcttgaaactgaaatcaagtttctagagaaacttggtacataaaaggtcttttctaactttaaaataaaaccattacttaaaactaaattgcatgttccaatagcttccacatgtgagcccatcttgtttccagataagatgctttgctcacttgccactggcttccttagattttgaatatcctgcaaggaatttgttatgtgaattgttgaaccggaatcaatccaccatgtgttaagattaacattagccatattagattcataacatactaaggaaattggattacctttgtcatccatccatttcttgaactggctgcactcccttttagcatgtcccttttgtttacaaaagaaacatttgatggaatctttctt

SEQ ID NO: 285178 - DNA, 451 bp, Cannabis indica
ttttccctttgttcttcttgaatggcttgcgtttcttaggttgagtggtcaggtgaacactttctccttgctcctgtaggagcctggcttcctcttgaacacacatggtcatcaattcattgatagtccatttttctttatgtgtgttgtaggaaattttgaaaggcccatactgtggaggaagattgtgaaggatgtaatgaaccaggaaggtatcaggaatgataacgtcgagtttcttcaaatgagcagtgatgtccctcattttagaaatatgttctcgaactcctttaacaccggtgagttttgtggacgagaactcttggatgaggttgatgaacaaggatttatctgaagtgtcaaactgctcatccataactttgataaagtctttcaccttctcaggtggctccaccgatccacgcattcccataggaattctggacataat

SEQ ID NO: 285179 - DNA, 726 bp, Cannabis indica
ggagagcctctagctcagatatgtctttgtcctttgccacaagggaagcatccaaggtcttcactcgctcctaaagagcatataaggacccttaagagccatcacgagctgagctcaacttcatcaaggcctgaaaagcaaaacaaaacaacatcagtgtcaaggccacaacactggctggctagtcccccccttgggaatgctatggctggcgaacccctcacagcagcatccaaggccagccagccacatgcaacatgcctcatggacagctagcctttacagtgccaaaatgatgaatagagctgaaagcataacataccagagaaagatcccgcagacttgtagagtaaagcctgtctagcccgccgtcactaatctctttgaattcctcatccatgaaaggaaaagctctttctatgcgcatgttggctgccttcgtagccctctgcccaacaactgaccccgttcctgccggccctctgagtaccttggctggtaggccgtatcagaggttcccctgctagtgcaagccttggcacagagggaggcattgatgacgcgacagcatctcctccacgagcagtcctggccaccttggctttcactctccccgtgggctcatatgaaggtcccccaataggacctctcaacttggaagaaatatctacagaaagaaagtagcaaagttagaaagaaatcataaacattcaatacaagacaaaa

SEQ ID NO: 285180 - DNA, 737 bp, Cannabis indica
aactctccgccaggtaatagggttccaaaccctgattcataactatcacacggtctatccaatttactaaagattctggctgccacataagaatgtgtggccccagaatcaaacagcactgagtaaaatgagttattaactgagagctgacctgttacaactgaggggctggcttctgcatcagcctgcgtgatggcgaacaccctagctggagtgggtctcgccggagccctaggtgcctctggtctgagctggggacaatccctcttgtagtgtctgggcatgccacactgaaagcatccctgacctctgcactcacccagatggtgccttttacaactagggcactctgggtaagaaaaccgggtctcagcaccaccctgacggctgcctctactctggttcccccggaacctcttattctgccccgagccaccggatgcagtggatgttctcctcttctggtccatgcccaaaccactacctcccctgctgaagcctgatgcaggaggggtaggagccccgccactcactggagccctaaccgactccgacatacatccaactgcgccctcagctcgcagtgccttctccaccatctcagcataggtggtcttgtcgtctgtggtgatcataaggtcatgcttgatcttcacatttaatccgtccagatatttttccttcttactgaaatcggttggcaaaattcccgaggccaacctcgccaactgatcgaa

SEQ ID NO: 285181 - DNA, 605 bp, Cannabis indica
ttttcaacttaaatatatatttctactttattagatattaaaaaatataaattacttactaaaaatcactatctagaatcttttctttaaactaagtgtgtttttctaaattaattttaaaataatccaatgaaaagttagtttcatttatttcaaaatttattacaattatttaaataagacaaatgggtcttcacaattgggattgttcatgtgagggagggttgggttcagtatgtcgtacccattactagtgggcccctaattctcacacaaagcccaaaagagaagaatttaaccttttattaaataactgttattcattgaataagcccaatactaattgggcctaaataaaactatcatatatggtgttctatttgggaaatttacaaaaatactgcttttggaccaaaactttacatttatactgggacacggcaaaaacaacatttatactgccccagcccaatttcattacttttgtactgcccaagcccaacatcatttcatttctactgtgaacagtaaaacacacgggaaacaaccttgttcgtgtgtgaggagacgtcggagacggaaatcaccaagaaaaaaccattaaa

SEQ ID NO: 285182 - DNA, 599 bp, Cannabis indica
aaataatcactatttttagtgatttgtttataacctttagatcttgatctaatggttaatattatgaattaaaaacattaaatacaataaataatttattttttaaaaaaatacaataaataggtaacttgttggtgatttgttgtatgaatagtaatttttattgaattatacatttgattatccatgaatgatttaaaaattaattattgaatattatagtgtattttttataacttttagaaaattgctatggagtttatttattgcaatccacacaaattaatcacatcctattcaggtccggccctaggctaaggcggactaggcccgcgcctagggcccaattaaaaaaaaagcttttaatgaatatatatattttaataatttttaaaaatactatttatttttaaaaaaaggggctaatttttttttctagggtccaattttactcagggcagggccgaccctgatcctattgtatgcatacaaagatgcatgcataatagtaataataatctttatcatgaatcacatcctatttgtattatatataaaaaaaaatttaaaatattaatatacttgtgatatcaaatcca

SEQ ID NO: 285183 - DNA, 698 bp, Cannabis indica
tcgttgtagtattctgctcgtctgttccccttcttctgtttagatcgttccttaggtcatgggttgttcccaacctatcgaacacagaagagcctggttgccttagcgattgattcgcttggttgacaggtggaataacgccattattctggttggaaccgtcaggtatgtctcctcctgatgaattaccggacaaggtctgcccgcctacctcttggcccacgagcggaactcgcaaccggggattgggcggctaaccattagttgtctgggaagtattcatcatcgggtcatcttccgtttctcccaggggaatgacgttcggcgcttgctgacctacagtttggtaggctcttcgtatcagcacggtagcttgccgactacgatcttcgatctctgcatggtaagcccttaatgcctccatctctttgtctctccattcagcgaacatacgcctttgttcgtcaaatgcgagatttactgcagctcgcagttcatcctgatcatgatgcagagtgttgctatgactctgcatgagtccgagcgcagcacggagattttgtaattcggttgcgtctccgatggtcgtctgggcgttggttctaggcggaacagtcgtattatgaatgccctagttgggtgcgaaagtgttattcccagtctcttgcacactaggcgcagtttcagtaataggagct

SEQ ID NO: 285184 - DNA, 733 bp, Cannabis indica
tcatccctgccagttagcactctacccatcaaagtttgatctggattgaagtgtttcccatatgtttgtttcctgatggactcaactctcaataaagatgcaatagtggaaggaccaaaaggaactctatgacccctaacaaaggcactcacacaccctggatgaccctcagcaataacagttctatccagattggcatagaattctcgaactaagatgggatgaggagcagacaagttagtgaccgtgttgacccatttcctaagttttaaaaactcatgcagttcaggaaaatcatctaatatgaccacttgttcgaaccaaagctcacgactaccaaaccaccgttgatagacagaggctttagaggcatcaacaaagcattgtactgttgctgggtcgacagttgatataggtactttgggaagtttggactttttagaacctctagacgaccgtttgggagatgactctgtagaggcaactggagtgggttttttcttggatttcttttcaggtggatgatacgtggtgtcagcagaggattttcgtttgggttgaacacgttcactgggggaaggagacgacagtgaaggtcgaacctttttagagagaggaggagccttacctagaaacgtacgaggtttctgactgaccggaggtgagggtggagacggagtcgactcaggactggggggatgtgcagaaccaccaacctccgactggtagagga

SEQ ID NO: 285185 - DNA, 516 bp, Cannabis indica
cacttaagggtatttttaggaaactctaaattcccgactaatcccgacattcccaatttctaaataaactgccccgctatacaaaaatactaaattgtgattctactgagccatacaccgtgttccatgttgtcgggcaccgaaaatgtaaaattatgaaatttcactatatgacataaaaatgcattcagaattcaaaaataacaacataaataattatttgaatatccataaataatttttataatcaaaccttaaatatctgctaatttccaaattaaactaagcggtctttacatctcttgtccaacgattttatcccattaaacacaaattaatgtgttggtaacagccatgtgatgaaagaatttgattttcaaatatgatcctcaaaacactataaatagaggtctttggttcacttgtagacaacaacaattttctatcttctaaacactaagctagaaaatattgagaggcttgttttttcccaaaagcatttccattctattccct

SEQ ID NO: 285186 - DNA, 521 bp, Cannabis indica
aaatcttaatcggtatagcctatgggatttaaagcaccacccttgtagcctaacacataatgcctagtacattttaaatatttcagaatatgcttaactgcagtccaatgttcctctcttgggtttgtctgatacctgctcacaattcctactgcatagcatatgtgagttctagtgcataacattgcatacattagatttccaactgttgaagcataaggaacccttctcatgtcctctatctcttcaggattagtgggacactgttccttggatagacggatactaggtctagaaggcatcactgcccctttggtattggtcattgagaatttctctagcaccttatcaatgtaagttgtttgagatagagcaagggatatgttcttctagtttctgatgatctgaataccaagaacataagcaacttcacgcaaatctttcatttcgaattgagtgtcaagccattccttgatgtaagttattttcttgatattgttaccaataataaaaatgtcatc

SEQ ID NO: 285187 - DNA, 473 bp, Cannabis indica
gggaactgcaagaagaaaaactactttaattcaggttggtataattcttctactagttattatattatatattacgtttcttaataacgaagtaaaacatatatataaagttattattattattattattattattattatcagtttatgtttaacgtaaaattaatatattattatatattatttattattatatacattacttaactgttaagaaaagtatattatataataaagtatatattattaattataattaacattaatatttatatttctgtcaaatatatacatattatttatttctcgttatattttaaattcaatttttatttcccgctatatatacatattatttatttcccgctatattttaaattcagtctttattttacgcacttatatggtaggcaccgcctcctaattttttcctgttattttaattttgtgatacttggtgtatgattcgctgg

SEQ ID NO: 285188 - DNA, 549 bp, Cannabis indica
taggcctgacggaccgagacctctcaccaagtggttcccaactcacagggttcaatggaacaacacttatcccaatgggaaaagtgaggcttccagtcaccttgtgcccggacacaccctagagcactttcaagtactgcacgttcgtggtggtggactgcccgacagcctataacgcattcctcggccgaccggccttggtggactttggcgtagtcacatcaatacgacacttgtgcctgaaattcccaacccaggaagctgggatagggacggtgagaggaaatcaaggggaggcgaggcaatgctataacgttgctacccacctacctgtgctgatggtccgagaaactactaagccagaaatggccggggatccaaaaaaattgtagaaccaatggaggatgtcgaggagatatcagtgtgcgacctcgactccaccaaagtactccggctaggaaagagcctagacccggaggaaaaagaaaaaataataaagacactgaagggtgccattgtcgttttcgcgtggtgccaggaggacatgac

SEQ ID NO: 285189 - DNA, 282 bp, Cannabis indica
gaccgtcttccctgaagctgatcgaacaaatcatcgatcctaggtaatggatatttattcttcactgtcagcttgttcaattctctgtaatcgatgcacggagccattctatatggagccttggaaaccagttccacccctggtgccaaatctatcacgaagtcaatctcccgttgaggtggtaaccctggaagttcctcgggaaaaacatctaaaaaccctaaacaacggccagaaaccctaaacaaccgccatgcaataattctctagctgacatggccg

SEQ ID NO: 285190 - DNA, 579 bp, Cannabis indica
aatggtggagggaggaggtggtggcccaaaaaggatcttcataaatataatattccattaccatgagctctttgacttgaggaatgcaaaaatgctcttgctgaattttttcaaaaactgggcagttttgctgtgataatgctacagcattatgagcagcaataaatgttgaccaacttggaatgcttgcttccttatcttttttttcactactttggattgaagtgagctcttgtaattgctcaaaattttccccaagtatctccaactcattaccactcctcaaaatgacattttcactttcttctttctcccttgaattttccatatcaatacccaaagtttcatgggatttatcacgcaactcattcaccaaaagctcaaattggttctccaatttcctcaaggatgaagcttggctttgaattaaggcatcatttttcgccatgaactccatcatcaacacctcaaatgagcttgattgagccatttgatgaagatcttcttctatgttgaactcttgtaaatcttctaaaatctcatcatttggtccttgagtgtaagtgtcaaaatttagct

SEQ ID NO: 285191 - DNA, 500 bp, Cannabis indica
aaaaggcattacttataacaatatagaccttgatcagtaatgaacgaggtatgctgctggtctggttcatacatcgggatttgattatatcccgagtatgcgtccataaagctaagaagttcgtgacctgtagtggcatcaacaagttggtcaatgctaggaagttggaagctgtctttgggacaagctttatttaaatctgtaaagtcaacgcatgtgcgccatgacttggtaccgtcctccctgttgcgtgaggagcgcgagagtgcgctctgaaaacagcgttgaggtgatcacgcagatcacctctatggacttggtaccgtcctccctgttgcgtctccacagaaccggacctcgtgtatctgctaggtgtgcgaccatgcgaggacgaagaggcggattctgcgtcattgtctcttgaaggctggctgtgaggattacgtcgctcagggtcttcatcaaccttgttgggttttgtgccctaaataaaacccttt

SEQ ID NO: 285192 - DNA, 625 bp, Cannabis indica
gaacgttctatactagggtacaaccactataccacatacactacgtacctcattgtacgagtgttggtagagtttgtttcgtaccccgagtaccactgagtgatataccacatacaccctgtactttcccgtacttgtgccggtatcactgtaatgtactctttaacaatattcactataccaatgcactctctatcataactgtacaagtgttggtagtgcaactaacacataagcatgcatatacacttaacatatatatactctcaaatattcatattacacattatacaaagttcttaccttctttccagattcaagtgtgctggccgacctgaacggaaagtcacgtgctggatggatgccctaatcacatattaaaaccgggtaaatcacatgattgaaaccctattccgggaaacccgaacccacaaccataggttctgttatattctcaagggattacactaactcaggaaatagagaaacaccttactacatcgctggaatgcacgagaattgagaaaatggagcattcggggaccctgccaaaactggctagccagtttacaccagttcacccaaaaacctcatttcttgctcaaaactccaccaaatgcaacca

SEQ ID NO: 285193 - DNA, 577 bp, Cannabis indica
ttatactaatcttacctcaattatgaattcaggtgtgccggtcaatctgagtggaacaaactgctcggcgatttacaggctcctaaaccataataatcacaacattgataagtgacacgctaaatcacttcccggggacttaaactagaaactaaaagtttccatattgaataaaaaaaaaaaaagcatggcaataccctaaacaacacaaaaatgggaagaactagggttcccaaaattgtcccaaccggtagaccggttctacaaccggaatttcggttctggaaaattcctggaagccccaaccggtcgaccggagcctgatggcttccctgaactggaattccggttcagtgcaggaattttcaaaaattcatatctcattaaattctaacccaaaccacatgcaaccttccagacctgttctaaataccccaaagaacattcccaaagcatcaaaacaacccagaaagtacagatacagaaaatgtcgttaaatctccaagctttgagttcaaaactcaagcttggttaaaatctacataacatgcattacaaactgctaaaatctattcaa

SEQ ID NO: 285194 - DNA, 540 bp, Cannabis indica
tatttcattgatggcaaacccatcccatcctctagttttgatgtggaaattcaccgcgatcgtttggctgtgttattttatcattatggcatgaagaagcaacttgagaacattgaaagtgaatccgaggcccctcccagccttcccaagaagtgatttgttttttcaatcagactgtcattgttcttatagttttttaatgttgtttttatgttgttttcgaaaacaaacattggtgttctgttatgttttcttacgttttgtgtggacaatatgtaatctttatttttgtattttttttttcttcttcttatgtacaaacaagttgttatgttaaatttgttagtattttcatttcacatcccttctttttatgttttttttttcttatagtttctctgttttttgaatacaaatattcatttcattataaaaacacaaactgtttcaataataaacttcatatatatatattcaatttagtatccaacatctttaatatccaatctaaagtatcatcaaatcccaatgtaatcaatg

SEQ ID NO: 285195 - DNA, 649 bp, Cannabis indica
tctaacaattctaacacagtttataatctgtactaagtcataaataattttctttgaattttctaagcaacctaggtatttttcataattaaaataagaaataacatcaataattcatgaaaaatacataatcgcctgaaaattcaatctaccaattttataacagtttatatatcatagcccatcatataaaataaatctagatttttctgagcaacctaagtatttttcataattaatctatgaattatactaaataattcacaataattccaaataaattcagaaaattatgaaacttcaccaagcaccttagaataaaataaggaatcaaaatatacaaaaatatctaagaaaaacacctcagaaacggtcagaacgcggtcgccggcgttctcgtcggtttcgtcgccggtaaagtgtaactttgtctccgattgctcttgaagcgtcctttcgattggggaagctctccacaatgctcaggacctcaaaacgatcaagaaaagtggtccgagaaggcagatcggggttgtcttcttcgttggcggtgtaccgtctttaatggagtcaaaattttggattttcgttttggacgttaaagcttcgttttcttacgtcaaaaacaatccttagggtcccatgcact

SEQ ID NO: 285196 - DNA, 563 bp, Cannabis indica
ttgggtggctactttaatgaaaatgtatcccacctctaagggtaaaacgtaaatgtcctaccaagttttgaggttttatcagctgatttgactatttataaatttgttccttttctaaaataatcttgtgttattaattgcaatgcaactattcaaatttgaattgatgtgtcgtatagaaagtggacactaatatggaggacttttttttcagtcaattctttccctaagaagggacgagcaaagaagtgtactctgattttttggagcattcccaactctttcacaaatttattttttaaaatacatcactaattttttttatttatagtaaatttttttcattatatctttatattaattttttttaaattcattcactaaaattactttttttttaaattttaatatattatataattttaaatgtaatatattaaacaaaaataaattattaataaaataatattagtagtataaatatcattttataaaatgtaaaaacaatgaatgataaaattttaaaaaaaaaaaacttaaaaaaaaaaacttaaaaaagtaac

SEQ ID NO: 285197 - DNA, 498 bp, Cannabis indica
gtaggtaagggcaaggctaaagccgaggagccgtgagagcgagcaggtgaagattgtacatgtcggggcggttaggcctggagcgtacgatctttgggacatcggggcttttttctgtatagtcgctaggcgacaaaacttatatatatgaatagcaaacttttataaatgtattttgtaaacgggatctcgggattttatatatgtaatactttaagtttctaattaaacaagcaaattttaattattcacgattttcaataaacctcgtttattagcaacgagctgcacagtatgtttaaaatcaagttaacacgcctatgctagttagggtgttacaatttggtatcagagccaccaggttgtcttctgaagatcgtcacgacatgtacaatcagcagttagctcgtttcatggttcattaagcttttattgttttaataggttattttaatattatgatttaagaaaagcctgttaggaagcatgttagtagcc

SEQ ID NO: 285198 - DNA, 408 bp, Cannabis indica
ttttttttttaaaaaaaaaaatttagttaattttcgtaagaattaaaaataatttttgttgtttttaaaaatacatgatgcatttagttaatgctttctaaaaattgtttttaggtttttttggttttttttccaacaaaaaacaatatctaggagtattctttagataatttatatctaggaattatagctattctttagataaataaaatttatatctaggagttaaaagattttctatagagttagcattagaaaaatactctaacatcttattaaattatgttgcttgtattagagtataaattaccaaacatatcacaatccgaaggtttaaataatctcaaacctatgatactaggattgggaagtcttgttaagtctattgaatagacttattattaaaaa

SEQ ID NO: 285199 - DNA, 537 bp, Cannabis indica
gttcagcactgcatatcatccagagacagatggtcagactgagagaacaaatcagatcttggaagatatgttgagggcatgtgtgatagatttccaaggatcatggagcaaatacctgcctttgattgaattttcttacaacaacagctatcagtctactatcggggtagcaccctatgagatgttgtatggaagaaaatgcaggtctccactgcattgggatgagttgggagagaacaaactcctagggccagatgcagttcagcacaccaacgaagctattcagaagatcagggctagaatgatcacagctcagagcagacagaaatcttacgcagacctgaagcggagggacattgagttcgaagtgggtgatcatgtgtttcttcgagtgacaccacgaaaaggactctcggtgaagagatttggcaagagagggaaactaagtcccagatatgttggtccatttcagatattggatagagtgggcagtgtagcttatagaatagctttaccgccatcattatctggggtgca

SEQ ID NO: 285200 - DNA, 332 bp, Cannabis indica
tatccttttaatttgaaatattatattaaaattatcttataggataaattaacctagatatttttatagatattctaaccataatattttcaaatttaaaatcgattatttagttaaattataagtttgaaaaatgatatttatgctattttatatcattttacttattaaaactttataaattgtattttaaatatttaaataacctagatatttttgtaaaaatttgaataatgcgtaatttgagatatttagacatataattatgataattattatttgtttattattttattctcaaaataatatttacctaaccatatctattttaa

SEQ ID NO: 285201 - DNA, 217 bp, Cannabis indica
agacttgcctttgtgctagaaagtctactgataagatggtgattactctgggggtggagtagttattttggagaagtgtaagatacttattcagtctaaggagaattctgtacatttttggcattgttccaatatttattaactactagtgttactattacgaagagtatactacatactatacttgatctgaatatcaaggtgttgacattatgtg

SEQ ID NO: 285202 - DNA, 653 bp, Cannabis indica
tttttgtaaatcccacattgtttaaaaagtatagtgcatgagtcattacaaatacactataaataaattttttctcatagtattttaatttgtcccaaaatatatattttcttccttgactaattgattaaattagtcttatttaattaatttattataattttttttaaattgtcccaaaatatgtattttttttctttgactaattgattaaattagttatattttttttttaaaaaaaatttatctattctatagtctattacaataatatacattttatattttatataaaaataaaatatatttttcatcctaattagtacacttttaaattgtaaataaagtattcttacattcatcttaatttgtctaaatatacatggttgatttatcacttgatattgcccaattagatataatcttttttttattattattttgagttctcaaatcaactctatttatttatctaatatatttatatactcatttaaaaaaaaattacttaatatataaaaaaatacaaaaaaataatcaaaaattaaatttgattttttaatgattataatgattgtacgagggacgatataattataaatgattacgtgattgcacaaccaacttcaatcaagtatttaaaacagtaagat

SEQ ID NO: 285203 - DNA, 533 bp, Cannabis indica
ccgaacaggtaaaaagtgagcagactttgtaaacctgtccactatgacccacacagagtcaaattgtcccgtggttctaggcatgcctaccacgaagtccatagctatatcttcccatctccactctagtatattcagtggatgcagcaaccctgcaggtcgctggtgctcagctttcacttgctgacacgtaaggcactttgcaacatattcagcgatgtcattcttcatgcctggcaaccataacatggatttcaggtcttggtacatctttgtcaaccctgcatgaattgaataaggggtcgtgtgagactcattcatgacctctttcttaatgttctcatccgtgggcacacaaactcgattcccaaatctcaacattcccgtttcatccactgagaaatcactagccttcccaaccgaaaccctagctcgggtttctatcagttatgaatcttgcttttgtgcttctttaattctctctaaaagagtggattgcagggtaatattagccaattgccccacaaccaact

SEQ ID NO: 285204 - DNA, 499 bp, Cannabis indica
ttgatttatcataataccacagccaagattaatgaataaaaacacataattaagattaatataacccactaaaggacaaaacaacaatgggacaaaatgactattttgcccctccacactaaaataacataaagggtactaaaggggtatttttggaaatcctaaattcctgaccgatcccaacattctcaatgtctaataaactgtcccacaacactaacatgctaagttgtgattctactgagccaaacaccgagttccatgttgccgggcaccgaaaatgcaaaattatgaaatttcactatatgacatgaaatgcattctgaattctaaaataacaacataaataattatttaaatatctataaataattttcataattaagtcataattaactgctaatttccaaattaaaccaagcggtctttacagctaccataaatatagaatctataacttctataagaatttagaagtgaaacgatgatatccttcgag

SEQ ID NO: 285205 - DNA, 710 bp, Cannabis indica
gttacgtttgatttccgcctatagttaggaaatttcaatacaatttttaaattttttagagggcatgctttcatattcctgagatacacatatttatattcttttacatatctgtctgtagaatctctccttgccactgcttgtatcttgtccccctcttgggtgtatttctctagatctatttatatgtctgtatttctgacttcttatatggattggttctctctccctctccccctggcattagttattccatcttcttcccttctgggttccgggaactccacagatgtaaacaccactggttagttgccacaataaagagaccacatctgtggtcctcagtttgatctgttattttcttttctttctttttttttttgtagacagggtctcaccctgtcacccagactggagtgcggtggcgcaatcacggctccctgcagtctcgacctccctgggctccaacaattcttccaccttagcctcccaggtagctgggactgcgggtgcacaccaatatgcctagctaatttttatattcctttgccatgttggacaggctggtcttgagctcatgggctcaagcagtctgtccaccttggcctcccaaagtgctggtatattttctcctttgtttttccatgaataataagattctctatattcattctcagatctaaaattaaatctatgactccccattttat

SEQ ID NO: 285206 - DNA, 633 bp, Cannabis indica
atgctttgttatgcattagaccagacacctgctgttgagtgcatgggagtaatgagtaggtgtcagattaatccaggaaaggaacactggaagacaatcaagtgaatcttaagatcaaaaagaggaactatatcttagtcgataagggtggtatttaataatcttatactacaccatatcaggtttctagacttgcctttatgctagaaagtctaccgatgagatggtgattactctgggggtggagcagtgaatttggagaagtgtaaaaacctatcagaagtctctaactctaccaatgagactgaatgttaaagttacaggaaagatacttatttagtctatgaaaagttctatacaatttgggcattgtaccaataatttaattaactactagtgttactttctgactaacacagaagtagttgccaaaaagtaaagaatccagtatccctagaggagtagacatatagagaggaagtcacaatatcaaggattttgtgactaaggaaatgtgtaatggtggaggaaaggttgtattgcatgcaacctgtcagatcctatttataatcatgattatatgttcaaaagtttaattctcttagtttgtcagttcactggatttagactggc

SEQ ID NO: 285207 - DNA, 803 bp, Cannabis indica
ttgaaaaaattcaaaaatctggccaaaccaataatgctggtctgggttatgtttctaatcaacctaattctaataccacttttgttaaatctaatagttttgtttctggaagaactgtttctacttcgcaggtttctgtctctacagcaaagcactctgttgttacagaaaagaagcaccacgttaagtttgacaattccaaagggaatggaagacgtttcatccctatttgccatttttgtgggagaaaaggtcacattcgacctaaatgcatcactatgcaaaacatgtttaaatctaattaccttggaaataaacatgttttacaaaaacaaaaatgggttgtcaaaaataaatgcttggtaggttcttcttgttttaaaactattgctactaacatgtggtactttgatagtgggtgctagacacatgacaggtgaaaaagaatatcttgagaacattagaccaatgcagtgtgaagaagttacttttggtaacggtcttgttggaaaagtcatagggataggaactctcaatttcgaagggcttcctagactgaagaatgtcatgttggttgatggactaaaagctaatcttcttagcattagtcaaatttgtgatcaggattatactgtgagctttgatagtaatcattgttatgtgtataatattcttgatgaaattgtcttgcaagggttcagatctaatgataactgttacaccatcactacctatgctacttgtcattctgttattgataacaccaccgatttatggcatgaaaaacttggtcatattcattt

SEQ ID NO: 285208 - DNA, 718 bp, Cannabis indica
ttcaaattataacctttcataatgcccataaacccatttaatcctgtcaatttgagcatcagaaaaatgtttgttcgggagcaaccttgcactaacaaagtaaagccatgccttggccactgggttaagttcacaccggtacaattggtatggttctccagcaagctcatggaacctcaggccaggataccctagagtttcagcaatatccacataattcaaacttctttcccgaaattgctgtttcaagggttgctgctctacagtgaaagttgggagctcgtaaagagcatgaatggcagctgtggaagcaggcactctaacccccctaactcttactttgtcatcctctctttcaggccagttggctaaaaattctaaagctagagtttggttactacgctcagtgacatccacaaacttagtccactgcctatttaagatttgatctctaatagacgcaaatgcaggaggaatgtttgcagtttgactcaggtttacaatgtctatccctctatcttcaatgaatgccctatctttcaatttcaaaaaccgctcttgagcatccatgttggtaaaccttactctatcaagattagagcgacccctaggtgggttggatgatgaagctcccccttcttcactcactcttgacctttttggacccatatcacccaaattttctaactttcaagatttttttaaaatttcggcagca

SEQ ID NO: 285209 - DNA, 991 bp, Cannabis indica
agagagagagagagaaaagaattacttgcagattcctgtacacattgaatgtgtagctcaaatcatgagcattgacattcataatgctgttcacgacataaacatttggggtgactttctgactgagcaagtcctgtatttgaaaacaaaaaagaaagaaagttgaaagtcttctctcagtttatcaatcaagatcattgcatcttcgttatcaatataggtttttctatggaggtaaaaacatttcacataatactttctaagtgggaatttaataatgtacagtcaaacttaacatagtatcatttgaaacacttactaagtaagccaatatggtagaaatacctcataaatctgcctagatttctggtaggcatgacagcgaccgcaaatatcaattatcgtgcggtagagatacatattgatagaattcgagtttttcttcgcaaattcaaatgcggtcaaagcagactccaagtcacctttctttccgaattcatatattgtgtcacaaaataccatatgtgcatgtggtaaagtacaagcatacctgtaaaatggggtcaatagagcatcaacaagggaagagtaaacaaaaaaagaattattccccagagaaaattgaagtctagatcaggtcaggtcaccaaataacatgtcctactcattaaagaacagtcagtaataccttatagccatcttgggctttctcttttgaacgcataccttgataacatcggaaggtttcattaattctttgattgagaaaccgaaacctgaaacaagtaatcatctgttaccagtgaaagcaatctgctatgctataaaataagccaataattcaatatggacacatactagatcagttcttccattctgctagttatggaaaaagctaaatttcaacaagttgggggattatcagtctctcctagtggagaatttgaatattgaacttaggtggcgtttggttgaaggtaatgaaatagaa

SEQ ID NO: 285210 - DNA, 79 bp, Cannabis indica
atgtggtatgctataaattgatagtgaaggcttcaggaaataaacactttcacatctctggtttccttcagagaaaaac

SEQ ID NO: 285211 - DNA, 561 bp, Cannabis indica
tggagtgtggaaaaattgggtttcagtgacaccataacccaagccctggactcgaccaccatgctcatctgtcccaagggccatggtcaagatgtcattcttcccttccacacttattgttccctcttcgagttgctttcgcaagtcatcctacaaacataataaataaatagagttagaaataaattatgaaacataaaaatataaatgcaattatactttaaacttacaatgcgttgggaaacttccacagctgggccctccaactcgcctttactgtttgtgcgaagtctcttcgataaatcggctctatcaattttgaccaattggtggcctaactctttctccatctgtaactccaccatcctcgcaccacctcgtccagctagcttgggccttctttctcgtcaccccgccattcttcagttaatcttgaagccacaaactctctccactcggtctcattgattatgtcttcgtacaatctcggtggcttctcaagaagttgtggacccacatctttaaccttgtaaataccttttgttaaggtgtttttccaat

SEQ ID NO: 285212 - DNA, 852 bp, Cannabis indica
cagaacgctcattttcaggaaaatataaaaaaagctgaagcaggatgtggcgaggatggagaaggagcttgaggaactcaacaaggccaaggagtgcgggtggtggacccatctcgcatcgctctccataaagacgatgtcgtcgcattctttcttgaagagcttctctggccgttcaccaagattgttcacattggttaacggcctctccttggcttctctggcatacctttcttgcgatttgcgagagtcgcctgcgatgtgcggtcctccgattatggttaagatattgcgaggtgttctcgagccactcgcgttctggctatctcctttgccatccgcttggggatgtccctcctcgcttcttttatacttgtcgaacttccctcttcggatcagttcctctatttcatcctgcaagacccaacattcaagagtagtatgaccaatgtccttgtggtacttacagaattttttaggatccctccggtcgcgatttcccctgatggggggcggcttcttgaagacgccgttcctttcctcaatcgcatagatatggtctcgaggtacggcaagttcagtatagttgacgaagcgaggtcctcccttccttttcggcgaggactccttctttgggggtgacttagccaacttcgggcttcgcggtctgcgcgggctacgtcttcttgggcttcggcccctggaattcttccctcgcggactgcgagagcgcgaccgcggtatgggtgatcgtcgtttgttcttccccttctctaactctgccagagagttctcgattctcttgtgaggttcggccatggcgaagaactctactaaggattccggccttcg

SEQ ID NO: 285213 - DNA, 555 bp, Cannabis indica
cgtcaccctcaacaatcattcctaatttctattaataaatgtaattttagtttccaatcaaattattaatctcgcaaataaagctgaagcagtcaattatcccaatctccccattgtatgttatcaaggcgaaacgttcaataattaattattttacctaagtagtaaattcacgaagcatgcaatttatttaacttagataaagctttgagatttatggagatagactaatctaggaaacaaattaataaagcatataattcatttaacctaggttctattcatcacaattaaaatttgtaatttgtcaaagatacttagaatcctagactattaggtgaatagtaatcctaagatgacagtagattaaattaaaacataatttagtggccgcctaaacaagattaaaataataattatgatattaaacatagaagaatagaagcaatttgatatatagtggaaactagaaattaacattcaataataaaactaagaattaatgtctcgggttttgaaataacccgtaactaaaaaaaaactactctgaactag

SEQ ID NO: 285214 - DNA, 650 bp, Cannabis indica
taaaaatactaaaattaatatttatgcaaaactaaataaaaccaaataaaagtcactaaaataaactaaaaatacttgagaacaaaacaaatttaatgcccaaaaagatataaataactctattttcatagagttatcaaaaccttacagtagttgcagcgaaatataatgtctccttccactcagatctctaatccttgtatcctttctgtagcagagtatcaccaagatctgagtctaaatctccttctcttgaaactggattcttcacagccttacacactatgattgagttctacttgatgtgtgtgggcactcactcttttcgctatgtggcttcggttttgaagagagaaagaaagagagatgatttcggctaggatattgaaggaggctttgaaatttttactgaaggaatgagatgcatcatcttttcccttaagccatcactacctatttataggaaaccacctagggttaggttagacttatttgacattaaaataataaaaaaataaatggtaaattgctattagagtggccggccatggattggatattgggccccactttgtaattttgccattttctcattttccatcttattttctcaaaaacactaattttctaatttaaccacttaaatgcca

SEQ ID NO: 285215 - DNA, 454 bp, Cannabis indica
atgattgataatggagcttcttcaaatattttgttcaagactgcttacgagaaaagggggctcaagctcaaggatctaactccatgcctccagcctacctatggtttctccggtcaaggagttgcatctctaggacaaatccggctacccctcacagttggacaagctccgacgagcataactatcatggcataattcctgatattggatgttccttcagcctttaacttaatgctaggtcgaccagccttgtatgacttaaaagctgtcacatcaatatttcactcgtgcttgaagttcccaacaaaaaatgaggtagggtatcttagaggaaatcagcaatctgctcgggaatgttacaaccttacagtagccaaggctaagaaggaaatatcctccagccagagcccagacaagggaataaacatttttaagtaggaaacttcccaaggca

SEQ ID NO: 285216 - DNA, 671 bp, Cannabis indica
tcctgagcaatcttcttccccttcttcttgtcaacattatccttgtaatgttgcatattctttcctaatgtctccatcagcttacgaaaagcgcgctcgcccacggatacttgaagaagaattcgagatcgttaacaaacttcaacatctcaggccaaacttggacattgccctcctttgatactaatacaccttcaatgaaagcgatcagccaagcttgtaggcatcatctttatcttcgcacctctcaagttggagcataagggaatccaactgaacagaactcttcccttcaaaataagtccgaactagatggtcgttggacttggcgtgtatttcctcgtctgtaggggcactacccataggtaagccagtaatgagtccaaactctatccgtccgaatctcatgtcatttctccctacatgaaaccaaacctcatcctccttttctgtgtccactttcatttttcgtaagaggaggctgtggaccaacgcgccggagaaagtcaactctccagcttcccaaaagtgtccgaaaggactagcctttactgtgtcaaccaaatccatctcagtaaacttggccttgatatatctaaacctatctgtaccccgataggtaagacgtcccgtgaaatgcgaggaaactggaagtttaagttcaggagcca

SEQ ID NO: 285217 - DNA, 657 bp, Cannabis indica
aaatttctagcaagattagggacataccttacaccagttagggttctgacaattccatcaaacattttaaaactgacattacctgaaccttctatattgcatgtattgttatttcccaatattactttgccacctttagaatctctgtagtcagttaggatttccctagaatttgtcatgtgaaaagtacaccctgaatccagtatccagtcatctttaaaagatgtagaagcaacatagacttcaccactgtcataaccatctgagtagttagcttcttgttgtttgtcactttgatgtttgctttgatctgttctttctggaaatctgccccctttcttgttcttgtatttgttgttgtagaaatagcagtctttcttgtagtgtccaggttttccacaatagaaacaccctgtagaatcaccagaatctcttgatggtgatctactcttccctctgtttgagtttctgtgatgatgtgtgctattacttctacctctgttctggtagggtttcttgtgagatggccttcctctacttaggttcatttcaccatgtccagaattggatttttcactcttcatctctaagtctttagattttagggctgaaatgacttcatcaagtgtgattgaagtccttccatacttgattgct

SEQ ID NO: 285218 - DNA, 751 bp, Cannabis indica
acaacaaattaatttattaggggtgacaaaagtcgcccataaaacaactaaatcgcccctaatgtattttagtggcgacatgtcgcccctaaaagttcgcgcctaaaagtaccattaggggcgacaaaaaaagtcgactcacaattggggcgacactgtcgcccctaaaagtaaaacacgaatttactgttttttacttttagaggcgacaatgtcgccccaaatacctagaaatgtcgccccaaatacctacaatgtcgcccctaaaggtttttatatgaaaaaaaaatataatttatattatttaaaatattaatttttaatttattaaaataattataataacaaataaaattaaaaataataattaatatcaaatttaaattacttcattaataagtagcacaataacataataaaattaaatagttcttacaaattttagtaactaaaacaacttaaagaaaaaacaaacattataatagttcttacaatgaaaatgtaatagtagccttttagttctacaattgagataaaaagtcatttgatctctcattctcattgaactctggatgactcgatggctggcagtgtgatgtctgaggttgttgtagcggttgtgtatgtctgaggtggttgtaccgggctgtgatgtatgtggtggttgtagcggctgagatgtcggtgcccccatcatccattgatatgggtaaactagctgagcctgctgtgatgacaaaggttgttgtga

SEQ ID NO: 285219 - DNA, 529 bp, Cannabis indica
gttgatttttttatctctttttttacttatatcagctaacccttttttttctttctcttctccctttatttatcattttttatcttttttcttttccaactctatctctcatattttctttttctaacactttttcactttctcacaaaattttattttattattttttaaaaaaatacaaacgcttttatattttttttttcttctcttttacattttcttattattcacactcaaattgtttcaaattatcattaatcacattttataaaaaaattacttaactaatttttttaatctttattaaatataattcttttactttctacactttttcctatttttttaactactctttctttattcttagtaagaaaaattaagagctatcactcctcctatacatttatctcgtttacatgattaataaaagttttttagatgttttgtagtttattcagaattgatttatgaataatttacatattttaacaagatttatgtcttgttatttttctattaatttata

SEQ ID NO: 285220 - DNA, 851 bp, Cannabis indica
agctcagggtggtcgccctgtaaacccacctcaagctcctcctgattgggagcaaagagttgcggaaatgcaagatcggatcccccaacaagatgaagaaattcagagattgaggcagcagggtcctcctgccgtgcctcctcaagtggttcaggccgtggcagttccagcggtgccagcagagcaacctgttgttggcaaccgtatggagccgttgtatgaaaggttccggaagcaggcacctccagtgtttctgggaggtcctgatgtaatgaaggccgagcagtggctctcagtgattgagcgtatcctcaattttatgggagtggttggtaatgaccgggtgacatgcgccactttccagtttcaggaagacgctctcgtgtggtgggagttgataaccctcactcgggacgtcacagtgatgacctgggaagaattcaaggagttgtttaactccaagtattacaacgaagcagtccgcagtgcaaagcggaaagagttcaccgaattggttcaaactgagggaatgtcggttactgagtatacgacaaagtttgaccgtttggccaagcttgcagcgggaattgtgccaactgatttcagcaagaaagaaaaatatttggcgggtttgagtgcaaagattagacatgatctggttattactactactgaggcaaccacatatgcagagatggttgaaaaggctttgagagccgagggtgcagtgaaattccttcaggagccccgggtgactccgagtgttggtggaacccccactgttcctactcctgtttatggtagggatggtggtgactccaccaccgagcagaaaagaaaagttgttccag

SEQ ID NO: 285221 - DNA, 637 bp, Cannabis indica
tgattgtgaatatcatcatttgtatgcgtttaacatgttcttggacaacagggtcaaactctgccaacatttcaaaagcccaaaaaatttccattactattttgatactgaaagtacaacttgttgattttaaagatccaaattaccaagttgattatctttaggttgattgatttcaagatatgaattatagacttgaatcgataataaagcagtaaatcacacaaagatttacaagcttcatctgcactgagaacacatctcagccgactagtgcttgggttccccgaaccagggtaaattcatctactaattctcaataggttcgtattacaatctccaattctctctaaaggaatcaaatacaaacttaacagcaattagtaatgaattaccaacaacaatcaagaatcctgattgttagtgcacaatcccttgtgcagcaactgagttcttcttcaacatttcttcaacctgaaatcccttcagatctgatgatgaagatgacactgaactcccttcagttagaactcagcaactccaggctcagatcattccgccattgatgaccatcttcaagctatacgatctgacctgtagacacaacaacaagaagcaagatacgacactatctcca

SEQ ID NO: 285222 - DNA, 633 bp, Cannabis indica
tcacccatgaatttctcaaaaaagcaaaaattctgttatataaacacactttatatagaatagatatatgagcttatatatttcacttatttgtttctactgaaaatatataaaccattagtactttaatttttgataaacaatattagtaaaaatgttgggtgcgtcctataatttggctgggcccaaaaatcgtagttaagatgtggaaagtgaaggtgtcgataattgcctgtaaagaaacaaaatgttttttgtaacatcaaaattcaaaggtgatgatgtaagttagatatatatgttttgacattaggtatgaattgtaatgaaagcacaacaaagtcgcaatgtaatactaattatacgaatagctcactatagattaaggtaaattaccataataggtatggatgtatgggaacgaagcaagcatcctacggcgttgacttataatagttcagttcaagtttggcaaagttagctcaaaaactatttcaacttcaactccatcatataatgacaaaaatgtggataggtggaccaataaaataatgtaatcatatttgaagatgagttatattaaaaaaagtaagcattggcataaattttatgtttgtaagcggtataaattta

SEQ ID NO: 285223 - DNA, 680 bp, Cannabis indica
aaaattggagcagtaggaggatgattcgagggcgtaggatcggattcttccaccctttttcgggtaccctaggttctttgtcttagccataggtatttgaaagatagaaagaagaacaaggaagcgaaaacacaaaggaataggaatcggttaggtagtgagaataaatgacaaaagaaaattggtttaaataaacatgggagagtggagtaaaaaagaaaaccaatttcaaattttgaataaccatcagcccacgaacaccaaagaaaaccaccccactctttttccacaattattttttaaaaaaagaaatagaaggaaactagaataaccaagatactttccaaaaatagacaatttaagaacatccttcaagattaaagacaaaatacaatgaatatgatattaaattttaaaaggtaatttatcaaaataaatcaatttagatcaaatgttgatacttatcaaataaagcacaaaattttcttagcccacaagccaagtcaccaatgcctcactctctcttttttttttttttattttttgtttttgaaaaaccgaaactactacacaaaaaaataaaaaaaataagcacaatacatataaggtaacgtctagagcaagcatctaaacaaaatttctactaacaaacctagacaaaaaaactaaaaaaaaaaaaa

SEQ ID NO: 285224 - DNA, 543 bp, Cannabis indica
accttgaggactattgccgctatttttggaccttgggggactaatctgtatcaacgtgaactttttgggggacttttgccgcaaatttcccttttaattataacttgctttctgagttattgtgtgttatttatttttactcgttttgttgtggaaccagttctattttattttacgtctctatgtttttatttttaatatgattccctcttatttttaaattataatcggtttctgagttattatatgttatttgtttttagtcattttgttgtggaacagagtctattttaatttatgtcatcttgttttttatttaatcacttcaaaaatttattcttggagtatttattttagaaactagtttttaatttagttttttctggaactgattttttatttagttaattcaaggaaccaattttttattgatttgttttatttaactggttttgtgtgtgagtttttatcttagttgctttacgaaactagttgttttttttatcaaatttttaactagttgataaatataaccaatttttt

SEQ ID NO: 285225 - DNA, 568 bp, Cannabis indica
aatttatgaattaaaaaaaaaatgtttgcaacattatgagaaaagaacagggaataaaatcccaaacttgaaatccaaattgtttttaaaatttaaacaattaattcaaaagtaaataaatgagcttcttctttatctttgacgaactccatcccattatccagctttcaaatccaactcgctaaggcagcacctgagtttaagaagcttgagctgtaagaagaaaaataaacaaggttagtagtccagaattaataatccaaatggataataattcactaaaactcatcagtttatagaaagaaataccttgtttctttgcaagaagcttaggacattggggtttccaatggcctttttcattgcagtagaaacactttccttttggtgtatcaccagaagctgcagcctttttgttcttagctgttttcatagcttgagctcgcttcttggcatttttccacttcttcttattcttgggtttggaagtagaggcaacgtgtgcctcaggattattcgtcctattaccatttctagaattctgaggtttactccatttcttcttggg

SEQ ID NO: 285226 - DNA, 551 bp, Cannabis indica
aatttaaagttaaaaaaaaataaagaacaaacctgagtattgggttcgacgtctgtgtaggtttttccagtcgtgggtgggttcgcgggtctcctcggtcgtcacgggttcgactgcgtatggtcgtgggttcgtctgggtcgtgcgggtggctgtgggttcgagcggttgtctaggttagactgcgtatggccgtgggttcgacgtctgggtttgtgggtggcgccgattggttggggcgttcatttgggtggccgtgggttcgaacggtggtttgggtttgtgggttttggtggagctttggtggtatgcgtccgtccgttcgtgggtttgggtgtgggttcgtgagtttgggagagggaaagaagagagagaatgtagttagagggaatgtgggaagtttgaaatgagaagggtatttttggaagaaaagagaaagattggtatatttttttcgatgtgttataattaggtataatttaacaccattagtcatttttaagcataaaatgtcaatttccctttaatttggctctccttgctaagcaagg

SEQ ID NO: 285227 - DNA, 734 bp, Cannabis indica
aaaaaagacgcataacgatcaagatttgagagatttgataatttagattaagtaaataatatggagagaaatacttgcacaccttcttatgaaaccacgaaggaaattcttttttgtgtaaaagattatggttagcattcgggtccttttgtccgattacttctaggtgctctctattaaaagagaaaaaattattacaaatttagctaaatagaataatacaatgttattcattaagcattatgtaataatttgattaacttatgtcatataaggttcgatctcgatacaattctgtaatatgtaccacttagttcttttgcgagtcttcttgtcgagaattgttattgtttgcttaccaagtggacgacattgagatttaaaaactattaaatatgagatagaataggagaattttcattgccctcatgacagttgaattttttatgcacacttttgaagtacatggaacaaaatatcaaagcctgatatatatcgtacctctcaaaagggtacatcaatctcataaaaattggcccacccaatatggattcctcaggtaaatgtatcaccaaatgtatcgtgatatcaaaaaatgctggaggatgagttctctccattttttacaaaatgtgaataaggtctccctaggccttctccatgtcttttacattcaatgtccttaaacataaaattttgaaaaaattacacaattccattatggtgcttgatac

SEQ ID NO: 285228 - DNA, 661 bp, Cannabis indica
gatcctcgtaaaataatttccaacattacattcattggtttagtgctctacttctccatgatactccaaccttttacttggaactcttttgaattttccccgttgaggttgatgggattttatgccctaaataaaacaactttaatataatcttatttattatcaatagaaagttagaagtcatttaagttaacatgtgattttcatgattattgtttaatatacaatttctattaaatccaaaacatatagttattcacaattacagtgatgtcaacacagtggaaggtaattgttattatatgtttcaaagcttatgtcccatgattcatcagtgcattggatttacactgatgtgataatcagcgataaagtttacttacaccttggataagtgttaagtcctttccaaggcattggtaaagtatgttagtatcagatgtatggagtatacattagactagaccgatattgagtttggtaaagatatcataaacttaccattatatctttctaagtcaatattaccatgttgatcttagatcaaaatatctcaatcttcatatggttaggttcaatctcaagagtgttatttgtgttcttagagttgttcgttaaagcttaccaattggtttaggccaatacttacatcttgggaaca

SEQ ID NO: 285229 - DNA, 732 bp, Cannabis indica
gttctgggaaatttcagaaccccatccggaattctggatgcacaaccggaattccggttcctcgcaggaaactttcaaaaaatcatacattgctcaaatcaattccaaaccatacaaaaacttccagacctgttctaaataccctaaagaacaaatccaaagcactaaaacagcccagaacacacagatactaaaaatgccatgtgagctccaagctttgagtttcaaactcaaacttggctaaagctcacctacaagcatcaaacactgattaaaattacatattcatgcataacaaagctgcagaaaacaatctctaactcatgcaacaactacagccaccaatttcgaaaatttctctttgaaacttaagcttttgaaaagaaaatccataactttaaacaacctaactatcatgcactaccagcagctcaattcaactcaaataatcatgctttaaacttcagaaacaacatcaaaaacacagcagcaatatcaactcaactaagcatgcaaaacatcatctttttcatcaaaattcaagaaacttaaagagtaagatacaagggtcttaccaagcacttgaagaacacttagattgaaagaaaaagagcttgaaaatcaaaggaatcccagccctagtacaccataccagccgagagagagagagagaggaaagagctttgtaaatttctaaattttttctaagttttgaaatcttgaataatgaga

SEQ ID NO: 285230 - DNA, 917 bp, Cannabis indica
ctttcacttctttacacctcataatggtataaattgctttagatctgcaggggttaggagtgttactttttaaaattgtaaaaccttcaccttagaaataagagaaggtaatacctatttgagctaaactgtagtccatactgaggttttaaaattaccaattcctcccagattttagtttatagataaatgtaagcttgtttaaaaagtgatcaagcttaacatatatagattaaaatactcatgtaaaactccgataaaagtttatccagataagtaaagttctatcttgagttatatgagactcgatgtttatttgtatcactagcgatacgatattttggaaggtgttaggcactaatagtattttttaacatttttattgagactagtataaaataactattttataaaagtggtctagtacttttttgtagcactatttatactcattttctaaagagaaaataatacaccaataatgcaaaaatgtgtcaaatttagcctgtatacttataaatatttaaataaataggattctcctttattcaaattatgatcttgtagagtaaatttttttaaaaaaaaaaaggaaatctctccgaataatcaaaatcaattgtaaattgttattgattaccaagaaaattatattgcactaggcaggtgttaccaattacaaccaccaatccaaccaacaatcccaaaagggattaaaaaaacaaaagcagctaaaggctatataattaaagctatcatctaatcttttctatatcactaatttcttttactttactaattttcttttacttttagtcattacatttcgtactttcctagatgagcattgttatgctggtgcccagaacttttctataagtgtcaccctactgattagttagcgatatttcttaaaa

SEQ ID NO: 285231 - DNA, 969 bp, Cannabis indica
ggcagcagcagcagcagcagctccagccttgggccgtttttgaaacacaccatcaaagtattccgagggttggaatgtaggaccagtgatagggggctcaagtgtttcatgtgattgggccacattcttctgagaagataaaaccttaaagattagatttggaaaaacaagtttaaaggttggctttttacctcttcggaatgaaacaatctggttcagaatgtgtgaggccaaatcaattgaagctccagaggtgatgcggtataagaatgatgccacatcttgagacactacggtcttgttggagttaggaacccaattgcttagagcaaaccgcataagagatgcatgagcaaatgtgagatgagtgattcgaagactctctcctggtttcaattcagatcgagcacccgtgagttcagagagcatcaattcacgatccatagacatcactgcattggagacattctcgggcaattgcaaagcttgagcaatgtccttttcagaaaaagagaaccaatgtcccctaacatatactcttcgatatagtctagaattctcatcaagaaaatcatcagtgagattagcatagaaatccttaacaatgtttgcaatgaacccattgaaaccagtgagagtgttttcccattgatgaaattgaataaactttacaatcccataaacccgatgagcatgcaaatcatagttcctctcacattcaaacttacgggttgcatataaattccagtcacgttcattatcacgataataaaatcgagggcagtgagaaagagttgaaggaacattaccagaagaaggctcttccataggctgcttgcctttggcagcagcagaagcctttgctgcagaagcagattttgacaaaggaggctctagctcgagttctgtgtcctcactgtctcccatgtcctctggattgtccttctctgaatgaagagaaactgattt

SEQ ID NO: 285232 - DNA, 564 bp, Cannabis indica
attaaactttattttgacaaaaaatcaattcaggatcctatttgtactattttagaaaatagaaggtgcattttgtcatttaacaaaacacagggtccaattaataacttttataaaacagaaggtacaaaacgatatttacccatatatatttccgaaattaatcatttaaaatgccccagaaaatggtttaacagatttggagcatgttactgtaggtatactttgaagttgacttacactaaagtatcatcattattaagacttgagtcgtccaaagaccaaaattgcatcatcgaaaacaaaatctacccaagccaaatgaatcccaatatcaatattatcatttcaaaaagaaaaaccttgaactatagaggaaattacactgtatacctactttttatttcatattttaatttttatcttcattttactactctttaatttatacccacttttataagttatattcccattatggacattagaaagtctaattttgataagttttgtgaggttatatttggtactttaattataaagaaggtatttatcaattaaaat

SEQ ID NO: 285233 - DNA, 100 bp, Cannabis indica
agtatggggaccatgggtcaatataaccgagcttccaatcagaaaagtgaaatgagatctccacaatttatttctgtttagccaagctcgaaggatatca

SEQ ID NO: 285234 - DNA, 775 bp, Cannabis indica
atgatttccttcgagcttggcgtaatagaaataaatggaagagcacttgtttcagtgattatattagctcactgaaatatcatttataggaggctaagtgtcttaaggataaaatacattgagggatgaaacggtaaatttatccctactcggtgtaaatcatctatagaggatctttgattattgggattagaacgatggtgaaatgtttatagcgtatctatatcgtggaatatatagagcgttctatatgactaagagtgcaattcaaagctctatggtggatgcaataaggaattaataggtcatggaatttacttggtaaattctagatctgcttattggaagctcggttctataggcccatggtcccgatactagttgagacgatactgcttgtaagactcaattaattgattttaattaatcatttataattttaaaattaaactatatctagtttatgaattttcactaagctatggcttaattttgaagaaaagagattctagggcttatttattaattaagagaatttattaagtctaattaataaatatattaaatggaaattttatttgataattaattttaataataagtaaatagttttggcatttaagtggtttaattggaagaatgtcgcttttgagaaaataaggaaaaattggaaaaatggcaaaattgaaaagtggggcccatatatccatggccggccacttatccctattttaccatttattttttttcaatatcttaatgccaaataattcta

SEQ ID NO: 285235 - DNA, 480 bp, Cannabis indica
ccaaactttatcaaactctccagtacacctatacaatgcaataacaaccatttccaaccaataattcacagaacaaaccaataaatcaaattatgccattaaagctcaaagcttgagtttcaaaactcaagcttgcttaggacgaacatcaagcatccaaaacaagttgctagggacttagattaactcaaactaaccctagaaattgaaccctaagcatttcataatgaaactaaactacaacttcaaaaacttaaggggaaaagaaactagggttaccttgtcttgattcctcttgaatcccttcctgaaaacacagaatttcagctccaaaatccctttgcctcagctggtttcgaagagagagagggaaggaaaagagagttcttcaatttttagatatttcttttaattttccaaaaatgagataaatgagttaacaaagttgattcttttctgaaataaaagccacttgtcacc

SEQ ID NO: 285236 - DNA, 414 bp, Cannabis indica
agagaagaagaagaaaaataacacacaaaaagcttgacgaaggctcaaggacctttgtcctaaaagtcatttcctcctcatatggacacttagggtaaactctagaaatgctcttaaggatttatcaagtcgtcatatgcttagcctagtgtctaaggatgagcatatcctcacaaggttctaaccacaacaaatgatttcaacttcttttacaagtgaacaatatgacctctatttatagagtttttactcccatatgacatgaatgaccaccataaagcccttggatattaccaatcataaattgggcatttatggtattaattgggtgattttgaggagttttggactgttagaaagactcacaaacgtttgtacttgtatgctgaaaaaacagtaactagttactagtta

SEQ ID NO: 285237 - DNA, 595 bp, Cannabis indica
aaaaatttccccactataaaaatgttattacctataactcatgaactaatatataaccaaattggtttaaataatgaaatgtaacaatttatattgttagaaggcaattttgtaataaagaatagcttatgggacggaatgtaatacccggtaaaaatatacatatattttaaattttatttgttatacaatttgtgtgagaataaatattcatttatttctactaatagtgaatagagactattgcttagaatagtattgatagatttctaaacatagttgaaattatagtaagtgtcaaggtaaaattatggtgtttttacgaattaggataattactcaattaaagcccaatatgaaagtctattagagttttatagattatttagtgggtttaatctattgtatgaagtgcattaaataacattataatggaattaatgtcacaaaaattcgtaggttttgataaattcgcaggattaaaaactgttttactaaaatgatcatatctagagttttagagctccgattgaggtgattccagtggcgttggaaagataattcaaagatctataaattttgtagaaatagttat

SEQ ID NO: 285238 - DNA, 345 bp, Cannabis indica
tatggaatctatagcttctataggtatttagaagttaaatgatgatttccttcgagctttgctaaatagatgtaaatggaagagatcttgtttcagtgattatattttagttcactaaaacatcatttacaggtagctaagtgttttaaggatcaaaatacattgaggggtgaaacggtaaatttatccctactcggtgtaaatcatctatataaaggatctttgatcattgagattataacgatggttaaatgtgatagcgtactatatggtggaacatatagagcgtactatatgactgagagtgcaattccaagttctaagagtagacgcaacaaggaatta

SEQ ID NO: 285239 - DNA, 583 bp, Cannabis indica
attgctacgcgatgattgctatagcaatgccagtcagcaataatcattttcctgctcctttttctccttgtcccaaacattttcaaatacctattcttgtattttttctgcttaaaacacataaaaacaacaacataagtccatctaacacttactaacacacacacttccatttattacaaagacacaacaaactaaacacaattacacaatatagacattaattgctccacaattcacattaaattcaagcttaaagatatgaaaataactctaaatcttagagttatcaacaccccaaacttagaatcttgctcgtcctcgagcaatgacaacaaaaaataaacaaaataaagcacacaacaaattttacacaaagactcacacacaagacacatgagagattctatagaaattcaagatggcctagcgaacattgacgctctcagaaaaaatggaattaaatggaatatgaaattgcttgccgtaactttatatgctgcccctttaacgtttttgtcattggataacattaatatttcccaaaagtcacctaatcaacaatttatacaagtatatccca

SEQ ID NO: 285240 - DNA, 463 bp, Cannabis indica
ctatcatgttcccaagatgtacgtgtgacccgaagcaaatggtaggctttaactaacaactctaagaacacaaataatactcttgagatcaaacctaaccatgttaggattaagatcttttgatctaagatcaatcagtgatattgacttagaaatatacaatggtaagattataatatctataccaatatcaatatcggttacaatccaatgtatactccatacatccgatactagcatactttgccgatatccttgaaagaacataacacttatccatggtgtaagtaagctttatcgcttactatcacatcattgtaaatccagtgcactgatgaatcatgggatattatcttttgaagcaaataatcacaattaccttccactgtgttgacatcactgtaattgtgaataactatatgttctggacttaacagaaattgtatacattaaaccataaaca

SEQ ID NO: 285241 - DNA, 533 bp, Cannabis indica
ttttaaagtgcccaggtttaccacaattgtaaaaccattagtttcatcagtatttcttgtgtttgaacttgatctgcctctttgaaaacctccctgtttgtttgaacctctgccttgacttctacctctgttattccaaggttttcttggacctggtctgcccctactcaggttgacttcaccattagaatgtccacctttctctgtcctcatttctaagtctttagatttgagtgcagagatcacctcctctagggttatagatgtccttccatacttaatagcagtcttgacttctctgtaggattcaggtaatgaatttagaataataatggcctggttttcatcacttagtgcctcattttccccagaatttgcaagttcaatatgcatccttaagaattcatccaaattttgatcaagagatttggatgaactcattttaaacccaaaaatcctttccttcaagaaaatcttgttggttagggatttctgttgaaactgttcttccagtttcttccaaatctgggcag

SEQ ID NO: 285242 - DNA, 544 bp, Cannabis indica
aaaatgatatagaattttttttttcaaatcatttatcttatttgatatttaatttaatttgataaaataattcaaatacacctagatattttaaattagtttttatttttgaattttaaattttgatgagattttttaaggttggttttaacaaccctaaatttttaaaatttagttggttagtttaaaataacaaattaattatattaatattttatttcacaatctcttacatggacatgtttgtttatttatactgtttattcaaaaaaaaattcaaacctattatttatttgatctaaattgctatgattaacttgttgacaaatccaatgatctgattttaatcatagttcaattgtcaatagatcttataaataatttgtaacaggtgattttgcaatttctttcatctgtgtaatcctagtaacatgataaggcccaccaaatcatttgacctgtgtgagcctatgtgtttagttttgggcttagatgcatataggaagcccatttaagttttgtaaattaaatggactaggttgct

SEQ ID NO: 285243 - DNA, 678 bp, Cannabis indica
atgacatccacaggtggcgttcttactccagataacagaacgttcatcgttccgatgttgatggattcttgttaacacctccgtttgcttggtttccagccatgatgattttccttcttgaatttaataagaatgtacttctcacgttcccacagacggcgctaaatgttgtcaagcaaaattcgcaacaccaaatgtatataataatactaataataagaagaaattgtttgaagaacaaatgcaaggcattcaacctaaaatggcgagtagtcgagctgggaacgtaaatacttaacagaaaactgcaaataacaagaagacaaaggattatagtggttcagtcagatcacggtctgcttagtccactgtagcaagagtttcgtagctctcatttcatggtggatcactcctttatatacaaagcaagtgtccagttagttatacaaagattgcattcattgtcaatccgtttgcacattgatttataataattaaactaaaaacgtaaacatcaataaatgaataacagtttctattcactaaatacagcaacgtatgcgtcttccaatatgcgagttgtctgttcatattctagcgtaagctcgcgggcttaagatagacctatcatttaattaagtttaggacgtctgcattcttatatagtcgcatctatgg

SEQ ID NO: 285244 - DNA, 581 bp, Cannabis indica
ttaaattaaatatactaataagataaatagatttaaaaataaccaaatagatattttcaatatcattttctatcttataatttaataaaatttaaataataaaacaaaccaattttacaatagatatggttagacaattattattttaagaataaagtaataaacaaataataattatcctaattatatgtcaaaatatctcaaattaagcattactcaaatttctacaaaaaaaaatctaggttatttaaatatttaaaatattatttataaatttcgaataagtaaaatgatataaaatatcatttttctaacttataatttataaacaattaaatatttaacaaaataaccaattttgaatttgaaaatattatggttagaatatctataaaaatatctaggttaatttcaaattggatctaaattacattttcactagtgaattaacggtactaaaagatacataagtaattagaagggtaaaacgttaatcttaccaaaactaattacgaaccgacacaaagaggactaattactggaattgattatatcgatagacactgcagtaaaacttagta

SEQ ID NO: 285245 - DNA, 608 bp, Cannabis indica
atacccttggttacccaccactggcacaggtgctggtggtagcccttgatcaactggggcagcctgttgcctcaaacgttgcaactcttccccttgacgaagtatgacacttcgcatttcttggaacatttgctgccagtcagcaggaggattagcattaccagcccccgcgttatcccctggattctgcggaggtggaggcagtgctggtggatcggttcgggtagccccgggctctacttgctcgccctgtggtctagatgattgcggagggtccattactagtacccctgtaatcaacaaccccagcgagttaagcaccaataccacacttacgcacttattgccttaaaccctaactcatctatttacctcataaaatattcacataaacaaataacatttaaagcatggcatcacataacacatacatactctagatgcttgcatactgcctaaaatggaaagcggtaaaaagatgatcacacaaacagtaaagtatttactctcaatacttactgcaccatgagtcgagcttatctctgacgacgaatgtacatgttcggccggtctacaggaagttgaaaaaccttggcgctctgatacca

SEQ ID NO: 285246 - DNA, 535 bp, Cannabis indica
ccgaactcaaacacccacacctagaatcagacccaaagctagactcggacccgtacccaaactcgaacccagaccaagatcacaaccaaggacatagaccaagaactgaatccagactcagatcggtattggaactttggactcggacccaacctacaccaagacccaggacgggaacccacaccgggagcctgatcttgacctagactgaaattcggactcgaacccaaactcagaccaggactcgaactccgacccgaactaaaacccaaactcgaactcaaaatcgcaaatggaactagaacctaactaggactaggaccaggataaggacctaaacccaaacccgatcccagatcaaaacccagacagagacctaaaccgaatcgagactaggactcgaacccaaacatcgacagcgacccaaacccacaaaataaccgagagcaggacccagaatcaggatagggacctgggaaacagaactaggaccgggacctagtactcgacccagacccgaacttgaacctaggac

SEQ ID NO: 285247 - DNA, 1892 bp, Cannabis indica
ccaacatgaaacagccgaagatagatgacatccatcctacagtgttgcatcttcggattaagggaactttgacccgaaattttccactaatacaatcaaaggctctcactcaaacatgtccagtcacgtatacagatggaaaatggacacttgggtttcaaaatgcggatacttgtgaggctgcagattcttgatacttaaggaaactaggaagcagagatcgaaagttgagagcttactttctccattacttcataataaggaggactggcataaagatgaatggaacggtcataataagtaatgatttataactaatagcaagtagaagattgttctcttctatatcttttttgtgtatgaaattctggttttatcataaaagctaacatactaagctagcagaatactaacccagtactacctgctgtgattatttccaagaggtgtttgttaatgtgttattatttcatgtaatgtttggaaggtagaatttgaattggttgactcataaggaaggcataaatttgtatttgctttgtcaaacatttatataccattgagtttttgtaagatattaacactctgccactatttttctaattcattatatgttttgctgctgctgtcattattttcccatttcgtagagtttcaaattatttgtgtactattaaatatagggcatagcatccaactgtttttcttttatctccccattggtatagatcttaatgcttggaaagaaaattgggggaaaaagaaagacaagacacctttcaagtccaaatatacaatgcatttgattattaggaaaccttgattaatatgatgcaggtgaaatgtgaatcacaattttcttttgttttttaactaaaattactgtatcttgagacttgattattattaggtacatgacataaaatgaatctggctctgatggcatgtgtatttaaaacaaaatggttgaaattaattttattatatattatgattgggaatgaggacatgagcttgattttacagaacagagagacagaggtgagctacacacgagctaaactaagtagtagtatttgtattatcatgattcatgcctttataaacttttaaaataatttcactagagcgtttaagatattacaaggcataaaaatattgagaactttttggaaaaggagtgtgtggtacgtaattccccatcacctttacattaacaaggctgtcatgtcaaaattagagcaactttttctccattctaacctttaagtctggccagccatccagccaagggttaatattattattaactacttaactctctctctctctctctctctctcttactaaaaccgaatcctatagtgaatgagtgagtcgcccacacacatcaagtggtacctcaatcatagtgtgaaagattgtgaagaatccagattcaagagaaggacaatcggactcagatcttggtgatactctaggacagacaggatacaagggttagagatctgagtggaaggagacattatattccgctgcaaccactgtaaggtttcttatactttatatgtgtttatttcatatcgttttagaagttcatatttaggatgttaaacaacatacttgttagtaaatctaagatcctagtaaaatatttccaacagagtagtgtgtttgtcttgtagaacggagtagcactcaaaatctcttaggtaagcaaggagcctcgtggttcttcctgttcttcgaggaattattgctagtgtttcagtagcagtttctagtgtgttggaaatctcagcagactcattcattgagtctggtgcatctgaattattttcctgcaagggatcattgtgactaggaacaacaatgttattaggagggtagtc

SEQ ID NO: 285248 - DNA, 881 bp, Cannabis indica
tgtctttcggttcagtttcttctacaagatcaccatcaactgatgaccgacctttctatgctgcagttctatgcgatagcaaccgtgagccagcatctggtcgccacgcaccactcccacgccatctggtgtttggaatttcaaggataggtgcttgatcaaactgacagcccctagtctgatcagtgctggatgacccaacaatatgttgtaagctgaaggcaggtcgacaactaagaagtcttgcataatagtagcagataaaggtgcctcgcctaaagttaatgcgaatttgattatgctaaggctagcgatgctgtctccggtgaatctgcaaaggttcaccatacaaggccttaatttggctttttcgagccccattttctttaaagtctccttataaaggatatttaccgagctcccattgtctattaatactctcttgatccttttattagcgagttgaatggttatcaccaatggatcgacgtgaggatatctcacatttttctcatcttcctccgtgaatgtaataggaggctcaatggttttcaccttcttggaaggttctggggcaaaggccgactgctcattctttatttctttcacatatcttttctgggcattattgctttcccctgcgatatgtggccctcccgaaataaccaagatgtcctctccctcaacgggaataggttgtaaccactagttgtttgggttattgggccgactgggttggttgtatccatggccctgtcttttcacgtactgcttaaaatggcctcgagcgatgagactttctatctcatctttcgattggcaacattcgtcggtggtatgcccaatatccttatggaatttacaatactgttaggatccct

SEQ ID NO: 285249 - DNA, 573 bp, Cannabis indica
ccgtaatctttgcaaaaccgctctgagatgcaactcatgctcttcttctgtctcagagtacaccaaaatgtcatcgataaacacaatcacgaacctatccaggtaatccttaaacacccggttcatcaaatccatgaatgccgccggggcattagtgagtccaaaagacatcacaagaaattcatagtgtccataccgagtacggaacgcagttttcgggatatcttcctctcgaattctcagctgatgatagcctgagcgaagatcgatcttggaaaagaccgtcttccccttcagttgatcaaacagatcatcaattcgaggtaaaggatacttgttcttaatggtaagcttgttcaactctcggtagtcaatacacattcgcagggttccgtctttcttcttcacaaatagaaccggagcaccccaaggtgagtagctcggtctaatgaatcccagattcagtaactcttgcaattgtatcttcaattccttcaactcagctggagccattcggtacggtgccttagacactggatccactcccggagccagttcaataacaaattcaat

SEQ ID NO: 285250 - DNA, 606 bp, Cannabis indica
  modified_base (588)..(588): a, c, t, g, unknown or other
atacgcctaagttagttagggtgttacaacaacaatctatgaccatccattcgctttactccaagagagagcttccttgataccaatggcttcgacaatatgaggttgcaaagagccctctctagataaacttctggcccccaagaccaaccccgcagcagaccttgcaatcaagcccaatccatactgcccataggcagaaaaaagtgcaccatccacattaactttgaccaaaggaaaatcgggagctgtccatcgctccactggtaatgtcgtcgtcccggttaagcatgcatctgtgacattaactttttgagcattaaaccactcaacataatttaactttgccattgccactacctcacttgcatcagggtgcttgaaggtccaaaccactcattccgcgattccaaatcgaccaacagaccatccagcctcaagagcctcagccgtagtccacgactaccaaccccgcttctaaccactcgagacacattgcatccggcgccacccgtagtaattggaaccttgctccagcacttcagcaaaagagcattcgcaccaacacatgcagaactcgtctcaggngcagcaaggcagacggac

SEQ ID NO: 285251 - DNA, 633 bp, Cannabis indica
ataattagatttgaaatttgaaaaacaaaaatcaacatacaaaactacacaaaaaatcggaatttaattccatgaaatagcatgaaaaatcgaagaaaacgaagaaaatagcaggtggtacggacagcatgcaaagcatgctgtccgcgcgcgtgggaggggagacacagcccagaaatctgggcgcaagcaccccctccgtcggccgactagtagtttaccgtttcccggccggccggtacggggtaaaggggggtaagggtcgtcctacccaacccctaaccggtttttttacccgggtttttacccgttttacttttaaaaacttaaaaacttctaaacttaaaactttaacttaaacttaaaaaatttaaacgtaaacgtaaacgtacggttacgtttcgttaaaaaaggttaaaaaaaaagtttaaagttcgttacgttaaagttttaaccttttaaaccctaaaacttacctaacctaaaaaaattaaaaaaatttaaccttaccgaagtaactaacgaacgaaactaactaacttaaattttttttaccttttttaccgaaagttaacttaccaaaaccaaaactactaactaaattagtacgaaccaactactactagtaaaccg

SEQ ID NO: 285252 - DNA, 559 bp, Cannabis indica
aaagtcaaagacttaaatttataccaaatatacaagaataattattctttcttggaccaccactactaatctaactctaagtttaatttgcctaaagtaaacatatacaagtaggagatttctaagattgaggattttatatcatttcagaatagcatgtcaggaatatagtcacctgcgccattaaatttcataagagaaagtagaatgacatcataagcagaagattatcgaccattcatccaatgatatactatgtaagcaaattcaaaatgaataagctaagaggaaaaataaggataatttcgattaaaataagaatccaacaatgtcccggtaggcgagagtcaaagttattcttattttacacgaaatttacaactacaattaataacagaaaacaacatggttcaatataaattcatacttaattcagaaattatcaagcatttagcaagtaacaaagacagaaaatacaaaacaagcgcatcttaaataatttccaaggtttctaacaaactgatacagtgtcccggtaggcgagagtcaaagatatcat

SEQ ID NO: 285253 - DNA, 501 bp, Cannabis indica
ctaatccaaattactaaagcggtcattacaattatccccccgttaaaaggatttcgtcctcgaaatctaacctgaatagctctggatgttgagtcctcatatcagactccaattcccaggtggcttcttccaccttactgttcctccagagcaccttaactagagcaatagtcttgttccgaagaaccttttcttttctatcaagaatctgcacaggttgctcttcataggataagtctgattgcagttcaagggcttcataactcaagatatgagtcgggtctgacacgtatttcctcaacatagaaatatgaaatacgtcatgaacagccgacaacgctggtggtaaggctagccgatacgctacctgcccgaccttctcaagtatctgaaatggcccaatgaacctagggctcaacttacccttcttcccgaagcgcctaatacccttcatgggtgaaacccgcaggaaaacatgttcccctgcctgaaatgtgacat

SEQ ID NO: 285254 - DNA, 560 bp, Cannabis indica
tgttggcaaccgtatggaaccgttgtacgaaaggttccgtaagcaagcacctctagtgtttctgggaggtcctgatgtgatgaaagctgagcagtgggtcacagtgattgaacgtattctcaactttatgggagtggttgataatgatcgggtgacttgcgccacttttcagttctttgaggacaccctcatgtggtgggagttgataaccctcactcgggacgtcaaagttatgacttgggaagaattttgggagttgtttaactccaaatattacaatgaagccgtccaaagtgctaagcggaaagagttcactgagttggtgcaaaccgaggggatgtcggttactgagtatactaccaaatttgaccgtctggccaagctcgccgtgggaatcgtgccaactgactttagcaagaaagaaaagtatttggccggtttaaatgtgaagatcaggcatgatctggtgatcaccaccaatgaagcaaccacttatgctgaaatggttgaaaagctttgagagtcgaggctgctgtgaaatttcttcaggagcctcgggt

SEQ ID NO: 285255 - DNA, 383 bp, Cannabis indica
atataatataatatacatatatattgcgagattaaatatgtagaaatacttattttctatgtatttatatgagacatgtatatataattatattatgtgtatataatatatatcatgtatgtatattaaagtgtatatatgttatatatatgtgtgagatatgtaacatatatagttgtgtaattaatatatattatgtttatatgatatatattaaagtatatatgttacatgtatatgagatatgtaacatatttatttgtgaatttaatattaatattatgtgtatgttacacatataaaatgttatgttgtaactgttggaaattattttaccaggatcttagatctactcacaactatgttgattaacaccctaaata

SEQ ID NO: 285256 - DNA, 640 bp, Cannabis indica
ttactttgccacctttagaatccctgtaatcagttaggatttccctagaatttgtcatgtgaaaagtacacccagaatccaatatccaatcatctttgaaagatgtagatgcaacatagacttcaccactgtcatagccatctgagtagttagcttcttgctgtttgtcattttgatgtttgttttgatctgttctttctgggaatctgcctcctttcttgcttttgtatttattgttgtagaagtagcagtctttcttgtagtgtccaggttttccacaatagaaacaacctgtagaatcaccagagtctcttgatggtgatctactcttccctctgtttgagtttctgtgatgatgtgtgctattgcttctacctctgttctggtagggtttcttgtgagatggccttcctctacttaggtttatttcaccatgtccagaattggatttttcactcttcatctctaagtctttagattttagggcagagatgacttcatcaagtgtgattgaagtccttccatacttgatagctgtctttacctctctatatgaatcaggcaatgaatttaggatgattattgcctgattttcatcacttagagcttcattctctcttgaatttgccaattcatatgc

SEQ ID NO: 285257 - DNA, 946 bp, Cannabis indica
agactaaaaattaatgtgataaataaatgaaataaaaaagaggcaaaattttagtggtgctatatacagtcactactacaaaattaattttttccaacagtttataactgtcttttatactattttccaacagttcttaaaacttgagctgttaagcgtggaagggagaagagatggaggtggtgatgtggtggagggtggagggaggtgctgatgtcgtgtgtggtgaaagcaagcacgcaacagttttgtgcgaggtgggagcaaggccgcaccttatcgtgcgtggtagaagcaagtcgccgacggtgcatggtggcagagggtggaggactggaggcggtttagacaagtgatggctggaagcagcttacacatcgaatgtgatttaaccttaaaatgtaaataccaattaacttctaagtataatatttttttgagataattaaaaaatattatttatatataatttgtttactaatatttgaaagcattattcttttaatgaaaacaacattactttttattatagaaaaaaaaattactgacattttaaaatgtcattcaattgaatcagttaaattatttttacaaatgtgattatgttataatttagtgacactttaaatattattaaaattaactatttataaattagtaacattttatattaaatgtcactaatacatataaatgctaacaattactaaaaaaatgtaatcaaataaaatatcatgttttttcttccaaaaataatatttttaggcaaataccattaaaatttaaaatactattattatgatatttttttatgactaaattcaaaataattctacaatagtattttataatgttctatttatacactttttcatttttctttttgtttaaaattgctgaattttttttgttaatcttttaattaaatacaaacttgttaatcttt

SEQ ID NO: 285258 - DNA, 814 bp, Cannabis indica
  modified_base (740)..(740): a, c, t, g, unknown or other
gtcattagtggttggtattgaaggtccttgaatatcatatcataacatgctagcgtttctttcttcggagttgtggtttcctatcaaattgtcttcgttgttgtgataatatccatcagattttgctgtttcagtgggtccacttaaatcaatcctgattttttaaaatatggtccattcttaattaaatgtaattggctgataaatattgtaacattatattttgatatatctacagatactatgtttagttatatttttagaagaattttatttttggtaactaaaatagataagtcacatattatgaacactttctttattttatttttttttaaaagaaaacattaatagaaaatatttttcaaatatgtgaagagagtttaaaaaaattattttttaaatatgttgagtttaaatttaaattgcaatctttaaatatgtgaattgcaatttatagctacattttatgtaagagaacatatatactgtgtatatatattatttatacatataaagaaattaaaagatttgatttttttttaaaacagtaggagagtaattaatgttcacttattttggtcaattaaataaattatatattaattcttatattgcattgtagttatatttgaagttgtaaatatatgtcgaggaggcctagtaagtatttttatgataattaatatgctaaataataaattatacattttattttatagttttaataatttttttanaattttaataaatagttatacacaaccatataaaaataagtagaatctgaatatttacaatcattttgatttat

SEQ ID NO: 285259 - DNA, 1173 bp, Cannabis indica
atgtttgattatagtttactctgtattaaaaaaaatattgttccaacaaacataaactagtaaatttattgacatatataatggtaagctatatgagatgaaatgaattattattccaatatacgaaaagaaaaataaaaatttacttcaatatgccaaaataaactaatagatttattagcatatacaatagtataggctataagaaaaggctacaatgtaaacaaagaataaattttttattttaatatactaaaataaactaatcagtctcttttacatgagtataggcataatatagccatatatgccaaataaatttatgagcaagacattttatgtgaacaatgcattttattatattcaaatctttgacaagtgtatatattattatccaagtttactatgtaagacatgctacagtcatatagtttgtatacaaccagatttgattctagacttgaaaaaatagactaattagtttgttattttataacacatattgtttaaaataaaaaaataaattgtcgttccaatatatgaaaaatagattgataaatttattggtgtatatcattatactctatattgaaaaatatgaaatattgttctaacaaacaaaaactagtaggtttattgacatacataatggtaagctatatgaaatgaaatgaaatgaattgttgttctaatatatgaaaagaaaaataaaaattttgtatcaatatgccaaataaaccaatagatttattagcatatactatggtaagctatacgaaaaatataaacaaagaatgaaaatttgtttcaatatgccaaaataaactaataaatttatttggcatatatgagtatatgcatatttgattataggatatttagtctgatcatcattttattttaaaattgataattttatcaaaagtaatcaattggtatcttatcaaaattattttattagtaatgatttaaaagttatttgtaatttcattctttatttaattaatcaaaatggatatattaatttatatttaaaaaatataggtgacttaaatatttatgatatatatttttttaaaaaaacacattactaaaatggtagcttagtagatggcaactcattattttagaaaataaatttaaaagttactcaaatatattaatataacctaa

SEQ ID NO: 285260 - DNA, 507 bp, Cannabis indica
cccaaaattggaaccaaaacgggaagttgaccgggactggaactaggatttggagttggaatcataactgaaatttgacctagatccagaaccgtaaccggaaaaggacccagactccaaataagacctagaccttaattgcgagccggacccggatccccacccaaacctggactcgggacctgaacccgaacctgaactcagacccaaacatggaaccagactaagcacacagaacaagggtcgggacgtaaaaccacaccctagtcttgatcccgtacccaaacttttaaatgggacctgggacctgaactagaacaagaccgagacccgtgactgtgatccaaatcttgactcgggattcaggtaacgtggcctggaacagaccagtagtcggtgtctagatttgggactcaaactaggaccagaacccagacaaagaaccaaacctgaacccagacctagaccttggacctaaaattagaacctgaacaagaatcgccgaac

SEQ ID NO: 285261 - DNA, 508 bp, Cannabis indica
tgaggataacgcgtctcggcgtctaataatcgcttactgacgtagtacaccgggtgttgacgtccttggtcctcgcggactagtactgaactaatcgcgtattcggagacggccaaataaatagacaaaacttctccgggcaacggttttgatagaactggaggttgccccagatgcgtttttaacgcttgaaaagcctgctcgcatttctcatcccattgaaaccttttgttacctttcaaagtctggaaaaactctttacacttgtcagaggatctggatatgaagcggtttaaagccgcgactttgcctgtgaggctctgaacctcctttggcttagtcggtgacggcatttctaccaacgctctaatcttcgcaggattggcctctattcctcgctgatttaccataaaaccaaggaattttccggaacccactccaaagacgcattttaatgggtttagacgcatcttgtatcgtcgcaatatgtcgaacatggcctgtaagt

SEQ ID NO: 285262 - DNA, 688 bp, Cannabis indica
gcactagtcggctgagatgtgttctcagtgcagatgaagcttgtaaattgatgtgtgatttactgcttaaagcttaattcttgttcataactcatatcttgaaatcgatcaatttaaagatgtacaacttggtaacttgaatcaataaaatctactagtagcactttcaattggtatcagagcttgaaattttataaaaatttgtgttagatcctactgctgtatgattcttgattgttgattcttgaatcaaccttgacgatcgattctgttgcaactaacttcctctgagttctctctcaaagaactacagaacaattgtgtttctgtttatcacttctgtgtgcaggatggaaatgttcagagaaggaggctccacctcgagacctcctatgctggaaggagccaattatccatactggaaaaccaagatgcgtgctttcttgagagctgttgatgaaagagtatggatgtccatagaagaagggtggtggaaaccaacgatgatggagaatgaaatcgtcatacccaaaccaatgagtcaatggaccactgttgaaatggaaagagcaaatttcaactcaaaggctcttcatgccttgttcaacgctgtctccactaaccagttgaaggttatagccaattgtgaaattgctaaggaagcttgggagaagctaaagattaagaa

SEQ ID NO: 285263 - DNA, 337 bp, Cannabis indica
tcaggttggttgcatggagtatgcatttattaaacttaccgtaatatcaattcaagtcaatatcgcctagttgatcctagatcatagcttctatctggcgaatagaaagtaaaggatgatctccttcgagcttgaccaaacgaaaataaatggtggagtactcatttcacatagctgaaatatcatttatacggggttaagtgttttaaggattagggtgttacggtaatctaatacctttacagtgtagatcattctatatactgagagtgccattctaagttctatgcgtggattcaatgaagaattaataagtcagtgaatttaggttataaat

SEQ ID NO: 285264 - DNA, 567 bp, Cannabis indica
aaaaaataatactttattaaaaataaaaataataccattgacaatattttattttatttttgtcaacagtattattttattttgttgaagatgaaaatttgaaagatacatttatcattatttttattagttttggcttaatatttattcaagccctcactcaactaaatttctggcttcgtcactgtaagcaacatatcatgcactcaaatcagcccaaaactgcttaaacatgcttactaaagctgcagaaaacaaacacaagctcatgcaacaatcacagcaacaaatttccaactttctctttgaaaacttaagcttttgaactaaaaattccataactctaaacaacctaactatcatgcatcacaaccagcttaattatcctcaaataatcatgcttaaacctttgcaaacgacaacaaaatcacagcaacaacaacaacctaaactaagcatgcaaacatcatcttttcatcataaattcaagaaaataaaaggagagaagctagaaaagaattacctctactagaatcactctaaacttgctgaaaattacttgaatca

SEQ ID NO: 285265 - DNA, 525 bp, Cannabis indica
atgcatatagaaatctgagccacccaaagtaaatccgaaagataacgaaactcttatgtcatatgcattatactgtgactgatcactcaattttaagaggagctttattatcttaatcaatttttagggtggagaaaactaattgaggtttgatgtagaaaaattggtatgcattgctaggtttttttttattattattattcctagcacttccctagaaaatccaattgtaaacaatatttctatccacttttctttgccagttagtcttcaaacacatgtatacttattcatagccactcactaatgtttggcggatgctatcttagtttccaaatcagtggtattaatctcagcgaagtcttcaggataaatataaactcaacttaattctcttatcagtttgcaaagctatttgtgaaacacacagatacattgtcaacttatccagttcattaataaatatccacaattttttttcttgccaaaataattgtaaaggtgcatttttattgtaatgtaaag

SEQ ID NO: 285266 - DNA, 1203 bp, Cannabis indica
  modified_base (127)..(127): a, c, t, g, unknown or other
gggcgagaagactttgcgagtgcggaaccaagactatgtcctagaaggacatatctaggtgggcttagcccactttacctttattgaggtccgacatgggtcttatgtgctgacctggagtccatgngtccaatactgaaatcccagataacatttacctccaagcttccagtgctactcgaccgtagaaggtggcttccatctgtgatgatgatctgtcgacgtgtcaactggatgcgagtgaacatgtgtgattatcgaggagtctttttccaaaaatagctatattttttacagctgttcattttttggtacaaaattaaaaatagcattttcatcattgatctacgccttggttctggggaacattaattgcaaggatacacgtagattgttggactccacaaccattggatgaagacatatgtttctggaagtgggatcgtggccatctatttcctcttcacgtgaattactttttgggtataaataccccttgtaacttctagttactacttttttccattttttaaattgtcaacccttcaaagcgcacaaatttctctcaatctttagaactacgaatcaacttcaaaataaagcttcttcaacttgaaaaattccatggacttttgccttcatttgttgctgaggattagggcacaagagttcccacaccttccatctccagtgatccggacttcatagcaaaagaattacgagcctggatttgacgtgaaaatcgattcgctaattgtctagcatctcaccttcgtgaagcgatcaacttccccagccagatccatcgacgatgagcttaacatctctattatcaatatcaggtaggttgtttcttcatttatggattatgttctttgaatttatcgtttcaaattgtatttgcatgatctgttttggggtgagattagggttttttgtttttgcgattaccatcttaagtagatttaagtatcatgtgccatattatttctcgaatcgcttgtttagaaattcttgggattggttgattggcagcaaagatgctagcaaagtttttctttcgcccaaaattcttctagtttatggttcgtcattaatctttgtcatctttctctctacattgttcctgacttgctatctgggacgagtaactcttggaagttcttttttctagatagttagtctagttgggacctctccaag

SEQ ID NO: 285267 - DNA, 582 bp, Cannabis indica
tcctcaagacgttttacttgtgaagaagtattagaacaagtaaacaaactcccaccccacctccctggaaatcatgagctctttggtggtgtgaagcgtaggcgagttgcagaaaatcataattggcggaaaaaaaaagcatcttctacgagcttgactattggtgttcaaatattcttaaacacaatgtcatgcatgttgagaagaatgtttgtgatagtttattgggcacaatattggacaatgagaaatccaaggacactaccaatgcaagacacgatttaaagaagctaggcgtcagagaatcgttgtggatgtatggagactttttcagtgctcagagtcagcaacaacagcaacaaccaattttggttcgcccgcaccctcgacaatatgtggagatcttacctacgccgcagactggacaaccttattaccctgccccgcctgttcaatcccgtgagaatcttgatggttcaagacttagctcgaatgcagatgaatttttagagtttactgatttgaacaatgatagttaggtttttttaattatgtcaagttttatgttttaaagtttattta

SEQ ID NO: 285268 - DNA, 870 bp, Cannabis indica
aaaaaaatttaaatctaatttttttctatattcatgcacgttatagctatttaagatatcctataaaattttgagaaattctgaataatttacagtatagaatacaatgttcaaacagtcgattttacacgcgtataaaataaaataagtcacgcgtgcaatataatatttgaacttagttttcggcgtggtaaatttttccaaattttacaggatgttttaaataactataacgtacattaccatgaaaaaaaatttaactaaaaaattatttaggaagctaaaataaatagagatgcaataatattttaagggtgtgtgtagaattttcctaaagtaattattatagttaatatttttttctttaatttttttattccactttgttaataggtggccgaacttgccagattatcgtcccaacccataaattatcttatttttttatttgtccctcaaatctcatcaatggcagcacggtttctctccaaaaccttcccagctcgaccctcacatctctctacacctctcactgccctttctctctctcttttgcagccccaccgattcgttccacgctatccggccgccatgacggcctcatcgaggtcgacctgtcgtctcagtcgccggattgtgaatcggaggctttaatgatcaagaagctcgacgcatagtccataggatcatcgtccagagggccacccctgattggcttcctttccttcccggttcctcctttgggtaccgcctcgacgtgacccattcaaattcaccgcttagtcgacaacgctcaccgatcgcctcaccgaccgaggcgtctctcgcgctctcgtctgatcgtggctggccttgcgctcatttattagt

SEQ ID NO: 285269 - DNA, 543 bp, Cannabis indica
ctttcagaggtcgtagccaccaaaaccagaacagaggtcgtagcccccaaaaccacgaacagtcaaaggtaagtttttttcttattaaaaaatagaattttcatagaattggatgggaatttgtgtatgttattctgattagattgttttaggatgtgtatacgaacttgtgcttgtttttctgcatgttaatcagtagtgttttattgttcaaacaagttgtcgatgacatgtcgataggttatcgatataatgtcgacaagattgaaagtgtttgagtctgtgttgttagtgtatgtcgataggatatcattggtatgtcgataggatgtcgaccttttttggaataaaagtggaggtctataatgtcgatagcatatcgaccttatgtcgatatcttgtcgaccattgttatgtagttgatatatgtttgataatgtcgatggcatgtcgacatgatgtcgaccttatgtcgacgattgttgttttctgcaaatatatttgtatgtcgacaggatgtcgacagtttgtcgatatgctgtc

SEQ ID NO: 285270 - DNA, 663 bp, Cannabis indica
ggtaaaaatgatagattttaaaaaagaaggtaaaaataaaagaggacaatataaaaagggtatagagtgtaatttcctccacaatttactacatgtgaaagtttaggaaaaaaagggttatttgcggcaaaacctccttaagtggtcaggtttttgcaactaacccccaattctaaaatttttgcggtaaaactccctaaactcaagttctgttagcagttagccctttccgtccatttttagctgttaaatgccatggtggaatgtccacgtgtacacagtgtacacgtggcacaattttattagtccacgtaaataaatatttaaaaaaaaaaaaaaataaattattttaaaaataaaaattttaaaattaaaaaaaaaataaaaaaaataaaaaagacctaatttataaatatatataaaaaaaattaaaatacagaaaaaataaatttttttacttttttttttaccttttttttttttttttcctttttttctttcttttctttctttctttttcgtttctttcactcacctcagaccaaaccctcatcgttctcccttgtcccaaaccaccaccagctctctatatcaattttcctcgcccaattcacgccgattctcccttgcctagatctcttcgcacgacaccaccaccacctc

SEQ ID NO: 285271 - DNA, 464 bp, Cannabis indica
tgcatgataattgctttgatttcaatattgaaagtttttagctcaaagtttagttttcaaagggaaatttcgaaatttgtttttgtgattattgcatgagttagagtttgttttctgcagtgtttttatgcatgattatgtggttttaatgtagttttgagggttgtaggtgagctttagccaagtttgagtttgaaactcaaagcttggagctcacatggcactttttgtttctgtgcattctgggtagttttattgctttagaaatgttctataggatgtttagaacgggtctggaagttttgggattaattggatttgttttggtaaagttatgaatttttgttttctgcctgcgaggaaccggaattctggttgtgcatccagaattctggatgggttttgaaaattcccagaaccggaattccagttggacaaccggtctgccggttgggtgattttca

SEQ ID NO: 285272 - DNA, 482 bp, Cannabis indica
ccgtcttatgaacgttcgggacttagtattgtgtgggacacggcagttagggttacggtcagcggtatgggcgtctgatcataacctggatttatgtatgattataatttatgcttttcttactgagtctgtcgactcacagtgctatgtttatgtgtaggtaagggcatggccaaggctgaggaaccgtgagagcgagccagtgaagattgtacatgtcggggcggttaggcctggagcgtatgatcctcgggacagcagatgctttttgtaatagacgctaggcgtcaagtattctgtattagacagtaaacttttgtaaagtttttttgtaaatgggatcccacagtattttgtatgaaatattttataagtttaattaaaaaacaaaaattttaattaatcacgatttctataaacctcgttgattagcaacgagctgcatagtatgtttaaaaatcacgtaatacgcctatgctagt

SEQ ID NO: 285273 - DNA, 839 bp, Cannabis indica
aaaaacaagatattttatatggttagaatattttcaattttattaaaaataataaaataaaataagtttgataaaaattatggtttgaaaccctaaaatttctattcaaacctaaattaaccaattattcaaatttcatgttatttttaccaaaatataattttaataaaaaaaaaatatctaataagataaaatgtttaaactaacatattcctaatcatataattttaattaataaaatatattttaaaaaataccaaatttgaaaaaaatatgatatggttaccaaactttgaaatttgaacaagattatttaaaaaaaataatattttaataccaaaataagataattcataatttaataaaaaaatataaatcctgatcttacaattaaaataaataaaatgatctaaaatttcaaaattaaccacaaggctatttttgtgagaaatcaaattttcaaaatttaaagcctactaatatctaaaactaattttaattaattaaaaattaataaaaattaattttattctgacaattagatttttaattgaaaatttagattctacacaaaattctaccaaaatttggcttttgtttcactgaaaaacaatttttcaatcaaaagatatcacaaaaacaagattgcactaggggagtatgcattgcatactcctcgtgcgcacagaggctgcccatgggcgagggagaggctgcaagcagcctgtatgggggggcaaaccttgggtgaggagggggacccaggaatggagtggccccaggaatcaaacaatacagagtaaaaagagttgttgaccgagagctgacctgtcaccact

SEQ ID NO: 285274 - DNA, 516 bp, Cannabis indica
agaaaaataaaataacaaagtaattttctactctctttaaaatctgattcccttcacattggtcttggggtcctatatatactaatttcataacccaataatctaataataatggtgtctaagtgggtgaatgtctcctaatttatgtgcactacaagagaagtgggtaatcatattgggccgtgtgcgcacgaatctgactttgttgaggaatcgattgcagcttcattgtaggaagaacgtgggtcagttactaaggagcaagttgatatgtgtaatgtaatgtcttcatagtatgaagatgtgtgtaatgtaaggatggtgataaatgctcaaaatttttcttcctttctgctgctataagaggaagaaggaataccattgagtgcattctgaataaaaacaatgaatggattaatgaccgaacgctgattggccaggaattcctggaatttttcaatagcatcttctctggttcggatagtaaccgtccgatggattgtggtcatttatttc

SEQ ID NO: 285275 - DNA, 575 bp, Cannabis indica
cgctaatatttatggaaattgcttctgttattaatgctctgcctctaggagatcaaaacattgaaagtttttataccaaatcaaatttaaatttacacaaacaaggaaggcatacccaatacaacacaatcttgacataagcttttgtcaactttgccatcctttgttatatccttgaaaatgaaaagcacttaaaaatgaccttgtatttccaataaagtaattaaataatgaagctgatttgacttatatattttttaaaaaccttgcaagcacgatttttaataaatgtaaccaccagtttaatttttcacgtactctgtatagaccttgaagtacacaatttcaaaactttcaacttattgaaatatgttttagaaaaataaatgataaacttttttttgtgtaatgaagggtagaaatttaggtgatgtttgctttgacactgtaatatacattgtaatgaaataaagtaagttgtatattgacaaaaatactatcgagtttatttcttttaatatttcaaatttaaataaaagtaacaaaaagggcaaaatagatatttttaaacaatg

SEQ ID NO: 285276 - DNA, 1075 bp, Cannabis indica
gatgtctctgcagacatcgaaagaatggtgcaggaacttgccgaacctgggaccatcgacattcgagacagtgagtccacggtgtcggcccgcgactaccttattcacttgaggcatgctcctgacgtcaaagtcgaggagatggacgatgattggacggccccagctcgcgaatcaggcgaggatgaagaagaggcggaagggagtgggacagattcggtcgacgatacccagctgaacgagccctttgcgtgcgaagatctgatttcgagggttaccaaatcagacttcactacctttacgaggttaaatctgctgcgacttgcgtttcagcgacctaaaccgacccaaagggcgcatctcccttttaccaaccctgcgattattcccacagaggatgtggtagtctcaatacccattctccgatgtggggtatcagtccccttccatcccttcatcgcagccattctcaaacggtacgatgtatcacctttccaactaaccccaaacagttatcgcactgccctagccttttacgcgatgtatatggagtatgttcatagggctccctcagtagaagagttcagctatttctacgatataaaaagcgtaggccttcataacggtttctactgctttagcaaatgggcgacttctgaaatcaatggagtagaaggaatggtgtcgaacatgggggactgaaatcaaagtggttctacgtctttaaagtccctgggattagaactgactttaatcgcagacctagtatgtcgcgtgttttttaacttgggcattttctgatttattttgagatcttatgctaactcgcttttccttgttctcgcagatagaccagctcgaccggcacttgacgcgactcgcagagagacagctgaaatcctcgggagccttccggtacaagatcgcgactggcgattactgtgtacaactgtgaagctgcgagaacaccagctgattccagagaacgcaagtcttcaaagggagccagtatacaaagaaccgtctgagagacaacaagagcggatagacaaacgcctctccaagcaaacttctc

SEQ ID NO: 285277 - DNA, 534 bp, Cannabis indica
tagtgaacccacctgagccagaccaaggggaccaagcgaatgttggtgccaatattgctcaacctcaaacagccacagatccggtgatccaggctcagttggacgagttaacccgttggtcaaggaccttaccgcaccaaaacccactgatttggacctggaaaggaggagagggtctgccttctcccaaatgattaatgacctccctattccagcaaagttcaagatgcccacttgcaagtacacgggtagtgaagacccactaactcatgtggagaacttcaaaatccaaatggaccttcaaggaatcagggatgaccttaggtgtcaaattttccctgcaaccctcacggacacggcgcaacaatggtttactaaactacccccaggaagaattacttcttgggatgagtttgaagggttattctacacccaattctcttcagcccgacagataccagcggagttgggtgacttagtcgccatcaagcagaagcccgatgagccactaaaagactacattcaacgctttat

SEQ ID NO: 285278 - DNA, 515 bp, Cannabis indica
atgagaactcaaactattttggaatttactaatgtagttgttgatgatttcaaagattttttagaattttccacagaagccgagatagatagttttctggatactccactagaagtagcaaatgtagattctgatgcagcagaattgaattttgaagacgcaaatgacgaatctgccgctgtaactgaagtaggtgaacaagaacagcctatctcgattcattcaaacatcattactgattctatctagaaagaaccaagcaccagagtaaaactgaatcatcctaaagatctctttcttggaaatcttgaagaaagcatggtaacaagaagaaggtatgttaagttgattagttttctttgttttgtctcacaatttgaaccaaaaaatgtgaaggaagccatggcttatgaagaatggctaaatgcaatgcaagaagaacttcttcaatttgtccacaacaaggtttggattttggttcaaagaccaaaaggtatcaatgtgattggaacaaa

SEQ ID NO: 285279 - DNA, 567 bp, Cannabis indica
ttatgtgaattgatttgtgactatgagcgaatcaatagtgaaaaaaaaaatatgttatgtataaatgaatataaacatacaacaaacaaataatatattattatatatgattaattagacattctaactattttttttttcttttccaatggtctatttcaagcactttatcaactctcaacataaggggcaattcaacatttaatagaataatcaagtcaaaataagttaggaaaataaaattcaatattcattttagtttatctctattatctatacaacatcaacaacaacaataacaacatataaatactaaactaaaatttcaaagcaaacaaaataataattaaaaaggaaaggaattaaataaatatagcaattgatcataaaaattaataaaatattaactttaaaaaatgaaaaacttaccattataatacaaagagatagaaattgaaaagagatgagtgatgaggattgaggatttaggatgaggaggatagttggtaaattgtaaattgtaaaggtgattttttttttttttgagagattagaaatttagaagag

SEQ ID NO: 285280 - DNA, 473 bp, Cannabis indica
actcagtaagaaaagtataacataataaacatactaaaacctgggttataatcacgcgcctatacacctgaccataaccctaactgaatttgggacgtccatgacaaagtatgattaaccgcgaatccaacctatactcggtactctagtcgtaccgatgtggtagcagttaatccatactatctgatagcctagcatatatatctgttggcatctcggtgcaactctatgtacacatcactgttgccctgatatgctaatctgacggctatataactgatagcctagcatatatatctgttggcatctcggtgcaactctatgtacacctcactgttgccctgatatgctaatttgacggctatataactgatagcctagcatatatctgttggcatctcggtgcgactctatgtacacctcactgttgccatgatatgctaatctgacgactatataaaatttgcctaaca

SEQ ID NO: 285281 - DNA, 500 bp, Cannabis indica
aaaaaaaaaaatcatcatctattttttttgcctggtcagttgtgtcagggtgcctatacttaaggcctacggaaagtgatcagtctcacttcttcactttcttctcagaaaccctaagctcggcatcattcaaattttttttcctctctatcatggagaatatcacacccattgcagtaacccctgttgctatggttgttccatccgtggcatcgactggtgatcctacagtggctcctacactcgagtctgcactgcctaatccctgtcgtgactttgtcctctaccagtcggaggttggtggttctgcacattccccaagtttagagtcgaccccgtctcccccctcacctcaggtcagtcagaaacctcgtacgtttctaggtaaggctcctcctatctctaaaaaggttcgaccttcactgtcatctccttccccacctgtgtcgaaacgagtcactcgctcttcgtcgagtcaccagtctccctcgaaacctgta

SEQ ID NO: 285282 - DNA, 1519 bp, Cannabis indica
ttgcttgctaagaactcaactcaaagaaagaaaataagtttattgcttgaagaagttgaggctttgaaagtaaaagaaaaggagtttttgattgaaacccaatgcaaaaattgttccttatttgaaaaagatgttgtaaacttgaaagctaaaattgatgatttaaacaaggtggtttacaattttacaaaaggaaaagaaaattttgaaatgatgcttgggagtcaaaaatgtgctttttcaaaaagtggtataggatataacactagtgtgaaacaaaaattacttaggaatttctttgtcaagtcatctagtaatttgaacttaacttgcacttattgtaaccaagatggtcacactaaatcctattgccatgtgaaaaagaatgcctattttggtaaggctatttggataccaaaggttttaaagactaacatcaaaggacccaaagttatgtgggtaccaaaaagaaagatataagtttgttttgtaggtatcaataaagaggaaccaaagttggctcttgggtgttgatgcttaaagaagaatgccaagttcctacattaccaacaagtctcaaaaagcatagaaaaagagcgtgtcaattcttgaacacaacccaaattaacaaatttgggaatcggtaatatcattcttattcattctacttattttgatgagattaagatgcctagatgaaaagaaaatgaaatttgaagtgtttggctaattgacttgcttttgatccttcttgttcactctcttatgcatacatgcttaattggtatgtcacatactatttctatgaataaaagttttgattagttgagttttgacattcttgaactatacatgctgaaaaattcagattataggtcattatgcaaatttttggtgaactttggacatacctttgaactagtgaatatgtgaatttttacatatttggctagtatatgtgtttatatgtttgaacatgtccaaatgagtgtatttagcatgcctaaaggtttttcttgattgaaatatactttgaacaaaattttggtatgtcatttgcttattttcaactttttaaggccataatgggtgaaattagccaaaatttcatattgttgagaaaattgttgttttgaaagcttgtacatctctaaatactcatatataaactgtctcaaaaagaatttttcaaaaataatgctcaaatcttgattttggtactatcttgcataattttgactttttaagacctaaaagagtgtttttttccaaacgtgctcaattttcattatttttcaattccgtaagtttgtacacctcacatttgatatttttgacctactggaaaaagaatttttcaatttggttgcatagaactcatttttggtagatttctagtttttaagcaaatcgaaaagcttaccgaaaagttaggatttttgacatttttctgattttcttcttgtttgagcatgtttgttttatcatatatcagctgtcaaaaaaagattttgcatga

SEQ ID NO: 285283 - DNA, 790 bp, Cannabis indica
ctcttcattatgtcaaaatctgaaacatacttatttttccctctacaatcacattcttaagcttaatattagcggaagaaatataaattaaacattcatgttctaatatttcatataggctttggtacactaaaaaacttaaggtaaaatcgtaatcttaagacggtaattaaaaaaatagttatttttttaaaataattttttaccaaagtaatttaaaataaaattattattttgacaaaaaattatcaataaagtgaaattaatttttcactcattactcttttgatggatatggatttttttacaacatccaattttgtaagaggtctaatgctttaaaatgtattttttttttttttgaaaaaaagttagtttaatcgtgaggaacaaaataaatgtgtaatgagagtataactttgtatagttgtaactttaattctagaaccgatctaattataagtgtcagtggatatagaaccaattcaatccaatattaaatagatgttggatcgattgaatgattgaaattaattggattatatcggataataaaacctatcattttagatataattggtctggatctaaataaatttaaaaatatttgatgtggtccacttaacacctataatcacactattaccacacttagatatacaagtaaataactataatatataattatagataaataatatactataaatggaacttgaattttccaacattttggtatcatgtgttttgcaaaaaataataattataccttctgttttgttaaatgaca

SEQ ID NO: 285284 - DNA, 696 bp, Cannabis indica
ttttgcaccaggaattagggtagatagcaaaaaataattatctttcatacataaccaaggtggtagattatagttagccaacaccactggccacatgctgtatgcaagactcatgttgccaaatggattaaatccatcagcagctaacccaagtcgaacatttcttgggtcccttgcaaactcgggatgttttgcatcaaagtctttccaagctaaaccatcgaccgggtgtcgcaacaccccatcatcttttgattttccagtatgatgccatatcatgcttttcgctgtaatcctcgaactatataatcttttaagtcgaggtgtcaacggaaagtatcgcatgactttgcaaggaactttttttcctttgccgttctcggaagtaacccaacgactagttccgcaaactggacaagcctccttggatgcattctccttataaaataagcaacaattatacaaacagacatggatagaatcataacccaagcctaatttcttcaatctcttttttgcctcgtagtaagttgatggaatattattttccttcggaaatgcaaactttaaaagcttcaacaattcttcaaagatgttattaggaatttttcctctaacttttaaatgcaatagctttgctaaaaagttgagagacgaaatccaatcacaaccgggatacaattcagcttcaatttc

SEQ ID NO: 285285 - DNA, 571 bp, Cannabis indica
accttctggcttactttgtttcgaacgtatgacttcaacttagataagtacctgcaattattcatatgaacattaaaagcaatattgaaacttttcacaattaaataaaataaaaatcaatatatattacctttcaacagggtacatgcaacgataaactgatggtccagcaattctcgcctcatatgctaagtgtatcaccaaatgaaccataatatcaaaaaatgatgggggaaacaatttttcaagattacaaagagtaattgatatttgctgttcaagttgcataaaatcttgtggtcgagcaacttttgaatacatcattcgaaaatagttgcttaaagtagttatatgttgacgaacatgcagacttgacattcccctcaatgctagcggtaataattgagtcataataatatgaaaatcatgactcttgagcccatgaatttttcgttgatttacatcaacacatcttgaaatattggcagcatatccatctggaaccttaattgtctttagaaatcgacaaaagatagttttttcttttttggttaatgtaaaacaagcaggt

SEQ ID NO: 285286 - DNA, 579 bp, Cannabis indica
aacctacttcactaacatgcatatacatataaactaatatcaaaaactactacgtactaagcgaaagcaaaaaaatatacctgaatcgagtgcaaaaataacaacttgtggcagcttgcggtaatcccgagcggttgaacacggacctaattccataaatagtaaaatcaaattaaaaatttaatacctaaatacatatcaacacatacaaccacaaccacatacactcacatacacttatacacacacacacacacacatatatacatatatattcacatacatatatacatacatatttacatacatacacacattcatatatacatacatatacacatatatacacatatacacatatatacacatacattttacatacatatatacatacatatatacatacatacatacacatacacatacacacatatatacctacatacacatacacacatatacgtatatacactcacatacacatatatacatacatacatacacatccatatacatacatatataccataatacacatacacatatataaaaatttaaatttttaaacaatacattaaa

SEQ ID NO: 285287 - DNA, 718 bp, Cannabis indica
atggttggctcaaaaggctcaaacggtccacaaatggcctaaatcatgtctttggttaagtatcgtctaagatttcgcctcaagagagaatcaaacaaattctaagacttgtgagatcacaaaatcatatatttacacaaactttcaccaaatcacacacaataaaatgatcaaggcattcgtgctcaaaattagacatatctcaatcaaaatgaaactagcacaagaattagtcacaagctcaaacaatatttacatttttcaacaagctatgcacactatcaatcatgtattagaatgtggaaaatcaccaaaccaaagcacatatgcctcaaaaaaaaaaaaaaaaaaattcaaacaagcaaaataaaagaaaagaaaagaaaaaaatatatatttagtttcccaaaacatgttaagcacaaaattctcaaatatgtgtgagcaagtttaaaaataaataaagaagagttaaagaagaactcccctagtcaatgatgtgcaaacttgcttgtgtcaacctccataagtgcgtccaattccatttgactttatgcttgcacctacaagagagaaaaagaaaagaaagagagaaaaaaactacaatgcaattgtcaaagccatttaacattgcatgtttattgaatttgaaacaaaataaagacaaagtttagaaagcttgggttgcctcccaagaagcgcttgatttaaagtcgtc

SEQ ID NO: 285288 - DNA, 400 bp, Cannabis indica
cataaaagctgcacaatttactctctctgttcccatcacccccatattgtcaaggatacaggtaattatactcatccactgctcagctttaattatattagtacctcccataaaagttgaaggttgcaacttcacaaaccgttcaaacacggattctttatgtggcaacatgaacccctggttacccaccacttgcacaggtgctggtagtaacacttgctcaacagaggcagtcggtgccggttgccttatccgacgcaactcttcctcctgacaaagtatgatacctcacatttcttgaaacatctactgccagttagcaggcagattagcattgccaacccccgcattatccctcgtattctgtggaggcacatgttgggtttgtgccctaaataaa

SEQ ID NO: 285289 - DNA, 521 bp, Cannabis indica
caggggttccattctattcgccactactactggttcgtcctggacaacagggccaggtgccacttgaacttctggtacaggcactgcaggagcaccctgctgtctcaatctctgaatctcattatcctcctcctctattctggcttgcatttcgacaaacctaatttcccaattctgggcttcctgattggcttgggcagcctaggtagcctgtggcgggttaacatcaccctgatcacaagccatgcccctgggacctctaccacgacccctaacatttggggaaaactgagctccctgaccttgatttgacccgacagagtttccctgactcctggtgttccgcctggcgtccatctagtctgaacagcctacgaaacaaagagttggcacatcaggtcatgatcaacgagagcttactaatgccgcttaatttgaaaattaaaaacatgtgcctattctactatcaggctactaacatgctgttaggttttatgccctaaatcaaactccatttcaat

SEQ ID NO: 285290 - DNA, 955 bp, Cannabis indica
tccatcttccaagtccaggatctcagccactccctcactgtggtaagtattttgtagtttacttttctccttattattttttcttggagattcttacttatacttgtatcctttcccagcttgctgctgaggccggccgcctttccaagaacataattaatcatggcttcgtcctgtccgattttggggacatggatgaagttaggaagatccttcaggaccttactgctgaaaggcggctttatcaggaggatgctgagcgccgggaggcccttgccaaggccagtgaggaagaggccaagcggagggaagcgcaggcggaggcaatgatccgggaggaggcccttcggagagataggctggaggccaggcaccaagaggagctgaggacggagggcgaagccactgctaaggccaggcgagagcttcgggaggccagggaagccttggatgaaatggctgccaaggtgaggtccttagaggaaactcaccgggcaaacttggaatccagggccaacctggccgcggagctgaaggagctcagagacttcaaagaccaagcctcaaagaaggcaaaaagagatgagcttctttctcctgtctcctgcagccggtgcgccaagcgttttgatgacggcgtcttcatggcctggtctacaaatgaccagaacatcaagcttaccttctaccccaaacccgaggagatgatcgcaaagttccgggagaagaagaaaaagcttgatgccatggtggaggcacgcatcggacctcgccttcctcctcgcattgattaggccgcttcgagtttgacccattacaaccaggatttcactctttttttcctttttttttatttacagctaattttcttgtatttaagacaatatttacatagctgtttcttttttatttaaaggggagacaatatttaaggcctgtccccgggccatttgta

SEQ ID NO: 285291 - DNA, 533 bp, Cannabis indica
attaataaactttataatatattaaaatatttacaagcgtcgggatcccgttttcaaactttttaaagttaatattccaaaatacatatattacaggtcacacagcgaatacaaaatacaattcccagatgtcccgagcctgaacactccaagtcccgctagtttgacatgtacaatctcatcccagctcaggttcactcctgttcagctttcacctttcctttacctacacaaggaagcagaactgtgagtcaacagactcagtaagaaaagcatataacatatcatataatttctgacttgtacttaggcgcccatacacctatttacaaggcttaacagatgagtacgaacgttccatactagggtatagccactataccacatgcactgcgtacctcgatgtacgagtgttggtaggatttgttcataccctgagtacacataacatatacatacactcagatatctatatcacacattatatacagttcttaccttctttccgaattcaagtgtgttggccgacctga

SEQ ID NO: 285292 - DNA, 640 bp, Cannabis indica
aattattaattctaatttaatatctaattaaaataagataatttgagttagtctaaaattaataaattaattagttttaaacttaaatatattttctaatttaattaaatttattgatataaaaataaaaaattaagtatcttgatcaaaatcaacttaattattaattctatttacgttctaagaaaaatattctaatttaagttggtctaaaattaattaacaaattaattttaaacttaaatatatttttctacttaattaaatattagaaaatattaattagttactagaaatttctatctagaatatttcattaaactaagtgtgtctttcttaattaattttaaaatagtccaatgaaaaattaatttcatttatttcaaaattaattatgttgctaatttaattttaattaggttaaactagtataattagcctaatacaattatttaaataaggcaaatgggccttcacaattggagttgttcatgtgagggagggttgggttcagtatgtcgtacccactactaatgagcccctaactctcacacaagacccaaaggagaggaatttaacccttctttaaataactgttattcatcgaataagcccaatactaattgggcctaaataaaac

SEQ ID NO: 285293 - DNA, 806 bp, Cannabis indica
aatttttaacataaatataatttttctatttaattaaatttcatgaaaatatctaatatttaagtatcttgaataaaatcaacttaaatattaattttctatttaattaaatatatctagaaaaaaataaaaaatagtctacttagaaaataactatctaaatatttcataaactaattgttgtttttctaattaaaatatattatattttagtctatttattttaataaatcattaataaaaattacttgatttaatttgatctaaaattaattaataaattaattttttaactttaatctaattttcaaaattttaacatttattataaatgaatttcaaaaattaaaataaaataaaatatactttgaaaattattctaattcaagttaatctgaaaatgaaaaacttccaacttaaatataattttctatttaattaaatgtattaaaatagaaacaattaattaagtatattgaataaaatcaacttaattattaatttttgtttaatttatttaattaaatattagaaaaaatacaaattagcttactagaaattacctatctaaaatttttaaataatctaatgagaaattaatttcatttatcttaaaattaattatgtttgctaataaatttttaattaggttaaactaatataattagcatagtacaattattcaaataacgcaaatgagccttcacagttggggtggttcatgtgaaaggagagttgggttcaatatatcgtacccactactatgaccccctaactctcatacaagacccaaaaaagaggtaatt

SEQ ID NO: 285294 - DNA, 749 bp, Cannabis indica
aaaccaacacagaacctaaatagctatttctagaacagtataagataaccaaatacaagatatccaatacatcaattaaccacaattcatccaattcataacttcaccaagtttgaaaccaaaacttgattcaaaaactcaattatctaattcaaaccaaaccagccacaatatacatcaattagtatctaaacattcccaaattaaacttgagaataagctcaagattcaagctatcccaaccaggcatgaaactctagaatagctagatcaaaaactcaatcttaactaaaataattcaaaggaaaacaaacaagattatagcttgatatcaaagcattttctaccccttgcaactacaatccaattgctgagaatttaagcaaaagaaggagaaaagaaaatccttggttgaagcttcttagggtttcgggtaggagaaaaagggtggaggtgatgatatatcttaaatatttttttttttcattttaaccttaaccaacctaatatatataatatacctttaattaatttcagccactaacaaaaactaaaaaagaattaaaataaaaccctcttcaaccaaaagaccaaactaccccccttttctttaaacccttaaataaagataaacaaaccctaggggcattatagtaactttactaatccaccaaaccgacattctaatattctaaactagtccggagtatcctcaaaataaatctcccattaatgtcgtgatatttctg

SEQ ID NO: 285295 - DNA, 508 bp, Cannabis indica
agcaccaggagtgggcaatggtggaagatccatgggaggcaagttgaaacccggcacagctcgagaaagatactcaaactgatcttggaatcgtctgaggtagagttgttgtgtctcatactgctgcctcgtatgttgagttgtctgctccgcttcctccacttttttctgtaaagcctcgtactgttccattgtaacagtcggtggggctgaaggatgcgtggcaggtgctcttttggccccaactcccttcagtctggggagatggccaaagcctctaagatgtcgagatcgttccccgagtacttgcgtcataacaggtaagtctcgggggtactgtgtaggatcgacagcaggctcatcgggctcatcttcagtgggcgctggttgagttgccgctatttcaaccatttgctcctaaaacaaacaaataagttaaatggttaattttaatacaaaataaattgaaagaaataaataaaaaatgaattaaaacgtaaacttacgt

SEQ ID NO: 285296 - DNA, 623 bp, Cannabis indica
atgcattttgatttgattgtagcatgagtaagcgtccatgaagcttaaaatttcgtgccctgctgttgcatctacgagctgatcgattcttggaagtggaaaacagtctttagggcatgctttgttgaggtctgtgaaatcgatatagactcaccatttcttgttcggcttgggcacgagtacggaattcgcgacccaagctgggtaaaaagcttcaattatgaagttgttgttgcgtaacttttcaacttcatctttcagggctactgctcgttctttacccagtagtcttcgttctggccggatgctaggatcgatattcagaacatgtgaagtaatagaaggatcgattccgaccatatccgcatgtgaccaagcaaaaacatctaggtttgctcttagaaattttatcaactctgattttacttcgagcaacaagccctttccaatttttagctttctggtcgaaatagctggatcgatctcgatttcttctaattcttccacaggtccaacattgttgcttgggtccccaagtcgaggatccacatcttcatcctcgccttgggaagtttcctacttgggaatattttttcccttgtctaggctctggctggaggata

SEQ ID NO: 285297 - DNA, 242 bp, Cannabis indica
acatacacatacaaacataataaatataacaattggtaatagatttataagataaagtactgaagctcaactcataaattgcaattaaaaataaattttattataaaccaaaaaaaattgtttgcaatattatgagaaacgaacagggaataaaatcccaaacttgaaatccaaattgtttgaaaaattaaacaattaattaaaaaaaatgagcttcttctttatcatagacgacctccatc

SEQ ID NO: 285298 - DNA, 527 bp, Cannabis indica
cttggggacggaaacaagttcataaaaatacaaaatttctgccgggcggggagatccccatcctcgggcggcataaaaaataaataagcctgaaagtaggcggtatgcttgagggataagttggtatggcgcaaggccgacaaaaactagaaaattaacaaagtaatcctgaagaggaagcatggcaccggccatcaggtgcgtttggctccaggcgccaaagccgccgtaattgtggttgggcgtctccgcgtcgcgaggtggccgatggtaggtttctgaggtggaaggcttgattccagcaacctccacaatgttctccagttggtggggacaggtcagggtggaataaagctcagccgcttcccatccggtcgcccgagacttatacccctcctgggcaacgggtaccagggagacttcctcaagggtagccatgcgcttaccacttttctttgatgacttcgagccagaagcagacatttttctattctgtaaaaaagcgtaaaattccagcagttaggccc

SEQ ID NO: 285299 - DNA, 708 bp, Cannabis indica
tttaggataatcatttataatttctttttctaaatctcaaaccctcaaaccctatattgctattgaattattgcctcatctattctctttaatctttcagcttctatgccgtagattcatggcctctctgctgcgattcctcactttttgttgatttgggtgcaatattcagtgttctattagcgagttatcctttgttgctcaagtaattatttatttgagtaagtcttctattcccttgctatattgctttacttttaaacaactttgagatatgcgaaatataatgtcatccgttagagagtttgttgggcacactaaaagtaacaagatatcattttcaatttataatccttgaatttttgatgatgctcattttgaaaggctaggtgtaattgtaatgtcggagtagctagattttttccagaagataaaactcacatcagcaccgccattactggcacccattctaacgaatactatttttctaagctcatatctaacacacaattccatgggaacaacataaagttgggttgaaccaagatgagataaacatttttaagtgtattaccttttaatataatagaaaatacatagcataaaatttagtatacgtgcctcgcacgtaactttttactagtatatatacatatatattgagtgattgataattaaattgctatgaaccccaagctcttaaatttg

SEQ ID NO: 285300 - DNA, 596 bp, Cannabis indica
tgagatccttcttgcattcaggccaaatccttaaagagataaactccacagctctcactattatccctaaggtgaaatgtcctaattcaccaagtgacttcagaccgattgcctgctgcaatgtaatctataaggtggccactaaagttctatgttccagactcaaggatattatccctgatatcgttgggcaaaatcagggaggatttgtcaaaggaagattcattgctcacaacatcatgatatgtcaagatcttgtgcgacattatggaaggaagtcaactaagccgaattgcatgattaaactcgatttacaaaaggcttatgacacggtagaatgggacttcattgaggaggtgctaagggggctactttttcctgaaaagtttatttctcttgtaatgaactgtgtcagaactccaaaattctctctttttttcaatggatcccttcacggattctttgaatctaagagaggattacgacaaggtgatcccctttctcctcttttatttgtcattggcatggaatatctgactcgcattttgaagaaagttgggaataaagcagatttctcctttcatgaacgttgtgat

SEQ ID NO: 285301 - DNA, 712 bp, Cannabis indica
ttaaataaacatataaatgataacatgaaccaaatgacacactaaataagtgatgaaaatacttctgtctcttcattgataattgaatgataaagattacattgaaatagagttttatttagggcacaaagcccaacaaacaccgcgttccaatgttgtcgggcctaaaacatgcaaaattatgaaatttctatttatgacctataaaatgcattctgaattcaaataaatcatcataaattaataattcaaaattaataaataatttccataattaaatcctaattatctgctaatttccaaattaaaactaagcggtctttacaattatcctccttaaaaggatttcatcctcgaaatctaacctgaacaacgctcgataatgagctctcatgtttgattctaactcccaagtgtattcctccaccttgttatttctccagagtactttgactaaagctatggtcttgttccgaagaaccttatcctttctgtcaagtatttgaactggttgttcctcatatgacatatcctgttgtagctcaagattttcatagctaagtacatgagcagggtctgaaacgtacttccttagcatagagacatggaaaacgttgtgaactgctgaaagagctagaggcaaagctaatcgatatgccacttatccaaccttctcgagaatctcaaaaggtcctgtaaatctagggcataa

SEQ ID NO: 285302 - DNA, 650 bp, Cannabis indica
tagtgatgaagatacctaatgctcaaccattacctcaagtcactttggttgacagtgatgatgagggggaagtttttgatgagaatgtatgtaagattgatggagagcctcgagctcttgagtatgcgataatggtacatgattatgagggtgacaagaatgagtatgtcgggcggtcccttcactttttgagggacaacccgaggtctagtatgactaagggtgatatcctacgcatgcgacatcaatatgagattcattcttctatacaaatgcgacttccaactatcgctgagcgtcccgattgggatagtggcgattgggtttgtatgtatgaatttccttttaggattggctttcgattccctttccctccatttgtacaagaagtattggactattatgaggtagctcctagccaacttatgccaaatgcttggaggttattgttgggtatagaagtcatagttagagtgaagggtaagagggttgaccttgtagattttcagtcaagttattatcttaaacaacacgatacagataagggtcgatttctattcactcttagagcgaacaaaaaagcttgggtaacggagctggttccgagcaacaagaggggttggaggaagaaatattgttttgtcaaaggt

SEQ ID NO: 285303 - DNA, 525 bp, Cannabis indica
gtttaggagatagattttgggggtttttttgattttgtgtgacattgtgcaatgtgtatgcgatatgtgtgcgattagtgatacaatttaaggtctgtttcgttgtgggattgtgtgtgcgatttttgtgcgattatgtgcgattatgtgcgataaatgactactgtatctgcaattgttgaatttgtgatttttctcgatgtcttgtgcgagtttgtgcgatttatgactactgtgactgcaatttttctatttgtgcgatttttgtcgatgtcttgtgcgattgtgtgcgatttatattcaaaaatgttgccagccaggaaacagaattaaattgtttctggtagtgcgattaatgtgcgatttatgtgcgactttgtgcgatatagtatgttattcagtggctgttatgcgatttctgtgcgatttctatgcgaagtatatgcgatttataatctttctatttgtatttgcagatggctccagaacttattctcccctcggctgagcattttcctgggcgta

SEQ ID NO: 285304 - DNA, 392 bp, Cannabis indica
tcttgagttagaccgtgcacgcggaactcccttctcacatgaaatcaacctcctgccactacctcacaagttcaagatgccaacgtggaaaatgtacactagaagagaagatcctctctcccatctcaagtatttcgagatgaaaatggatttacaaggggtacaaggagacgtatgttgcagaatcttccccgcaactctgtcagaggccgcacagcaatggtatttcaagttggctccaggaaagtttagttcatggaaaaccttctcttcagaattccatgcacaattctcttcctcacgccaactcccatttcatctgggagatttggtcgaagtaaaacagcgaccaggcgagccactccgggcatacattagcagattcatgacgg

SEQ ID NO: 285305 - DNA, 557 bp, Cannabis indica
ttgagaggcacaatgcttactcgagttttaaaccattcagggaactcagtctcctgcactttttcaatattgcctacaccccttgcttgaagcaactccttgtgctcaatatataatataatgcacttagtaagttatggaatttatacttacttgatatacggctcaacctccgtgcaattgttcaaaatgtaccactccgccttacgcttgctttgcatgggtaaggtgtcggctgtcctcatacctagcggtcagccaacatgcttgaatacagaaaattgtcgagttggcatgttttggacaatgtcattgttccggtcaggacggttgaatcgagtttccacttctcgaaagtatattaagcaaaaggttaatgcctcattaaccacagaagattcagcaatagagccttccagacgggcacgattcctgacacattgcttgtacacagacattaaccgctcaatgggatacatccacctgtactgcactggtccacctagtatggcttctttagggagatgcataactacgtgaaccattatgtcaaagaa

SEQ ID NO: 285306 - DNA, 499 bp, Cannabis indica
gggtgaccggcgcttgtccttccccttctctaactccgctacgagaattctcaattcttttgtgaggttcggccatggcgaagaactctactaaggactcgggccttcgagcttgtagttccttccaaaagtcggtcctcggcaagatacctgttatcaacatgcaaacaagcgaagactcgggggccttctcgacctttgttacttatgcgttaaaacgtttagaaatagtcttgtaaagactcaccaggttcttgtttgatgttggccaaagtcgtataaggtggcatatacgtaattgtggctaggaaatgcgtgagaaataggtcgacgaaggtttcccacgtcgatattgatgcctcgggtaattgggtgaaccaatcatgaacattttcctcgactgttgccgcaagaatgcggcactttgcgagttgtggtacctggtctacttccattatagtattaaatttttctaaatagtctatcgggttagaagtac

SEQ ID NO: 285307 - DNA, 679 bp, Cannabis indica
ctctttctagtccaaaacatggacaagatatttttcccagataataaatttgtctgaactttaacatcatcacagctcagaatatgggtttagtctaatacatattttctcagcatggagacatgaaacacattatatactctggacaacgcaggagttaaggctagctgataggctacctagcctaattaccttagtaaacatgtatctaatatttctcttgtaccacacttattaaggtacctaacctgtggtacatttaattattacttttaaataaacacctcgtcaaggaagagattattctaagataatctatcctttaataaatatgctcacaacatgtttctaatattccattgatcttctcaggttacccaccattcaagaataaaacatcatactattttcgctttaacgtccatggttctcaataaccttctttagttcataacatcatagccaaagatatcaaccttggaatttcacaagattagattatttcttcgtatgaattctgtattctcatttatagtataaattgtctacactgatagagaacatattaactctgtatgtccaatcgttactactcggtcaaaatcatcagatcccatagtacataattcataattatgtctttctactccttctatgagatctcctaagctgatctact

SEQ ID NO: 285308 - DNA, 652 bp, Cannabis indica
aaaatactcatattgaagcatgtcacccaacccaattatatgcttaaaaaaaattatttaaattaatttttttttctattttctttttttgaaaagtttcttttcaaatttaaaaccctatttctttaacaacttttttttttctttcttttatataataagctatctttgctcaatttttttttttcttataatccacgaccacacatatttaacattatgagaaaaaaaattaattaatcaaattaatcaaaataatgttcaatagataatatattttacttttggtaaatataatttgattcaaaacaatttagttgaaatattaaaaataatcttgattttatgtttaattttttttttaataggtaaaaacaacttttttgtgaggactccaaaatttaaattacgctttaggtccatatattctcagggccgactttttgggcgagagtaatactaaaatgcgtgactttttgaaaaattcttaaattacccctaaaatttatctaattaagaaaatatttaaaggttaaaaactagggctgcacatttggacccgcacacccgaaaaacccgagtacccgccccgacctgatgccaaaaaaactgaccctcgaaaaacccgtatagtcgggtcgggttgtacccg

SEQ ID NO: 285309 - DNA, 722 bp, Cannabis indica
atacatatatatatatatatatttgagatacatatatataaattaaacactatacaattaaaatatatgtaattattatatgtattgataattaatttataaattggaactccatatatacactaacatatttttattttctcaactatatactttgcattctaacatacaaaaatccgtagaggctttgtgagagaatgttagagagtccacattcataatacataaaaactaaatactatatatataatacatgaactactcttttattactaattagtttaaaaatggaactctatacgtacactcacctatttatattttctctaccatagactttccattttaataatatatatacttttcttttaatgattttatcataacttaattagcagaatatattcattaaccatagtaatttataaaaaatccaataaagagttatctttatctagctgagtttttagagagtaaaatacctaatacaaaatgttgtacctttttacattatttttttgtattttacctttatacgtttttttttttttttgctaaaatattttaccttcatacttgattattttaattaatatacctaatatttttacaatatttcacttttacagacctttttgtcattataaatactaaatatatacaatgtctaaaaaaaaaaaagtttattccatcactatataacatttaaaaaaaaaaaaaaa

SEQ ID NO: 285310 - DNA, 703 bp, Cannabis indica
ttagaattaattaattataattaactatactttaagtaattaaataaatatttaacaagatttttttagcaattaaaatttataaataatttttttatttatatataaatccatactataattattttaaaagttaagccatttaattataatatttacaatttttcttttacaaaaattgaacttatttttatataaattaaaattctatccttataataaatttttgaataattaatttttttttttataattagatgatgaggcctcaagctagtgttgggcctcaagcttataataaattttgaaataatttttttttttacaataaaatggctcttgagctatttttctaaaaagccatttagacatgagtttaatggttgttaccttgaagagttagtgaaattatcttatgagattctcaaaaaatgtcgatgcttaccacttgcattaggggccatagctgttttactatctagaaaaaagaaggtctaatctgaatgggaaaaagttcttaatgatattaattttgagttcaaaacaaatcctcaactagtaagaatttttgaaattctctcttgcagctatgttgatttgcctttccacctcaaatcttgcttattgtattttggaactttttctagaagattattcacttccgaagggaagattgtgtcagctatggatttctgagggtttt

SEQ ID NO: 285311 - DNA, 481 bp, Cannabis indica
ctcaaacttgagcaaatcccacaaacatgcattcaaaccaacttaattctacttaaacaagcttaactaagcctctgaaaacaattgaaaacaataacaacaacacagaaacagatttcaacaattttcttcaaaaatcacatttttgcatagaaaaagctatagcttgctcaacctaactaacatgcttccaaaacaatttaaataaccctaatctaacaagcttacacctctgaaatcaaggacaaattcacagcagcaacaacaactataactcatgcatttcactcaatatttcaccatttttttcaagaaaacaaagaagaacaattaggaaatacataccacaatcaagagttcccaaagttatgatgaatctagcttgaaatttgatgaaaaacccagcctttgaatcacatgcacccagccgaaaaagagaaggaaaagagagaggttttctttttcaaattttttctatttt

SEQ ID NO: 285312 - DNA, 465 bp, Cannabis indica
tactgataaatctaggaatataactttaatcacacaatctgattactttccactgtgctgacgacacaataaacaagaatattaatgtgataagggtttggatgaatctataaatcaaataaacatataaatgataacatgaaccaaatgacacattaaataagtgatgaaaatacttctgtctctttattgatatttaaatgatagagattacattgaaatagaattttatttagggcgtaaagcccaacaaactcccacttgcactaatataaaacaatcagtacatttcaattaatcctagattctgacggtgcttttcaaatgcagttcctgccaaaactttggtgaatagatcagctaggttgtcctttgtgtccactttctccaccagtacatcccctcttgccacatactctctgatgatatggtatttcctttctatgtgtttgcttctcttgtggc

SEQ ID NO: 285313 - DNA, 603 bp, Cannabis indica
agccaaatgctagcaagaaaggagtctgtcccgttgccgtcttctcggtagttatgtgagcccagaatagctgagctagctcatcgacccatctgcctttggcagtgtctaacttcttctttatagtatcatttaaggttttgttaacaacttctacttgtccattcgcctgaggcctggatattgaggagaagctcttgataattttgttcctctcgcagaactcagtgaacaagtcgccatcaaattgggttccattattagatactatcttcatgggaattctaaacccacagacaatgttcttgacaacaaagtcgaggactttcttggaagttatggaaactagaggctcggcctcagtccatttggtgaagaagtcgactgttactaccgcatacttagctcatcctctcccagtgggtaatgccccaattaggtcaattccccatatagcaaatgggtagggcaagatcatcattcttagttctgttggcgggacgtgtggtatatgtgaaaacctttgacacttatcacatttcctaacaaactcatgggtgtccttattgatcattggccggtattatccttgtcaaatgatct

SEQ ID NO: 285314 - DNA, 584 bp, Cannabis indica
gaggaaatatagggtttctgaaaatcacccaaccggcagaccagttgcccaaccggaatttcagttctggaaattttcaaaaccccatccgaaattccggatgcacaaccggaattccggttcctcgcagaattcacccaaaaattcacacattcctcaaatccaatccaaactataccaaaacttccagacctgctatttaaaccctaaagaacaattctaaagcataaaaaccaagcttcatgcaaccaaaccaaaaccaccattaaagcatcaagctttgagttccaaactcaagcttgatcaaacaccactaacatgcatttaattcagcccaaatctacttaatcatgcataatttaacctctgaaaatagcagcaaacaactacagcaagtagagcaacagattcaacatatttctttgaaaaccatagttttcagctaaaaacttccaatcttgaatcaaagcaaaagtcatgcattaaactagctctaatctacttaaaataacaagattaaacctcagaaaatatcacataaacacagcagcaacaacatcaaatttaccaagcatgcaactatc

SEQ ID NO: 285315 - DNA, 644 bp, Cannabis indica
atatataccaatctctaaaatttccttttatccattctctcattttctttcgttcctctctcacttttctcctctactagactaccaaaagtaaggtaagggctactttaataatgctggctacctgattttgatgtaagaaaaatttaaatatccaatcaaaaattagaaaaaacagtatcacagttgctcaacaggagggaagctacttgtatttgaagttgaaaagtcaataatttttgggattttttcataaatatgcaaaaatgacaaaatttaaaaacgataaattttttacattttttcggatatattgtttttaattttaatagattttatgtttttttacaaaatatggaattttttttggttgttttcaaaaaaatattattttcacgttgatattacggaaaaataacgtgatttgtctttataattatacagggggtaagttgaaaaataccccttttattaatcaattaatcaaatttacctctaattttatatttatttgaaacatacctctttttatatgtattgtacccaaaataccctaacataagagagtcacatggagagtatcttgaaatgacatgtgcaaaattggtacaatatttaaaaaaagaggtaaaaatgatagattt

SEQ ID NO: 285316 - DNA, 370 bp, Cannabis indica
taaaataatttccaacatacaccacctgggcatcccatgattgatgatcctctcgctaggagggatcggccatcgggcatgggtgccccaaaccccagctagggagtaggctcagccacggcgtagagagccctggaggcagctcgtaggcgccaagagagtgccctttgttcgatggattatgagctttaggagctcagttatagtgagcccaataggctctactctgttaattgattttagttaatcaatttcaattctaaaaattagactatgtctagtttatgaattttcactttgttatggcttgattgtaaggaaataggattttagggttaatttattaattaagagactttgtggagtctaa

SEQ ID NO: 285317 - DNA, 619 bp, Cannabis indica
gaaatgacgtttgtggagacttttcatttggaggaactatatcacaaattccacctagttacttcaaattaaaagaatgtcgatgatgaagaaagaatgcagccatcactggttggtgttctaagaatcttagtatattaacttatgagattgattaagggcccgtttggcacagcttttggaaaagctaaaagctgctttttgaaaaagctgtgataaaagtgtgtttggtaaacagtcaaaaaacagctttttgaagaatttttgaaaaagctacagctaaaagctgaagctgctccaacccaacttttagaaaaagttcttttaattaaaagactataataattgttttatactaaaaccatatttacttatttattacatattaaaaaaaatttaaataaactaattataataaaataaataattattaaatctctttttttttaaaaaaaataataatttatattttattttattattaacaaacaacatcaacttacaatttttcttatatacttgagtttctatgtttttttacatttgataaacatataaaagatgctataaatcatttttatcaaattgcatataaatttatatttttaaaaaaaattaa

SEQ ID NO: 285318 - DNA, 644 bp, Cannabis indica
aaaacaacactacaacaacatatttattattttagttttttttttttaaaaaaagaagcataattaatattttacctccagattcaatgagtatgtgtaatttttcaacagtatgtcttctccagttggtgatagcttagtgaaggtgttgtgtgcttttgtcctattagtatgcgtccattgttgcaccaatgctctcaagcattctagcagcgttgtaattggtagctcccttgctgccaaatttgcagcgttcagtgattctgatatgtttgaggtcattgtggaatacctcttgttttggctatgaattcttgaccacttttcataaccgattttttttaggtaaggtcttatgcgtttgtccaatccatccaattcagccatgtggaactcgaattgctttctgtgtaggctttgactgctccaaagaatggcagattgtatttggcagcatgttgtttgaagcttgttttaaggttgctcaaaatgtggtaaccgcagtaactgtgtgcaatttctggatagatttctcttgctgctttgatgaggctttcattcctgtctgaaattaggcattggtgttcccgtaccccatacgcttctttaaattttttgaagaaccatttccaagattggtcatt

SEQ ID NO: 285319 - DNA, 752 bp, Cannabis indica
gatgataggagtcaatttacaaaaactactaaaaaaaaaataatgtccaaattattaggattttatacaacccaaaaatttattttaaagaaggttttagttggttgagattccgaaatacttgtagtaaaaatgaacctattcaaagattctttgcttctagattttgtgtcaataatatttatggtatatatcgtcacatataatgtttttttttttttgagcaataatattacaattatgtgtattattcaacacaattaattttatccgtggccgtgagcatgcatgctttctctttttaaaacttaataacaaataatagtcaatggttagggtggtcgttaaaaataataacaatagaaattatatattcatgttcaacgaaagacaacaaaagttataatgccacagtgaataagacaacagctgtgatgtaaaagcacaaaatccatcattttaaaaaaaattatattaatcattttaaaaaaaaattatattaataaataaaaacgcttaaatccactataagaaaaagtgttgcaagccgaagtggagaagtttcttgttgtcttgatagtaattataaaatatttatacattatttaaaaatataatattttattttatttatttatttatattatgtttggcacaatttatttttaaaatatttatatagtatagtacattataaaaataggacatgttgaaaaataccacttttattaattaattaatcaaatttatct

SEQ ID NO: 285320 - DNA, 965 bp, Cannabis indica
aatgaaactcacttgaatgaacaaaggcaaaacaaatgctaaagtaagcttaaaacttaatcatacccaacatagaggttcatagccattcaagcctcaaaaatctagctcatagttaagtaagaaaacaaattccaagctgaaaaagattcatccatggcttctgcccgtttttttacatttcaacaagtttgagatatctaaagataagaaataagcaaataaaagaagaaagaaaaagataaagagaaggtacaagaaaattcaaacgcaaaaggttggtcccgctctcttctttcttctgttgtgtacttgctgcaattactcttcttcaaagattggcagctgctgctcacgtaaatggtcatcccccaggtgtacttcccttttctcttcttttagatgttgggttttcagggtacaaacttcatacccccaaaatagaagcccaaacttttccactttggcccactaggtttagcccctttgcttccacatcagccaactggtgtaatttgagtgactggaccaaatttgctgaggtggataagtgaaactcgtgtttctacgtcactgccaggatgctgaattcgcttcagcaatctgccccactttcagcttgtgttccttttcttccttgcttccttttctttttcctatcaatttaattcttcctttttcaacaacaaacaagcacaattaattggaaaaacacacccaacaatatcaatatttacaagacttaaaagttagcttactaaatagaaaataacactaaaactaactaaaattaagcaaacaaacacattttcactactcttctcacaatacttttagtttaaaaacataaaaaataactctataccatagagttatcacaccccaaacttagagtattgctcgtcctcgagtaatgaaaaacaaaaagaactaaacaataaaaatagaaaatgacagcgacacta

SEQ ID NO: 285321 - DNA, 756 bp, Cannabis indica
ggtagtaatctaataataagtaaaaccaaccgtcatctaatactaatcattaataaaaaataaagaaatacaattaatgtttccaacaatattgtaaatctattttttcaattctattacatgttattattattaataaaaaataaaaaatcattaaaaaaaagtatcactattcataaatgaatcaaattatacatacatattacactgagtagttttaattttataaattatactattaaattaacaaagtatgattcataaatttaatatagatactttaaattataatatacaatatatttttactaattaagcaaagagataatatttaagcaaaaattatatatatttttttttaaaaaataaagtgattttttaaaaataattagtaaactaaaattttttgttactacttcaatttaaattttctaaaaaaattataaggtttgtacatattataaatatttaggattttttttaggtgtagagcaccacttttgctctcacctatgagagctattttcttttagttttgattggtttagtaatgaaggtgcatgagattaaaatgaattgtggaacatgttagttttttaattgtttttttttttttaattttttttactaaaaaattgaactaactttttattaaaaacattaataaacactaagattaataaagtaaaacgatttgagttaactaatttaattatcattcttaaagagtattaatgtttttttatatatataaaa

SEQ ID NO: 285322 - DNA, 405 bp, Cannabis indica
attttgaatattatggtttaggaacctgtaaaacgtcgagctgcacttccagtcaagctgaccggcacacctgagcacggagcaaggtaagatagcatgaatataacgtatatgtaaatgaatgcttgttttgattatttacactactaacactgattgttcgtgtgatttaagagtgttagtatagtgtaggatatcagaatggttacagtgttaccaacacgagtaccagaaggtacgtcgtgcatgtggtacaacacttagtaactcccgggagtacaataatggctctaccaacacaagtacagcgttggtactgtagtgcatttggtacagaggttgtacttcccttacgaacgttcttaaccatttgctgagttcgttacttgttggaaattattttac

SEQ ID NO: 285323 - DNA, 526 bp, Cannabis indica
gattatgattctgattttgaagctccaatgcccaagcgtgggagaccccattcttcgaagaaaacgaagctcaacttggaggagcacacggttccagaaatttctgggaaaaaaactattgcacatgctgaagatcggactcaggttggtttttagttttattttcgtttccccctttccttcatttatactttacccagattttggcgtttttatgttcattatgctttgtgtaattttagggtttcatttgcgcattttgtttcatgtttttaaattttttagttatttattgttggttttgaacatttcatttgattctggtctgggtgttgttctttaatttggttttgttttctttattttcagtgtttttttgtgcttacaggttatgtgttttgttttcgtttttagtgttttcaatcagtcgtctgtagtttcttatcagttttttaatagtttgttaatggtatgttttgatgtgttttcgattttcattaggtttagttgtttgctgttatatttt

SEQ ID NO: 285324 - DNA, 590 bp, Cannabis indica
gtgcgaagcatgacgagtctagtcatattgaagatgtcttcttcccactaactcagagttcagaaatgccaccatctgatacttgcttcggagcttctagctctagggatgaacaacttatcgactttgataggtctgataattatgttaacaaaggatttgatagtgaggcattgcctgcagagccaaccattccaccagaaccgattgtctcagcaaagacgggtactccatcatcacttgttccttcagatttgcttattcctcgaccaaacccggtgttgacagtgtcagcttcagcaatcaccaactcagacttgaatgagcataccaagaagtttgtgattgaatgcatgaaagacattcttcatttgtcatcttctcctctgaccacatcagacatttcaaaacatcgtgctgacgtgagtatgcaactcgacgtgttgagtaccctttgcgggcattataaatgtggcttagcagaggttgcatggttcactgacaatgttaatgacttactcaaaactcaagaaaagtttctcgcttctgctcaagttgttgagaatgcccttagtcttgatgaatctctt

SEQ ID NO: 285325 - DNA, 454 bp, Cannabis indica
agccggttttacccagaaaaacctcaaaattcaattctccaaccaaaacgtttccaaactcaaccaaactttccagacctgctaattagaccctaataaacattttccaagtgataaaacaaagcttcatgcacaaaaacaaaatccaccattaaagctccaagctttgagttcaaaactcaaacttggttaaatctaacaaacaagcacccaaaccaactcaaatctacttaaacatgcataaaatcacctctgaaaactacaccatagttttgagccaaaatttcataacttaataaactcaagaaatcatcagccctaacatgcatgaataaacattttaaatcaaaaataaacctctgaaatcaacatcaaaatacagcagcaagaacaactcaaaaataagcatgcaaaccatttctttttcatccaaaaatcaagaaactaaaagaaa

SEQ ID NO: 285326 - DNA, 691 bp, Cannabis indica
ttaataagaaaactggttctaacatgaatacaaaatactatattgttaagttattgcaggttatgccgaagctcaagagagtactatccccaacccttctcctactgcaaggaatgaggcaattaacgtacaaaacccaaaatttgatgacaaactgcctcctttaggatactctaagttaaatgtagatgcaaccttaaatgttcataaggggaaatcaggattaggggcggtagtttgggactgtcacaataatatcattgcagccctcgccaccccacaaattagagcaatttctcctctttatgcagaaggacaagctctttccctagctctatgttggtttttggcaataagattacctctctcccttattgcaaaagactgcctccaacttattcagaaaataaaacataagttgaaatatcgctcagctttatccagtttaatctcaaatattatcaataccttatcttcatattctaatgtttatccgtattttgtcccaagaaatggatacactttagtgcatatcttagcaagagattcttcaggcttacataaggagcaagttgagagaataacttctcaaccttaatctctgtattgtgactttgtactttcatgttaggggtgttcatgaaataactgatccagtccaattcaattcgcaaagtgcggatatccgcac

SEQ ID NO: 285327 - DNA, 500 bp, Cannabis indica
tatatactcatctttagatttacactaaaatatatatatatgtattcattactaaaataaataagttagtatatatatttcaatttatatgtatgtgtctgtgtgaataagaataatttttcttgtgttttaaattataaaataaataaaatacaccaactcaatatattactaaaaaagattaaaaaattagaagtttgtgttctttttttttttaatattattagaaaattaatatatattatatattataattttttaaaatatatataattaagtgcggattgaattggatcagtttactttttgaggtcaaacaacatccaatccgcagaagtgcggattttagatttttcaatccaattaatccaatccgcgcaagtgtggatatccgtattttgcggatttgattggattgaattgtgcggattaaattggattagatacttaatgaacactcctacttgttatggattgttgtaaataacttgagcttataa

SEQ ID NO: 285328 - DNA, 550 bp, Cannabis indica
ccgaaatttcggtagcataacgattgtaattggacattcccaaaaattttaaaaatgcctaaagtaacaaacaaaataaatatacaataacaaacaaaataacataaacaatacaaaatttatccactcatccgaccacagtacatgtattcgcagaacttgcttcactacggatgaatatttaagatatttaaattccactaagcattcattaataattaattataataataaaaatttagtgaatgtatatacctatagcaagttaaaatccgatcaatatcgaaatatgttgaacctcaaaaaattagctcacaacctacaatataatgcaatacaacaaaattagaattttaattatttaattacttactagttatttaaaaatgtaacaagttactagttattaaattctatagattaatttttgaaaaaaaaatatcatatacacatatatatataatcaattatatatcacactaacataattttacaaattttatttctgaactaattaaatccctactatctcattctcattcacaacaaa

SEQ ID NO: 285329 - DNA, 657 bp, Cannabis indica
ccactcagatcttaacccttgtttcctttctgtcgtagagtatcaccatgatctgagtccgaatgtccttttgttgaatctggattcttcacgatcttccacactatgattgaggtaccacttgctgagtgtgggcactactctatcactaaggggttcgaaacaaaaaatgaagaagaaggaaagagaggtggcggctagattagatagaaaggctcaggtttttctctgaaaggaagaagatgcatcatttttcctgaagccatcactacctatttatagtatgccacctagggttaggtttgaattatttggcattaaaataatgaaaatattaaatgataaatcctacataagtggctggccaaggcttgtggatatgggccccacttttgtaatttgctgttttatcatttctacatctcattttctcaaaaacgccaattttcaaattcaaccatttaaatgccaatttcaactatttaataactaaaattaattattaaataatattgtcatttaatatatttattaattatactagtcaaagtctcttaattgacaacttagtgataaattcacaaactagacatagtctaatttgacaattataattgattaatcaaaaccaattaaatgagtcttacaagtagtatt

SEQ ID NO: 285330 - DNA, 465 bp, Cannabis indica
ggctctgatgccagttgttggaattattttaccaggatctatttttactatcgattcttcacagtcttacatactatgattgatgaccaacttgatgtgtgtgggcacttactcaatcactaatggctgaaattattttgtaaagaaaggctataggtttcgaattgaagaacaaagaagaagtaatacagtgagatttctctcacctagaaactcgagacaagactcctatttagaggacacgtattttcaggtttccaatggaagctgaaatgtccatgagagactcctcgaagtttgaacctcgccaggataaagccagcgagtacgaccaaagtcggatcgcataactgtaactcgcattatgcaggatgagaggatggatccaactcgcatgtgtcgggacatatgcgagtatcctctctatacttctgcaaaagcgtagagatcaactctctatgatgc

SEQ ID NO: 285331 - DNA, 720 bp, Cannabis indica
aattcaagccttagtgtattgagtgcatcgcccacacatatacaaataagtcctacaatcatagtgtgtaagactgtagaagaataccaaacacaaagaaggtagttcgggctcagatcttggtgatactctgctacagaaaggatacaagggttagaaatctgagcggaatgagtcatttaattccgctgcaaccaatgtaaggtttctcatacctttttatgtgattattttatatcattttaaaagttacatgtttaagatgttaaaaaaatatacttgttagtaaatctagatcttggtaaaatatatattccaacagtctctagttacacttttagtgaaaatatctgcatggttatcatgtgtgtttatttccttcacttgcaccttctttgatgacacaatatcccttatgacgtgtaacttgatatcaatgtgctttgacctctcatgaaacattgaatttttcatgagatgtgaagcactttaattgtcacaataaactgtgatatcctcagatttgaaacctaactcctttgtcaaccccttaagccatatagcctccttgatggcttctgtagcagccatgtattcaacttttgtagatgacaaggatactactttttgtaggttagatttccagctgatgcagcccccaagagtagtgaacacaaaccctgttaggtgttgggttttgtgccctaaataaaacccttt

SEQ ID NO: 285332 - DNA, 524 bp, Cannabis indica
cttgaatttaggaaaaaatattggatgtgtaattactcagcccattttgtaatgagtcagagtattgccttttatagatatggtaagttgttacagtgtgggctgtgagcaacggctctttgacaggtggcatggtgctgaaatcaataaagattacaaagggaatatactaacagaattcctaatgattgctccctaatatttggaccacaaggacatggatgacacctgtccagggtgtaatcctctgtttctctgtatcaagcatcaacagagtaatgcaagtattgtgcaccagcagtagatgacaactctatttctcaacaataataaaattcattttttttaagaaaaattagacttccatatatattttaatttaaaagcaagtagtggatgaaaaattgataatacttttcatctaacctatatccacatttaaatcgagagggaaggagggaggactcccaaaaactcatttctcattctaatttcttttttttttttttattttttttggaaaa

SEQ ID NO: 285333 - DNA, 688 bp, Cannabis indica
aacgaaaaaaaaaaaaaataaaaaattatattaaattatttgtaattaattatttatatatattattatattaaaattattaattttaattttaattttttttaattatttaattaattaatatataaaattattgaattaattaagatataaaatcatttaacaaaaagaaaatatttaaagtcactaatattacaataagagtaagtcataaacattatagtactgcctacctaaatataaattagtgttcataaaatattaacaaacatattagaccgatagttcgtaaaattaaaatagatattctaaaagaagtttgtagtagcatcgtcctcatcactagcatctcgaggaacatccgacccaggaacatccggcatctgtgggtagtatggcggcatttgcgagctggtcatcatgtgagatgtctgctgcccatgtagtgtcggcatcatttgagatgtctgctgcccttgttgtgtcggcatcatctgagaagtctgttgtcctagatgtgtcggcatcatttgagatgtctgctcccatggttgtgtcggcatcgtctgcgatgtgttctgatattgctgcccttgtgtcgacatctgaacattttgcggcatctgtgacatccgaggctctgacacatgagacgtctgaggcgactgagtcatcatattcaacaata

SEQ ID NO: 285334 - DNA, 653 bp, Cannabis indica
atccattgttataattccaataattaatgatcatctatatatgatttacattgcatagggattaatttaccattacacccttcaatgtattttatccttaaaacacttagctacctataaatgatattacagtgaactaatttaatcactgaaatgagtactcaaccatttatctctttttagcaaagctcgaaggaaatcatcatttcacttctatgtccggatagaagctatagatttcgtatctatgattagctctcccactcaattgaactacaatgtacttaacctatacgtcactagaagaaccatatggtcgaccttaactaatagattgaagaacacaaataatgcaactgaactagaacctaatcatcacaagattgagatcatttgatctaggatcaactagatgatattgaattgaatagatattgcggtaagtttatcatatctagttcaagttcaatatcggtcccttccgatgcatactccatgcatccaaccccaccttactttaaacaatgccctagaaaggacataacacttatccaaggttcaagtatactatgttgtagattatcatatcagttaaaccctatgtactgataaatctaggaatgcatttattgacataatcttgattactttcc

SEQ ID NO: 285335 - DNA, 664 bp, Cannabis indica
tttgactgaaaaaaagccaaactaaatccatccggcccaggtgctttgttaccttcacaactaaaaatggcttcttttatttcatcttcttcaaagggtctttctaaatctgtagctaatgattctgataactgtttccattcaataccttcaactccccaacccggtctcctctcggatgtatataatttggagaagaattctactagttcagttactatttcatcctccttatcaattatcgaaccatccattctttcaattcttgaaatagtattccttgccttccttgcatttaataaattatggaacattcttgtatttgcatccccttcttttgcccatttacatttcgatttcagccataaactcctttcttcttcaactatgtattgttgccactcccttttaagctttctcctctcctctgctagagattgattccacataatactcccctcttttttatccagctccactattctcctttctacagcattcttggccaccttgttatttccataaacccctttactccattcctttatatttttttgcactttcttcagcttgcacataattttcgttcctggccagccgtcaacactagcatttctccaccaaccttcaagtaacttaggaaaagatttgtgttccagccaaa

SEQ ID NO: 285336 - DNA, 1101 bp, Cannabis indica
ttgttgacgagaaagctcaggaggagttattttggcagccaagaagttgacataatcagcataccacgataccatcaggttttccctcacactaaagagttgctcatcaggaaattgctcatttatttgtacctcttttgtattttgactctcttccaactctagtcttgacagatgatctgctaccaggttttcagtgccctatttgtcttttatctctatgtcaaactcctggagtagaagtacccaccgaatcaatcttgcctttgcatccttcttggtcataaggtatttaattgctgaatgatctgtatagactacaaccttattcccaattagatagggtcgaaacttatcacaagcaaacacaattgccaacatctctttctctgtcgtggcataatttagttgagcatcattcagggttctactagcatagtagatcgtgtgaaacaccccgtcaaccctttgacccaagaccgctccgattgcatagtcacttgcatcacacatcaactcgaagggcaactcccaatttggttaagtgactattggtgctgaaatcaatttctctgccttcaaacattcttctccaaactcaaaaggaacgccattaacaagtaaattggacaatggtttagagatctttgaaaagtccttaataaatcgtcgatagaaaccaacatgacccaagaaactccttactcctttcacagaaaccgggggtggcaaattctctattgttgacactttagctttgtccacctcaatccctgcttttgaaattttgtgtcccagaactatcccttctttcaccataaagtgacccttctcccagtttagaaccaaatttgacttttcacatctgattagcacattctccaaattctctaagcaatgatcgaatgaagaaccaaagaccgagaagtcatccataaagatctcaatgcaagtttcaattaagttcgaaaagatagccatcatacacctttgaaatgtagcaggagcattacataatccgaatggcattcttcgaaaagcaaaagtaccatagggacatgtgaaagtagtcttttcctgatcttctggtgctatggctat

SEQ ID NO: 285337 - DNA, 512 bp, Cannabis indica
tctcttgtatgagttttttcgtcgtccctttttttatgttctttgtcactatttataattacatagtggacagttagttacaaagttgactgtaatatgtttacaacaatcatccctaaaatcatgggatttgattacatatcacgtagtgtaaatgcagtttatgatttgaaaatcatatagctgtgattttcctgcttttattgggtcagaatgatcgtgttttaaacatgtctttaattattgtttccggagttgtctcgacagaagcttggttccagtgatctcaatagcaagttggggccatttttccttccgaggtcgacgatgcatgtcttgagtcgatcgcggttcttatttacaaagagttcttcgaagttcatttgaatgttagcttcttgacttgctagggttgtgagcctcgctaatgctaacgggatgaagatatatgaggtcttcccctaacgagacgggcacctcacttacttggtcttgagtcgatccgtctgtaa

SEQ ID NO: 285338 - DNA, 780 bp, Cannabis indica
gtgtctgagaggaaaccagcaaacttcttggaaatgttataaccttaaagtggccaaggctaagtaggaagtatcctccagccagagcacagacaagggaaaaaacattttcaagtagggagtttcccaaggcggggatgaagatgtggatcctcgacttggggacccaagcagcaatgttggaccagtggaagaattagaagagattgagatcgatcaagatatcccagccagaaagctaaaaatcgaaaaaggtttgttgctcaaagtaaaatcaacattgataaaattcttgagagcaaacctggacattttcgcctggtcacatgaggatatggtcggaattgatccttctgtaattttgcacgtcgtaaatattaatcccaacttccgaccagttcaacaaaagcgaaggctattggacgaagagtgagcattagccttaaaagaacaagtagagaagctacacaacaataatttcataattgaagctttctacccaacatgggttgcaaatccaatactagtacccaagctgaacaagaaatggtgagtgtgtattaatttcagagacttcaacaaagcaagcccaaagactgtttttcactcccaagaatcaatcagctcatggatgtaacaacagggcatgaaatattaagcttcatggatgcttagtgcttactcagggtacaatcaaatcaaaatgcatccaccagaccaagaacatacaagtttccgaatagatatgggtatatattgctacaaagtaaatgtcgtttg

SEQ ID NO: 285339 - DNA, 660 bp, Cannabis indica
caactgtttaatttcagtctttctttttaggtccccgcacccaatccagatgttgttggtcaaaagtcagatgcccttcatactgatgaagaaactgaggacactgtctctgatacacctctgttggataagaggaagcgtgctccggccttgaaatctccatttgttgatttcgggtctgctgatgtcgggagcactccaatggagcttatgtcctcaggttctcaatcagctggggatgatagggatttcaaaatggtgacttatgtgaagggcctttatgctcttaatgatgcttttgctgatcccgtatctaccgagattgaggcaaaatttgacgcttggattggtgaaggattgcttaaacatcctaggtgactgtttttattaaatctgtttttgtattatgttttatttttcagttttattctggttttaatgttgtttttttgttgttttaggcattacaattgttatgttgatggcgcaaagaaatttaccccgggttttaggctaggtgttgattatgtggaggataaagttttatcatttggctacatgcgacatgtttataaatgactcggtaaagtttccaatttccattgtagtttatgatagttggttttcagttgctttttaaatgtttttaagttttgatac

SEQ ID NO: 285340 - DNA, 822 bp, Cannabis indica
tggaaaccccaatgtcctaaacttcttgcaaagaaacaaagtatttcttttcctataaactgatgtgttttagtgaattattatccatttggattattaattctagacctactaaccatgtttatttgtttttcttcttattacagcccaagctgcttgaactcaaatgctatcttagcgagttgaatcggaaggttggacaaaggggtggagttcatccaagatgaagatgaagctcgtttttttatttttaaattaattgttttagtttcagaacagtttgaatttcaattattagtttgggattttattccctatttttcatattgttgcaaaaaattccattaattttggagaattttacaataaagttttctattttggaaataaaatgcattttaaattgagcttcattccctttattctagaagagtgtaaaaacccatctataataattcaagctccatcagtgaagatatataactttgtaaattcgaaattaccagaaagttattcaactgaagaaaattctacactgtattatctctatttcattctttaaagaatgagagatatgtcttctgtttattcagatgtacttaataagcagtaaggatttcagtatcccttgatgagtaatgcatatagtaaaggatgttgcataatgttttatgaacatggttccagaaatttgggttgagtcaaatatactacacttgatctgaagatcaagacaacagattgattggaatgcacaacttgttttatgttagtgcaagtgggagtttgttgggattttatgccctaaataaaacccattac

SEQ ID NO: 285341 - DNA, 731 bp, Cannabis indica
agttggtttagaggatcaatttccacaaatttccaccttgattctctaaagcaatttatcagagtcttttcactgaagccttgatgatgtgatatctcgaaatgttcagcaagaaccaatgttcagcaaactgagacaatgcatcagtttactgaatgtaagaacctttgttcccatgtcagcagggttgtcacttgtgtgcaccttttccaattccagaaccctgtcctcaatcttctctcgaatccaatacaatctaatgtcaatgtgcttgcttttctcatggtatacaggattcttgcacaagtgaatagatgacagactatccgaatagactgtccctttgtctttgagcagtagcagctcttgcagtattccttgtaaccatatagcttccttgaaagcttcagtggtggccatgaattctgattcagtagttgacagtgccaccactggttgttgttgtgatttccaacatatgcagcttttgttaaccatgaatacataagcagtggtagatcttcgattgtccctgtttgatgcataatctgcatcaacatagccttctaacctcacatcagatgtgtctttctgatagatcagaccatacttgattgtccctttcaagtatctaatcagccactttacagcattccaatgctctaacccaggtttgccataaacctcttaaaaacacttagagcatgtgctatatcaggtctagtactgac

SEQ ID NO: 285342 - DNA, 467 bp, Cannabis indica
caacgagttgcacagtacgtttttccataatccattcggacccgagaacaccttttgaaattaaagtatacattttgcgtgttttcaatgcttgaaatcaatatagatctcttaattttttcatttagatcattttggaattgatttcatgatttttggaagtttaaggaaaatttattatgtcgtttttcagggcagatttttcaaaaaaaaaaaaggaaaattaagaaaaatttaagaaaattccgaaattttattattttgatttatttttggaattttattttatttccttattttgttgatttagtcaattaaattacatttgtttaaactttccattcttatttaacatatatcttcatatattatatgttatttagtaataaattattatggaaagtttttaatttggtaaattaattacatgctttatttttacatgtaattacaataattgtgatatt

SEQ ID NO: 285343 - DNA, 643 bp, Cannabis indica
taaatgactctttccgctcagatttctatgtatcctttctgtcaagatctgagcccgaaactccttcgttgtgtttggattcttcacagtcttacatactatgattgaagaccaacttgatgtgtgtgggcactcactctatcactcaacgatgaaaatatgaagagaggaagagagaagagaggttcaaatagcatagggaagaaggctcaaatttttgactgaaggcaagtgtgttcatcatcattcaatttgtggccatcactatctatttatagggaaccacctaggtttaggtttgaattatttggtattaaaaaaataaaataaatggtaaaactagagcaatagtggccggccataggatgtgggcccccactttgcaattttgccatttttcacactatttatcttattttctcaaaaatgctatttttccaattctaacaacttaaatgccaaaactatttatttaataattaaaattaattatcaaataaaattgccatttaatatatttattaattagacttaataaaatcccttattaataaataaaccctagaatctcttttcttcacatttaagtccttgcttagtgaaaatttataaactagacatagtctaaatttagaattataat

SEQ ID NO: 285344 - DNA, 575 bp, Cannabis indica
cgacctagaaatcaaatatcccgatgctttggatcaacataactcttctgtctgctctgagccgcgagcattcgcgctctaatcttgttaactgcctcacttgttctcttaacatcctcgggacccaagaactttctttcacctacttcatcccagtgaataggtgatctgcattttcttccatataaagactcataaggggacatcccgattgttgcctggtagctgttgttataagagaactcgatcagggaaaggtactttacccatgatccctcaaagtcaagcacacatgcacgtagcatgtcttctaaaatctgaatagtcctctcggattgcccatccgtctaaggatgaaatactgtgctgaactttaactgagtacccatagctcgatgtagactttcccaaaatctcgatgtaaacttcggatctctatccgaaataatggactgtgggacaccatgaagacgaacaatttctcagacatataactcaacatcctggtcaatggagaatttcgtccgaacaggtaagaagtgcgctgactttgtaaacctatcaactatgaccca

SEQ ID NO: 285345 - DNA, 635 bp, Cannabis indica
aattgttaatgctaattactattcctctttctttatgtgaacgacagattataaaattaacctaactcttttcagatcttttaggtcctaaatcacatgttatcttcaccaactcatgaatctaatcatctctgagatagattaacatataatcaacattaagcaataatctaaatgtcacaaaggctatgcaaatactttagtttcacatcaaaacctagtttatccaattttagcattcccaattctcactttttcagattttgaattgggatcatagaacatgtagaaggtgatcaatcttaaacatgtaattaaacacaaatatggataaattcacaatcaagaaaggagaaataacaattatcattaaccaaaagtaatttcaatcaacattcatcatctccccaaataggagtttagttcataaaatccataataacatccataatcaaaactaaaacaaaaattaacatagaaattacgagtttaagaaagaactagttggtgattgcattccggatcgccaccattgcttcctctgcctccttctttcactttttagtccaatttctgcctctctcccttctaaaacacgagccccttaaatagaaattagggttgctacctttgaa

SEQ ID NO: 285346 - DNA, 620 bp, Cannabis indica
tacaatgccaaaaaaatacattagatacatgtacttgtatttaagagtttatcttaataaaaatataattagcgtacctgaaattcaggagttagtcgacttgcaacaaaagtgcaccaatgagcatggtcgatttcgggatgcttttcagggacttgtggtagtcgtcccacatccttctcttccacagcgagcattatgatgtcttttgtcatcgtattcttgaagtctttcattaactttccagcaaggatgagacaatcaagtttgaaggaaacaatgaaccccgtctagtttgaaggaaaacaaacacggttagagtgaacatttaaattaataaaaaataaataaaaattctaacaaataactgcttacttgtatatctttccaaactttatttttcagagtagcgttgacttctttccaatttttatgggacaaccctatcgtctgacagcatatgactcctaaagttgatacgagcttggcatagcttttgccgcagtattgtcctttatcattaacctcaagggccaatctcttgccttgatccatgagcttggatatttcattcatttgcgtaggccctcatgtaggtattactgttggacactctgcct

SEQ ID NO: 285347 - DNA, 356 bp, Cannabis indica
taattaacctagtacagttatcaaaatcaggcaaatgggccttcacagttggggttgttcatgtgagggagggttgggttcagtatgtcgtacccactgctattggtccctaactctcataaaaggcccaaaagagaggaatttagccttaaaattaaccactgttattaattgaataggccaaaaaaaaaaaaacaaaatgggcctaaataaaatctatcaaggtatgaaattttatttagcaacctagttcatcttgattaaaaattaaatgaacaacctatatgcatctaaaataaagtaaacatataggctcacacaggcacacagatttagatggatcctatcatgttact

SEQ ID NO: 285348 - DNA, 424 bp, Cannabis indica
taattgattttgattaatcagttataattctaaagttagactatgtctactctgaattttcactaagcaagggcgaaattgtaaagaaaagagattctaggtttatttattaattaagatactttatatgtctaaattaataaacatattaaatggcaattatttaataattatttttaagttattaaataattagaattgacatttaaatggttaaattagaagattggcatttttgagaaaatgggaatgaaaagtaacaaaatggtaaaattgcaaagtgaggcccaatatcccttgtttggccgcccactatgcatatcaattaccatttatagttttcaatattttaatgctatataattctaacctaaacttagatgggattctataagtagaaggtgttggctttaggaaattatga

SEQ ID NO: 285349 - DNA, 195 bp, Cannabis indica
ataggtggccaagtgttttaaggataaaatacattggaagggtgtaacggtaattttagtgcatctagaatccaagagaggcaaggatgctcactcactacatgaaccggttggttcctgaggtaagtgagcagctggccgatgctgacaccaaatcttccctggagctgctgatgggaggagtcttgagggaat

SEQ ID NO: 285350 - DNA, 384 bp, Cannabis indica
ctacacaatcttccacactatgattgagataccacttgatgtgtgtgggcactcactcattcactcaaggttcgaaattgaagaggaaaagagaagggaagtggcggctatagagaaagaataggaggctcaaatttcatctgacaaagttaagtgtgaatgagagccatcactatctatttataggtaaccacctaggtttaagttagaattatttggcattaaaataatgaaaaaataaatgataaaatccattaagtgtggccggccatgggctttggataatgggcctcacttatgcaattttgctgttttatcatttctgcatctcataaagtctcttaattaacaaataaaacatagaatctcttttctcacaatttt

SEQ ID NO: 285351 - DNA, 171 bp, Cannabis indica
aatgatatttcagcgaagtgaaatgagatctttaccatttatctctgtttagccaagctcgaaggatatcatcgttttgttggaattattttagagggatttcaaaaaacagggaaggaagagagagagagtggcggcttcaagagtgtttttgagtgaaagaaaataatg

SEQ ID NO: 285352 - DNA, 539 bp, Cannabis indica
tataatatatatatatataaagtttaaactattttagctcatgagatgtgagtgctactctttcttgtgagactttaagagaatcctcaccgaccatcagagtaatttggtgtaagtaccataatcggttcaaccttagtacattaatcctataatcaaagcagtggtgtagctcttcaccctcattagttttttcttcttcaatagtcttcgttgctagcaatcaaattcagatcaaactaattacctgtttataatatgtttcatcatcaacgcaggcttatgatatgtttttgttaatagataaaaaccaatgagatatgacataatcttctgtctagaaccggcttatgagaaaaaatgagacatgagcatgacataatcttctctatagaagtaagataaaacagtcattagtaccactctcttaaccccatatgagatatgaattaatccagcctcaggtttcaaaaagaaaatataactaaaatacaaataatataattttttaatattaataagctaaacaaataaaaaaa

SEQ ID NO: 285353 - DNA, 669 bp, Cannabis indica
tttaagaaaatagaaatgaaaattgttaaaactgcaaaattccaagtggggcccattaacaccatggccggccacttgtagagagttttttcaattaatattttcattattttaatgccaaataatcactaacctaaacctagtggttatagaaagtgatggctcacaccaaaatagagtattattcagtaattcaagagattgcgttttagaaaattgagccatccgctttctctctatagatgaccctctcattctcttttttcctctttcaatttcgaaattattttgagtgatagagtagtgcccacacacaacaagtggtacatcaatcatagtctggaagatcgtgaagaatccaacttgaagagagcgacattcagactcagatcttggtgatactctgcgacagaaaggataagggttagagatctgagtggaaggagacatattattccgctgcaaccaatgtaaggtttcctaaactttatatgtgtttattatcgttttagaagttcgtatttaggatgttaaacaacatacttgtgagaagatctaaggtcctggtaaaataaattccaacaactggcctcagagtcgtggtacttgatttgcttacaagaaatttggacttaaacgatttgtgtgtgatttggatggtgtcatgtt

SEQ ID NO: 285354 - DNA, 1077 bp, Cannabis indica
cacatagacgacctggatgaatgttttaaagtcctcaggaaatacaacatgaaactaaatcccttaaaatgctcctttggagtcagctcgggaaatttctaggcttcatcgtcaatgctcgaggaattgaagccaatccagagaaaatccaagccctcctggatatgaactcgccaacaaaaaccaaagaggtgcaaagcctaactggtcgaatcgccgcacttagcagattcgtgtcaaaatcaacggataaatgtgttccattcttcaacatcctgcgaggaaacaaaaagttcgaatggacagaagaatgtgaaagagcttttcaagatctaaaggcacagctcgcaaaacctcccgtcctttctaaacctctggacggtgaggaactagggatatacctagcagtaacggagcatgccgtgagtgccgtactgatcagagaagaagacggcgtgcaacatccagtctattacatcagtaaaagactcatcgaggccgaaggccgatatccgttgatagaaaagctcgcctactgcctcattctagcaataagaaagttgaggccttactttcaagctcatcctgttcgggtgtataccgaccaaccactacgacaaatactgcagaagccagatgtctctagacggttactcaagtgggtggtagaattgggtcagtacgaaatcaacttccaaccccaaacagctatcaaaggccaagccttggcggactttgtagtggaatgcacaggcaaaactgaaagcataccagaaagcgatctcgagccaatgccacaaccaagtaatattgaagacaaactgacctgaaagctacatgtggacgggtcggtaacagatcaactacctggtgcaggaatttccattgtcacacctgggggcaacacctgcacgcagcggtcaaattcagattcaaagcctctaacaacgaggccgaatacgaagccctaatcagtggacttaaactagcaaaggaaatgaaggccgagcacattaagatctgcagtgattcacaactagtggtaaatcatgtatccggcgaatacgaggctcgggg

SEQ ID NO: 285355 - DNA, 1010 bp, Cannabis indica
ctcatatagtttttacactatcatatatttactaataaacaaataaaaaggaaaacttaaaaaaaaaataagcaagtaaaattcatttatttaataaagagtaaaagaattgagagattttttttagcaaaaatgaaaagaaaatcaaagattaaaaaaaaagacaagaaaaggacaagtattaataattggtaaatatataaataaaacacataactctaaatatggtaacaaaaaaaaaagtaagaactgtagacaaataaattttaaagtatcaatacttattttgttttaaaaataaaattatattttttcttaagtttttataataatttacaaataatatatatgcaggaaaataacatacatatatacatattcatttccttctatttttccacatttaaatagaaaaaatataaaaaataaacataaaatatttacaaaaaaaagatattattatacttgttatcccatttttcgtactatgatgtggcagtgtgtactagtggcacgtgtcagttattctttacacttggttggagaaatatttcgaacagacttcaagcaacacatctgcacgcacaaagtctgcttgaccgagcagaacaaaggacagatgattcgagcaaagagtgaagttacccctctgaactgtgtatcaagacttaactacttcaaagatgatatataccgtgaagctcaagcacaaaagcaatccctacaatcatggaatcatataaaagggatacaacaagctgtcccaatcccccatttcatataatttaaatatgtaatgtatgttcttactaattatagatattgtaagcaaaagggaaacctcccctcatgcatttagccctataaataatgatctagcttcactgaaaaatagatcgaaagaattgctttagagagagatctaagagaaaaaccctcagagatttcattgtgaaagctttgagagaagaaacattgtattctttgttctcaaagtcaaatacaaatct

SEQ ID NO: 285356 - DNA, 732 bp, Cannabis indica
ataaatatccataataaattatttaaatagctataaataatttcataattaacataaacaactgataatttccaaattaactaagcgggctttacaattccctaccccaacaatactcgtcccaccgaccgctatccacaaaatctagatcaaacctagatacttctttatctggagtattacgaagaagaaaacactgaataatatacaaaacagccattttcaaaccaagggactcatccaaaccccacctactacccaagaaagcatcctcaatggctttgtggtcaatggtttttacaccacgaaaatagatttctaccaactgatttgtttcctgtgaaaacaacaacttgttgcaatcaccgaaacaatcaattccagaaatcaaataaaattcctcaacactaaccgtatacaacggccagcaaccttagctcaaaactctttaggattgggctggaaaacttccctcagtaataaattatagacaaattgcggatgaaaaataaactcagacatatctagaaaatggccaaactgagtttcacgaaacatagaaagaaaattaacagataaagttttcttaatattatctatgacagaaaaaagactagtgcaaacacacttagatctatagcaaacctgcaaaataaccaaaatggccacaataaattattaatcgtgaataatacagtatgacaactaaaataaaactataaacaaaccaaa

SEQ ID NO: 285357 - DNA, 197 bp, Cannabis indica
ctaagaggttcgaaattattcaaggaggaagaagagtataggtggcggctaggttagagagagaaggctcaggtttttctctgaagaaaacaagatgtgaaagtgttaatttcctgaagccttcactatctatgtatagcaattgtcattaatcatattataattgaaccatacaagtatcttaattaacaaatatg

SEQ ID NO: 285358 - DNA, 449 bp, Cannabis indica
agagtgccaagtcctccatgtcactacataagctttcctcatcttcttcactaatggcatgggaggaggaagacttgaatgcaatagtcttctttttcttctcaacttcctcttcttcttgagcacacatgaaaatttcatggttcatgagcgagccaattagttcttccaagagaagcgttgagagatccttggcttcttgaatggcaaccacctttccttgataagccttggtgagacttctcaaaatcttggtcaccatatccttttgagtaagtaccttgccaagagagttcaaaccattagtaattgtagtgaagcgagtatacatattagcaatggtttcatccgatttcatcttaaagttctcatattgagtggaataaatttgaattttagtttccttcatagcactagttccttgataagtaacttcaagcattttccac

SEQ ID NO: 285359 - DNA, 259 bp, Cannabis indica
tcagaatttaggattaattgagatgtactgattggttttatattagtggaagtgggagtttgttgggttttatgccctaaataaaactcaaattcaatgtaatttgaattattcaatatcgataaaagaacagaagtatttttcattcatttgtgtatgttttggttcaccttatcaattatttgtctatttgatttataaattcatccaaacccttttcacatacttgttcttgtttattgtgtcgtcaacacagtgg

SEQ ID NO: 285360 - DNA, 654 bp, Cannabis indica
ctaagagagaatggtgcagctgagaagagagaagggtgcggctgagtattatgtgtttagaaaatttaggattttttatttataaggaaagagaaataatgagagaataaaatgagaaatatagagagaataattgaagcttagtaatatatatttttcttacgtaatctagcatttgttttttaaaaaaaaataataatttaaggttattttacagtgacacgccaggcatgtcacgatacatttacccaatcacacatggcgcgtcactataagttaacaattttttttaaaaaaaaaataatagtaattatgggaattactctatagtgactcttcatatttttagtgacacaaattgtaggacactaacattaaatttttagagtctttttgtgtgtgtcactgaaactcaccgctaaatttttagtgacccgcacaaaagtacgtgtcactaaagtgtgtcactaaagcatatttttgtaatagtgctaggttttaatattatttttctagaaaataatgtaaaccaatattcgggcataggattttttatgtaattttaattttctaaaaattgttttttatgtaaattattttatgatgtaatgctcacgaagcacggagctcaagtttgaacgaaccccagccatg

SEQ ID NO: 285361 - DNA, 637 bp, Cannabis indica
gtattattattcaaaataaattatataaacttaataataaagccagaaatgcatgactaattgcataattagttggatacatatgctatgcatgtacattaataatattgatttatttattcagaataataatcaacatgatcattaattaatttgtttaattccttttgataatgaatttataatgatatgccaaacccgtgcatagtcacatctaaatataatcacatttactttattttattctttcataatctaggcatagatttacagtaatttctcaacattttatataaatatcaccttgcaaaatggtaaatttttcataaactagtattttccaccttgaaaagctattgcaatagactagaccatattattttttaaaaaaattttaaagtataagtttataaaaatatgatttttttttctcaaaaaattattttatgagaaaatttagttaaaagttaaaacatatgaaaaaaataagcatgaggtacttggttactgctttatggtagctgattactcttctcgttaccataagagtacctgattattcttatttgtatttctcatatttttttctttttctttcaattttttcgctaaataaacttttttttctaaaaaaaaa

SEQ ID NO: 285362 - DNA, 502 bp, Cannabis indica
ttagctttaacaaaagaacccttcaccatctcaatcttgcaacaggtaggaatgtcggttggggcaaaaacattaaaattgacctcttcatcttgcactctcaactttaactctcccttttgaacatctattaatgctcggcctgtggctaagaatggtcttcccaaaataatgggaatagttgaatcttcctccatatcaagaattaggaaatcagcagggaagataaacttaccaaccttcaccagtacatcttcaattatcccacgaggatgagtcaaagaacgatccgctagttgtaaagtcactgttgtgggctttgcttttcccaatcctagccttttgaagacagacaagggcattagattaatgcttgctcccagatcacatagagctttagtttccaccgaaccccctatagagcatggaatattgaaactacccggatctttaagcttgggcggtagtttcttttgcaaaatggcgctacactcctcagtta

SEQ ID NO: 285363 - DNA, 501 bp, Cannabis indica
aataaacctaataaaagtcttataaataataatggactaggacctcaactctaaaaagtcacaaaaaaaatgtacatattaaaataaaagtagttaaaaatgtataagtttcttaacttttaaaaattatatacttcttagtacaattttactaaagtctcaaattatcataatttgcttatatataaaataataaagctttattcaaaaaaaaaataataataaagcttgtccaactgaaaaaaaaaaaatacaacttttcaaaatttaagtataataaaaattaaggaccatccaccaacaaattaatttgatttaataacaaatttaagttttgagtaaatcaatttacacaaagaaaacaaaagtcaaaagtcaattaaagcaacaagtacacaaaatagttattatagtaccatcctcatgcaatcataactcatcacaagtcttggccaattatagtcacacctaatatgctttctttaatatacaaaaagtatt

SEQ ID NO: 285364 - DNA, 612 bp, Cannabis indica
aaaaaaatttcttcttttttttttcatatgcagtacaaaaatttaaagaaaaccaaaatttggtttaccagttcactaaacataaactaaaaagaagagaaataaaaataacaaggaaaacataagaaagttcaactaaaacatcaagaaaatttgggttgcctcccaatagcgctgtctttatcgtcgcacagctagacgttgaccgagttcttcatagtggcgccaaaatcatggcggacttggcttggtcaaattgacctcccaagtagagctttaaccgctgcccgttaaccttgaaagtctcgaggctttcacctttcagttccaccgctccatcacgaaacactttgaccactgtaaatggccctgaccaccttgactttagcttaccaggaaacaatttcaaccttgaattgaaaagtaaaacttgctgcccaggttgaaactccttcctaactaagcttcggtcatgccactttttggttctctccttgtagatcttggcattctcgtaagcctcatttcggaactcctccagttcatccaattgcagtaatcttttctctcctgcagccttcaaatccatgttgagagtcttcatagcccaat

SEQ ID NO: 285365 - DNA, 536 bp, Cannabis indica
ttagatatagaaagatcttccatttattgtgagagtttaattaagggggcgtttggtatgaggtgtttaaaataatttgattatagggaatattatgaaggagaatatgattatagggaaatgtgtaaactgtgtttggctgtgtagggtaatatgtaatcatattactgttaattaaattacactgtttggttgagtacaggaatcttatatatattattttgaaaaataaaataaaaatatttttttattatatctatttaatgttaattacatataaaaataaaataattatttattaaagaaatatatttattaattaataaacattaaattttattgtattttttattaattaaaatgaacatttctatatattttatcactatgttatttttttttgttcgatatgttatttatgtacaccatccgcataaaatctttgtataataaatatatatatgttattgctaataatataaaataactcagttaaaaaaaactaatctcacagactaaatttatatatcataata

SEQ ID NO: 285366 - DNA, 660 bp, Cannabis indica
ctttctagcatggttgacaccttgaaaacaaggtttgctaacactctcacggctgcagatatcttgaaccagttgactgaactattcgggatggcatcaattcaatctcgctttgaagctacaaggaatttcatcaatgcacggacaaaacctcgtcagaacgtgcgtgatcaccttctccaaatggcgagttacttccaagaagcttagaatcatggagctgttatggatcagacaactcaagtgagtctgatcttgaacagtttgactccagcctttctaccttatacttcaaattatgtcatgcacaagaaggaacaagactttcacgagtcggtaaacgaccttcagacatttgaaaatttgattggacgaccacagaaaggaggatctaaagctcataattttgggaatgctaatggggcggctagggttgaggcaaactttgcctctacttccaaacccaagaacaagaagaaatggaataatagcaagaagcctgttcaagctgtgaaaacagttaaaaagaaaaaggctgctactcccggtgattagccaaaaggaaaatatttctattgcaatgaaaagggccactggaaaccccaatgccctcagtttctagcaaataaacaaggtgtttctttctatgctataaactca

SEQ ID NO: 285367 - DNA, 672 bp, Cannabis indica
agtcgggtgcaataaattcacagaagacggcattgcacactaaagaaaaagaaaaggcaggaaatagaaagaaaacagtctatcctatgccctaagcaaccattgtacgaagaacgtatggtcatctacaaaaaaataacaacaaatgcgtgacaacactaatcctatcactagagcagtaaactcaaaccgattatatgaaggatttaaacacttgcattcccagaaacttcaaatgcaaacccagaaaagaacaaacagataagtaacagcatgccatttaataatgaagcaaagggtgcaaagaacttacactgaagtgttgagactgggggtttcgctgtgaatcgaatgaagacaagaaggactaacagtaacaaacgaaggagaattggagaaagctgcaaagtgcttaaaggtgtttttctgggtctgaggatttttctctctgggaaatttgagcaaagttggcaagaaatgggaagtaaccgaaatgaaggaaagatgatggcttttataggcaaagctgcatgcggaacaggcgtcatcacctaccaatcgaacggtgggggaagcgcacgattcgaattctcataaatcaacgaacaagattgatttgcaattaaggcggtggaaacgtttgagtatccgtctgacaccattaatgcaccg

SEQ ID NO: 285368 - DNA, 551 bp, Cannabis indica
agtatgcctgtgttgtcttttcaggtgtgttctgacaggttggcgcggtatagtcacaaccgggaatttcgggccgaaccgggttcgggcccgaaatgtaaattgaattgattatttggcattttatttgacatgtgataatctgaaatttatttggatataattgagtgtgaaatggcatttatgcccttgaaaatgcttatgtttgttttatagccctaagggcaaaatggtcatttgaccataagtgatttactttgaattaaatgatttttgaaaggaaaaaggatttatttttctggttctatctctctctcacccgaaccctctctttccctaaaacccttttgattttcaaagttaattgttgagaaattgcttgaagttgggtgtggattgaagctttggaattgtggattcttgagcttggagttaggtaatttcttgctgagtttatgtagaaattgttggtgattctcttgctgaattttatgttggaaaagcttggaaaaaaatgatttggtcttataattgcatgttgtgttcttgag

SEQ ID NO: 285369 - DNA, 774 bp, Cannabis indica
acgagcaactgcaaacttaaagttggtagctcatcaacaaaaagtagctcggtatttcaacaaacaagtgaaagctcggaaattcttcgtaggagatatgttcctaagaagggtattcctaaacaccaaagatagcacgtcaggtgtactaggacccaagtgggaaggaccataccaggtggtcgaagtcctcgactctagagcatacaaacgaggtaagtatgacgaaaaaatgcaactcatcctagtaccacggtactggaatggagaacatttaaggaaatactaacaataaagtactcaggtcgggtagaccacttcaaagtactcaggtcggatagaccacttcaaagtactcaggtcgggtagaccacattaaagtaccattgaacattcgcttctataggaatggcctcttgggcggactacgcgcaaaggcttcagaaacaaagtactcaggtcgggtagaccactttaaagtacagtttcttatttgttttatgtcatgttaagcttaaagatcagattagatcactagctctgatgtaagttactacggtagcaaatacattttcgatcaataaatgaataaagatagtatttccaattctcttgagttgaaaaaatcagcatgattataatttacctaaagtgcgtacaaaaggtttagtcgaacccaaaataccgaacagaaaagcaatatatttgcgaaagacaagtgaccaagagtcatacgtctgctcggtcacttggggggcgacccatacctgtaca

SEQ ID NO: 285370 - DNA, 587 bp, Cannabis indica
gagggcatatgccactctctatgggcggaagccgctctttgatgagtgcttctcaaaaagtcaagccgacgactttaaatcaagcgcttcttgggaggcaacccaagctttctaaactttgtctttattttgttttaaattcaataaacatgcaatgttaaatggctttgacaattgcattgtagttttttttctctatcttttaggtgcgagcataaagtcaagtggaattgggcgcacttacggaggttgacactagcgagtttgcacatcattaaaaggggagttcttctttaactcttctttattaattttaaactcgctcacacgtatttgagaattttgtgcatacaatgttttgggaaactaaatattttttcttttcttttattttgcttgtttaacaaaaaaaatttgaggcatatgtgctttggtttggttattttccacattctaatacatgattgatagtgtgcatagcttgttgaaaaatgtaaatattgcttgagcttgggactaattgttgtgctagttttattttgattgagatatgtcaaattttgagcataaatgccttgatcatttaa

SEQ ID NO: 285371 - DNA, 587 bp, Cannabis indica
aaagaaaaatatatagatatatatataatatactagaagaaagttacgtgcaaggcacgtatacttagttttatgttaggtgctctataatttaattgagaaagattcaataaataatcatataatttaaaatggtttaaaaactaattttaattagtgtgtggggttatttgaaaatcaatagtgaaaagtcaaatttaaaatttgcagaaagagaagaggagaatggagattagcttgaaatatatttaaaaaataataatgctacacacttactatggatacttaactcgagccggtaataataaaattataaagaataggggtagcaggcatataactggacatatgaaagaaagaatataaaaaacaagaaatatgatagcttccaaataatattataacaaagcaatgctctccaaatttatcttaatatcatctataacatcataaccttatatttagatttgggccaactttcttctcagttgggcttccagctttcttcacaatgcaagttgccacttctgacttttttttttgaaacttgaactgcagccatcgtaatctcattcttctcttgaagc

SEQ ID NO: 285372 - DNA, 813 bp, Cannabis indica
tgggctaagactagcccaggagatgaacggcgaacacattgaaatctgcagtgattcacaactagtggtaaatcatgtatccggagaatacgaggctcgaggagaaaagatgatagcatatctgaaaatacatgattagctcgcacaattcaaaagcgacggtcttagacaaattccaagagaagaaaatacaactgcagacacgttagctcgattggcaagcaacaacgtaagtgacaaggcaaacttcgttcctatacagttcttcgaagagcctagcatcactggcacgaaagaaatcgaaaggattgatacatccccaaactggatgacaccaatagcagcctgcctcaactctaggaaactcccagataacagaaatgaagctcaaaaaatgagaaggaaagttgcacggtatatcatagtagagggaattatgtacagaagaggattctcaatgccattgctcaaatgtgtcactcaagaagaagctgcacgactcctatctgaggttcacgatgaattctgtggaaataatgccaccgggcaaagcttatccaagaaaattctaaggcaaggttacttctggcaaacgatgattgaaaattcaaaagcctatgttaagaagtgtgacaagtgccagagattttcaaagatacaacgagctccacccaacgagttaacacagatgcaaagtccgtggccctttgccatttggggaattgacctaatcggacaattacccaagggcaaaggaggagtgcagtacgtagtggtggcggttgactacttcaccaagtggacagaagccga

SEQ ID NO: 285373 - DNA, 371 bp, Cannabis indica
agatattttttaagttaattttaaacttaaaatggaatattcttaaattaagtagttaccacttaattttgatatttaattaaatttcatttggaaactttttaagttggttattatagattctttctataacaacttaaattagatattttccaaatcttgaaaagatacttagttaaattgagatattttctagatggttatttctatactaattattatttctaatataggaaaatatcattgattatgaaattaattgtttaataattaattttggtacaattcaagttaagagtatttttcctagtattaaattagaaattaataattaagccttctctatacttaattatttatttcttgaattt

SEQ ID NO: 285374 - DNA, 883 bp, Cannabis indica
atctaaaatgaaaaacattctagtaaccttttattcgatcaaaaagagaattcgacgttgtcccatttaggcgagagtcaaggtcattcctatttcatgagcctccaccattatttcatacttttgtaagttttactaatagtcgccactattagggtgatccatactaaaaataaaacacttacaaataatacttatctttcgagattctacgacgttaaattgctaatgaacgttcttccattagggaggattactcactataacaagaactatgtagaacaaacaatggagatcgaatgtctcttgattaaaggtcattatttaaacaaaatatatttttatttaatcatttattttattgatattttaataatgaaaattataaattaaagttggtccgaaaataattgaaaaagttatttccaactttaattaaattttcaatatttaattttcaaaaattatacataaatatataaaattcaaaaataaataaataaattaaaatataataaaataaaatttgaaaattatctaatttaagttgttctgaaataactaaattttcaacttaaattattttcaaacaaaatttaattaaataacaaattaagttataaccacctaatttgaaaaaatattccattttaagttgatccaaaattaaactaactttcaacttaaaataataatccaagaatctctcaataactaattcctagaattcctcaacttaattttgaatttcaaaaatattcaaattcaagttgataaaaaaatagttataataaccaatttacacttaatagaatattaatgaaattaaataattaagcttcagaagaatctaattagttataattctatattaattaaatac

SEQ ID NO: 285375 - DNA, 712 bp, Cannabis indica
ttaattttaaattattacacttaattatttaattttttatttaaatatttaaaaagtaaaaagtgaaataagttgaagaattttttagaaaaaaaatggctacacttgttatcgattgactagtttgaggcctcatacttagttcatctaattgtaacaaaataattaaatatcatttaaaaataattaattatttaaaaatttattataagaatagaatttataatttgtgtaaaaagaagtttaatttttgtaaaaaaataaattttattgtaaatattataattaaatggcttaattgttaaaataattagagtaaggatttaaatataaataaaaaaattatttataaatattaattgctaaaagaggtcttgctaaatattaattaattattttaagaaaatagttaattataattaattaattctaaaaaaggaatgtttacctattagtaacttgctattacaagtcaaagaaaagtgtaaccatatggttacaataaaaacgtaaccattgaatagtcacccatatatatataagcacttatttacagctattgaaaaacacaataattttacaaataaaaatttgtaataaaatacctacttatttaaaactaaaatatatcctaattgtgttttctcctaaatatgaacaaaaaaaatatagatacacatctataataatatatataaatatattatacata

SEQ ID NO: 285376 - DNA, 756 bp, Cannabis indica
tttttattttttaaaaattacaaatttttactttcatttttgtgaattaaaaaattaaaaaataaaagtgttactaaacgcttcctatgttaacagaaaaaaaaaattgttttataataaatgctcaatttataaatagagaaattttcaagattgaaaaaaaaaatcaaaattaaaaaaaattagtagaccgagaaaatgttgaagaacctctgggttttttttttttttttttttttgtaaaataagcgttcatttatactaaaaattaggcctcacggtcattacaaaataagtctgtcggaataaaaaaaaaaatataagctaccatattatctgtgggtaaaagcccacttagccactttatgggcggcaaaattacatgatctgggaatacaagtgaaaatacaaccatcaaaacatctagagagtctcaggcaaaaaaaaagattagttctcaacctctcaaccggaagacaatgggttaagggaatcaatcaccactcttgagtcgctctccacgatgatgaacttgtgccctttgatctttgccgtctcaaatgctaagcagcacgcagtcgcctcaccacagcaagcgtccaagaaatccaacctcagcagagtggtttctagcgaccacaacgatacaagaactttccaatcccactttaacatcacagttcaattttagccaatcctccttctggattgaagtaataacagggtggagattacctctcagatctgcataaaaat

SEQ ID NO: 285377 - DNA, 566 bp, Cannabis indica
attaggttgattagaaacataacccagaccagcatgattggtttggccagatttttgaattttttcaaagatggtggaacctggatttagcattttcacattctttttaatgttatcaagttccttggttaaagaaataattttagactcttttaaagatagttcagattcacaacatttaagtttatcttccaactcattaatgttgttacacaagactttattatctttaaccagggagcgattttcagcacatgtttccatcaacttaccaaacattaccttgtaggattcaaccatagaattctcatcaatttctgactcatctgattcggatctagattcttccttgttgtcatcgatcgaggtattattcatgcacatgaattttcctttttcctgcaaatttcttgacaaaacacttgttagagcaactttttctttttcatcttcactactttcagaatcatcactccaagtaacattcaatccctttttatttttctttaaggtattggcacattcagattgaatatgaccatacccttcacactctctgcaacgaa

SEQ ID NO: 285378 - DNA, 97 bp, Cannabis indica
tactcattcactcaagggatttcaaaatttagagaagaaaagagagaggaaagtggcgctcaggaattctctctaaaaagaatgagatgcaattgtg

SEQ ID NO: 285379 - DNA, 617 bp, Cannabis indica
ctaacttagacattttttgaattactttgagatctcatgctaactcgctcttttttgttttcgcagatagaccagctcgacctgcactcgacgcaactcgcagagagacagctgaaattctcgggagccttccggtacaagatcgcgactggcgattattgtgtacgactgctaagctgcgagaacacaagctgattccagagaacgcaagtcttcaaagagagccagtatacaaggaaccatctgagaaacaacaagagcggatagacaaacgcctctccaagcaaacctctcgaccagcctcaggtaacatatcccacgttataaactagtgccttgaaatttattcatacttatcttttatttgtcctcgcagagatgacttttttgaagtccgcgcccgtcctcaaccgcaagccaaaaagtggaacagcgacgacatcgcccgtcattgcccagaagaggaagagcgatgttataactactcttgccgcagattcttccaagaagctggctaagaccgcgcaagacaaagggaagaaagtcatgatcgagccaactatccgagcccgcgattttctggctatgcaggagaagttcgtgggcgaggagttcat

SEQ ID NO: 285380 - DNA, 1259 bp, Cannabis indica
tatatataaatcaatacttaaaattattaaaaataaacatgacacgtagagtgatataataaacatatgtgaatattattattttgtttattaaagtagtatgtttaataaatagaaaacaaaataaacatatatatacaaagtattttatattattagtacgtttattataattgtaaacataaaaatagacatagttaatttatactatactaaaataagtatattttctttctattatttttatatattgattattttctaatgagttagtgaacgagttttttattgaagtataattcttacatcaaaaaacactacaagaaattgtattaataccggcggtattattcccggcggaacagatccgcctgtaatagtaggggtattaccggcggatttagtaatccgccggtaatagttattaaataaaaaacgttttacaaaaataaatattaatttattataaatcaattaataccggcggataggacttattaccggcggaatcccgcctcgaaaaatgagggcgggaattttaccgcccatttatttgaaaacattattgccggcggattaataccggcgggtcccgccggtattaaattgggattctgaccgtttagattaataccggcggaacccaattaataccggcgggtcccgccggtattaaaactctataaaaacccctccccatttcagaaaaccattttccccatttctcatttccaccttccccattcacctctcccccttccttcaaacacagtaccttccccgttcgactttttccctgcaccgcccgtgcgtcggccgtccaccactactgcagtggtcgtaagctccagtgcaccggtaatgtatttgtttttctttttttaatcatttttatttattgttttttttttcttcttaatatctaatttttttttccatcttcaaagtttgagattaataatcggtggggaggagatttctgagtaaaacaccgggattggtcggtggtctaaatatttggaggttagttcttacaatatttgtgtatatatctcataaattttttttctgtaaaaaatatgatatatttatgtgttatatttgaaaaatttatatatactcttttatactatatatttgtagagatttaggattttatagtttagtgtaattttaattgttgttttgtgtatattgtatattgtgtattatatattttgttattttatactgtgtattgtatattgtataatgtatat

SEQ ID NO: 285381 - DNA, 407 bp, Cannabis indica
aagtaggaaacttcccaaaggcgaggatgaagatgtggatcctcgacttggggtacccaagcaacaatgttggacctgtggaagagttaaaagagatcgagatagatacaagctatcctgaccagaaagctaaaaattggaaagggtttgttgctcgaagtaaaatcaaagttgataaaatttctgagagcaaacctagatgttttttcctggtcacatgcggatatggtcggaatcgacccttctattatttcacacgtcctgaatatcgatcctaacatccggccagttcagcaaaaatgaagagtgctggataaagaacgagcagtagccctgaaagatgaagttgaaaagctacgcaacaacaacttcataatagaagctttttaccccgcttgtatcgcgaa

SEQ ID NO: 285382 - DNA, 630 bp, Cannabis indica
aaaaaaaaaaaaaagagaagcatcacatgtctctctaaagaaaaaaaattgttattatatttctttatttattagttagttagttggctctttattttgtgagtttttcatgtaaatcccaaaggttgtttgtcatttgaattctattagtttgatgtgtctattttgtgatcaatatttgttcaaattgcttgtcctaaaaagtttatcttctctcatttgtgcgttaattgttacatttctaactccaaatagtgtcacccttccaatataaatactttcaatacccgtgagaaaattggagttgagacctttacacttttgagatttttcgatactatttgtgttatgacttaaaaaaatggataaagtttggtgcacacacacgactctggagttacaactgaaataactttgataacaatttttgactctctactaatattttgaaaatgcttggatggttttgcttgatttgacttgtttattcaactcgataattcttttctttttccgcttgaattgctagggactagcaataagctagttgggggttgtgattaatggtgaaaaatgcacaattattggtcttaaagtttaaaataaattaagtttaaattaatattttca

SEQ ID NO: 285383 - DNA, 516 bp, Cannabis indica
aaagggttttatttagggcacaaaacccaacaaattcattgttggtacaacgccaaaaactgtatagaactttccataggctaaataagtatctttccaacaactttgacattcagtctcactggtagagttagagactccgtgtcggtttttacacttctccaaaatcactgctcaaccccagagtaatcacatcttatcaatagacttttttgcatcaagcaagtctagaaaccttatttagtgtagtctaagagtattaaaatactacccttatcgactaacatatatttcatcttcttgatgttaagatttacttgattgtcttccaatgttcctcttcttgaattaatctgatacctactcattacttccacaaaacagcaggtgtctagtttaatgcatattaaagcatatctgagacctctcactgttgatcctaaagaaatctttcatggcttttatcttttctagaatagttgaaactcttccttagataaataaaatctatatcta

SEQ ID NO: 285384 - DNA, 501 bp, Cannabis indica
taatttcataattaaacgtgattaactgctaatttctaaattaaactaagcggtctttacagccgtattgtttaattaaatagtgagactagtggtagcagtagtattactaatagtaaccgaacccaaaaaggtggacgtgtggccgaacccaaataggtggacgagtggcttgttatgacaacatgttagtagtgatgtctcaaggtaatggacttgtttctcttgttcattcgaaaatcaaggagaggacttcaccgctttggagtctttcttcaatcgagattagcctaggaataatctagaattggctttagatgtaatttttgatagtttttaaatgttaaccttgattagtagtgacataagtggggcacgtgttagagagtcacatattactaatgtgtggaatgataatagaatttataagaggaatgggctactcctcccatagccaattaattttgagatggaaccccattcatcttattcccaaattct

SEQ ID NO: 285385 - DNA, 571 bp, Cannabis indica
ttaattttaatcatttaactttataaaaaaacatcacaatacatttatattaattttttataaattacaccatataattaatatattgaaaatgatatatgtagtatgtatttttaattaattttaattatttaactttctaaaaaattattaatttaattttttttggttattgataaactaattttgaattattaatatttaattttaagttgtcttctaatcgatctatttatctgtatattttttatatctacatataaatctgaaagaaaaataagtgtggtgacttcatctccttctaattttctactttacctaatttacggtttttttataatttttttcatttaataatattataaaaaagtatataacaacccgattaaatatatactcagatcttactacttcttcatttatacaattaaataaatcaatatcacccttacatattgcacttccactgaaatcaatgagaaatttattaactactatttatatttctttgtccattaaattcctacaattttttctttttttcaattatttattttctaataaatacttt

SEQ ID NO: 285386 - DNA, 829 bp, Cannabis indica
attttaccaacatatcattgacgtagacctccatgtttcttcctattgtcttgcaaacatttcattcactattcactgatatgtcaccccagcatttttcaaaccaaatggcatgactttataacaataatgtcccatgttggttacgaagcttgtttgctctttctcagggacatgcattttttatctggttatatctagaatatgcatccatgaacaacataagcgcgtgtccagcagttgcatcaactaactttttgatccttggtaatggtaagcaatgctttggacacgccttattaaaatttgagaaattgatacaagttctccaggttccatttggtcttgggatgagcacagggttggatatccacgagggataaaatgcctcgcgtataaagtcattaactaacaacttatccacttcctgcttgagtgccctttgtctcttaccatccaagggtcgtctcttttatctcttggatgggtaatttgggtcgacattcaggttgtgacagataattttagggtcaatccctctcaaatctgagtggatctaggcaaactgatcctggtttgccctcaaaaaaattattaatttctattttagtttttcacccaagtttttcccaatgaatgcacactttgtgggatttttttgatataaataaatcttctaattctcaactgatttcaattgattccattcatcttgaatccaaggatcaagatcctcatcctgcctctcactttcttcagtcttgacgaccattagttgatgtaccaacttttctattatgtagctctatatcggtagcattcatgagcc

SEQ ID NO: 285387 - DNA, 584 bp, Cannabis indica
gagaatatatggatatgcagttcaaagatcatttgatcgaacttggcattgaatcccaattaactgcccctagcactccacaacaaaatggagttgcagaaagaagaaatcgcacgcttttggaaatggttaggtccatgcttagctactcaactctacctacgtccttctggggatatgcaattcagatggcaaccgacattttaaatgttgttccatctaaatcagtccctaagacacctttagaactatggaatggtcgtacacctagtttacgccattatagaatctgggggtgccctgctcatgtcttaagaaagaaagatggcaaacttgaaaagcgaactgaggtttgcatgtttgtcggaaattctaaagagactaggggtggactattttatagtcgcaaggatgataaagtgtttgtttccacaaacgccactttccatgaagatgactatattaagaatttcaaacaacaaagtaaagtagtattggaggaaatgcttgcagatataagtccttctactgttcaatcctcttctactcaagaagaggataatcccactgttggaaattatttt

SEQ ID NO: 285388 - DNA, 446 bp, Cannabis indica
aagttaagactaagtcatcaacatagcagactagtatttgaagtgaaaaatacttgctagagattaagtaatcaaaattaagataccataaaatgttatgagaattaagaaatctaggttcaagtcattcgaatagactgaactagaattctattatcttattctcataattctgataagttatatctatccacatgaatggttagatttgcttttcagtagtgttcttaagtcaattaaggtagtgtgaaacattatcaaagaacttttataggtatcatttttactacaacagtaaaactaaattggaacatacaatcaagatcaaggatttatattgataatagctaagtcattatattacttccatgtttaaagaaaatatgtgttacataggttattgtggaaaaaaatttcacccctaagtatatagagattatgatcca

SEQ ID NO: 285389 - DNA, 848 bp, Cannabis indica
taaatattcccaagtaggaaacttcccaaggcgaggatgaagatgtagatcctcgacttggggacctaaagcagacaatgtttggccctgtggaagaattaagaagagaatcgaaaatacgatccagctatcccagccagaaagactacaaattggaaagggtttgttgctcgaagtaaaatcggaattgataaaatttactgagagcaaacctagacgtttttcgccgttggtacacatgcggatatggtcggaattcgatcattctattatctcacacgtcctaaatatcgatcccaacatccggccagttcaacaaaaacgaagactgttggacaagaatgagcagtagccttgaaggatgaagttgaaaagctgcgcaacaacaacttcataattgaagctttttacccggcttgggtcgcgaatcctgtactagtgcccaagccgaacaagaaatggcgagtctgtattgatttcacagacctcaacaaggcatgccgcaaagattgttttccacttccaagaatcgatcagctcgtagatgcaacagcagggcacgaaatattaagcttcatggacgcttactgaggctacaatcaaatcaaaatgcatccaccagaccaagaacatacaagtttccgaacatatatggatctctattgctacaaagttatgccgtttggtctaaaaaatgctggagataggtaccaaagattggtaaacaaaatgtttaaagaccagatcgggcgaaatatggaagtgtacgtggatgacatgctcgtcaaatctagaaaggctggggggcacatagaagacctgaacgaatgcttcaaagtcctcagaaa

SEQ ID NO: 285390 - DNA, 571 bp, Cannabis indica
taataataattaagttatatttctgaaacttccataagtacctgaacgttaaatattatcattgtattatatttttagaaataattgcatgaggatacatacttttcattttattttaagaaaatgtccttatttatattaatataaaaaataaccgtcagttttttagttattttatacgcacgcataccgaaacaaacaacttcacttttaatgaagtcaaaaattatttttactgggaaacataaattgtttttttttttgtcagacttttttgtatcttttccttacttgtattttcttgtcagattttgtcaaatcatttatttttgttttgtttttttttgtaaaaactttatcttttgttacgttttgttttattgggtgttgtttttaatacatttatttaataaagagctttccctttatttttttttatttttatattttttaaaagttataaaataattttataccttaactctctctcttaatatttaatagttacttgtttatatgatacattagcttaatttgtaaaataatttgataagtttcaaaatattataag

SEQ ID NO: 285391 - DNA, 155 bp, Cannabis indica
aatcaattaccaattgttatatttattatgtttgtatgtgtattagtttttattattgatacaaattctatagttcataatctctataacctttaggggtggatcataatctctatatacttaggggtggactatattccacagtactctttgtg

SEQ ID NO: 285392 - DNA, 672 bp, Cannabis indica
gtgtttcgtttttttttgttttttttttttttctaaggaaacgtactatagattaaaaataaaattagaccaaaaagacacattaattacacaataaataatctcgtagggaagatttcttcccatatagcgagaatattaattttgacctagtgcccatttagccacatgagccacaatgttaaaatctcttctttaacaaaattacatcccaaagagcacatagacaaatttttacaagctccaaacataattatggagctcccatgagaatccctcagcaaataacaatcttaaaatcactctcaacaatgacaaattgatgctgcatatgtctgtcatattcaacatgccaacttgcatgccttagcttccccatgtattgggttatggatgggaatccttgggttcagatccaaaggatttctttttaagtgatttttctccactattgccactatcatgctctcccaacccactgccatatcgctgttaatcttgactcacactacaaaaataactatttttagtgataaatttttagtcatcataatataaattttttatgactaaatatgatttttagtcataacaaaaagttatttgtgactaaaacatgcactactacaaaaaaaaccatttaatgtctcttttttatgtccaacaaaatta

SEQ ID NO: 285393 - DNA, 640 bp, Cannabis indica
tatgttcttaccagaacattggttaaagtaaaatcaaatgatcttaatcttgttgataactctaagatttagagttattttcatatctttaagcttgaatttaatgtgaattgtggagcaattaatgtttatattgtgtaattgtgtctagtttgttgtgtctttgtaataaatggaagtgtgtgtgttagtaagtgttaaatagacttatgttattgtttttatgtgttttaagcagaaaaaatacaagaataggtatttgaaaatgtttgggacaaggagaaaaaggagcaggaaaatgattattgctgactggcattgctgtagcaatcatcgcgtagcaatttgtcagcccagtaagtttattttggcagatagtccagctggctttaatgaaaagaaaaacgagctgaggtggcggaatttggctattgactcaacaaacatgtggaaaatgaaggacaagtgggtgatgattgggatttccaattagggtaaactttggtaccctaattggggggcaaaaagagaaaaagaggtgatgaatagaggagaggtggctgcacttgaataccagtacgaaaaatacagcagagaaaagaaagtttctaagtacaaagaaggaagaagagtacaaaga

SEQ ID NO: 285394 - DNA, 559 bp, Cannabis indica
actctatcactaagggttcgaatggtgaagaacaattaaggaggctgaaatcactatcgaaggatctctctcatctactagttgtcagagaatgaaaactagatttggtaggttaaatagtcaagttgacaagagaatgagatgagagcatcatgttccttttatagtgtttcaactagggcttagggttgaattatatggattaaaatagaataaaatattgggcaaaaatcacttaatggtcgtaaaagggaccattctctagttaccattttgctactttatttcgaccacttattcttctttcaataataccatattttccaattcaatcctataaatgtcaaaactatttatttaataattataattaattatcaaataaaattgccctttatattatttattaattagaccatatggaatacctggaattaagaaaaaagattagcaaaaccctaattagataattatgagttgattgaggaattatattattatataattcaatatatgtgaaattatatgaaatttagcatgttaaagaccccgttggtga

SEQ ID NO: 285395 - DNA, 751 bp, Cannabis indica
ctgaattttccccaaccggtagaccggttgcccaaccggaattccggttctgggaattcctagaccctcatccggaattccggttgcacaaccggaattccggttcctcgcaggaacttttcaaaaattcacacaatactcaaatcaaatccaaaccacaccaaaacttccagacctgttctaaacaacctatagaacaattccaaagcaacaaaaccacccagaactcacagaatcaaaaatcaccattggaggttcaagattgagttcaaaactcaaaacttgactaatccctccaaacagccactaaaacatgcataattcaacatatttcaacatcaattaacaccagaaaacactacctagtcataacagcaaccatagcaacgaaaatcaagaatttgctttgaaaaccaaacttttgagctaaaaatcacacaacttaaacaagatagcaagcatgcattataacctagttaatccattcattttagacataattaagcttctgaaaacataatcaaaacctagcaacactacagccacaaaactcaaagcatgcaatgatcatacattcaccaaaacttcaaaaacttaaagaaaagctaaaggaaacataccaacaacttgctaataccaaatctgaacaaagtgagcttgaaatccaagaaaaaatagcaagaatccttgctgcacaaggaggccgaaagagggaggaaaagagagagcttgagagttttttgtaattttt

SEQ ID NO: 285396 - DNA, 517 bp, Cannabis indica
tgggacccagccctggacccgaaccctgttaaggaccctaacccacacccggacctgaacccagtcccaagcacaaaagtggacccgaacccataccatgtgacccaaaattggaaccaaaaatcagaagttgatcaggattggaagtaggacttggacttggaatcataacttaaatttgacctagatcaagaaccataaccggaccaggacccggaatccaaatctgacctagaccagaattgggagccggacctggatccccacccaaacctggactcgggaaccgaacccaaacctgaactcaaacgcaaacatggaaccagacttgggatacagaaccagggtcgggacaagaaacgcaccccagtctcgatcccgaacacaaactgaaaaatgggacctgttacacgaaccagatccagactgagatccgtgatagtgatccagatcttgacacgggattcgggtagcagggcctagaacaaaccagtagtcggtgtctagatctgggact

SEQ ID NO: 285397 - DNA, 523 bp, Cannabis indica
ctctacttgctcgccctgtggtctagatgattacagagggtccattactagtacccctataatcgacaaccctagcgagttaagcaccaataccacacttacgcacttattgccttaaaccctaactcatctatttaccccatataaatattcattaatcaaatagcatttaaagcatggcatcacataacacataaatactctagatgcttgcatactgcctaaaatggaaagcggtaaacagatgatcacacaaacagtaaagtatttactctcaatacttactgcaccatgagtcgagcttttctctgacgatgaatgtacatgttcgaccggtctacaggaagtttaaaaaccttggcgctctgataccaaattgtaacgccctaaataattaggcacgctacccaagttatttatgaaaccctaatcccctaaacgggattactaatcaaaatagcgcagaatttaaacttttgcaaaaacggaatgaaaataaaacttgtaataatttaaactttac

SEQ ID NO: 285398 - DNA, 811 bp, Cannabis indica
taggaccgggacctagtacccgacacagacccgaacttgaacctaggacccagctcgtgacccagcaccagaaatgaaaccagactgggactcgagattgggatccgaatctggacccagggcttggacaaaacccgtagtcggtgtctggatttgggacccagccctggacccaaaccctgacaacactactacaaaaaggagtattttcgtcagttttttagtgacatatagtgattttgcgtcggtctacaaaaccgacgtataaaccgtagacgcaaatagtattttataacatattgcgtcagtttggaattgacacaaaatatttataccgtcggttcttaaatgacgcataacttgttgcaaaatattttttttcacctattgcgttagttataaaatgaagcaaaggtgtaggtaaggtaaaattgcaaatttccatacaacttttttctacctgtattttcagattttataatcattaactataaaagtaactgtaactaaatacataatctaaaaaaagttaaaaaaattataattcaatgaggcatgtaatcactaaataagttagaaaaattatctgcaaaaaattaaccagctaaactttacattaatacataaagttatacagtaacttgattacacaaaggtattgtcataattaaaatgttaattctaagataataaacctacataacaaagtgtaaaccaaagttagtgataaaaagttacaacattaagtaaaacggaaacaatataaaaaaagaaaaataaataaataaataccaatactgtaaaaaagtac

SEQ ID NO: 285399 - DNA, 504 bp, Cannabis indica
gaccgagatcctgacccagacccaaacttggacccgcactcgggacccgaacttggacctggaccggaacctagacccagattggggtccagacctggacacaaacccggacaaagacccggacccgaactcaaacacccacacctagaatcaacccaaatgctagacctggacctggatccggacccaactcgaacccagaccaggatcacaacaaaggacatacacccagaattaaatccagactcagatcaggattggaacttgggactcggacccaaccttgaccaagacccaggacgggaacccacacccggagcctaatctggacctagactgaaatcaggacccgaacccaaacttagaccaggactcgaactctgacccgaactcaaaccgaaactcgaactcaaaatcgcaaatggaactagaagcgaactaggactaggacaaggaccagggcctaaacccaaacccgaagatagatcaaaacccagacagaga

SEQ ID NO: 285400 - DNA, 518 bp, Cannabis indica
tacccagagtaagcacgatcagttagagattttaaaaactctcggatccttagttcgaaatcatgggcgtacacttccaaatcatcaatgaattggatgataagttctttagcattgccgaattttccattgtactttctaaatacaagactcatataacctcttgggtaaggcttcattgcaacttccaaggggtaaggtgggtgaaaatcgatagaagttaccgatgatgatgacttccctctttcgactttaagaagaccgatcaattcatcttttgtaacaaattcagaggaagatcggacttcttcaccaaccctttcagcaatctcagaaattctgatccctcaaacattatcaggtgttgcttgagttctttgttcaatagtatgtacttgccttatttgagattcattcatcacacactcttcaggtaaaccgcttctatcaatagatgcttcttggtgtgctgtggcaaaagtgagctcaacaattgcatcatgccgtcttgggctttt

SEQ ID NO: 285401 - DNA, 920 bp, Cannabis indica
tttattaacaaaaaaaaaaaatgagtttcaatgtgcatttaaatcttgtgcaaacccagcagtaaatgtcaattgttctctctcaaatgatctttaatcattcactatattagaactgaagttctactagggatggcttggctgtagcccccattaattgttgatttgagccataaattcaagttgggagaactcaaaacaccaaaaactttctcatatgctcaatcaattcaagaactgattcaaacaacttatgtgttgtaaatgtaaaaatgagaaattaacattgttaaccataagagtcagtaattggatctatttattacttactgtaaatatgaaacagttgtcatcatcgttcatactcatcgtaagtgtcaaagaaaatttcatctacaggtccaaggagatctatcccagccttcaactccacttgagggtcatcagtctctgcctctgtcaaaacaaaagcaatgtatagggagctatattgtgtgaataagagcagcaaaacatgtacctgaaagtgttatattatttgttataatataatatagattaaaatattcaaatgtgacatattatatattaatatgaaattaatatatattatgtgttagaagttatattatatcatatatactataataatacacataaaattgtaacatatgaggagttacaaatatgaaaatagattgtaacctaaggatcaaatttgataaatatgtaattatgtgatttgttacatatgggagttatggaattaatgagataagtttctagctgttggaaactgttacaatactcaattatatcatttaaataggtattgggacgttgggaaaagatttaacttggagaggagttacattttgagttctctggaaacagttgtttaatagttgtttttatattgt

SEQ ID NO: 285402 - DNA, 744 bp, Cannabis indica
catataattaaaattaatcatataattaaaagtaatatggtcccacttgaaaatataaatgactaatatttattacacattattgtgtgtaataaatgtgtacataacattactcatttgttcatatatgaaaatatttgaaaaaaaatatatcatacgtataaattagtaaatttgtaatatatactgaagtatggtttaaatcacaattattaaatttaaaacaaccaaacatatcgaaaaagatttcaatcgatacattttgtataatttggtgctgattgacgatttgtaaggtgtagatggtttgaaaatacctatactagaaaagaaatatggaaaattaaactactttcttgttttgttgttttacatcgtatatttttacgcattatattaaataaacaaaaattattgggttctatttataaataagctaattaggatttttatcccctaaattttaacatataccaattctctgaattttttttgaccgttaaaaattaggctatttacaaaatatggaaaaagaaattaaagttttgataaatatggcatgcaaacttaattgcattaaatatgacgttttttcaaaaaaaaaaaactttaaaataatgggaaaattttataaataaaaagaatgccataaaaattataaaattgtgattcatttttatcatataaaaaaaacacttatttacataagtactgtaactatatataaaaaaaaatttaacaaac

SEQ ID NO: 285403 - DNA, 137 bp, Cannabis indica
gtggccggccaaggcttgtggatatgggccccacttttgcaacttgctgttttatcatttctacatctcattttagacatagtctaattttagaatattaattgattaatcaaaatcaattaaatgagtcttacaag

SEQ ID NO: 285404 - DNA, 601 bp, Cannabis indica
aaaatacaagatttaaaataaaattttgaaaactatagagttcgaactaatttttcatcaaagcacataatcaaaaaaatagtataaaccatttttagtattatcaatcaaattaaaatatttgaaatcgaatgttaatatttgatctgaattgcatttaataagagtatgatatctgatattgggtaccatgagaaatctttaataatattatgtgtcatcttttttttttttcttgaataaatatgatttttatctttttttttttttttttatgtaatatgatttttatcttctgaattatgacttttgtaagaaatttcctcttgattttttttagtttgcaaaaattccaccgaactatgtaaatagttgcaaatatccctgttatgctcatattttaggaagcaatatggtcacaacatgtatacaagaggtggaaaatgaactagctcgaatattaaagaattaaatacgttgtatattgcctcaaaaaatattagtcacagttattaattcaagtgtttccttagctgactaaggataagtcaaaataatagctcactggtagactatcgagatcaataacaaccatcttgaa

SEQ ID NO: 285405 - DNA, 407 bp, Cannabis indica
tccctttttcctattctttagtgtgacattagggacaatgtgtcatttaagtttggggtgaacttaaaaatttttagttgtgcattttactttttttgtgttgtttgtgtgtttgtgttttttgagtcaattttttcagtgtgtttgtacattgaaggaacatagaatcataataggtaaagctttagcaattgaattggtttatgtatgctaaatgtgaaatgtgaaacgttgtttgaaaaaatttctaaaaacttccttgcttgctatttgaggcaaaaataataaatgatgcatgataaggaaagtgatttatgtattttttttggatcgattgtgcctttcaaagccatccttttaaatctttatcctagtttacccttttttgagctttgacttgattcttt

SEQ ID NO: 285406 - DNA, 642 bp, Cannabis indica
tgagacaaactgcttgtaagacttaattaattgattttaattaattaattatagttctaatattagactatgtctagtttatgaattttcactagttatggcttgattgtgaagaaatagaattttggggtttatttgttaattaagagactttatggagtctaattaataaatatataaatgacaattttatttgataattattttaattattaaataaatagttttgacatttatagggttgaaagtgcaaaaagtggtatttgtgaaaaatagataaatggttaagaaaaatggcaaaaatctaactagtgtagggcccacttcatggcccgccattagtgcctatttttgctctatttttatcattttttattccaaataaatcaaccctaaccctatgtgaattagtataaaagaaaaagtatggtctcattatccaactaatgtttctaataactcttgacctagtttctctctatctgaaaactagagagtttgagaccttctcttcttcctttctattcttctaattcgaaatcctatagtcttattcactatcaaattcgagccttaatgattgagtgcatgcctgcccatagcaagttaatcctcaatcatagtgtgtaagactgtgaagaa

SEQ ID NO: 285407 - DNA, 551 bp, Cannabis indica
tttaagtatattctgttaaatcaagaaatgccgttagatagacacttttaatatataaagatattaagttttaaattaacagtagaaaagaacgaaggaacgaacaaacaaactcttatttttcttttttagacaaaattttttcctcctatatccatttttcttaattttcaatccaaaacttagcgatctaagcttcggtagtagcacgatagcaaatccttaaagagggaaagtttaaggtatggtttaatttcgttttaagtttaaaaacaattagtttcgtatagggattttgtaaattagaatagttatgaaggttctgaccttatagaattgttctcgggtagtcatggactagttccgatattttcttgttgaatttgaagtgattttaagttagaaatcgagtttggaactttttaaagctcagtctgaacgttaatggcgtttttcatttaaggggtcgagttttatttctgttacgtaagaatggtaatatttatggtatatatgcgccttgtgaagtttggagtgatttggataagttt

SEQ ID NO: 285408 - DNA, 709 bp, Cannabis indica
ggattgtcttcgtgcttggactctacgatacccaggggcggaggcatgttaggagtagaggaggccctggcccccctaaacatttcaaaatatatatgtgtatccttacctttacatgatacaattatgtattagtatgacaatatataaatgtgagtcacttgaaagactatattgattaataagtgactctcgtggtactctccctttaattcaaaattaaaataaataatgaatatatttgaaaaattttaagtattttactaagagttgtcaaagttacggtggaactaataaatttttttaggctaattagaaattttttcctttgaactttgacatgtaccaaattatgtctcctgaacttttaaggtcgttaaaaatgccccttaaactattgagattgttgaattgaaggacttttgtccaattttagtaaaaaattctaacatggatgaaaattcagggagcataatttagtacatatcaaagtttgaggggcattgatttggtagattatcaaagtctggggagcgatagtttagcacataaacaatcactaaaacagtaaaattgaatgaaattagacaaaagtccttcaatctaacaatctcaatagttcaaggagaatttttaacggctaaaaaagttcagaatgcattatttagtacatgtcaaagtttgggggaaaaatcctaattagccaaat

SEQ ID NO: 285409 - DNA, 543 bp, Cannabis indica
aacaattccatcaaacattttgaactgacaatgaccttctatattgcatgtattgttgtttcccaatattactttgccacctttagagtctctgtagtcagttagaatttccctagaatttgtcatatgaaaagtacacccagaatctagtatccaatcatctttgaaagatgtggatgcaacataaacttcaccactgtcatagccatcagagtagttagcttcttgttgcttgtcattttgatgtttgttttgatctgttctttctggaaatctgcctcctttcttgttcttgtacttattgttgtagaaatagcaatctttcttatagtgtccagttttgccacaatagaaacaacctgtagaatcaccagaatctcttgatggtgatctactctttcctctgtttgagtttctgtgatgatttgtgctattactccttcctctgttctgatagggtttcttgtgacatggccttcctctaattaggtttatttcaccatgtccagagttagatttctcactcttcatctctaggtcttt

SEQ ID NO: 285410 - DNA, 505 bp, Cannabis indica
tggagcttttcttatttctttccaaggtttgataatgtaaatctcgtcgcttttactctggaaacataacaccctatctgacaatcgcagtttctggtgacgaggtgattttttttgtgtgtgtatgtcttcctatggcgaggtggacgcctcgctatcgcttgctttggttcacccatctgttatactcaacttgtatactgcatgttatacgctaagtgtcttcactgtcagtatatctcatccatgtaatcaaggttagtgccccgtcttatacaccttaagttacatggtttctcgttgatgcgcaaggcagcagtttgtatatctttatctcgcataagactattcagtcagccgagttgtaaatatactatatcaattatgcttttaacgagttattccacctcaaatgtaattataattacgtgccttggtttgtatcttcccgagcttgacacgtgttttcctctgatgtgttaaccgaatttggatataattgccc

SEQ ID NO: 285411 - DNA, 790 bp, Cannabis indica
ttttagttcaagtttaagaccccagaaagtgatttagtgtgtcactcacctatgttatgattgatgtgatttaggagcctgtaattcgctgagcagttgttccactcaggttgaccgacacacctgaattcggaatcaaggtaagattagtataatgtcatgcatatgtttatacatgtttagcgtaaatgttagttgccgtctgaataacatatcagatatttgttaggcaaatctatagccatcagattagcatatcagggcaacagtgaggtgtacataaagttgcaccgagatgccatcaggtatatgctaggctatcaaataatatgatttaactgctgccacatcagtacaattagagtactgactataggctggattcgcggttagtcatactttgtcaagaacgttcctgattcagttagggttatggttaggtgtatgggcgcctgatgataacccgggattttagtatgtttattatgttatgcttttcttactgagtctgtcgactcacagtgcttttgctatgtgtaggtaagggcaaggctaaagctgaggagccgtgagaacgaggaggtgaagattgtacatgtcgaggcggttaggcctggagcgtacgatcctcgggacatcagggtttctgttgtttagtcgctgggcgacaaatcttttgtaaatgaatagcaaacttttgtaattgtattttgttaacgggatcctagaattttataagtataatatgatatgttttaattaaaaagaaaaatttaaattattcacgttt

SEQ ID NO: 285412 - DNA, 550 bp, Cannabis indica
tttctattgtaaggtatatattttatgttatatggtatataagttttattgtatagtatatcattttattttagataatgcatgtttagtttttattttagtatacataaaggtgatatataattttgttaatatgatatatataatttttttaataatattataatattttgttttattttttattgtagatatatacgttttattgtatagtatgcgatttttgttgtctataatatattatttatttaatatggtatttagttttattttattatatataaattaatttttcggtgtgtattcatattttaatggtggtgtatataattttgttaacatgatatatatatatatattttaagtattaatttagcattgttataatttctttgtggtatataattttattactacggtatagtaattttctgtcctacgatatatctaatactgctgtatatatttaaatgatctaatatatttatttattttgttacaatataataatatgcaaatactaaaaaaattatgtaacttaattttatta

SEQ ID NO: 285413 - DNA, 509 bp, Cannabis indica
cacacttgaattcggaaaacaggtaagaactgaatataatatgtgatgtgattatctgaatgtatgtatatgtgtttgtatatgcatgcttaaattgtgatttgcactaccaacacttgtatggatatgatacagagtgcattggtatagtgagtattgtgttgtgagtacgatacagtgataccaacacgggtacgggaaagtgctaaggtgtgtggtatatcactcagtggtactcagggtacggagtaaaccctaccaacactcgtacagtgaggtacgttgtgtatgtggtatagtggttgtaccctagtattgaacgttcatactcatctgttaagctctgtaaataggtgtatgggcgcctatttacaggtcggaaattatatgatatgttatatgcatttcttactgagtctgtcgactcacagttctgcttccatgtgtaggtaaaggaaaggcgaaggctgaacaggagtgaacctgagctcgggtgggattgtacatgt

SEQ ID NO: 285414 - DNA, 583 bp, Cannabis indica
gttacgcaggctattcagactagtatggacgccaggcgaaataccaggagccagggaaatttggttggatctaatgctggtcagggagcctcagattcccccaaatgtccgtggctgaggtagagaccccaggggcagggcacgtggccggggtgatgctaacccggcacaggttgcccaggctgccaaagctgctcaggatgcccaaaattgggaaaatcggtttgcagcaatgcaagccagaatctaggaacaagataatgaaattcaacgattgagacaacagggtgctcctgtagtgcctgctctagaaattcctgtggcacctgcccctgctgtccaggctgaactagtggtggcattgaatcggatggaacctctgtatgaaaggttccgcaagcaagcacctccagtttttctgggaggtctggatgatatgaaagccgagaaatggctaacagtgattactagaatcctaaattttataggcgtcactggtaatgatagggtggtctgtgcctgttgggttttatgccctaaataaaataccatttcaatgtaatccattttattcaatatcaat

SEQ ID NO: 285415 - DNA, 578 bp, Cannabis indica
tctaatggcagttactcgttcatctccttcttcggctaaagctagaaaacccacaaaacaatcacagaaaaccaaacccaaataaaaaatgagtaaaaaaaatctaaaagataacccacctagccccacttctcctattgctcataaaagaaaacctcctgttggaacttcgaagaaccctcgagggaaaaggcctcgaactgttgtggaaaattcagactcagattttgagttggaatctgaatttgtgaggtcgcctgtctcggtgaaggtattttcttatttatcttctattgtttttgagtttttttttaaattcgatttttgaagttcatatatctgggtaattgtttgggttttttctctgtttttgttatgtttttttcatttcttgttttcttatatatatatatatatatgttttttgttgatattttattgttgttctttgggtgttgtttcgttcaattttaaagcaagggtaaatcccctgtcaaggttttgccatccacaggtgtggctgaggaaattacagccaataggattgttgaggtgtgtgatgttatgcattctgttct

SEQ ID NO: 285416 - DNA, 527 bp, Cannabis indica
ttttagataatacatgtttagtttttattttattatacataaagtgatatataattttgttaatatgatatatacaattttttttaataatattatattatttattttattttttattgtaggtatatacgttttctttgtatggtatatggtttttattgtctatattatatcatttatttaagatgatatttaatttctattttattatatataaattttttggtacgtgatcatattttaatggtggtatatataattttgttagcatgatatatatattttttgagtattaatttagtattgttataatttctttgtggtatataattttattactacagtatattaatttttcaataccacgatatattaaatactgctgtatacatttaatgatttaatatatttatttgtttttgttacaatataataatatgcaatactaaaaaaattatatgacttaatttattattatatatatatttttaaaaaataatgtgataaatgtatttttataattctta

SEQ ID NO: 285417 - DNA, 553 bp, Cannabis indica
gatggaattttgctgttatgaacagaatgagtgaggagctcggggaccgagaccctatatttataggtgagatactccatcagtatctgcgccacattaattgtcagaatattttgacaattaattcaggaaatcaaatcaggtaatgaatatagaaatctgaccatatatagaatattacataattgattttgtccagattcaatgaatataaaatattcatttatcacaaaatcaattatttatttatttccttaaatagaaatttatttccttaaataaaaatatatttcccaatatagaaatattcttataatttatgcatcccaaaaaaaaaaaaaatagtatatttctatatttttttatataggtcatctatatatgtatttttaggggttacacaatataaatatatagaaataaattaagtagttagtagattttattataatttgaagaaaactatagataatataattctattactaatataatataaggaccaataaaaaaattaaaagaaatagttacaatacataatatacaatatata

SEQ ID NO: 285418 - DNA, 796 bp, Cannabis indica
ccaagcaaagtaagaaatttaaattactaaaataacaacaacaactcaatgtatatagcttagttggctactatttaatttcccctcttaaactccctatatgtaggagaagtagggaaattattacatatagtttgtctcatccccattgatcaatatgtaataatttaattagatgtactcttattgacaattaacaatatatttttttttgaaacaatgcactttcattgacaataacaatatatatcccacttactagctactaaatgatcttaagtctaataaaaattaatatctcacttattaatttttttttaattaattgtttaaattttatttttaacacaatatagtaaattatttaaaatttacgagaagtaaggaaataatttttcaccaactatagacaaatttattcctactagctaggaagaaagacaaattgggtgctctagaatattgtgcaactttgattcatatttgataataaaagctcattcaataatttgataatgacaaaacaacaaagaagaaatgtgtgcatttagtttaatttactctcttgcctagcatagcaagtagtagaacttattttgtggccctttttaatgcattcctctaatgaaatgtttacaacttttatactttgggaaattgaaaaactaggccaaaaacataggaaggtatgccatattgaggacaatttgcaatgacaaatcaaatcaaaattaaatgaaatgcacatacactctcatattcatgtgtccactaattgatcacacaaaaataccaa

SEQ ID NO: 285419 - DNA, 524 bp, Cannabis indica
taattactaaaatgagatctcaatcgtatatctctagtaagccaagctcgaaggaaatcattgtttcacttctaaatacttatagaagctatagattatatatatatgatcagcgctcccactcaattgaaattctatgtccttaatctttatgtcacgagaaggtctgattggtcgactttaacgaacgaattgaagaacataaataatgcagttgagctgaacctaaccaaattaagattaagatctatagacctaagatcaatcagtggtattaacttagaaagatataacggtaagtttatgatatcttatccaagttcaatatcggtcaaatccaatgtatactccatacatttgatactggtatactttgccaataccctggaaatgacataactcttatccaaggtgtaagtataccttatcgttgataatcatatcagtctaaatccagtgtactgacaaatcatgagacttaaacttttgaacatataatcatgattatattccactgtgttgac

SEQ ID NO: 285420 - DNA, 783 bp, Cannabis indica
cccccgatgctggtgatattcgtcttctcaggtgtacagaacatgtcatcatcatccggttggtaatcatttgggagaatgaagtcatcttccggtgtccgagcctcctcttccggttgtggctgtggctgtggctgtggctgtgaatctgctgccggccttccaggatcttgcaggagcgtcattatggtcttcaactgatccataatcgctgtttgtcctcttagcagagcggcctgccccctctccacagtctccaaccttgccaaaatggcagggtatactggatcgcgagcctccgaggtgctgggaatggaagctgacgggggaacaggaggaccctgtgacgctgcaagtgggtcaacaccagacccatcaggaactgaagctgcagatgggtcaacaccagacccatcaggaactgaagctggagatgggtcaacaccagacccatctggaactgcgggcggtgcacgtggaggagacggtggaggtggtgtagagtctttaaatattcgggctgcctccgctcgctcttccaatgtggaggcaagcttttcggcctggcttcgcaaagcatcctgtgttggttgcccatcctcacccaacacaagttcctccaagtcaacaaataacggaggctgacccccggttatgtaactcacaaactcaatctcgttcggccgaggacataacacggagtacactgtcaactgaaaaatataacaaatatattaatataatatatggaaattaacatgaattcaaaataaagcgtaacaa

SEQ ID NO: 285421 - DNA, 572 bp, Cannabis indica
gaaatccatctctgagtaagttggaactatgtaattaggagttatgtagaagatacgctaccattgaaaagggctaccattgaggtagtgtgacagcgtctcctatggttacaatttatcagaaaaagtctttttgacaaattgggcaatgttccctgcttacactttcacacacttatgcttgacacagtttgtggtaaaaaaatttctatcctcgaaaatggtgttataaagctgttacatactgtttgatttgctttaatattcttggtgactgagtcaatttttcctgtgtaaccggtatgacctcattctactacttcattagcttgataaaataatttctgactattcttatgagtttgattttttcatcagggacaaagacaagcggacattgtgaattctagttacaaaaatatcaaggttattttatttttctgtcttttaaataaaaaaaaaaaatttgtgactgaatttgtcatttgagctttcttaaaaatttcttgttatttattttgttatgtttcattatattcttagacactatttttgctcttaagtggtgatta

SEQ ID NO: 285422 - DNA, 567 bp, Cannabis indica
aacgccttgaccactgtaaacggtcacgaccatcttgactttaactgccaaggaaaaatttcaaccttgaattgaaaagtaaaacttcctgcccaggttgaaactcctttctggctaagcttcggtcatgccacttcttcattctctccttgtagatcttagcattctcgtaagcctcgtttctgaactcctccaactcattcaattgcagcagtattttctctcctgcagctttcaagtccatgttgagggtcttcatagcccaataggccttatgctctaattctaccggcagatggcaagcttttccaaacaccaaccgatatggtgacattccgatcggtgttttaaacgttgttctataagcccatagtgcatcatctagctttcgtgaccagtcttttcttgatctatgcactgttttctccaatatcatctttatttcccggttagaaattatagcttggccattgctttgtggatggtagggcagagcagttctatggcaaacgccatatctagagaggagtgcttcaaactgtatattgcagaagtgactcccttcat

SEQ ID NO: 285423 - DNA, 590 bp, Cannabis indica
aggacatggtcatccgagttggagaaacacatccatttggataaaccatgtggagccacttatgtgatacattatttggaaatggaattattcaatgaaatccattaattaatgtggttaagtcgcgccattcactatcaacgctcgctaggagttgtagttttcaatcatcactaaaaaaaaagggcccttaaattgcatgatggccataactatttcccacaagaagcctattaacctttaagagcatcttcatcctaaaaatttgttgagttgtttggcaaaataaatggacccatatggatccccatttaattttgtagccgaagaaaacataatttgtgaatttgctattgggcactactagtgcttagcatcttctagacatgtgactttgcgattgactagcggtactctttaaacattattaaattaaattatatgagatccgatacttagtttaatcaataacaatattgacacgtaggagtaggggtgggcatccgatccaatccaaccttttcttcctcatccgatccaatccaattagtaattggatttggaaaatcatcatccaatccaatccaatt

SEQ ID NO: 285424 - DNA, 316 bp, Cannabis indica
aagattgcttttgcagtcattgtcatggaagaatatccaccccattcaatgacaggtcagccaaatgtatctgagctgtcatgttgtgatggttgatatgtaaaaagaatcaaacttgaaaatggcatgcacaaaaaatctttgtaaaaagaagaagtgtatagtagggtaatggaaggtgggtaagagagagtaaaaaagaaagcttttttcaacttaataaatattattctttttttaacaagcatagagatctgactcagataattatttcactttgcttttttcccaaaaaataaaattttaaaaaaaataa

SEQ ID NO: 285425 - DNA, 53 bp, Cannabis indica
ttaggtgataaattcttgatctacttattggaaggtcggttatatagacccat

SEQ ID NO: 285426 - DNA, 626 bp, Cannabis indica
tcaatcataacataggtgagtgacacgctaaatcacttttcggggtcttaaacttgaaactaaaagtttccccatcgataaataacatggcaatacctaaacaacacaaaaatgggaaaaactagggttcccagaattgccccaaccggtagaccggttccccaaccggaattccagttctgggaaaaattcctgggagccaaccggaatttcggttcctacaggccctctgaaccggaattccggttcagtgcaggaaagaccaaaaatttcatatctcaaccaaatcaaccccgattcaaaccaaactttccaaacctactatttagaccataaagaacaaaacccaagcaacaaaacaattacaaaaccttaaaatcaaatttcaccattaaagaccaaagtttgagttcaaactccaaacttgattaaatccaaccaacaaccattagaacctgcttaaatccacttatctaaacataattaagcttaagaaaaacaaaactaaacactaacagcagccacagcaacaaaacaacaagcatgcataaattttctttccttacacatcaagaaaacaaagaggaggttgcaaaagcttaccttggcttggattcacttgaaac

SEQ ID NO: 285427 - DNA, 775 bp, Cannabis indica
taccatggtactagaatgagttgcattttttcgtcaaacttacctaacttgtattctctggagtcgagaacttcgaccactagagatccccctcccaagttaggtccaagtacacctgccgtactatctttggtgtttaggaatacccttctcaggaccatatcttccacgaagaatttccaagccttcacttgtttgttgaaataccgagctactttttgtttatgggccatcaactttaagtttgtagttgttcgtcattcttcgatttcatcaagtgattatgctaggagtatgtgattggtaccttgatcgtacgtcaatcttctgtgggaaggtacgagttcgacgggcggcatagcttcatagccgtacgccattgcgaatggtgtttgtctggttgccgtttttttagttgtacggtatgaccatagaacttcaggaagctcttctggccagtttcctttggaatcttcaagttttttcttcagtgtatccttcaaggttttgttgactgcttcaacttgaccatttccctgaggatgcgccactgcggagaaacttttgatgataccatggttcatatagaaatcagtaaaggattggctgtcgaaatgcttgccattatctgagactattttgtacggtagtccgaaccggcatattatgttcttcatagtaaagtcttgaactttctttgatgtaatggtggcgagtggttcagctttagtccacttagtaaagtaatcaaccgctaccactacatactgcaatc

SEQ ID NO: 285428 - DNA, 574 bp, Cannabis indica
tgtaggtttattacaaaaaataaagttagttgaataataaaattataaaaatatacatataaaaaaaacttaatagaaagtcacatatatctcttatatgctttctttttatattaatgtatagatagatgaaaaactataactaattattgttgccaattaagaagattgcaaatttctatcattattaagtaagaatttttaacctttcaaaaaaaaacactaagattttttaagatgttagaacaaaaacttactcaagaaagcaaacttttgttctgactataatgtaaaattcagtgtgcatttaaacaatatattaattatgatttgcatttatttgtagattttaattaaacttctctatctaagtggattttttcatgtataagataaaagctagttagttagtgatgtttgatttattgtaatggtaattataatgctaatgaataagtccattatattgttgcttttctcttttggtttttataacttattataatgtaataatgattacataccaaaaccaatataattcccattacaattacacttcattacaagaaaaaat

SEQ ID NO: 285429 - DNA, 670 bp, Cannabis indica
gtcgagctggtctatctgcgatgacaacaaaaagcgagttagcaaaagatttcagaaagcaaagtaaaaaatgtctaagtcaacaaatacgcgacatactgggtctgcgattaaagtcagtcctaatcccaggaaccttaaagacgtaaaaccacttcgacttccagtcacccatgttcgataccatcccctcaacaccgtttatttcagaagtcgcccatttgctaaagcagtagaagccgttatggaggcccacgctctttatatcgtagaagtaactaaactcttctactgacggagccctatggacatactccatgtacatcgcatagaaagccaatacagtgcgataactgttgggtgtcagctgaaagggcgatacgtcatatcgcctaagaatggctgcgacgaagggatgaaaggggaccgatacaccacatcgaaggatgggtattgagattaccacatcctctgtagggatgatcgcagggttggtgaatggaaggtgcgctctctgagatggtttaggacgttgaaacgcaagtcgcaacaaattcaacctcacaaaggtggtgaagtctgatttggcaaccctcgagactaaatcctcgcacgagaagggctcgttcaattgggagtcgtcgaccgaatctgtcccactcccttccgc

SEQ ID NO: 285430 - DNA, 660 bp, Cannabis indica
ataatatgtttttatttttgggggccttcgaaattgtggggcttggggcctacgccccagccgccccaccctctggtcggccctgctcttgacgggaaaacccgaggccatcttcatggccacccagggaacagtcccataagaaagccctttcccttcaaaaaggaattgagtaagagagacatgtcgaagttttgtcggattcacaacaactttggccatgacaccaacgagtatcagaacttgaaaaagggagattgaattcctcataagaaaaaacaatccccacctgcatcgttatgtgtagaatgaccatactcaggcacaaggtgctcagaacggaaatccaataccatcactagtggcaggacacttgggggtcatcattggcggaccccatattgcaagcgagaccagcaaagctagagaatgttatgctcaaacactccatcacgagcccaaaagtgacatcctagaagtcaaagaaataagatctaagcaaccaaagcttggagagcccacaatctcttttatagaaggagatgctgcccaagttagtttcccgcacacgacccctaatcatcattgcacaatcgggaatatgactgtggcaagatgtatggtggacagcggagcctcctccaacattcttttcaaatc

SEQ ID NO: 285431 - DNA, 506 bp, Cannabis indica
atcgaaattcagttctattttactatagcatatttgacactcacttctcagatctcgcatcaaaatcatagacagataattggtgatcaggcaattaaaagtaattaagcacaaataaaatagaatacatagaaattagggggaaaataaatcatattaaaaccataaacaatgtcaaacaatatccatctaaccctaataaagtgtttagttactcatgttcattgaagcacaattacacatattaactttaagaaaagagatgaaaatagagaagagaagaagagaagaatgctgaaaaccctgagaagtatgcctccaattttgcagttgatctctccactctgtatctgaattctctctttttttctctctgaaattgcttgatgaaatcaactcccttcttccctttatataggcattgaaggcctaaaaatatggaaaaaaacgcaatatttaaattcccattcggatttaaatttttgggaaacctcaaacgagatatt

SEQ ID NO: 285432 - DNA, 645 bp, Cannabis indica
cattgcgttagcatccgcagggaccatcgcaatgctttgttttaattaaacagtcggattccccttgtccgtaccagttctgagttgactgttcgacgcccggggaaggcccccgaaggggccgttcccagtccgtcccccggccggcacgcagcgacccgctctcgccgcggaagcagctcgagcagtccgccgacagccgacgggttcgggactgggacccccgtgcccagccctcagagccaatccttttcccgaagttacggatccattttgccgacttcccttgcctacattgttccatcgaccagaggctgttcaccttggagacctgatgcggttatgagtacgaccgggcgtgagaggcactcggtcctccggattttcaagggccgccgggggcgcaccggacaccacgcgacgtgcggtgctcttccagccgctggaccctacctccggctgagccgtttccagggtgggcaggctgttaaacagaaaagataactcttcccgaggccccgccgacgtctccggactccctaaccgttgccgtcagccgccacgtcccggttccgacggaagttttaacccgtacttccctttcgtaagctcgcgctcgcagcgctatcagacgggtttcccccg

SEQ ID NO: 285433 - DNA, 508 bp, Cannabis indica
aagaagaaaagagagaggggtataggttcggctataggtatagaataggaggctcaatttttctgaagacaagaaatttcatccaatttaagtgtgagccatcactatctatttataggtaaccactaggtttaggttaggaattattaggcattaaaataatgaaaatattaagtggaaaatccatataaatgaccggccataggttaatgggccccacttgggtatttttccaatttcgacaatttttcctttattttctcaaaaataccatttttccaattctaaccatttaaatgccaaaattaattatttaataactaaaattaattatcaaataaaattttcattcaatatattcattaattaaacttaataaagtctttcaattaataaataaaacgtagaatctcttttcttcactatttagccattgcttagtgaaaattcataaactagacatagtttaatttaaaattataattgattaattaaaatcaattatttg

SEQ ID NO: 285434 - DNA, 518 bp, Cannabis indica
acccgaacccaaactcgaaccaggactcgaactccgacccgaactcaaacccaaactcaaactcagaatcgcaaatgaaactagaatcgaactaggactaggaccaggacctaaaccgaattccgaacccagatcaaaacccagacagagacctaaatcggaaccgagactaggactcgaacctgaacctagacctggacccaaaccaacacaataaccggggcgtggacccagaatcaggatacggacctgggaaacagaactaggaccgggacctagtacccgaccaaaacccgaacttgaacctaggaccaacctcctgacccgacactagaaatggaaccagacgcggactcgtgattgggatccggatctggaccaagggcttggacaatacctgtggtcggtgtttggatttgggacccagcccttgacccgaaccctcatatggacctgaacccacacccggacctgaaccctgtcccagaccaaaaagtggactcgaacccgtaccatgt

SEQ ID NO: 285435 - DNA, 574 bp, Cannabis indica
taatataattattgaaatgaggcctcgatcatttatctctattaagtcaagctcgaatgaatttatcatttcacttctaaatacttatagaagttatatattccatatctatgattagcgctcacactcaattgaactaccatgttcttaatttttatgtcacgagaagatccaattggtcgactttaacgaacaaattgaagaacataaataagaaaattaagatagaacctaattatctcaggattaagatctatagacctaagatcaactagtgatattggcttagaaagatataacaataagtttatgatatcttatccaagttcaatatcggtccaatccgatgtatactccatacattcgatactagcatactttgtcaatgccctggaaatgatataacacttatccaaggtgtaagtatatcttatcgctgattatcatgtcagtctaaatctagtgtattgacaaatcatgggacttacacttttaaacatataatcatgattatattccactgtggtgacaacactataatcatgaataactatatgatctggacttaatagaa

SEQ ID NO: 285436 - DNA, 546 bp, Cannabis indica
aatttttgtatgctactgtatattgtggaaaataattcatttaatagtatattaatttaagtttgtgatatatgtatattggtttaaggtatattgtttgtatatcatacgatataataataaaaaattaattatatggttaaataacatattagacaacaacaacaacaacagcaaaatgtaaaagaataaaatatataataccttttatataatggaaaaatagttgacaaaaatttagtaaaaaggttttgatttattatttttcataatttctattaaaggaataaaacatataatacattttatataatgaatggtattttaggtattaaaaaataaaaaaggacatttgctttattattttgaaaaagagacattaactatctatagagttagaaatagggtcatttacttacatttctcatctttttttatacagtttttaaagttgggtaaataccattttaaatcctgtattttacaaaaattaccaattaaatcatttgttttgttaaatgacaaaatggaccttgtattttccaa

SEQ ID NO: 285437 - DNA, 944 bp, Cannabis indica
taactaatttaagaaaaaaaaaaaaaaaagaatttgagactcaaaagttcgtcaaagaacaatgcaaaaaaagtttgagtacatttttatcctctaaaatcatatctaccaaaaaagcttttagtggatatgatctcataagaaagagatatttttagtggatattgaaaaataattatattaaaaaataaaaaaataatattaaatatgaacataaaatgaaataatgacacatatttaaaaaattaatttcatttaaaatcatttttaattctaatgaagcatgattcattagggcatgtttaatgtggtagtttgagaaaaagctggttagagtgtggggtcgaaaggtggatgaggtggaggagtaatttaaatacgacaaatttaaaagaaaaagttaaaaaatagtatataaagtaattttctaatattaaatggactcacaataacaattataaaagttatgatctcagttttacactctattacgatccattaaggtaaattaatttcgtatattaatttgaagtaaaagttgaattaaaaaaaaaacaaaaaagttgatttgacaaatatcttatttcctattaaagccacttttgcaaacatttccatccaatatgacataattactcaaacaaaataataattaaatagctatgtaggccaactttaattatttttaaatttcaagttttaaatttttaaaatacttaaatgatctaagtactaataaaaatcatcataaaataaaatttaattttaatttctttatgaaaatcagagatgcactcatgtatcactttttgagttgtaatccaaatacccctaaatataagtgtagaattattctgaatgattatttaataatagaataaatatggtttatctcacccagattattaattgtagagttttatttttgtaatttttttttctgt

SEQ ID NO: 285438 - DNA, 500 bp, Cannabis indica
ccctagggccatataacacacttaaaagcatcaaggacaaatggtcatcacatcacaaataaacttaaaaaaaatcagattatcacacataaataaataccattaatttatcccagaattatagtttccggccccgaacccggttcggcccgaaatacccggttgtggctataccgcgccaacttgtcagaacacacctgaaaaaggacacaacagatatactatataataatatagttcataagcacgtaaataaattaaattcacaattttacccttctcaggtcaaaattactaaaatgcccctagctcaccaacagggtcttaacatgtcatttctcatattcgtatataataaattatataataatataattctataataatactcaattaactagttagggttttgctaatctattttcttaattctagggtattatagtcttggcttacgttaggtggacaaaatttaggataacatttgcccccaagtccct

SEQ ID NO: 285439 - DNA, 551 bp, Cannabis indica
attatgactaatatggttttttagtttttatggcacgtgttttttggtttttgtaaggcaatatatctagttttgtaaatggtttgtttttattgattttgtaaggccaatgtggctagtttttttgtatggccaatgtggctagttttctttgtacggccaatgtggttagttttggttttgtaaggccagtatggctattttagttttgtaaggctagtatggctagtttttggttttgtaaggccagtatggctagttttaattttgtaaggtcagtatgactatttttagttttgtaaggctaacatgactagttttgattttgtaaagttattatatggctagtttaattttgtaaggtcagtttggtctaataataacacatcaaatgtagtgtaatcaccgtcaggaatggagatgaaaatagataagtatctacgtcagagaattctatgtgactatttatataaaatttcatattttattttattttatttataagggaaatttcatttttttattaaatatttattatgtattaattaatt

SEQ ID NO: 285440 - DNA, 654 bp, Cannabis indica
aatcaattatccgagtcttactagcagtatggtctcaactagaatattaactcctcgttgcatccactcttagaacttggaatcacactctcagtcatatagttataatctcaataatcaaagatcctctatatagatgatttacaccgagtagggataaatttaccgtttcacccctcaatgtattttgatccttaaaacacttagctacctgtaaatgatgttttagtgaactaaaatataatcactgaaacaagagctcttccatttacatctatttagccaagctcgaaggaaatcatcatttaacttctaaatacctatagaagctatagattccatatttatgtttagcgctcccactcaatcatactatcatgttcccaaaatgtacgtatcaccctgacccaaaagtaggcttaactaacaaatcaaagaacatgaatagcactcctgagattgagcctaagcatatcaggattaagatcttttgatctaagatcaactagtgatattgacttggaaagatacaacggtaagtatataatatctaaccaagatcaatatcagtctagtccaatgtatactccatacattcgaagctagtatactttgccaatattctggaaagaacataacacttatgcaaagtgt

SEQ ID NO: 285441 - DNA, 501 bp, Cannabis indica
cctggtaaaataatttcaacagggtagaattggctgcttgaagggcaatcaaatagtagcacgagagtgttacaacctatccatcacaactagggagaaagcagccaaatccctcaaagctacggcaagtagttctcaacaatgaagactcgcccaaaacggggtcgaggacattgatccccgttttggggatattgatacaggggtcggtccgattaaagaattagaagaaatgccattagaccccaaacaaccatccaaattaatcaagatcgggaaaaaccttcctggggacataagatccgctttgatcccgctcttaagggacaaccaagatgtctttgcttggtcacacgaagacatggagggaataagccccaccgtgataagtcatgctttaaacatcgacatcgaaaacttcaagccagttcaacagaaaagaaggttactcgacaaagaaagggccaaggcattgaaggaagaggtggaaaaactttggaa

SEQ ID NO: 285442 - DNA, 572 bp, Cannabis indica
gtttcaacatattctaggacaagtgttttattttccacaagctctctaataaagtgatgacggatgtctatgtgctttgtgcgagagtgtttaacaagattttttgaaacatgtataacactagtattatcaatggcagaatgacaagtagtataaatagtgagagtgtaacaattgtcactagatctgaggccttgcaagacacaatttccaccttggtcacgcacataacaattattatgagaaaaatttactatgaaaccttggacacaaatttgacttatgctaattagattagctttcagtccttcaataagcaaaacattttccaattttggtaatccaacaacattgagagtaccttttccaagaacagtaccaatcataccattaccaaaggttaccacatttcaaagatttgaaactagtgagtaaactagcatcacctgtcatatgctttgaacatccactatcaaaataccacaaattagcagtatgagatttatgacaagcaaaagatactagacatttagaattatttttctttacccaaacctttttggaagaacttc

SEQ ID NO: 285443 - DNA, 676 bp, Cannabis indica
atgtttgtttggatggaaaaatagtgaaaagatagggtaaaaataaattaggaatgtttatttaggtgaaataaattgggaagagtaaatgaatatttaggtgtaagttgtgggagaaatatatggattttgttgcttttatgtgtatgagaaaataggaataaagcaattaatttaactgcattttttttctttgttctcagcaggtacacgtggcaagggctggttggagctaaagctgacagaattccaaatggcgtgtgctggtttgctgctggggctgattgggtgcatgcgtggcgagctgaggctggggctggttgcacgcgtggcggaaggagagggctggcagctgctcgtgggccccgcgtggaagaaaagcagcaggaggagattgctctcactctctcttgtctggggtgcatctcactcgccacctgggtcgttagatctgcaggagaacggctctgattgggtcaaagagctgaccgagagtgggccttctaaagggctgatgtgattttctttgaaaattgcacttttaactcaatttctctaatatttcttcaatttaatcccaatctttttcttctaaacacacctaaaaatacataaaattaattagaaaactaaagtaaaattaaaaataaataccacataacatattataataaaa

SEQ ID NO: 285444 - DNA, 654 bp, Cannabis indica
aaaatttaataacttaaacctcgtgtgataatttacttcacttaaagtacctaaattttagaattataatttaaatattattattgctaaaaatttagctcaagtatgattaaacttaatatttatactataaattactttaatatttactataatgcataatttatatcatcatatggtgccgtttggtaacatttttatttttaattttttaatcacaaaataaaaataaaatttttgtttttagaaaatttatctttaaaaaataaaaatgcgttctgtaaccacttttatttttcaattttaaaaacaaaaaacaaaagtgtgttctgtaaagttcatctttatttttattttttgattttatttaagtcgggtcaagatccggggttggattcgggttcggatcagaagccgggtttagagctaaggtcgtgaggaggggatttgggtccagatctagttgtaattcaaaagaatgattaagaaaaaaactgtttaaaaaattttgaaagtgacttttttttgttttaaaattttgatttctaattataaaattgaaaagtaaaaacagttttatagaacatgtttttaaaaaatactttcacttttccacttttaaaaacagaaaactagattaaatattttataaat

SEQ ID NO: 285445 - DNA, 729 bp, Cannabis indica
tgctgcattgggtaacagattacatagatcggatcaaagctgcaacaccaattgtttttatactagtcaaacaccttgtgtctctttgttgtccacagagaatgaaccacacatccccagctacagcctcctgatttctgtagatgcagctcaagatataaggcaaaataagatgggctttggatggtgttcagacatgtcaatgggagatactcttaactttggcaacaccttggagcggactacatcaacctatgataatggaatcacacgccttgtactatgctctttcttggtgttctaatcactccatttatccagatggcatagtttcagattgtaaggttttagttgattatatttgtaataaggatactcataatctacatctcaacaaatttgttgctgcaaattaacagcttactgtcatctttccctaaaggttttcttagctacatcccaagaggggcaaatgaagctgcccattccctagctaagaaagctttaggccttgaccaggaagttttgtgaaagagcccttcctctctttgtgatttgtatcctggaacatcttgatttttattaatggatacaacattcttcttaaaaaaaactttacccttagtgaaattaaatatagtgtgataagaaaacaattttgccatttgaaaagtcaaaatatcaatattcactcaacactcaactctctctctctctctaattaagcaa

SEQ ID NO: 285446 - DNA, 610 bp, Cannabis indica
aatgtgggagtgactttggaactgggtaacatgctggggatggaacagtttggagggctcagaagaaaacaggaaaatgtgggaaagtttggaacttcctagagacttgttgaatggctttgcccaaaacgttgttagggatatggacaataaagtccaggctgaggtggtctcagatggagatgagcaacttgttggaactggagcaaaggtgactcttgttatgttttagcaaagagcctggtagtattttgcccctgccctagagatttatggaactttgaacttgagagagataatttagggtatctggcagaagaaattttctgcaacaaagcattcaagaggagacttgggtgctgttaaagacattcagttttataagggaagcagagcataaaagtttggaaaatttgcatcctgacaatgcaatagaaaagaaaatccaattttctgaagagaaattgaagccaaactggataaatttgcataagtaacaaggagctgaatgttaatgcccaaacaatggggaaaatgtctccagggcatgatgaggtcttcagggcagcccctcccatcacaggccaggaggcttggggggtaaaaaaat

SEQ ID NO: 285447 - DNA, 559 bp, Cannabis indica
tggtatgggatgaaaagagatgcggtggactacgtgtccaaatgcttaacctgctagcaaatcaaggctgaacatcaaaggccggcagggttattgcaacctttggtccttcctgagtggaagtgggaggacattgcaatggattttgtaacgaggttgcctaaaaccacaggaatgtatgattcggtatgggtcatagtggatagattcccaaaatcagctcactttctaccagtgaaagttacatattcagtggatcagtatgatgaactgtatgtaaaggagatagttcgtctccatggagccccaaactcgattgtgtcagacagggatccaaagtttacatcgaagttttgggtgagtcttcagaaggctatgggtaccaagttaaagtttagcacagcctttcaccctcagactgatggtcagtcagaaagaacgattcagatattggaagatttactacgagcctgtgtcatggactttgagggttgatggaataagtactttcctttgattgaattctcctacaataatagctaccagagtacaataggga

SEQ ID NO: 285448 - DNA, 616 bp, Cannabis indica
cagatagttgttgcttggaagttgttgccgggttgtttccagattgctgcaaatctgcctgtgctgagttgttgtcatcccaatgcccattgctctgtaccaaaatttccagattacagatctccttctcttcgattcttctcctctgaacgcgttgggcttttgactgaatgttgtttttgagttttttttttttttgtacaacaatggaggttggataaatttttttcccttttgtatttggattttcgggatctgagtagtttttctttgagatctatattttttttagatatgattttcctagttttggaatgaaaatggttgaaaatggttgttggggttctacagctgggtcacgaagaaggaggatcccctctgtttttttttggcaggtatttttgtaaataacaacttttagtttctatttttgtttattttctctatgtaggtcataaatgtaaattttttccattttcagtttattatagaaaaaatcccttatttatttactaatctgtacgtacattatgtgtttctttttttaataacttagtcattaggtttattttaatttttatattctttaaaggctaatttgtaatttttccccccg

SEQ ID NO: 285449 - DNA, 814 bp, Cannabis indica
accagtagaacaccagtgaaacttaacacagtatactgcagtatgaaacttataaaaaaacacagtaaaaaataccgcctggcagtatttttgtaaaaaaatagcaaaagttagtataccttgtaaatttccttatatatatcattaagtatattattaagaaaaatttaagtagttttaccataaatatttttagaaaactcattcttccataaaaaaaaaaaaggaaaaaaaataccataattataataataaatatccttacgttgttgtcaattagaaattctaacattgttgtccataaagtaaactagtaaagtatataacaataaaaatttcctaatcttgtccaattagaagttattttatttatttatttattttttgaaatgttacaacatagttatttatttgttacattttgtatattattccaaacaaccaaagaaaaataagaactacacacttgtaactagtaaccactattgcaaagagggagaaccaagaaccaaagaaccaccacaaaacaaaatgagactaactattatttttgaaccttatattttataaatattaatgatcagactatttattttgttaaataataattcaaattttatatttttcaaaataatacatacaatatcctctcacttttagtcaatttatttttaggttaattagtaatttttccccccgaactttgacatataccaaattataccccctgaacttttttgccgttaaaaatttcccctgaactattgagattgttaaatttaaggacttttatccaatttcattcaattttact

SEQ ID NO: 285450 - DNA, 281 bp, Cannabis indica
aagataagatataatacaaatttaaaaataagatagataattaagcaaaaagatagatatttactaagcatactgcccgcgcgcgcgtatgggagtgcatggccgagaaaactccgcgcaggaggagtgctgcatgattgccccgcgcggagaaggggtttcagacacccttgcgcgtgttgctcggacaaaaccttgtccgaacacgcgtctgaccgaggatcactcggttccgcgcgcgtgggtgagtgcatcatcccagatatttttcgaaacttcaa

SEQ ID NO: 285451 - DNA, 745 bp, Cannabis indica
tgcttgagctcgatttctttatttgcttctgcttccctgatgaaatggtacttgatgcttatatgtttagttctactatgaaatactggatttttcgccattgctatagctgatttgctatcgcaatatatctttgtagcttctttctgtgattctcccatgtcttctagtattcttttgagccatatagcttggcttgtagtcattgctgctgcaatatactctgcttctgctgatgattgcgcaacagttgcttgcttctttgatgcccatgaaaatattcctgatccaagtgtgaaggcatatcctgacgtgctcttcatgtcgtccatggatcctgcccagtcactatctgtgtagccaacaagttttgagtcacttgtaactccgtaccatattccgtagaattttgttccttgcaagtatctgaggattcgcttggctgctccgtagtgaacttgacttggatcatgcatgaatcttgataggagactaactgcgtacattatgtctggtcttgtagcagttagatatagtaggctaccaattagacttcgaaattttgattcatcagctttcggtgagccatcttctttcttgagagctttgttattgtctaatggagttgatacagtcttgcatccctccattttgaatttcttcaatagtgtctctgtatacttcttttgtgagatgaagatcccatcttctttttgagttatttcgatcccgagaaagtagtgca

SEQ ID NO: 285452 - DNA, 692 bp, Cannabis indica
gcctttgccaaggcacgcagccttgatttcttgacagcatcagttccctcgttcttaatctttagcttctcccatgcttccttagcaatttcacaattggctataaccttcaactggttagtggagacggcattaaacaaggcatgaagagcctttgagttgaaattcgctctttccatttcaacagtggtccattgactcatgggtttgggtataacgatttcattctccatcatcgttggtttccaccacccctcttctatggacatccaaactctttcatctacagctctcaagaaggcacgcatcttagttttccagtatggataattggctccttccagcatcggaggtctcgaggtggagcctccttctctaaacatttccatcctgcacacagaagtggtaaacagacacacaaatgttctgtagttctttgagagagaactcagaggaggttagttacgacagaatcgatcgttaaggttgacttaagaatcaacgatcaagaatcatacaggagtaggatctaacacaaattttaataaaatttcaagctctgataccaattgaaagtgcaacttgtagattttaatgattcaaattaccaagttgtctatctttagattgattgatttcaagatatgaattatgaacatgaattaaaagtcaagctgtaaatcacacatcaa

SEQ ID NO: 285453 - DNA, 530 bp, Cannabis indica
cccagacacatcgagatgcaactgaattgcaaaatctccgtgctgcgcttggactcatgcagggccacaacaataccctgcatcacgatcaggaggagttacgtgccgcagtaaacctcgcgtttgacgaacagaggcgtatgttcgccgagtggagagataaagagatggaggcattaagggctcaccatgcagaaatcgaagatcgtagtcggcaagctactgtgctgatacgaagagcctatcagactgtaggccagcaggcgccgagcgtcattccccttggagaagccgaggatgacccaacggtgaatgcttcccagacaaacaacggtcagtcgtccaatccccggtcacgagttccactcgtgggccaagaggtaggcggacagaccttgtccgagaattcatcaggaggagtcatgctcgatggatccactcaaaataatggagccattccacctgccaaccaagcgaaccaatcgctaaggcagccaggttcttctgtgttcgaaaggttgggaacgccc

SEQ ID NO: 285454 - DNA, 939 bp, Cannabis indica
aaattgattaattaaattcaattaattgagtcttacaagaagtttgtctcaactagtatggggaccatgtgcctatataatgagcttccaataagcagatatagaatttaccaagtaaattctctaacttaataattcctccttgcaccactatagatttggaattgaactctcaattatatagaacgctttatatgttccacgatatagatacgctatgagattatctatttgttataatcttaataattagtgatcctctatagatgatctacattgagtagggataaatttaccgttacacccttcaatgtattttatccttaaaacactgagctacctataaatgatattccagtgaagtaatataatcacaaaatgattactcaactatttatctctgttaagccaagctcaaaggaaattatcgtttgaattctatatccgaatagaagctatagatttcgtatctatgattagcgctctcactcaattgaactaccatgtccttaatctatatgtcacgagaagaatcatttagttgattttaacgaacaaatttaagaacacaaataaggcaactggactagaacctaaccatctcaggattgagattacttgatctaagatcaactaggtgatattcaattgaatagatattacggtaagtttatcatatctgaatcaagttcaatattggtcccttccgatgcatactccatacatccaacccaagcttactttaactaatgccctagaaaggatgtaacacttatccaaggtgcaagtaaactacattgtagattatcctatcattcaaaccctatgtaatgataaatcataggaatacatttaaatcttgattactctccactgtgtttacaacacaataaacaagaatatcaatgtgataaggattcggatgaatttataaatcaa

SEQ ID NO: 285455 - DNA, 746 bp, Cannabis indica
aataaaaattaattacaaaaaataataattaataataaaacaataattaataaataatacaaattaataattaataattagtaaaaaaataataattaataataaacattaattaataattaataactcataattagtaaaaaattaataaataataaaacaataaaaaataatacaataattaatcattaataataaaacaataatcaataaataataaaaaattaataagacaataaaaattaatacaaaaattaataattaataataaaacaataattaataaataatacaaattaataattaataattagtaaaaaaataataattaataaaacaatacaaattaatacaatagttaataattaataataaacattaattaataattaacaaaaattaataattaataactaataattaataaaaaattaataaataataaaacaataaaaaataatacaataattaatcattaataataaaaccataatcaataaataatcaaaaaattaataagacaataaaaattaagacaaaaattaataattaataataaaacaataattaatacataatacaaattaataattaataattagtaaaaaaaataataattaataaaacaatacaaattaatacaatagttaataattaagtcataaacattaattaataattaacaaaaataaataattaataactaataattactaaaaaattaataaataataaaacaataaaaa

SEQ ID NO: 285456 - DNA, 762 bp, Cannabis indica
cattgtataatgcaaacccgtcattttcaatttttttttttttaaaattcaaaggttctcaactaaacctctttgatagaaggggagtcaaaccgttataactccctgaccaaacctttttgacgagaaagggatcgaatagttataacaccttgatcaaacctttttgacaaagaagggatcaaacaactataatttttgatttataacctatctgacgggaaaggaaaatcaaaagttataactcacgtataaaactgaatactaacggttctcccgagctaggaaagtactaaacgaggcatcacaacgccttgataaaagtacttgaacctagaaaatagatagataatataactattcatacaagcaaattaagaatatataaagtgataaaatcattaaagtgtaattaagtttccttaaggcagattataactacaatagcaaggcagaattgacaacagctcgaaaatcaaaaagtttggtagatcactaactacttaaacaagaagattacgagcaatggaaaaacccaaaagtactatacatttgatcaaaatatagttgtttatattgtgaataaaaacgtaagcaaacacaattgtattaagttcaaatgaaaatagtacaaggcattcaagataaggaaaaacctaaattgggttacaaacttgtctttacaaaaatgccactaggggctaaccactaagtcatcttcctaaactaaggatgagggggaaagccgataaactcgagaaa

SEQ ID NO: 285457 - DNA, 560 bp, Cannabis indica
tgaggggtttcaattatactgtaattactatattttgtcaaacaagatattagtaattcatatgtaattaccacctcatatccaaccataccatgcattttaaaatatagggtgcgtttagaaagccacaatgtaattggatttgtgtgtaattggaagtaattacacaatttggtatgtttgtctgaccatgtaattacactgtaactgtgtaattggaagtaattgaggggttccaattacactctccaatactcatggcccccccatgagaattgaatgtaattacactgtgtaattactaaaaaatttccatattaaacattagctactaaaaaaatattattttcccatgtaattactaactattttgctaaataagatattaggaattcatatgtaattaccacctcatatctaatcatacactacattttaaaatatagtgtaattactacactgtgtaattaccaccctaataattaccctacctagtaattacacagttacttccaaacacacccatagtgtaatatctaaactgtgtaattactatccta

SEQ ID NO: 285458 - DNA, 129 bp, Cannabis indica
taatcagatttactaattaataaagatcagaaatcattttatgttgcatggttcacatgatttatttcatgtttacatttaatgtataaattctattaagtccagaacatatgtatttgttcgtgatta

SEQ ID NO: 285459 - DNA, 307 bp, Cannabis indica
actacacttctacttaaggcacacattaaattttaaatgtggtaaacttttttataaataaaaaatttatatgaataaaataattttaacatagtctaacacttaactagaggagatcctaaattccaacttctactttagtaatgaaagttatcaacttctatatatattgtatatgtttatttattattaattttttttatttatatatacactttattttataaataatatatatatatagaatgggatttttgtaaataggtttggggggggggggcgagtggctgttggaattattttacca

SEQ ID NO: 285460 - DNA, 604 bp, Cannabis indica
aaggtttcatcaagctcgaagaagccattcaacgagcggaaggtgagcaaaagcctggtaagtcaaaggctcattctactggaacatccgcccaacttccccattacccaaataattcaagctcaagtggtaagcgttccaacaacaaccacaggcaacggaatgggaagaaaggaaaattcgccggaaaatccgaacaagctccccgagaaaatcaagcaaagtacactgcgttcactatcttgactgaagacaaagaaagtatttacatggcaactcagtcgctggccccatataagaagccaagcccatgaagaaagatgtcagcaaaagggacatgacaaagttttgtcgattccacggaaactaccgccacgacactaatgaatgcaacaacctaaagcgagaaattgaattactgataatgaaaaacaacccacacttgcagaagtatgtcaagaccgatcagggtcagaggaatgacaataacaaagagttactacctccaccggtagatgggcatctgcaagtcatcattggaggcctgcatattgctggagattcaggcaaagctcggggagaggtatgcccaaacagcgcagca

SEQ ID NO: 285461 - DNA, 509 bp, Cannabis indica
atcaatgatcctctatagatgagttacattgcatagggattaatttacagttacacccttcaatgtattttatccttaaaacactcagcaacctataattgatattttagtgaactaatacaatcactaaaatgagcgctctatcatttatctctatttaaccaagctcgaagaaaattatcgtttcacttctatgtccggatagaacttataaattatgtatctatgattagcgctcccactcaattgaactaccatattctcaacctacacatcacgggaagaactatttggtcgactttaactaatagattaaagaacacaaataatgaaattgaactagaactaaaccatctcaggattgagattatttgatctaggatcaactaggtgatattaaattgaatagatattacagtaagtttatcatatttaatccaagttcaatatcggtcccttccgatgtatactccatgcatccaacccacttactttaaccaatgccctgg

SEQ ID NO: 285462 - DNA, 564 bp, Cannabis indica
caagaaaaaagagtgcgacatatacatatcttccattcatgcacatatccataattagtttttgcgataatatctcataagattattatcatgatattgtaataactattaaaatatcatcatatattatttatgtttatatatttatgataactcttgtaatatatgtgtggacttctaaattaagaatgagacatgagcttacaggttcttagtacatcatgtatccaacttatttgataattcatgtgtgtgtataacatcattcacaacccaaattttgaaaatttaagtagatatgaatataatacattaatgatgaaaatataaatttttatttgcgataataataatactcaagccatatcattatttcttttttgttatatgatcttatttttaacatcaaattatcacatttatatataaatatatatatatccataattgattatgcatgtttagtgttagagattttataacaatggaagaaaattaagatttattacaactctattgtaaaataatacaaggactaaaataagagattgattaaatatatgt

SEQ ID NO: 285463 - DNA, 683 bp, Cannabis indica
actgagtactggtcgattactgcgaagtccgccattgacttggctgtcactggggcagttcccaaagtgattgggagtttgatcattccttttattgttatgacgtcgcctgtaaaaccatagatgctcgacgtcacgggtcgcagatccttctcctgcaaccccatttgtttgaatgcttggaaattcaacagattcactgaactcccattgtcgacaagtatgcgatggacattatccccgccaatattggcgattatgactagtgcatcggaatgcgggtgatggacccatctcgcatcactctccataaaggtgatgtcatcgcattccttcttgaaaagtttctcgggccgctcactaagattgttgacattggtgaacggcttttctttagcttctctggcatatcgctcttgtgacttgcgagagtcccctgcgatatggggtcctccaatgatagttaggatgttgcgaggtgttctggagccactcgcattctggttttctcctttgtcatccgcttggggatgactttcctcgttcttcttatacttgtcgaacttccctctccgaattagctcctcgatttcatcctgcaagacccaacattctaaggtagtatgaccaatgtccttgtggtacttacagaattttttggggtctctcctgtcgcgatttcc

SEQ ID NO: 285464 - DNA, 860 bp, Cannabis indica
cgtgaaggatgattttgatgatgctgcgttcgaaagattcaaagaatctggagggaaggtgattggtccgttcactgtgaagaagggttactcaaatcaacagtacgagttgttccgttacattttctctagcgccaatgatccgaggtaatctcatgtgtcatgattactgtgtacgtagttgatattagtacattcgtttcgttgttgattatttgtttggtatttcagtgaagtgttagcccattttgggaaggttgaggtcgagcggatgtatttcaaatgcatgaaaccggagaccgatatatcaaacagtgtacgtagaagttggcatttgggtgctttgaaatttgtagttcattattttagttaatgccattacaaattgtatgaatgacaacataacggatattgtttgtgtaaatgtcaggtcattgattgctttgctcaaatcatgaattttcgagagaagaagcgcaacggcattggaagtaagagaacttggtttatgcccaccagaatttcggtatgaaatttgatatttaaaagtggacatgaatcttttgtatttgtgctgtaaactctgttaaatctatgtttttatttaaaatgtaatctattatgtgtgcttattgtgcagagcaagttacttggaagaacgatgactgtggagaggatggcgaagcagcaagagtggtccactctttattacgatgcagatttgagtttatgtcacactgtaatttgcattttcttgaaacttttgtgttgaatcaaatgtgtgtagttcaattttccgatgacgttgtttgttttactttgtcgcagatggtggtacccctactggataccgagagtgc

SEQ ID NO: 285465 - DNA, 1078 bp, Cannabis indica
atgatgtgagagtttgggggtatttttggggttttgaaaaaaaaaggtatagtttttttagggtttaaattattggtttagaaatcaaattttttgattttctaagtatagaaaatcaaatttccctatgagaatcaacctatagaccaagggaaattgagtaatttgcggtaaaacccttctaactatcaatttatttataaaaaaccatccaatctcatattttggtaggaaaaccctccaaaatattgttccatttacatttttaagttgtcgtctgtccagccttgttaagtcctaattttgtccacgtggcaatgacaggtcattaaaaaattatcctatgtgggtatgttttacaaaataaaaattaaaataagtaattaatataaaaataaaaactttaagagtaatttacggtaaaacccctcaactatcaagttacttataaaaaatcatccaaccttaaagttttttggtataattttttgcgagtaaattgatagttggggggttttgccacaaattactctaaaatatatatacacacatgatgcctttaaacgtttatagttgaagtttagtgcagtgctgaatattttattattattatgagaaatcaaaatcattttattgcataaactcaaatttacaatttaacagcaccattacggcctttataatctatacaacttgtagaatctgtaaaattaattatgttgtaaatttacaattgctaaacccatttcaagtctttttatttcattttttagacaaatttgataaaattctaactttcacctcatctcgaatgcagagcattaacatggataacatggtgttcacggattggtttggtcccgatttttatagtttttgaaccaaatcagtataacggttttttgaatattaaaaaccaaaccagaccaataaatttctcaaaccaaaccaaaccattaagaacagtttggtttcgttcgaaaccacggtttaagtagaatttataattattcatattttttaagtaattgtactatttttattaagtttttaattttatttttcaaaatatatagag

SEQ ID NO: 285466 - DNA, 551 bp, Cannabis indica
tagtatgtttatgaagtattaaatttatgatacttagtttttacgtattttaatattaaaatttatgtgtgtaattagatatttaattaaaaaaccgatccaattcaattagtaattggattggatggtctaattggattggatcggatgatgattttctaaatccaattactaattggattggatcgaatgagaaaaaaaacgttggattggatcagatgcccacccctaatgaatacaatttggcagaatttcgttcaatctgaaattcagttgccctttttacattaatactcctactatttattataagaattaaataatagttatttgatcttatctataaaatagtttataaaacatgattattccctacatttcatatgtcctttcataggtatgtaattacatttgtaattaaccgttattgttgatcttatcccaaacatttataatcaagcctttctttgaacgatatcattacatctttggaaaaaataggactaatttttgttatttttttacaaaaatactgtcaggcgatatttttt

SEQ ID NO: 285467 - DNA, 558 bp, Cannabis indica
taaaataaagtattttaaaaaaaatatgtgaccttagatttaaaataagataaaataatcaaattttaaagaaaataagaaaagaggtaagcaaaaacttaatttttatctattttcaaaattaaatttcactaatatataaaattaatctaaaaaaataaattaatttatttctgataattagatttgaaatatgaaaattaaaaatcaaaatacaaaactatacaaaaaatcgaaagttaattccatgaaatagcatgaaaaatcgaagaaaacggaaaaattgatgaatagtacgaatggtatgcatagcataccattccgcgcgtgcatctaaggggctggccgagtttccacggtgatgggaggctgcaagcagccattccgcacgcgtgggaagagtgcttatcaccctgatttttccgattttcaaaaattcataactaattcaaattaaatcgaaattgagttctgtaaaaaagtaaattgcttccaattttccaaactattcaataaaaataattacagaaacagaaaatcaattattttcccagaatt

SEQ ID NO: 285468 - DNA, 414 bp, Cannabis indica
aataatgaaaatattaatttgaaaatccacaaatagtggccggccatggtgtgttaatgggccccacttgattttgcagttttaacaaattttatctctattttctcaaaaatgccaattttccaattctaaccttttaaatgccaaaactaattatttaataactaaaatagattattaaataatattgtcatttaatttaattattaactagacatataaagtccattaataaataaataaacctagaatctcttttctttacaatttcacccctgcttagtgaaaattcataaaattagacatagtctaactttagaattataattgatcaatcacgaatcaattaatgagtcttacaagcagaatgttctcaactagaatggggaccatggatctatatgctgagcttcc

SEQ ID NO: 285469 - DNA, 312 bp, Cannabis indica
gcataaaacccaacagttattaccaacatcaacattcactacaagaaaaccagcttttgccggcgcattgttgcgccggcaaaagtaccctaactgcgccggcaaagctttgccggcgcagttgtgcgccggcaaagattatctgggaagcttggtcggtaaaggactttttaccggcgcgtatagtaactgcgccggtaaaacttccttttaccggcgagaaataacgccggtgaaaaataagcgccggtgttaaaaaatggccttatccgccatgaacctgctatgataagcttttgccggcgcaatagt

SEQ ID NO: 285470 - DNA, 527 bp, Cannabis indica
atgtgattggtaccttgatcatacgtcaaccttctgtgggatggtggttcgagttcgacgggcagcatagcttcataaccgtacgccattgagaatggtgtctgaccggttgctgttttttccgttgtacgttatgaccatagaactttggggagttcttccggccaatttcctttggcatctttgagcttcttctttagtgtgtccttcagggtcttgttgaatgcttcaacttgaccatttgcttgtggatgtgccactgcggagaagcttttgatgatgccatggttcgctcagaaatcagtgaaagattgactgtcgaactgctcaccgttgtctgagactattttgtacggtagtccgaaccggcatatgatgttcttcactataaagtcttgaaccttctttgatgtgatagtttccaatggttcggcttcagtccactttgtaaagtagtcgactgctacaactgcgtactgcactccgcctttacctttaggtaattgcccgatcaggtcgattcccca

SEQ ID NO: 285471 - DNA, 397 bp, Cannabis indica
attatcatacatttagcaagtaagaaagacatgtgaaaatacaaaacaaacacatcttaaataatttccaagaattttaagaaactgatacagtatctcggtaggcgagagtcaaaaatatcattcattgaatagagtagtcaactcatctaaaatagacaccattctagcaaccttttattcgatcaaaataagaatccaatgttgtcccgtaggcgagagtcaaggttattcttattttataagcttctaccattgtttcatactttgtaaatttatctctaagtaatcaccgtagaggagagtctaatagagacaaaaacttacaaaatacttatctttcaagatcttcacggtgttaaatgcttcaacaaataaccatccataagggggacga

SEQ ID NO: 285472 - DNA, 669 bp, Cannabis indica
agattgtcatatcagttaaaccctctatgtactaataaatctaggaatatatatataatcacataatcttgattactttccactgtgttgacgacacattaaacaagaatataaatgtgacatgggtttggatgaatttataaatcaaataaacaagtaatgataacatgaaccaaatgacacacaaataagtgatgaaaatacttttgtttctttattgatttttaaaagataaagattatattgaaatggagttttatttagggcataaaacccaacaaactcccactgcactaatataaaaaaatcagtacatttcaattagtcctaaattctgacggtgcttttcaaatgcagttcctgccaagaccttggggaatggatcagctaggttgtcatctgtgtccactttttccaccagtacatcccctcttgccacatattctctgatgatgtgatcttcctttcgatatgctttcttctcttgtggcatcgaggctccttttggttggctatgactctagtgttatcacaaagaaaaaccagtggtttttccattccagggacgacactgagtccagtgaaaaactttctaagccagacaagttcttttgcagcctctacaacagctatgtattctgcctccatggtagagtctgaaatcgcggt

SEQ ID NO: 285473 - DNA, 673 bp, Cannabis indica
tatactactctgaccaacatcaaacaagaacccagtgagtctttacaagactattttaaacggtttaatgcggaagtatcaaaagttgagaaggctcccgagtcttcgcttgtttgtatgttaataacaggtgttctgccgagaaccgatttttggaaggaattacaagcttgaagaccagaatcactagtcgagttcttcgttatggccaaacctcataagagaattgagaattctctagcagagttggaaaaaggcaaggacaagcgtaagtcaccagtgtcgcgatcgcgatctcgcagtctccgagggaaaaattcaagaggccgaagcccaagaagacgcagcccacggagacagtgaagcccgaagttggccaaatctcctccaaagaaggagtcttcgctaaaaaggaaaggtggaccgcgcttcgtgaactataccaaactcgcggtgccacgagaccacatctacgcaattgaagaaaggaacggagtcttcaagaagccgcccccgatcaggggaaccgcgacaaaagagaccccaagaaattctgtaagtaccataaagatattggtcacacttctctggaatgttgggtctttcaggatgaaatcgaagagctgatccggaggggaaaattcaaccaatataaaaagaacgaggaaggtca

SEQ ID NO: 285474 - DNA, 790 bp, Cannabis indica
attaaaaaaataaaataaatggtaaaaatagagcaatagtggccggccataggatgtgggcccccactttgcaattttgccatttttctaactatttatcttattttctcaaaaatgtcatttttccaattcaaccacttaaatgccaaaactaattatttaataattaaaattaattatcaaataaaattgccatttaacatatttattaattagacttaataaagtctcttaattaacaaataaactctagaatctcttttcttcacaattaagccctagcttagtgaaaattcataaactagacatagtctaattttagaattataattgattaactaaaatcaactaactgagtcttacaagcagtttgtctcaactagtatggggaccatgggcctatataaccgagcttccaataagcaggtctagaatttacaaagtaaattcactaacttattaatttctcattgcgtccaccataaaacttggaattgcactctcagttacatagagcgccctatagtgccacgatatagataagctataattatccattgttataatcccaataatcaatgatcctctatagatgatctacattgcatagggaaaaaattactgttacaccctttcaatcaaatcaaagaacacaaataacactcttgagatcgaacctaaccatgtaaggattaagatcatttgatctaggatcaactaggtgatattgaattgaatagatattacggtaaatttatcatacctaatccaagttcaatatcgatccctt

SEQ ID NO: 285475 - DNA, 728 bp, Cannabis indica
atcatatttaatgccataatcctaatctcatcatagaaagatttaagacactccttaagcaacaaccaaatttcacaaatcttagagaagaaatgattagcagtaggatatttagttccagaaaacatcacagttacattgtaaaacaacttcaatttttcacacataacttttgccaaaagccaatctcgctcactaggttcttttttgtaatttttctcagtatgtattaggcgactaaatacatctttataaataatggcactagtaagcatcaaataagtagaattccacctagtcttgcaatcaagcactaaccttttgttgctagagcatgataatcctttcttagcctcttcaaacttttcaactctttttggagtgccagtccaaaaaactacactctcacgtatagtttctatggcaccttgaattgcccctagtccttgttgaacaatcaagttcaagatatgagcagagcatttcatgtgaagtagttcccctttcattagtaaagaagcatttctcaatttttctttcatttgatccatcatggcaatgttcacagtacagttatctaaggtaagggtagacaacttacgctcaatagaccattcaatcaaacactccatcaacacttttgctagaagtttagcagtatgaggggcgggcacatatataaacctgaatgtacacaaaaaaaaattattagcatatatcgatatcaa

SEQ ID NO: 285476 - DNA, 670 bp, Cannabis indica
tcactttgcagtatcaacccgggaaagataatgtagtagcgaatgcactaagtagaaagccgcatggtactttggcatgtttggctcttgaggactggaaaaggacaatcacaatgggtgattataacttacaatactatgaaggggaagaagtagcttgtatctctaacttagtggctacaccaatactacttcaacaagttaagcaacgtcagtggcaagatgaaaaactaagacttatttggaaccgaatccaggatggtgagcaactagatgggtggacagttaatagtgaagggtatctataccatatgccaagactagttgttgcagatatccctgatcttagggagacctttttgattgaggctcatagatccaaattttttgtacatcctggaagtacgaagatgtaccaagatttaaagagacaatattagtgggaaggtatgaaaagagatgtagccagctttgtagctaagtgtatagtatgtcagcaagttaaggctgagcatcagagaccctcaagtttacttcaacctttgcctataccagaatggaagtgggacaagattaccatggactttgttactgcgttgccattgacacctttgaagcatgacgctgtttgggtgattattgatcgttgactaagtctggtcattttatt

SEQ ID NO: 285477 - DNA, 590 bp, Cannabis indica
actaaagggtgtattttgggaaaactctaaattcccgactaatcccgacattcccaatgtataataaaccgtcctaatatattgaaatattaatttagtgattctactgagccatacaccgagttccatgttgtcggacaccgaaaatgcaaaattatcaaatttcactactatatgacataaaaatgcattctgaattcaaaaataacagcataaataattattaaatatctataaataattttccataattaaacatagattaattgctaatttcgaaattaaactaagcggtctttacagataccatccattgaatagagttgtcagctcataaaatgataacattctagcaatacttttgtaagtcaaatacagtcgccaccattagggtgatcaatactatataaaacacttacaaataatattatctttcgagattctacggcgttaaattgctaatgaacgttcctccattagggaggattactcactaaaacaagaactatgtagaaccaacaatggagatcgaatgtcctaataataaagctcattatttaaagtgtattttttctaatatttattttaat

SEQ ID NO: 285478 - DNA, 464 bp, Cannabis indica
cttagcactattcaaggcatcataaaaacctgtaataattgtaaaagcttgctaactaaattaatagcagataatattttaaaccaaataataattgctattaaaactcaaaatctccaagctcatttgttgccaaggattttgcttcacttcttattttagaatcaagttcatctttttctgacacttcaagtaaagcttctctaaagtctgatatttgaaatcttatagctttaacactatctacacgactttcccaacgagtggatgacaatgattttggagtcaatcctttcacattatctttcaaaatttgccatctcttagtagaattggcaaaaatcgtatatatgcgctggataactccaaaaaaatctctagctttactacatgattcagccatgtcacataatgtcaaattaagactatgacatccacaaggagtataaaatgtttttggattt

SEQ ID NO: 285479 - DNA, 737 bp, Cannabis indica
aaaaaaatctcttcaactacttcttcatcgataaacgatccatcctccctttcaattcatgaaattgtgtttcttgcctttctcgcattcaacatgtcatgaaaaaatctcgagttagcatcaccctctttggcctactagcatttagctttcaaccatgcacttctttcttcagcaaaagctaaattttgtcattccttttttgtctttcttctttcctccattaaagtttgattcccgccaacacttccttccaatttatccaattcgaccagccttctttccaaataactttttatcatctgattgttaccgaaagtcgacttactccacgacttgatgttttcttgcctttctcgaattcaacatccatgctttgttaaggtgagcatgaacaccttatgttgcgctcgacaactgtcaacacctaaacaatttttatattcaaaaccagtgggtgttaaggatagatttcttccactaggtagtagggccagcgaattcttaaaaaaccttccatgtccattcagacaatgaaagcccctacagtgcatacttttgcgtattctgaacaatcctccatacttccgtgtccattccaagttgttgcctcaatggataaggtgatctcgtagtagatcaatctagtactttcgcatattgtgatcaatcatccatgctttgttaaggtgagcatgaacaccttatgttgtgctcaacaactatcaacacctaaa

SEQ ID NO: 285480 - DNA, 718 bp, Cannabis indica
ctaagaaagttcttcaccagtcttggtgtagtacctggaatggaaaagcctctagtcctgctttgtgataacaatggagcaatagccaacagtaaggaacctcggagccacaagagaagtaaacatatagaaagaaaatatcatattatcagagaatatgtggcaagaggggatgtactggtggagaaagtggacacacaggacaacttagctgatccattcaccaaagtcttggcagtgactgcatttgaaaagcaccgtcagaatttagggttaattgaaatgtactgattagttttatattagtgcaagtgggagtttgttgggttttatgccctaaataaaactctatttcaatgtaatccagattattcaatatcaataaaataacagaagtatttttcattcatttgtgtggttcaccttatcaattgtttgtctatttgatttataaattcattcaaacccttttcacatacttgatcatgtttattgtgttgtcaacacagtggaaagtaaacaagactatgtgaataaagattcctagatttatcagaacactagggttttactgatatgacaatctacaacagagtttacttgcatttggtgaaatgctatgttctttccagaacattggttaaagtaaatcttgggttggatgcatggagtatgcattggaatggatcgatattgattttgatatagatttattaaa

SEQ ID NO: 285481 - DNA, 251 bp, Cannabis indica
tattaaatagttagaattgacatgtatatggttgagtgtgaaaattggcagtttttgagaaaatgggaaactgaaatgataaaataggaaaattgcaaaagtgaggcatatttccatattgccatggccggccacatgcattgcctttatcatttaatttttttcattattttaatgccaagtaattcaaccctaaccctgtgtggtattctataaatagaaagtaaaggcttcaggaaacacacacaaca

SEQ ID NO: 285482 - DNA, 559 bp, Cannabis indica
cactgcactgtagagcaccgtcgaatacacccaaaaaattttgatatcacagatggaatttttaattttatgaaaattgtatttttctgatatgaaaaagatgtgttcttcccatcagttcaatcgcattatataggcaaatggattgaataaacataacgggaagaataacgttttctgaaacgtggggtgagttggttttgaacgtgtcccgttaactgatacgactaagtaatcagtttaattaaacacgtttcttagttaactgataccacaccaacccaacccggctcgaatcggacggcgcgcgcgtgtagtgggtcaagtgtgtgtgtcctcacccattcgcacaaaactgggtaccccttggggcccaaacccaaatgccaaagttgcactctttatacccttgtaaatgagggttcatatcccatgtgggaccctttccaactcacacacactaagacacttatatattttgttaaaagattcacaacatttccaacagttgcaataggagtttctatgtagaattctgtaaatataacaaaaaaaaaaa

SEQ ID NO: 285483 - DNA, 409 bp, Cannabis indica
ataagcttctgaaaacatacaagaacacccagcaatttcacagaaacaaaatgaaccatttcactcaaaaatcacatatttgcataggaaattcaaagctttaaacaacaccactagcatgcattaaaacctatataatccatccatttaaaacctaattaagctactggaaacaacaattaaacacagtagcaaaaaacttctaattaacatgcattttctcaactttttcatcaaacaaactcaagaaaacaaggtagagaaatcacataaagaaatacctcaacaaaggattactagagcttgcaatccaagcttgaatcaccaccaaaaattccagctcttgaaccccaagtttcagccgaaaaagagagagagaaaagggagtgtttccttgaaatttttcttt

SEQ ID NO: 285484 - DNA, 868 bp, Cannabis indica
actcaaccaaatcaaatccaaatcaaaccaaaccttccagacctgttctaaataccccaaaacatttctaaagcatcaacacagcccagaaaacacagaatcaaaaatcaccattaaagctccaagctttgagttcaaaactcaaacttggttaaacatcattaacatccattcaaaccagctcaaatctacctaaacatgcatataataacttcagaaaacaacagcaagcatcaacaaccaatgcagcaacagattccattaattcactttgaaaagcatagttttagaaccaaaactctaaattagttaaaaaccaacccaacatgcatcaaaacagtttcattccactcaattaagcatgctttaaacctctgaaaacaacataaaatcacagcaacaacaacaaaccaaactaagcatgcaaccaacaattttccttaaaaatcttcaagaacaaaagcaagagacttaccaagagttgagaccacaagaactttgataaatccagcaagaaaacacacaaagaattccccccaatcccagctgctcaaaaccgaaagagagaaagaaggagagaaaaagaggttttttgcttttctttctaatttttctaagtttgaaataaaagaaaacatgcataactcaacatatattcagccatcaattaccaattaaattcacataatttcaccacataaagtccactaaaggacaaaatatcattggggcaaaatgaccaatttgcccctccatactaaaataacataaagggcactaagggggtattttgggaaattcaaaattcccgaccgattccgacattcccaatgtctaaataaccatcccaaaatactaacatactaag

SEQ ID NO: 285485 - DNA, 627 bp, Cannabis indica
aataacttttgagatatttataaaaaataagtaaaaagaaaatatggtgtttttttttagggaaatttacatacattactaacttttcctattttattacttttctactgtcacacgcttattattacttttatactgtttttttttttctactgtgtcaattatttttacaatgtccttcattcttactttgacatgtttatactgttcttcttcgtagtcttatataaaatatgtatcatacattgttgtcatatttatgttttcatcattttataataataataataaaataggaaataatagtagttgtgtctcctcacatcaaattttaaatttttttgttttattagagtgattgattggacgtgagatttgacaactcttagacacactactcactaaagcaactctctcatcaactctatttatttatttatttttctaattttaattttctttttcatacaactaccttcatattttctttaaaaaaaatttagtttctctctctcctttatccttgtgtctctattactataaagcataagatcttgtttagtgcttcactagcaaaacccacctcctaaactctttcacttcctctcttcttttccttctctctct

SEQ ID NO: 285486 - DNA, 617 bp, Cannabis indica
gaatcaaaaagtgaggaccttcgtgttcttgggcaaggatcaaaggtcccgaaatccattgattatgacgcttaaggctgaaggtttattatgggatggatgtaccaaaccttcagttagtgtggcaaatgttgcaaaggaaacatcggtggaactggaacacaatttttgtggttcaaggacttctagatgccttatcagaagagctatcaagattattggtgaaatgggaattaattttgaattgaattgatacaaggagtgaaacctgaatccaaggttctaaattggatggtaactgtaagattgaaaggggtgaatgttccgttataggaaatattaggtttgaaatatctagtttgagtggattttatttatgaggaagagggatgaaaccatatgagtgagtattgactgctgggagattaaaccaattaacggtgaagaaagagtatcctttgtcaaggatagatgttatgattggttaattttaagaaaggaccatcttctctaagatcgatcttcgatctggttattaccagttcaaagttcgaaggaaggatattcctaaaatagttttttttttttttttttttattttttttttaatattcaat

SEQ ID NO: 285487 - DNA, 470 bp, Cannabis indica
ttgatcatgatctgaccatgctagctcttggttacgtaggctgttcagaatagatggacgccaggcgaaataccaggagccagggcaactcggtcgggtcaaatgaaggtcagggagctcagtttaccccaaatgctcggggccgaggtagaggtcccaagggcagggcacgtggccggggtgatgctaacccaccacaggttgcccaggctgcccaagctaatcaggaagcccagaattgggaaaacaggtttgcagaaatgcaagccagaatttaggaacaagataatgaaatccagcaattgcgacaccagggtgctcctacagtgcctgttctagaaattccagtggcaaatgcccctgttgtccaggccaaaccagtgatagcggtgaatcggatggaacctctgtatgaaaggttccgtaagcaagcacctccagttttctgggaggtccagatgttatgaaag

SEQ ID NO: 285488 - DNA, 491 bp, Cannabis indica
ttcctatacttggctgctccgagaatgcggttagcgcggcccagtacgggaagaggaaaaaacacagcatcccgtgtactatgtcagcaagcacatgataggagcggagacgcgatacccggtgattgaaaaactagttttttgcctcctaatggcctcgagaaaattgagaccctacttccaagctcacccaatcaaggtattaaccaaccacctgctccgacaagtctacaaaagccaaaggcatccggaaggctcctcaaataggcaatggagttaagccaatttgatctacactacattccacgcatttccataaaagggcaggcattagcagacttcatcatggagtgcaatgaagctgaagctatcgcaaacatacccacaccaccagtcccggcgtggaaggtattcgtggatggcgcctccaacgagaacggatgcagagcagggatcgcaatgatatccccaaacggacttcgactccaagc

SEQ ID NO: 285489 - DNA, 503 bp, Cannabis indica
agcttcagcaccggaggccccagcagatccatctaccccaccaccagctgcttcacccccagtagaagaggaggaggtcttccccgacgattaggatccttatgagggagctccagcgactccgatcgaggcacaacctgttatccatgtacatgacaccgagtcgcagggtgagattctgtcgatagaggcacaacctgcagtggttaagagtcggaagaggaagagaaagcctcctgtatggttcggtgactatacggagatgaagaggagacataggccatcttcgacttttgatcccctggagccaccggatgagaaattgttaaccactttccgaaagtggtgtgttggactcattccgaaccaccgagttcgggatttgagaattggtgattacggtccaggattcttttggataatgctcacaccaaaggaatggcttacagatgacgtaagtaaatatattacttcactttacaactttatgtgcaattaatata

SEQ ID NO: 285490 - DNA, 940 bp, Cannabis indica
tactaatcttacctcaattccgaattcaggtgttccggtcaacctgagtggaacgaactgcacggcgatttacaagctcctaaaccataacaatcacaacactgaataagtgatacgctaaatcacttcccggggacttaaactagaaactaaacgttttcctatcgataaaaagcatggcaataccctaaacaacataaaaaggggaaaaaactagggttcccaaaaatcccccaaccggcagaccggttctgcaaccggaattccggttctgagaatcctggaacaccatccaaaattccggttgcacaaccggaattccggttcctcacaggaaacacacaaaattccataactcactcaaatcaaacccaattcataccaaaccttccagacctgctatttagaccctaaagaacatttctaaagcatcaaaaccatccagaaaccacagatatgaaaaatgccatgtgagctccaagctttgagttcaaaactcaaacttggctaaagctcacctacaagcatcaaaacttgatttaaactacataatcatgcatataaaaactgcagaaaatgaactcaagcacaaacaatctctacagcaactaatttcacattttcactttcaaaaaccatagtttttgagctaaaattcaaaactttgaacaacacaactaacatgcatcacaagcagctctaatctactcaattaaacatgaataaacttatgtaaacaacatcaataattaacagcagcaacacaaccaaatcaagcatgcaaattatcattttcttccaaaaattccaagaaacatagaaaatagttataaaaccttaccaaccacttgaatcacacttagaattgctgaaaatgtttgaacaagcaagaaaattcccagccctagcagccccaatccaaaccgaaagagagagagag

SEQ ID NO: 285491 - DNA, 868 bp, Cannabis indica
ctttcagccaaactacatgtagttttaagacaaactacatgtcgtttgagatcaaactagatgtagtttttcacattttttttcaaaaataataataataataataaataatgtggcgtgtgggggcacgtggagggttccttttggatctttttttcactatttttctctattttaattttttcatttaattgtgtgattatattttgattttagtcaatttaaataattaattgactcacaatcacataattaaattaaggtaaattattttctaatatttataatctcacaattttattatgtgttatttatcaattgaatcataattatattcatgtcataacattattgtataaatgattgacattttctttgataatataattatgttagtgaataattaattgagtgcttatgtactcacctatcgtgagtctaagcatgtcaatttcgttaatcataaattgtgagaattgtgacaaattgttgataattaatttaatctcatacaagaccatttttatatgattatctttccatagttttgttatatatatgccttttgtgattttgagatttttctttttatgaattttattgttattattataaaattcttttggggcatatactatggaaaatgtgtaataaaacattgatcatgatttgcgcatttaccatacaaattattgtcaatatttaattgatattttcggtaataaaattgctagaaattcaaaatgcgcatttggtattagatagttatgagattgaaattattcattgaaatgtgttaagcttacctatcgtaagttttcacatgtcaattatcgaaaaattatgattcatgttaacacttttctct

SEQ ID NO: 285492 - DNA, 698 bp, Cannabis indica
attgagaaagccatgagagagcttaaacccttcgtttccctattaccttctctaagtatcactctaggctgttcctagccacctttggttgtgaaggcgatcgtcgtagggttcttgaagaccaaccttgacacttggtcattatcaggggatctttgctaatcttgagagtttagacacccttacttctgaccaactttgctatgttcccttttaggttcaagtccacaacatcccttttagtaagaaatctccccagttggctcagtatgtagctgatgaagttgggaatctcataaaggtctacaccttttttctgtttgaaagttttggtccttatcttaagatcaaaattttttagacgttaccaagcctctaagaaggggaatgaatatccactttagaaaaatctctaagactaagtagttgtgttttaagtatgaaggtttgtaaaaattttgttacttctctggtagcttggatcagacttacaacaaatgtgttaactatcttgcttgttgtgatgattttgttgctcccccttttattgggttattaggtgttaggttatttttagtataaattttagattaattttagtataattttaatttagttttactcgtgtttggagcaattctacgtttgttattttttatttttgcagatttaaaataaaagaagattagaaaaatatc

SEQ ID NO: 285493 - DNA, 718 bp, Cannabis indica
tatacctaccccctcacacatatatagcatatatacataatgatagtaggaatagttaaggatagacttgtaatgagtattcttattagtaattagttaaacatattatgaagtaaattaatctatttagtggtttagaagttaattaataaaaaaaaaaatgcatatatcactgaaaataaaaggggtgtttgtgaatattcttgatataaggagggtcgtaatctaacttaaaacaataatgattattgtgtatattttttcatgtccataataaattatagaattagtgggtaccagaaaaaattaataataatttgaaaacattaattactttcacatggctgttaaatatagctttattattttatttaagaattaatacaaattttctatggtgatgattcgtgacacgagatttaattgtgtacaaagcccagaataaaaattaatttaacactgttttttttttcagaaaaataatatatattggaagtaagcaacacttaaaatgaacatgtattgttatatattctctttattattgaattttttctttatgcttaaaaaaataagaatctttacttttgtatatatatctttattaacattgatgaaccatataatatatataaacttaattatattgaagataatattttgcaaaacttaacaaaaaaaaatggtttttattttaatattatgaagtaagtcaatc

SEQ ID NO: 285494 - DNA, 713 bp, Cannabis indica
caattagagaaaatgactgttatcacaaaataaatattacgtgatagatatattgtatttttttttcaaatatttataaaataaatacatttagtttagatatatattttataaataaatagtattttaattaaaaaataaataaatagtaacattttttttctataacaatccgtttagatttagataaatagattttttatgtaatttttattttgataatatgtgcaattatttttagttattaattttaatatcaaaatttataatgagatcgtttgatatttttattttttacaactaaaattgagtgatttaaataatggatttggtgtatttaaataatagaattattaaaagaattttaaaatgatttggagagtaaaacataagtgatttttttttggactattaaatatatttgtttagatattttttattaaaaaatatatattaattatacatattaaaaatagataattatgtaaaaaagctaatgttaaatttaataaaataaaattttgaaagaaaagcaaaaacaactaagcattgtaacaaaaaaaaaaactaattaaaaattaatagcaaaatatatatacatggcatgcaacttgtttgaaaaaagtctttttattttttaattaaatttattagtagcgattctgatagacacacttggggctcgtttggacgtcgtattaagtcgtattgta

SEQ ID NO: 285495 - DNA, 949 bp, Cannabis indica
attatacaacctcggtccttacctgccaaataccccaacacataacagagatacgcctaacagtatccacatcattattcatccaatactcctaataccaacttgagaagcgttagaattgtaagatacatgtggttctattttaaaaccaattggcaagagtagctaatagatcttatatatgttattatctattcacacattagtaatataagactctctaacatcttttctgaagatggtggctattttttactcacaaagcttggatagttcgatcacaagttgctatttttggctcactaaccccagataacaagtggctcgtttggctctactttttggactaacttttaaatttttgctggatctttttcactcatgtcataattacaaaatgactctttttagctctactttttggaccgattttttaaattttttggtggctctttttggttctaatttttttcgaatcaactttttttttggatcgaaatcacgtaataggttttttttttttttcctatgattccatgttagaattgtttaatacatgaggtttccatctaaaaatcaattgactataaaaggggtagttcataaatcttatttgctatattatctttccacacaattaataacacgagactctctaacaaaaaaaaaaacccagcacccttgattgaagcaactcttggtaaaaaaaatactcaactaataataagctatgaaaaatagactcatcaaatattacacatttaataaatattataaaacctaactagccattgaaaaagtttcaatagttattagcaaatagcatgaaatgatgttgagacaagacaaatttattgataggaggatcttcgatcttttctctatgatgtacgcaacgctagtttttttctcaataaaattttgttcattagttcaaaaaaaaaaaaaa

SEQ ID NO: 285496 - DNA, 509 bp, Cannabis indica
aacataaataactgctaatttccaaattaactaagcgggctttacaatggatgtcatgaacaccctcattttcgatcggtctttgaaagaggtaatcctgttgttttttacactatttccactgttgttttaatgttgtttttatgtacatcatttatactttatgttttgattgttgttgttattttataatttcagtttcatgtgcatattgttttttgttggtttttcttgtttcagttaaaattaagaaacatcactccaacttccgttgagagattgagtttgagcctcactgattttttctctggtgagactactcccgaggctgtaaaattcaaaattaaaggtggttccaagcctgctggtcaacctggcttgatgggtgcttcttcatcatctgctcatgagaatgtctcccgagtagagtttgaggaatttaaaaagtgtttatctgttgttgtcagccagcaagggatacttatgaaatctgttgctgagatgaacaa

SEQ ID NO: 285497 - DNA, 545 bp, Cannabis indica
acatacttgtgagtagatctatgatcctggtaaaataaattccgacagccatcactatctatttataggaatccaactaggtttaggttttaattatttggcattaaaaaattgataagtaaatggtaaaataaagcataagtggcttgccatggatgtgggcccccactttgtaatttttctatttttcaactatttatcttattttctcaaaaatgccatattttctaattcaaccacttaaatgccaaaactatttatttaacatatttattaataagactttataaagtctcataattaacaaataaaccctagaatctcttttcttcaaaattaagccttagcttagtgaaaattcataaatgagacatagtataattttagaattataattgacaattaaaatcaattaaatgagtcttacaagcagtgttgtctcaactagtatggggaccatgggcctacacaaccgagcttccaataggcagatcaacaatttgccaagtaaattccctaacttattaattccttattgcatccac

SEQ ID NO: 285498 - DNA, 588 bp, Cannabis indica
gagctgagccaagaaaagcaccttgtgaggaaaaaaaatgcatatctggccgcggctagatcatgaagcagacgcaggattttcgaggctacagtcgccgcggcgagatacaccctcgtcgtggccatatgaaagttacaaaaccgtatttttgaggacctatctggccacggcgagaccatacttggccgcggcgagatcccgtacggcccaggggtattttcgtccgacgaaccctaaaaattagatataaatagaaaactacgattgtaagtcaagggaagcgatttggagacccaaaaacacagcagagagcggcaggaagagcagagtgattcaaagtgaagaccggaattcatccaccaacagtttctttctttattcctctttaatttatttatgttgaatattgtcataggaatggttatggatttatttctgaactaaatttcccatttagggaggatgatgattgttgtttaatgtttttgcctagttaatgtttaattgccattcctccattcttgttgtgaaattatctttatttgtgctgtttaagattgatcaccttgtgcatgctttatgatc

SEQ ID NO: 285499 - DNA, 476 bp, Cannabis indica
aatcaaggatcattataatcatatattcttacatccctaggccactgagattacaagaaaagtgatcaacttcacaagcaatataacattcattcaatcatactataacaaaatgtactcaattacaacttatcacataataacactcttgattcatttcacaacatcgtaactacacaatttctgtacttcataaagtactcttaccactcgttaaccacgagctatatatgtcactatcgttgcccgatacagcaaacgataagtaagaaacctatccgcggtttcaaaagtaattactcataacggtaatgaccgtttcctttactcgatcataatcgagtcacaacgataataatcgtttcatattattttccctcgatcataatcgagtcacaacgacaataatcgtttcctatcatttctctgttgggttttgtgccctaataaaacgtcatttcaatataatcagattt

SEQ ID NO: 285500 - DNA, 844 bp, Cannabis indica
tcacactaaagagttgttcatcaggaaattgctcatttatctgtacttctttcgtattctgactcttttccagctctagtcttgacaggtgatctgctaccagatttttagtgcccttcttgtcttttatctttaagtctaactcttgaagtagaagtacccaccaaatcaatctcggctttgcatccttcttggtcataaggtatttgaaagctgagtgatctgtatagacaataaccttattcccaattaggtagggttggaacttatcacatgcaaacacaattgccagcatctctttctctgtagtggcataatttaattgagcatcattcagggttctgctagcatagtagattgtgtgaaacaccctgtcaaccctttgacccaagactgctctgattgcataatcacttgcatcgcacatcaactcgaaaggcaactcccaatttggtgaagtgacaattggtgctgaaatcaatttttcctttagaaccttgaatgcctttaagcaatcttctccaaactaaaatggaatgccattaacaagtaaactggacaatggtttggagatctttgagaagtccttaataaatcgtcggtagaaaccagcatgtcctaagaaactccttactccttttacagaaactggaggtggcaaattctctattgttgaaactttagccttgtccacctcaattcctgcttttgaaattttgtgtcccagaacaattccttctgttaccataaagtggcacttctcccagtttagcaccaagttagacttctcgcacctaattagcaccttttctaaattttcaaaacaatgatcgaaggaggagcc

SEQ ID NO: 285501 - DNA, 541 bp, Cannabis indica
aattatatcaaacaacgtatccaaatcaatagacatactcccatattccggatcatcttcattaaactgaaactcctcaaaaccactcaaactcttattatccatcacaaaattcgaactctcctccgccatcatcaacatcaatcaatcaatccaatccaatcttctttgaataaagaaaaccctaatcgctccgacgattccagttttgacaaaataaccgaactttttccacgaaatttaccaaccaaaacacaatcaacaattcgaatcaaagcaaaaacaaaatacaaaatcaaaatctctgattggtttccaagaaagttcccaaattgatgattttttttttttttttttttttaggttttgagtatgagagaatgacaaagtcgtaagatcgtgaaaaatatggtgtgcgtacgattaaataaaggattagtcatatgtgtgcgtaggttaacgactttttctctttatttggtcttttttattttttattatttttttttggaaaattaaaaaataaataaaaattttaaaa

SEQ ID NO: 285502 - DNA, 518 bp, Cannabis indica
cccgccctcgtgttttgggcagttttgagttgattttcgaaagttcgtaacttttgattccgaactccgatttgggaattctttatatcattggaaagctcgtcccgagctctgtatgataatctgaattgtaaatgccatgcttgaattttattgagttgaaagtctggggttaaccctaagtgtgaattatcccagatttgtgtgactaggattactggcacctgatcaggagtacccggggattcagaatctctttctcttgctggacaacaagtaagaaagtgattagcacgtagagtatgcacggtggcacttatattgagaatgatatggatgaacgattagtaaatgggcatgttgacataggtctacgccacgtagacataaatgggcatgttgatataatgatcaggtctgtgctatacagacatatgtgaatgagcatattatatttgttatgatttatactgtctttctgggcttggctcacgggtgctctactgtgcaggaaaggg

SEQ ID NO: 285503 - DNA, 715 bp, Cannabis indica
tactgttttttttttgttattcttttatgatttttatagcatttttgtttctttaattttctttgtttctttgttatatttgctacataatgtatgtttaaatcaattctattttttgagcaagcaaataaaaattaaatgccaaaataaagaatgaagttagaagtttgattattaggtattgatataaaatttatatgttcaaaactggtttttaaatttagtatcgtttgtaaaagtttagttattaggcattgtgtatttttcattatgttattgatgaaactatttttttttcctattttaatgaaataatcagtttcttttaatattgatgaaactggttttaaagttagtatcgtttttagattgtaatttttttcattatcttgttgatgaaactatttttttttattcttttaatgaaattattagtttctttcaatgttgatgaaactagtttttaaagtttgtattctttttcagattatgattttttatattgtttttttttttcatgatgatgttgatgaaactggtttttttttctgctgtttttaataaaataattagtttttaacaaaaaaatagtagttaaaaaaaaaaaaagttaattaatgtaaaaaaataagaatacaaaaaagtacactaattatatatattcataggttttaactattctgtaatgaggttgctctatttttatgatattatt

SEQ ID NO: 285504 - DNA, 533 bp, Cannabis indica
attggccgttattttgtttggtacatttaataatcttctctcttattctttttgctctatataaatttgaaattagattttgttccttttcaaatgggaaatttgaattattatgcatgttttaatacataattagtttggagaacacttagttagtgtaggtaatttttaaaataggaccaattttcaaaacctcccaaaatagccttgtcaaaatcccaatccctttctctctcttccactcaaactctctctcggtccctctttcgttcatgcccgatcccagccgcctcacacaatccaacttcgcccgaaccccagccacctcacacaaccaccgcgtcgtcaccccctcaccaccgcctacgacccgacgatctccaccgcgtacgacagaaaaaaaaaacaaacaaaccctcggtccgatgggtccgattggcccaatatggtagccatcggaccctatcgggtctaatcggaccgcacgaatcggaccatcggaccatcggacccaacccaacgtgaccatcgga

SEQ ID NO: 285505 - DNA, 567 bp, Cannabis indica
atttttgctctatttttatctatttttttattccaaataaatcaaccctagccctatgttaaattagtataaaaggaaagatatggtctcattatccaattaatgcttcaaaaggctttaaacctagttttctttctctttgacaactaggtttatgagacttcttcttcttcctttcttcttctaatttcgagttcctatagctttcttcactatcaaatttgagccttagtgattaagtgcatgcctgttgagctttttgctctaaataaaactcaatttcaatgtaatctctatcatttaaatatcaataaagagacagaagtattttcatcacttatttaatgtgtcatttggttcatgttatcatttatatgtttatttcatttataaattcatcctaaacccttatcaaattaatattcttgtttattgtgtcgtcaacaaagtggaaagtaatcaagattgtgtgattaaatttatattcctagatttatcagtacaaagggtttaacagatatgataatctacaacatagtttgcttgcgccttggataagtgttatgt

SEQ ID NO: 285506 - DNA, 638 bp, Cannabis indica
gggaccaaatcgcatcatagagagttgatctctatactttcgtagaagtatagagaggatactcgcatatgtcctgacacatgcgagttggatccatcctgcgtaatgcgagttacagttatgcgatccgactttggtcgtactcgcagtatctcgctggtttcatcctgggtgaggtctaaacttcgaggattctctcatggacatttcagctttcattagaaatctgaatatacgtgtcctctaaataggagtctggtctcgagtttctaggtgagagaaatctcactataacagaagaggtaatgtaatgttgatttctttagtttaagtttttatccagttaactaactgtttataacgaaattgaggtgtcaatctatttttttgatggatttgtttctatggatttggttgtcttgtgtattactgaattggtttcctaatgtacaatgcagtttgctcctatcgaagccagagtggaatgtgttgggaaaattgtcacccacgagagtaacaaggctaaacatgctgtgatggagggagttaagaagcaatttggattgagcaaaactaaagttcttccatcaacatctacaacttaaccattacgtggtccatcaaggtctcctcgagac

SEQ ID NO: 285507 - DNA, 439 bp, Cannabis indica
gtactttatgtcaatgtgtttagagcggaaagtacttctaacattttagagaaagctactgctgcgaaattatcacaatactatttcagcggcctcgtgataaagtttacaacatctagtgctgaaatgaaattccgcagccataatgcttgacaagtagcctcatagcctcataacatgccatatactctgcctccattgtggatgaagctgtgagtgtctgcttgacacttttcctcaatacagctcctccagccatcatataaatgtagcctgaagtggaaccttttatcgtccacgcatcccacataatcggcgtcactgaacccaactatatccaaagtgtcaactcgccgataggtcaacatatgatcctggtaccctgaagatactgcatgaccttcttagtgttggagtatgttttaccaggatctagatt

SEQ ID NO: 285508 - DNA, 628 bp, Cannabis indica
caagcacacagtttattttacaatttcagaacacatcacactaatcagcagtatacaactatcgtcaagcttattgccattccttaactaaaacagaaaaactaaaacagaaaattaaaatgcagaaattaaagtgcagaatttaaaaattttaagtctctccccccaaactaaatatgacattgtccccaatgtgctattatactcaaggtgagaaggacttacctgaacccccatcagaaggggttgggtggtggtggctgatcataaggctgaaaacgcggaggatatgccaagtaattcgggtcctcgaccccaagactccacgaatcaattaaatgattgaactgcctcacttgattttcatcaaattcacttcttcgcaccatgtaactctggatatgattgttttgctggataatgtagttgagttgagcatggatatgttgcatccccgcatcaaggggagtggaagtgggaaccgcttgaggcatttcttcatttggaatgttctcttcctcggggacatgaatttcttgctgcggagtacgacgtggaggaggcggttggccatagggatgcgggggtttaaggtttcgcaccattgtccaatcaatattccgttgtg

SEQ ID NO: 285509 - DNA, 629 bp, Cannabis indica
tggggttctaatgtttgagtttgtgtttgttccttttattgattattaggattgagagtttgattttttatacgggaattaaagtttgcattttcgttgcattaattgaaaaatattagtagaaaatttatggaatgaaaattttgaatatatgaaaatagaattgaaaaatagcatttgaatcaaaatcaaagtttattgttaatctgcttacaaaagaaaagtttattgttaatctgtaaagagaatatagctagaagaatacttttcttatattcggcaagtaaaaaaaaagcttcacacatatatatagttatgaatacatatatataaataattgaataattatttaattttaatattattaatttagttttatatttattattatgtattttttaaaaaataattaatttttaagatagatattttttattagaaaatttattaaaataatagtaaaatattttgtaaatttatgttctaataaaatgtttaaaaattgagagaattaaggagaaaaaaaataagactttagagagattttagaccgtcacgtcactgtcacgtacttctcttttatatatatagatatatagattagactattaataatttacaaaaataac

SEQ ID NO: 285510 - DNA, 389 bp, Cannabis indica
atatttattaattagactaactaaagtctcttaattaacaaatgtaccctagaaactctttcttcacaattttgcccttgctaagtgataattcacaaactagacatagtctaattttagaattataattgattaatcgaaatcaattaactgagtcctacaagtagtattatctcaacaagcaaaccaataagcaaaccaagaacttaccaagtatattcactgactttttaattccttgttgcatccatgcatagaacctagaattgcactctcagttatatggaatgctctatatgttctaccatatagatacactattaattatccattgttataatccctatttgatcaatgatgctctatagaggatttacattgtataggga

SEQ ID NO: 285511 - DNA, 486 bp, Cannabis indica
aaatgcacataacaatcaagtgttgcaaattcaacatacaaaaaaactaataaaaatataataaatatatatatatattatatttttcaatattatttattattatatataatttttttaatgtatataaatgtaatgagattggatcaagttttttaattagattttgagattgacatccaataaccgatccaatccaattagaatccaatttttagcatccaatccaatccaattataattggatatctaactttttataattgaattgaattgaatcagttcggttcaattagattggattggatgatgtccacccttaaataccacttaatgtacggttataaatattagtcatatttgtagcaagttatgtgtaaaaattaattaagataattaagattggaactgtcaggatgtgaaaaacaccaaagagtgcatagtacactctttttttttggaggtgcacttgtttacaaacttttt

SEQ ID NO: 285512 - DNA, 525 bp, Cannabis indica
ctatttattttaacataaaaaaattcatcagtttaattttttcataattcggctatacaagataacatgtaaattaattttgagaattctaaatagtttaccgtgtcaaaaaaaatttttcagtttaattttttgtcgcatgtaataaagtattttaattttattttaatattaaattttactcctaatttttaaaaatttattaacaatcttaaataattataaaaaaaaaaaactcatctagtcgaaatacatattaaaaaaaaatactacccaaaaatactcttataaaaaaaattatgaaattatccttcaaattttatccaaaagggaaatttacggcaaaagtcctcaaaaagttcagtttgatacaaataagtccccaacctccaaaaatagcggtaatagtccccaagatcacattttttgtaagtccgttggtctccaagttaacagatccgttaaacccaattcaaatgccacatgtcaatttttttattggtccaaataataattttaattaaa

SEQ ID NO: 285513 - DNA, 198 bp, Cannabis indica
catttcgaaaattgaagaaggaaaagagaagaagagggtgcggctaggaggctcaggtttttctctgaaaaagaataagatgcatgtgcatagtttcctgaagccatcactttctatttatagaatgtcatctaggtttaggttagaattgtatggcattaaaataatgaaaaatataaatggtaaaccctatacaaa

SEQ ID NO: 285514 - DNA, 583 bp, Cannabis indica
aaaaataatgacaaagagatagagatggagatggaggtgatagtgaaggaaatgaacattaatattacttttattaatttttagacacatagggagagcatgactaaacctatatatcatttaacaaaaagtaaataaaaatgaacataaaagatagaaatgagcaatactaccattactataatcactaaataaaaatatatagaaagagcatgactaagtctatatatatatttggtataatagcatagatagtatagatggaagaagaacataaaaataaaagtggaatatgaacttgcattactcaaataaacattacaacaaaaagtgaatcaaagatacaaaataacctcactttgcatatggaatcatccctaaccttccaaggaagattaggccattatgctaatcattctcataaaatttctaaagagaaaagatgagaagaaaagttgagagaattttgctatagtttttctacactaaaaattacacaccaaaaattactaaaatgagctcctatttatagagccataaaaggactaaaaataaataaataaaaatttgggattataaaata

SEQ ID NO: 285515 - DNA, 984 bp, Cannabis indica
  modified_base (938)..(938): a, c, t, g, unknown or other
  modified_base (969)..(969): a, c, t, g, unknown or other
tatttattataacattacgaaaaaaaaatgaagatctcttataacattcaaacattaatattaagatggtcttaataattcatttttgattaagacataataattaattattttttatattactttaaaaaaaaattgttaatattatgcatattaatatatacagaagcatatattatattagtacaaaactaaaagaatgaacaaaagaaaaattattaactattttgtaatttgtattaaaatattaggattagaactaagtatcacaaaatatataatttttattttaaattactactaataaaaaaaacaaaattgaaataaatatataaaactcacaactaaaagtgaaacataatgaaaaaaaaattagagaatataaaatagtaatgaataataaaattgaaaacttaaatgattaaaataaaagaaacatttaagattatagaatgtaaaaatttttacatacctcacttcatcactttttgtaagaaacaactactaaaaattccaaacctattcgacacaaaaataaactttatataaaagatataagaagaatggtgaaaccaagctaacatacattcaaaaaaaaaaaaaaagtaaaaaaaaatataaatagaaataaaatataaaataaacacataaaggaatccaaaaatgaaacttttaatcacctttaccattattatcatcgtccgtgtgactacaaatttcaagatcatcaaatcttcaatataattctcatcttcaagttttttgtagccttcaacatatcttttttttttatttaagtcgttttatatattacaatttatgttttacttgagattcgaatccaggaccttccaacacacacacacccacctatagccacttgagctagcctcaagtggttaaaaatttacgggtgcaacacctgctatccttcaacntattcaatctaagttttatatttttcaaagntaaaaaagaatcgaa

SEQ ID NO: 285516 - DNA, 356 bp, Cannabis indica
ctggcgaagctgccgcgcaagagggaacagagagagagaactcaggagcgatatagagagagagaggagagaacaaaagagtttacctggcttagtggaaacagtgactggagcgactcgttgaggttaagctgagagattgtgagagaggaagagaacgggagagtcatgagcggtgggtgagcgagggtcaatccttgtctagtttttttctagccctgtagggagcaagtgagagaaagagagggggcggggggggggggggggggggggagagagtagtgagaaggaaaggagagtagtagagtagtagagtagtaggtaagttaaggttttagggtttttaagtttaaact

SEQ ID NO: 285517 - DNA, 696 bp, Cannabis indica
acaatcacaacactataagtgatatgctaaatcacttcccagggacttaaactagaaactaaaagtttccccatcgataaaaagcatggcaatatccgaaataacataaaaacaaggaaatctagggttccagaaaaatccccaaccggtagaccggttttgcaattggaattctggttctgggaattcttaaaccctcatccagaattccggatgcacaaccggaattccggttcctcgcaggcagaactcaaaaattcacacattgctcaaatcaaatccaaactataccaaaacttccagacctgctatttagaccctaaggaacaattctaaagcataaaaactaagcttcaaccacagaaactcatttcaccattaaagcttcaagattgagttctaaaactcaaaacttgtctaagcaacaaatcatgcatccaaaacagcccaaaactacttaaacatgctcactaaagctgcagaaaataaacacaagctcatgcaacaatcacagcaacagatttcgaaaattctctttgaaaactaaactttgagctaaaaacttccaatcttgaatcaaagaaaaaaccatgcattaacaagctctaatctacttaaaataacaagattaaacctctgcaaacatcatcaaaacctaacagcaactacacaaccaaatcaagcatgcaacatcat

SEQ ID NO: 285518 - DNA, 580 bp, Cannabis indica
tagaacctaaaagatctgaaaagagttaggttaattcataatctgtcattcacattgagaaaaggatagcaattaggtattaacattggtaacttaacaacaggattctcctccctaatctatcatcttgattaatcttcatctattctttttaattttctgaattgttttctttaaattgcaaaaagtattattttaccagatagaatcataagtataattcagtattacttaatccaattccctgtggttcgacctcacttgcgtgagatactacttgattgcgtatacttgcgtagtaaccataattttcgtaacatgaggcttattagaaaaagcccggcgatggtagaggtggggattctgacgatgaaagcctcggtctcggagaggtggggatttcggagttgaggaggtcgacaatgagaatccgaggggtgatgaagaagacggagatagaggagtagagagagaggcgttggtgagcgggaagattcgggagattgctctcgctggttcgaggagatggagccggttctgggtcgtcgacttcgtcgtcattttgatcgagatcaagagg

SEQ ID NO: 285519 - DNA, 1332 bp, Cannabis indica
ccgagagaagagtcaatctcaatctcttttctcttgatctgccttcgataatgtttttgaggatgtagcaatccgacaatgggtgactcacaatttggtggtaccgacaataatttggatcatttgtcataccaacctcgttgggtcgtttcggctcggggagtcgtattgccttagcttttaacaactcatcgaaaatttggtcgacatcatcatcgtcgaatgaatacttaacttctttcctttctttgagagtttcttttgcggctcccgtgccttccctttatctttgttgccggtattgacaaaagttgccattgattctcccttcttgaatggctttttattttcgaatctcggtgagggtttgccacccctttgtcgagaaatttgtatctcaacgttgcaggccttcgagacgagctcattaaaagttttgggttctgctgtgcccacaaaagttgccacctcagggttgaggtttttggcgcacattgaaaccgccgcttgttccgatatcctttctggacattggagattgaggtttctccacctggttatgaactcattagcgctttcactaattcgttgctttgtttccaccaggtcatggagacttatggtcttctttgagctcacgaattgtgccaggaaagctttttgcatgtcatcccaagtagttatcgatcctgggggtaactgagtataccaggtgaatgctgcctcttttagagattgcacaaattgccggatcaatagtgcatctgattgggcagattcaccacatgcagaggtgaaataggccaaatgctcatgaggagaaccattaattccatcaaacttttgtctgatgtagtttggtggaaatggaatttgatcatagtaagccgggtatggcttatgatatccaagaataggcattgttgcagcctgatattcccgaataccctccatgataagagccttcaggtcctgctgaggttggacaccagctagtggtggttgcacaccttgtggtggcggttgtgtgttgcctacaggcggcactgaggacgaggattgttgcccaatctcactctccttttgtctcatattaacttgatgagataattctgttgagagtcgggctacttcttcgtccctctcagccaataacctttgcagttcctgaatcttctcttcattactgattgtcccagttactaacaccggcatatttttatcattgccaatggttagtgcttcgaactgagtaatgagatcagcagacaccccctcactgtgttcaataaggggagtgtcttctaaagagtgtccagatgtacacccttc

SEQ ID NO: 285520 - DNA, 652 bp, Cannabis indica
ccgatcaatgctagagacccaacaatatgttgtaagccgatggcaggtcaaaaactaggaaatcttgcgtaacagtggcggatagggatgccttgcccaaggtcaatgcgagctcaattatgcctagactggcaatgctgtccctagtgaatctgcaaagattcaccatacaaggcctcaatttggctttttcgagctccatctttctcagcatttccttgtaaaggatatttactaagctcccgttttctattaacactttcttgatccttttattggcgagttgaatggtaatcaccaatggatcgacgtgaggatatctcacatttttctcgtcttcctccgtgaatataattggtggttcttcggttttcactttcttggattgttttggggcaaatgccaactgaccgttctttattgctttcccctgtgatatgtggccctcttgaaataaccaggatgtcctctccttcaacaggaagaggttgtaacccctgattgtttgggttattgggcagactgggctggttgtatctgtggccctattttttcacgtactgtttaaagtggcctcgagcgatgaaactttctatctcatctttgaattggcaacattcgtcgctcgtatgcccaatatccttatggaatt

SEQ ID NO: 285521 - DNA, 506 bp, Cannabis indica
tcgccgcggcgagataggtcagttttccctttttaaaccccaaatccctaacatttcaaatcaaaccccacattcaaaccctctcttctccagccgaaaaccacccttttcaccctaatttcttcatctaaccccattcaaaccaattttcctcaaaattatccataaactttcatcccaaatcatcataatcccttatttctctcatctaacactcttttcctctaaaaatccattccaaaatccctaaacctcacccaaatttcagaaaaatcactattcaccttcttcttccctaaagcttcaaggttctcatcaatggaggttgactaaagagtgattttcattgaggtaacaaattttaatttctctacacaagtttgattggattatttgtggattgctagagaatattagactttgtgttgaaatttttggaattgttgatcatacattgttgaacattattgtggtgagtcaattgaatgtgattgtgaaagggttaa

SEQ ID NO: 285522 - DNA, 552 bp, Cannabis indica
tataatcattacttttattgcatttatggtgccacgtcacaaaactcttcggtttctgtgtaggtgtggccatctttggccgttggattgggcgactctaggcattccaatcgccacgtgtcgtgatcccagctaatgagggatttgggtatttaaaccctctaattcgaaccaaaaatccccattttccctcattttctttaactcccttaactcccttgttccctctctttcagagaaaccagcaaaatttccataaattgcccagatttttgtttttctttgtgggctttttctcgattctccagtgctgtcgagagcaattcgtgggaacagattactagaagtaaatgttagttttcaaaacttcgctgcatttcattttctgtttgagagggaacactgttttctgggtttttaatatggatgagagagtttaagaatgaatgtttgtaggggatatgtatgaggctacgttttttaggtaaaaaactgggtaatttcagaaaaatgacctaaaattggcattaccgcatactgtataaaaaatgc

SEQ ID NO: 285523 - DNA, 538 bp, Cannabis indica
tattcagggacagtttacccaataggacaccaaagtgagtgggaggtaccggaagaagtgaagaatattatagtcttgcctccacatgaaagagtaaaatcaggaagaccaaaaacattaagaaggaaggctggatgggaaaaggatcaacacaacaagtgcagcaaatgtggtgaactggggcataacaaaagaacatgcagcagaagacgtagaagggaataaaaacaacaacagaacaacagtggaaaaacaaaagaaaactacacatacgttttgagaatgagatattgaggaatttaaatttctgaaatacaaagggaatacagtttttatttgaaaaacattgattacattgggaattgttgatactttagattggatattaaaagatgttggatactaaattgaatatatatatgaagtttgttattgaaacagtttgtgtttttaatactgaaatgaatatttgtattcaaaaaaacagagaaactataagaaaaaaaaacaaaaaaagaagggatgtgaaatgaaaata

SEQ ID NO: 285524 - DNA, 707 bp, Cannabis indica
ttattttttaattgtatgaatttttttttgatgaatcaataatttcattgtactattaactcttttgattacaaactagggctcagagaggagcaaaacatctatacatgtataatttgaaaaaaaattataattcactaaaccaatctatatccttttggtctacacattggggcattacacaagtaattctatttttcactaaccacttgatttcttgcactactatcttcgaatctgtatcttccttgcaccagtattttttatggcattttacaattttgtatacattattataattaattacaaaatatgtgcaaaaaaaacttatttgttataatataaagtagatgagaggaaagaagaagaagatgaagagagaaagagaaagtgaatgagaatgtaaagaccgcttagtttaatttggaaattagcagtaaatattgattaattatgaaaattatttatagctatttaaataatttattttactgttatttatggaattcagaaatgcatggttatgtcattcagtagttttcatattttgctattttcgatgtccccggtattttggtaacccggcgttttggctcagtaaaaatcacaacttagtatgttaaggtagtttggggggttgttttagacattgagaatgtcgggaatggccgggaatttagaatttcccaaaaatagcccctttagtg

SEQ ID NO: 285525 - DNA, 534 bp, Cannabis indica
tttccaccgggtttttctcaacaaccaagacctcaacaacctcaccaacctcaaggctctcaaactagttctttggagagcttaatgagagattatatggccaagaatgacgctgtaattcaaagccaagcagcatctcttcggaatcttgaagttcaattggggcaattggccaatgatttgaagaatagaccacaaggcactttgcctagtgacaccgaaaacccaagaagagatggcaaagaacattgcaaagcggtaaccttgagaagtggaaaaataattgagtcaaatgtggctgcaacaggcagtaaagagccctcttcaatccaaaaagaggggggaaatgaagaaaaaaccagcaatttcagctgctgaaattcccccaatagttacaacatccagtcagcattctgctgcagaaaagtctttgcaaaagccacctccaccatttcctcaacgattcaagaagcagcaagacgatggtcaattctggagattcttgatgttctaaagcagctccacatcaatata

SEQ ID NO: 285526 - DNA, 409 bp, Cannabis indica
tacgtgttttgtaagttttcgtctctattagactatcccctacggtgactacttagagataaatttacagaacatgaaacaatagtagaagctcataaaatgagaataaccttgactctcgcctacccggaaaacgttagattctcattttgatcgaataaaaagttgctaaaatggtgttcattttagatgagctgactactctattcaactaatgttatctttgactcttgcctaccgggacattgtattttattatgttggaaaccttggaaaataataaatatgtttagtttttggtatttttgcaaacatatttgctatacttgttattttctgaatttgtgtatttattatttaaccaaatgatttacttctatttattgatatttgtgttggaaattatttt

SEQ ID NO: 285527 - DNA, 547 bp, Cannabis indica
tgtgtagctataatagtatgtgtctttgattttatgagtatttaccattctttcagtgcttctgcctcggggagttgaggattgattttgaaggtactcgtgtcgcgtgacgatagagacatccctaaatcaaaatgtatgtgttaattgaatttttgaatttttgcttttaaatatcagtagtttaattaatgcaataacctctcttggtttgaacaattagttttgatcccaatattatgggtctgtcttcgattacttctgctatttgtaagcattcatcgtggactttatgcccccacatcgtcaaacatactggtttgaagctacaactttgtaaagaaataaaaaaatgtattagcataaattttgttaaatagtatttaatatatcgcaataaaaatgaacacaagggtgtatttatagtggtagattaaatgtatagtttacctttcatcaattaaatatatctcttgaattgtatgtggtccatagggagtgttgacttcttttggtgggttcattttgagagcaatagccaaaatat

SEQ ID NO: 285528 - DNA, 498 bp, Cannabis indica
tctgggaattttcgaagcccatccggaattccggatgcacaaccggaattccggttcctcgcaggcagaaattcaaaaattcatatctcaaccaaatccaacccaaatcatttcaaaccttccagacctattccatataacccaaataacatttctaaagcattagattcacccagaatacacagaaatgaaaaacaccattaaagctcaagctttgagttccaaactcaaacttgagtaaacctaaataacatgcaatcaaaccagctcaaatctacttaatcatgcataattaaacctctgaaaacaactacaaacttcaacaacatcacagcaacagaattaaaccatttctctttgaaaaccataatttttgcatagaaaaccttagctttgctcaacctaactatcatgctttacaacagctcaaattaactcaaataaacaagctttaaacctcagaaatcaacaacaaaaatacagcagcaacaacctcaa

SEQ ID NO: 285529 - DNA, 593 bp, Cannabis indica
gtctttgactttaaattttagtttccaaatagagattttatatttctatttccacaatacaatacagttacactttcacaagtgtttaataaccatttttctatcaatggattcaaactgtatgttaaagtatggaatatgagtttagtattttgtgaccaggatccacttggactattctaaaactctttattgtaactaaacctaagtcatcaaaagactacaaccacataaatctatggcatttgtatcttgttcataatggttttgacaagatcattctctacaaagagtcaatatgcctatatccactgaaagtataatcatctcatttgcagatggatgtttcatcgggacatcgttatattcttaagatgatcactctagattttaccttatgcaaagaaatttgaaatgtttaaaaaatttcatgaatttctagcaatggcgaaaaccattaaggtaagtggttaaagatcttgcgaactgataggggtggagaaccatttggtacatatgcagttcaaatatcattaagttgatttttgaattatatccaaacttatcttcccagaaattcgatttgcatattg

SEQ ID NO: 285530 - DNA, 655 bp, Cannabis indica
taaacaaataaataaaattgatcgaaaatgaagtttcccaaagcaatatgttaatgatgtcagtcatgtatgtgttgaggtaattactattcccactagtggtgattccaattcaagttttaatattagtcacaatgatgatgctgtgagtcgaacattgagagcttggaggtgcctgtttcataaggctaccaaccattatgaatgtattatcgtgaaacacttaaaggtgtggggcaatgaaaccaatgttcgggatgtcaaactagatatcttgtttttatcttaaactattgagtctctctctcaaatggaattacttcgtgttcatttgagattttacgaaaaatcagtggtaaaaagaattggtagagcttatggacaacttgatgtctcttttcgtcctacttttggattttgatgcagcttattgctcataactcctatccttgggtttatggtggagactagaatgaaattttatcgttatctgagaaagatggtagagtttttaaatacaaggtacctcacgaataatatttgccaggctttttttttgctggaaagattacttcatagaaaaaaggcaaaaaagccacaacacaaaacagttttagaaggcaacaagaggtgccaactcctcagcattgaaaaa

SEQ ID NO: 285531 - DNA, 978 bp, Cannabis indica
gaagccagcagactacaaataatcaaatagggggtcgttcacgatttgcaagcatatgaggttcacgattatagatatacctagtgttatgatggtgcaggatattaatgtaccaaccgcaccaacagcacgatagttataaagttcttgaagaactgcttctttttcacttgaaacctggcacaaagatcaagatcaagataataagttatacagaaaccattactgacgtgaaagatgaatagaaaagatccttcagtattgcatggaaataaaagtacacacattggaagacgagggacgttactcctctaaatatacacaaattagataaaaggaaacaaccacactcaccctgcattgaatataataggaggcagaagataaataaagaagagatcttcactaaaaacaagaagatgcgagctctttcccccgctaatcagcaaaataacaactccggtacacagaccctacaaccaacccagcataaaatcagcacaagaaataaaaatcataattttattataatttgttttaatagacgaaatgactcacaatcacaagagctgtgattgactcattcatccatcgattctcctccagaagatgaccaatcacaatacaagcgcacagaagtgccacaaagagattcatggagaccaccgacgcatgatcggaagtagatagcgtctgcaactttgagaccgcgaagcccaacccaacagtcattgtgtcagcctattctccaatcacccaatacttaataattttatcggactcaaattataaatgcaagagattcaaatgcccttataagcttaataaatctgtaatctatgtctccgaactgtccatggaacttctgaatctcgtaaagccttacgattacgaaacctgcatcagaatgaatcaacaaaccatcatgcacgcacaacacagaatcgttgaattaaaatgagaagcaaagtttaatcc

SEQ ID NO: 285532 - DNA, 796 bp, Cannabis indica
ctgtccgtagagagactagggggaatggtagacagggcctggaaaggactcatctgcaaaacactatcagcatccgcacacacttcatggtatctgctaaaaatttccttcctaacagaatccacacaaggccttgtactagtggaatgaataatcctatttctggttttccatatacaatcaaagatcacaccggcacaacaaagcatattgactctcaagatagaatctagagaagaataaagagtacataagagcttacctatgttatcgccaagaatcgactcgaccctaactggcaatggaccggtaaaccagaccgcagaggcaaaaactacaccttgcaaacagatggatgggagtttctgaggcagcatgacacacagggcaaacgttctcccacgaagaaaagaacttgtcacccgtgggaagagtcttggtgcaatctctccaaatcatgctcaaccacagatgaacttttgaatcccaaatccatctccaaagcacattattgtctccaaatcttgatttctgatcaacccaataatgacaccttttgttggaaattattttaccaagaatctagatttactaacaattatgttggattaacaacctaatatgaattctaaaacaatgaaaataaacacatataaagttagaaaaccttaacagtgagtgcagcgaagtaatatgactcctccgttcagatctctagcccttgattcttttctgtagcgagagcatcaccaagatctgaacctggatctttttttctcctctttgatgcagaatt

SEQ ID NO: 285533 - DNA, 503 bp, Cannabis indica
ataataacaatttaagagtaattgttattatgtagagtataatgttcagatgtcgacacaagggcagcaatatcagaatacatcgcagacaatgccgacacaactatgggagcagacatctcaaatgatgccgacacatctaggacaagagacttctcaaatgatgccgacacaacaagggcagcagacatctcagatgttgccgacacaacaagggcagcagacatctcaaatgatgccgacactacatgggcagcagacatctcagatgatgacaagttcgcaaataccgccatactacccacagatgccggatgttcctggagatgctagtgatgaggacgatgctactacaaacttcttttagattatttattttaattttacgaactatcggtttaatgtttattaatatttcatgaacactaacttatatttaggtatgcagtactgtaatgtttgtgactcactttttattgcaatattagtgactctaaatattt

SEQ ID NO: 285534 - DNA, 463 bp, Cannabis indica
atctctctctcacacacaaaatatatatttataaagttacaaaacttaagcatcaagacaacttggggaccaacacattctaaagcttccttaggaagactcatcaaaacttatccatcaagactttctcttttcccacaattaataattatcgaaaaagaagttgcaacttcacaaatatagataaataaataaattaaataaataatttaagtcaaactccaacagataatgacagaagaaagaaaaagatagggagaagaaggtggatctcgatggttccaaagaataaaagaaaaagaaaaagaaagtaaataagaaaaacaaaataggcctgtttgggtaaccaatttgttttttgtttttttaaatttttactttaacaaaatacttgtagtttcctcatggttttggattaattaatcaaaaaatagattttttaattggctaccgaacaatacta

SEQ ID NO: 285535 - DNA, 514 bp, Cannabis indica
aaaaattattttgtcacctaacttgccaaaaaaatgactttacaaaccctacttgaaatcgcagtgtgtcgctctcctcatgcattcatgatttatccataacaaatatcctaactaaaaaaattcagtgtttagtaaccaattataactagttactacttacacaatgtaactaagtagatttctcacaattaattcatcttaatttatatattactaaaattattgttttagtttggttcaatttattaagttgtataagttgtaaaaattgtaattaactaactagggtagtgtttagttgatggtaatgttggtagaattgaaatgacttttcttaaagtgaatccacttatttgtttggtttgtcatttataattaaaaagtttatataaatgtgttatgttacctaatttcttacaactagcgagtaattaactagttatttatgttatgtacttttcatttaatatttatgttttttagtaaaatttattctaattctaccaaaatt

SEQ ID NO: 285536 - DNA, 301 bp, Cannabis indica
tcatactctagcctgtaccgatgtgatacgtcaaatagtacagaaccaccaaccctagccagctgctagacatactctagcctgtaccgatgtgataccttacctggattccgaattcaagtgtgccggtcaacctacatgcacgctaactgcacggcggtttacaggctcctaaaccataacaatcacaacacagataagtgatacgctaaatcacttcccggggacttaaactaaaaactaaaagtttccctatcgataaaaagcatggcaataccccaaataacataaaaacgagaaa

SEQ ID NO: 285537 - DNA, 332 bp, Cannabis indica
gaactcgtgcgacacacccgtatgcaccctacacaatccgcacagacgaccctgcaaaatccctcatcctcgcgcgcaaggctatttttgcagcctatttgagctgcacgtgcagccctagtggcagccaacccacaattgcgatttttgtgggatttttccccaaaaatccgatttcttgggatttttccccaaaaattcgattttttccaattttaaatatttccaattatggtcagatttaaaaatttgttaatttctttaatatttatatattatttaattgtaagattagatattttgatatttaacatattttaaattaaaagata

SEQ ID NO: 285538 - DNA, 517 bp, Cannabis indica
aaataatttccaacagatgcatggggggaatcctgacccagtccgtcagcagatccggacgcaagtgtgaaaaatcgagtatcgtctccacagggattgaaaattagaaattaatttgtaaaactaattactcacaaattggttcaaacaaaaataaaataaattgttgagaatatataaaaattaataaatgcaaactaggaagaaaacaagctagaattattaaattggcctaaaaatgcaaagttgatataattgtgcaaatgagtattgttgtaaattgatgatgtcaactaggaattaaaatgtcataatcctttttgcaaagtatttatggtttgaattctctaattaattagcatattcctttgcccaattaattttaagaataccaatttaagcataattccttcaagtcatacaaggtaaatcacacattcctatgctatttacaaatcacacttttccaagttgatattcatgcatcatccaagcaattccactaaccctatttttt

SEQ ID NO: 285539 - DNA, 562 bp, Cannabis indica
cacagaaacataatcacactattttcctccaaaaaccacattttttcaaagaaaactcaaactttgaacaacctagctactcatgcttcaaataactcaattaacatcaaataatcatgctttgaacttcagaaaataagaaccaaacacagcaacaagaacagccacaaaagcatgcatgcatcaacaatataccaaactttttctaaaaataaaagaggagaaagctagaagacacctaccacaaacaagaattcactagagctttgcaaaactagcttgaatcaccacaaaaatccagctccaagcatccaaaggttcagccgaaaagagagagagaaaagagagtgtttgctttgaaaatttccaatttttttctaagtgttgtaaaatgaaagaaataaaaggaataaagccatttaacccaaaatcatttcagccaacaattaacaattaaaataaacatttattccaattaataatcactaaaagacaaaatatcattggggcaaaaagaccattttgcccctccatactaaaccacataaatcatactaaaggg

SEQ ID NO: 285540 - DNA, 782 bp, Cannabis indica
taccaaagagcaatgaccacaatttttgaagacatgatgcacaatactgtcgaatgttatgtcgacgatctagtggtcaaaacaaaagaaaggacaaatcatcttgatgatttaaaacgagtctttgacaggctcaggcaacacaatctcaagatgaatcctttaaaatgtgcatttggggtaacatcgggaaagttcctcgggtttatcgtcagacatcgaggaattgaaatcgaccctgcaaagatcaaagcaattttggaaatgcctcccccgcgtaatttacgtcaactacgtggactacagggaaaacttgcgtatattcgaagattcatctcaaacctgtctggtagatgtcaacccttttcgcggttgatgcagaaaaatgtcccatttatttgggatgaggcatgccaaaatgcttttgaaagcattaaaaagtacctgttgcacccaccagtgttgagagctccaatcttaggaaagccattgatattatatatcacttcactcgaccgctccttgggagccatgctggcacaaaacaatgaggagggaaaagaagttgctctttactacctaagtagaactttagtaggggcagaacaaaactaccctccaattgagaaagtgtgtttggctttaatctttgctgtcacaaaactacgacactatttgctctcacatcctgtgactttagtgtcaaaagctgaccctctaagatatatcctatccaagcccgtgttgtctggacgacttgccaaatggtccatgatgctatc

SEQ ID NO: 285541 - DNA, 329 bp, Cannabis indica
taaccacaaaaactgaatttttgacggctaaactacctaaaccctggttccgttttgttctgcacaccactgtacaaaaattacagttaagtgtcacggtggactgtccacgtgtacacacttgtacacgtggtaagtttttagtggtccacgtaagattagttttaaaaaataattataaatttaaaaaaaaaattataattttttttaataatttatatattaaaaatagtttaaaatatttaaaaataaaaaaaaacttacttctctttctttttttttctttctttttcttcttcatctttcttcttcttcgtttatttttccac

SEQ ID NO: 285542 - DNA, 528 bp, Cannabis indica
attaaaaaatcatcacctacttcttgccacatttcccacgtgcccacctacttttttttttctatttcccacatgcccacctatatcttctcacctatttcttctccatttcccacactctaaaacgaaaatcttaaactctcaaaaaccccacccacacctctgcaccatcacccttctctctcgccgccttcctccctctctcgatctccctttcttcttgtctctctcgtccatcgatctccacccacccctcctcccgtcggtctccctctactcttcatcgcatacgtcagaccaccaccacctcccgtcggtgtccctctcatcttcgtctcatacgtcggaccaccaccacctcccgtccgtctctttctctctcttcgagctcggtataaatacatttagttatttatatacttatttatttattttgttattgtataaatttaatgtgttttaaagttgtcattgtaaaaaaaattaattagttgttttattttaatttaggtaaaattataaagctaa

SEQ ID NO: 285543 - DNA, 564 bp, Cannabis indica
ttttatttcgatctggaattatttttactagaaagtagacgaaaaattaataaatttggcttttacagaacctaattaggattttttataaattagttaagattttttgaatttgaatgaaaatatctgaaaccgagcacacacgtgcgcgtgcggatgggatgctcgctacggaaaagaggccttcagacaaggcgctgtcctccctccgcccatgtgcagcctctcgtgcgcacgattgcatactcccctagtgcaatcttgtttttgtgatatcttttgattcaaaagtcgtttttcattgaaacaaaagtcaaattttggtagaattttgtgtagaatccaaattttcaattaagaatctaattttcagaataaaattaatttttaattaattaaaattagttttagatattagtaggctttgaattttgaaaatttgatttctcacaaaaatagccttatagttgacttagaaattttagattattttatttattttaattataagatcagatattacattttttttttattaaatttgaatgatcttattttggtatt

SEQ ID NO: 285544 - DNA, 545 bp, Cannabis indica
aaaaaaatgctagacattataataccttttaggcttttaatattttcatctgtcaatcagtcaaaatataagttaaatattatacttaaaccatttcaaaaataaataaatatacattatccacaacatacttttatattattaaaagtaatttccagtgaatcttttttatatcttaatttatttatatttaatttttttatttttttttgggcaaaacttttaagtttattttttttttatataaatttgacacgtcaactaaatattaccattaaatatcaattggatgaccactatatgtaattatatatatcatagtaaaattttaaaatcgttacagtaataatccaattactatttaatgataatatctaattggcaccttaaatttataaaaataacataaacttaaagagattttattacaaaaacgacaaattcctctattattaattatgttttatataaaaggaaccaactcaaatttatcattttcccatctttctaaatgctaatatactctttcttttttttttcttttt

SEQ ID NO: 285545 - DNA, 455 bp, Cannabis indica
agattccatatctatgatcaatgctcccactctattgaactaccatgtccttaatctgtatatcacgagaagatccaattggtcgactttaacaaacaaattgaagaacataaataatacaattaaggttaacgtttaatcatatcaggattaagatccatagacctaaaatcaaccattaatattgacttagaaagatataacgataagtttatgatatcttatccaagatcaatatcagtccctttcaatgtatactccatatatttgatgctggtaaactttaccaatgtcctggaaaggacataacacttatccaaggtgtaagtataccttattgctgattattatgccagtctaaatccagtgaactgacaaatcatagaaattaaacttttgaatatataatcatgattatattctattgtgctgacgacactataatcatgaacaaa

SEQ ID NO: 285546 - DNA, 570 bp, Cannabis indica
agtattggaatggcattccaatggaatgccctttccaccattttggtggaatggctattccattttgaaaagaaaggaatgaccattccaatgtaaaaagaaagaaaaattaaagattttttatcaatttttttaagcaatttaaattttattccattcctattcttatttccatttctattcttatattttcattcatcccaaccaaacgcctcctaagtgtgtagttacttggagatatctcaattgatttggtgtgtgaatgtgtgggagatgtatagcgggatgggttgaaatccccattataacatttgaataacaatgtgtatattatattgtcaaaaaaaaaaaaaaaatgtgtatattataggtttatatacacaattataacattcttaacaattagttatataaaacatatcgtttataaaataatttacaattagttactgaattcttaaacaaaaccactaaaacttaaaaaaaaacaaaaattacgtgtctcgccacgtaactctcatctagtatgtatatatatataatgtattatgtacaattattttgtgattt

SEQ ID NO: 285547 - DNA, 633 bp, Cannabis indica
gcgaccaacgacattgttgttggagattggctgacacactgctactgtcagccaatccccagcgataatgtcgttggtaaaaaatttgatgatgatccccttcaaaaacccttcgcccatttcagtaagaacaataatttagggacgactaatgaatattgtccctaataataggttattagaggtaattatttgtcgcccctaaaattatcacccctaatactatcttttgttgtagtgtgttactatctataagcaactcaagctatatctccatatcggaatcatctgtaagttgtttttttttctttatacttatcgttgtacattcatttattttacttgtaaatatttgtcatttttataatatattaaattgttttacaaataaaaataattttgtatatataatttttcaaaaaacagatttattatactttttaaacttaaaatctgattatgcatgttaagtttttttttttttttttttttgttaaatgttaataaaactgtgatgtaatttttgtttatataaaaatagtaaagtgtgatgtatttggaattttttggggtatttaaaggagatttttatatttttagatattaaaaaaagtaaatgttatgttgtggaaa

SEQ ID NO: 285548 - DNA, 544 bp, Cannabis indica
ttcgaatggacagaagaaagtgaaagagcttttcaagacctaaaggcacagcttgcaaaagctcccgtcctttccaaacctcttgacagtgaggaactgggatatacctaacagtaacagaacacgccgtaagcgtcgtactaatcaaagaggaagacgacgtgcagcatccagtctattacatcagtaaaagagtcatcgaggccgaaggccgatatccgttgatagaaaagctctcctactgcttcatcctagcaacaagaaagctaagaccttactttcaagctcatcctttttgggtgtacaccgaccaaccactacgacaaatactgcaaaagccagatgcctctagacggttacttaagtgggcagtggagctagggcagtacgaaatcatcttccaaccccgaacagctatcaaaggccaagccttggccgactttgtggtggaatgcataggaaaaagtgaaagcatcccagaaggtgatctcgagtcaacaccacagccgagcaacactgaaaaaaaaccgacctggaagctgca

SEQ ID NO: 285549 - DNA, 576 bp, Cannabis indica
cagtccacttagtaaagtagtcgactgctaccactgcgtactgcactctgcctttacctttaggtaactgtccgattaggtcaattccccaaatggcaaagggccatggactttgcatttgtgtcagctcgttgggcggagctcttggtatcttggaaaatctctgacatttatcgcacttcttgacataatctttcgaatcttcaatcatcgtcagccagaagtagccttgccttaggattttctttgataagctctgtccggctgcatgatttccacagaatccgtcgtgaacttcatatagaagccgtgcagcttcattttgtgtgatgcatttgtgttatggcattgagaatcctcttatgtacatgatcccgtctacgatgatgtaccgtgctgcctttcatctcattttccgagcttcattttggttatctgggtctgcagagttgagataggctgctattggcgtcatccatttcggagatgtgtcgatcatttcgatttcttcagtgccagtgatgctaggcttttcaaggaactggatcgggactaggttcaccttgtcacttatat

SEQ ID NO: 285550 - DNA, 759 bp, Cannabis indica
ttgtatacaaatagttatattattttttatatattaaatcaaaataaaaacacagtattttatcaaaaaaaattgaaggagtgaaggtagctaaatgtatacatatagttgaatagaatttttactttagtagatattttttgctcctaaaggttctgctaaaattcaaatggtaacattcaattggttaggattacgtattattggtgtcctcgctacctagtgaaacaaaaactcataaataaataaagaaaagtaaataaaaatatcagttatataggatggtataagcgaatatttaatatcagttcaaatattaataggatttgttttattattattttattatatataaataatattttattattttattaaataaaaataaaaagtcacccataaatttctcataaaccaagaatttcagttatataggcacactttatatagaatagatatatatatatatatatatatattttttcctttttcttctttctatgtctaaataaatattttttggggtcattttcatttttacactttggttaaaaaataatatataagataatctcctatttttaatctcttcttcttttttcttattttaattaattaaatataatatttaatgaggtaaatataattatagagacgaaaaactttagatgtattgtataatagaaatatgggttttttatttttatatttgaaagtagttttttttttttttttttttttttttttttgtttatttta

SEQ ID NO: 285551 - DNA, 644 bp, Cannabis indica
gtaaccttcaagtcccgactgattgtggcattcagtcctctcttcatccactgcttggccttaattatgtcaatacctcctagaaaagtcggaggttgcagcttcacgaaccgctcaaacaccgagtctcaatgcggcataacaaacccctggttacccaccactggcacaggtgctggtggtaacacttgatcaacaggggcagccggttaccttaatcgtcgcaactcttcttcttgacgaagtatgacacttcgcatttcttgaaacatctgctgccattcagcaggaggattagcattgccaacctccgcattatttccccggattccgcggaggtgggggcagtgcggtgaattggtttggtctacaccaagctctactaactcgccctgtggtctagatgattaaagagggtccactactagtacccgtgtaatcaacaaccccagcgaattaagcaccaataccacacttacgcacttaatgccttaaaccctaactcatctatttacctcatacatatttacataaacaattagcatttatagcatggcatcacataacacatacatactctagatgcttgcatactgcctaaaatggaaagcagtaaacagatgatcacacatacagtcaagtat

SEQ ID NO: 285552 - DNA, 554 bp, Cannabis indica
tggaataactcattaaaagcatataattaacagagtatgtttacaactcgactgactgattagtcttatgcaagataaaaatatacaaactgttgccttgtgcctcgatgagaaaccatgtaacttcaggtgtacgagacgaggcactaacctcgttacgtggaggagatataatgacaatggagacacttagcgtataatgtacggtatacaaactaagtataacagatgggtgaaccaaagcgagagatagtgaggtgtccgcctcgctgtaggagggcatgcacgcgaaaaagatcatctcgtcacccgaaactgcggttgtcaaatttaaggtaaaagcattatccaccttggaaagacatatgacgagctccagtttgctatcaagattaactctactctattcccagcgagacattccaatacgatatggcctacaatatatttaatacacgttcattttgacctagtaaaagcgggatattcacagctgtgtgaaatttaaataaaaaccgcatttacttaacgtgatatctaatcagatcccatga

SEQ ID NO: 285553 - DNA, 512 bp, Cannabis indica
tctctaggctctatttatagaacatagaaaccctagagacagccacaagatcgaatctacagctgtacaaaactttcctaagataaactcgatctgcagcatcagaatcaaaatctaacacaacaaatcagaccagaaaaggaaacttgctataaacgggtccgatcttgtattgagtcttgattcttgccataaaaagtttatatattctgattgtatcaaaacacaatcgaatttaataaggaaaaaggcaataatcaaaatatactttaaaaaccaactttccataagagaattgcttctcttacaagaagtttccatacaagaaaagttcagctgtaaaatgcatcttttctaacatagaaaagagtaataaaaactgataaaacaaggtaagaaattcggttatgaatgcaaataattcttaccataaaagaaaaatattttggtatctaactttccaaacaaggactttacaaaaagcatttttaatatcaagctgatgcaaaggc

SEQ ID NO: 285554 - DNA, 576 bp, Cannabis indica
ttttttttttcgaaagaaagcgtttataatatagattaataaccattagaccccgcggtcattacaaaataaggttttcggcacagaagcaaccggaagagacccaaacgtctgatgggtaaaagcccatctagccacattatgagcggcaaaattacaagatctattgataaaagaaaagcaacaactactaaaagagagagaagactttttacaaaatgagatgtagttctctattgcccaacgggaccccttcccattgatagcatcaattactactctcgagtcattctccacaataatatacttatagccgatatccaatgcaactgaaacagccaacgaacaagccgccgcttctccacaaagagcgtccgagaaatcttcccgagcagtctgaactctgatcactcttccaagatggttccttgccacaacagcaatacacatactatccaatcccactttaacatcacaattcagcttaatccaatcctgaggaggaggggaccaaacttcctttaaagccggggtaggacattggatcaaggagtcatagatatctgcataagaagt

SEQ ID NO: 285555 - DNA, 502 bp, Cannabis indica
attttcttgattccaaagtgttcagtcatcttattttgcataagatgatcccactgcctccgctgtcttgacacaactgaagaggacaataccatttagattcttagacaaaaatcacggtactttatcgtagtgggagggtttcaaggaactcaccctgttatgacttagaagacacttgtgatgaaaatccattgttagtttaaacaagtaatggattgtcagaataagaaactaagaagaaaagccaagagaactatggttaaaatcattcatgtggaacaaccaaaagttttctattacaaggacaagaaaggaaattttagttagtaagtctattcaatggacttaacacaacttcctattcctagtatgatatgtttgagatgatctaaacctatggcttgtggtatgcctggtaatttacttactctagtgcaagcaactttagtaagatgctcaagaattttcttttctaatggcatgttgggttttatgccct

SEQ ID NO: 285556 - DNA, 820 bp, Cannabis indica
ctaatcccagggactttaaagacataaaaccacttcgatttccagtcccccatgttcgataccattccttctactccattgatctcagaagtcgcccatttgctaaaacagtagaagccattatgaagacctacgctttttatgtcgtagaaatagctgaactcttctactgagggagccctatgaacatattccatgtacatcgcatagaaggctagggcagtgcgataactgtttggagttagctgaaaaggtgatacatcgtatcgcctgagaatagctgcgatgaaaggatggaaggggaccgataccccacatcggagaatgggtattgagactaccacatcctctgtgggaataatcgcagggttggtaaacggaagatgcgccctctgggacggtttaggtcgctgaaacgcaagtcgcagcaaatttaacctcacaaaggtagtgaaatctgatttggaaaccctcgaaatcagatcttcacacgcgaagggctcattcagctgggtatcgtcaaccgagtctgtcccgctcccttccgcctcctcttcatcctcgcctgactcgcgaactggggtcgtccagtcatcatccatctcctcgacctcgacgtcaggagcatgcctcgagtgtataaggtagtcgcgggccgacaccgtggactcgctgtctcgaatgtcgatggtcccaggttcggcgagttcctgcaccatcctttcgatgtctgcagaagacatcgggcctagctctattggtgcggcctcctcttctgaaatcgaggttagaagaaagctgtcctcctcctggtcaactt

SEQ ID NO: 285557 - DNA, 634 bp, Cannabis indica
aaatcattaaaattgactattttgtattcaggttgctggttttagtcttcatttttttgtcaattcttctatttttgttgtagagataattattcattggtatatataatctttacaaatagaaaaatttaataataatataatttaaaaatattaaatgcaatattatgaaataatttaaaaactaaactttaaggaatgtttgattttatctttctatatatatatttttttttaaaaaaaaaattatctttaaatggtttttataaaatttaagaataagattcgacatttacttttttttttctaaaaaaaattttagccttgatttgacattatcatttttaaaactaaatttattaattttaaaaacatattataaaataaagaaaagttaaaaaaataaaaccctaaattaaaatcattttttccaacggtactctctttcttcttctttcctccctcttctcgcagatatgactagctacccatctcgaaggtactgggacgacggagacagaggacgacagatcaaaggaaaaagacaagatcgagattgatggaacttcgggaagtcggtgatactccgatcgtcttgacaaagaattgtgtgaagagagaaattgtgtgagac

SEQ ID NO: 285558 - DNA, 593 bp, Cannabis indica
gcataagatttgtgtttatgaattatgatatgatttgatcaaattataaagttgttgtggtgtctatattaactacctcaaccaaagtttgagaatattctttattgttatacacaactcaaccactcaaatctttagccccacacagatcttacagacacagttattgaattgaatccaattacgacaaatgggcattgggtaggcatcatgattaatgtcgttgtcttcatataaggtcctgcaatgcaataactgagatatttccgcgaaaatgacccaggaacacagaaaacgacagtcgtttgaaactaaaagaatttttaaaattacactatatttggtatttttgtcatttttttttaaaataaaaataaatgctaaaaggcacctagcaccctctaataggtatggatcaattaattcttaagtctcatttaatttaaataaaataaatattaaaaagccaaaaatagtgtttgtagcactctactaacatattatattatatgagtataatttttttgaaaaatttcgattagtttacagtgttgaaaatacatttgaagttttttgaacacgtgtggtaaact

SEQ ID NO: 285559 - DNA, 592 bp, Cannabis indica
ttttaaattcttcccaggtcattacactgacatcccgggtttggcccacgatatcccaccagacgccggcatgatctggtaacatgaaggctgcacagttcactctttcagttcccgtcactcccatattatccaggatacgggtaatagtgctcatccactgctcggccttaattatatcaatacctcccaagaaagtcagaggttgcagcttcacgaaccgctcaaataccgagtccctatgcgacataacaaacccctggttacccaccactggcacaggtgctgatggtaacacctgatcaacaggggcactcggtgctggttgccttaatcgtcgcaactcttcttcttgacgaagtatgacacttcgcatttcttgaaacatctactgccagtcagcaggaggattagcattacaaaccctcgcattatcccctggattctgcggaggtggaggcagtgccggtggattggtttgggcagccccaggctctacttgatcgccctatggtctagatgattgcggagggtccattactagtacccatgtaatcaacaaccccagcgagttaagcaccaataccacact

SEQ ID NO: 285560 - DNA, 606 bp, Cannabis indica
atatgttcttttgttattcttaataattgtctactttggttatactgatgagagccatgttgatcatgtttggtgcatattgttgtttcacgacctagtctctgtgtcatcataggtagatcaggtgtgcactcacctgtaggtgaaagacctagaatctgtacagggatgaattaaatccgagccctagtatggtggttgatatcaggtgcgactccccagttttggatgtcattttctatgattggtattgagagctaggggtctagtggatggtgtgatatgcatttgatgcttgattttgtgattctttgtggtctctcaatttgtttatacattttgatactggtgatgagatatcttattttttacaaagctaaccatgcaggaattttattaaaccaagagattctttgattgttagtttttttttctactgggctttataagctcatcctttatttctcccattccaggaactcagtttgatgctagtagatgaggatggtattgttgaggaagaaagtcgttattagtttagtctttttctactctttaatcttctaatgaaactgattttgtatctaagctgaaatggatggtctg

SEQ ID NO: 285561 - DNA, 176 bp, Cannabis indica
agagtgcaattccaaagttctatggtggatgcaacaaggaattaataagtcagtgaatttacttggtaaattctgggtctgcttattggaagctcagatatataggccccatggtccccatactagttgagacaataattacttgtaagactcagttaattgattctgattaatca

SEQ ID NO: 285562 - DNA, 516 bp, Cannabis indica
tttcttaaaattttcaagttccttctttaatagaataatttcttcatcttttaaacaaaaatcagtctcaaattctttaattttcaattcaagagattcagtttgatgagacaattgtttatttatttttgacaatgatctatttttagaagtaacctgtatccacttttcatacataaccttgtaagactcagccagtgactcctcacagatgttagattcatcagaatcaaaatcagaattttctttttcaatggtattattcaaacataccaatctttctttcacctgtgaatcacaaacaaacttagaagaaactgaggttagtgcaacttttttagaaatatcttcatcactatcagtttcaccgtcactccatgtgacattgaaactttcttattctttttcagtgtatttgcacattcagattgaaggttttgaaaaagtattacctttggagaattttggaaaattctttttgtcacttatctttttcatgtatttttgaaagttttt

SEQ ID NO: 285563 - DNA, 649 bp, Cannabis indica
gtagcgtgccttagcattagggcgttacatgtcacatcacgaaactaggggcatgtgttatagtgagatttctctcacctagaaactcgagaccagacccctacgtagaggacacgtatactcagatttttcaaagaaagctaagatgtccctgagggactcctcgaagtttcgaacctcgcttaagatagaatcagcgagatgtggcgagcatgaccgaagtctaagcgcatccgagacaagagagtagctcgcatatatcgaacatatgcgagcatcctccccgtgtccttgtataaaccaggagaacgattctctataaatgcgagttggtcttaagaaccctgcagcctttataatgaaatataggcttgcatgtctaggtcctatcaccccgtcatgcgatgtccacaagaggcgactacctaaggatgcagacatcccaagcataatcgatgaacccgcgagtttatcatcagaatatgaacaaccaactcgcagatttagaagacgcatacgttgatgaacttagtaactgccgttcatttattaatcttaacgctgtttagttaattattgtaattcaatgtttaaaaacggattgacaatgaatgcaatccttgtataactaattggacacctgctttgt

SEQ ID NO: 285564 - DNA, 530 bp, Cannabis indica
aatttttttaaaataaaattgataacatcctaactatcaaaatatcttatttttaattttgtttattttgttaaatttatttaattaaattattaagattagaaaaaatttatattagaaatatctgaaattctcaaattaagatatttatattatattatcgtattagatatttaattaatttaaattatttaaataaactaaaaatttgaaaattagttagatattttaaatttcattttagaaatttagatatttagaagatttattaaattttaaatattttctaataacctaaatttaaattgtagttaagatatatttttttaaaaatatttgattttttaaatagagacagcttaacctactttcaagatttttgttacatgcgtgtttctttgtttatttatttaattatttattcaaaaatgtttataagaaaacctattatttatttgatctaaatttctatgattaacttgttgatagatccaatgatccgattttaatcatagtccaattgtcaatag

SEQ ID NO: 285565 - DNA, 524 bp, Cannabis indica
tactgtagtaatagaaattgataccaatgaagttcttggacatagtatcacagtaccttatctgagtgggagaattttaaaattttagctcatctttatttggatgacactagtgatagattactatgttatgatcatgatatgaactttaaataaaaccgagaaagtaaatctaaccatacatatggatagaaataacttatcagattgacttaggcaaaattcctagtcctcgtgaaatgttttatggcatctttcttaagcaactattttccattaatgttaatactagaatgctatgttgatggcttagtctataaggaacttatagttccagactaagataacatgtcacaacaatatgtccttgagaaccaatagtaagaggttaagtgtacacttgtgtattactttaaccagactcctactgttgagtgggagccatctaagatataatcaaacaaggaacattaggagacaatcaagaaagaattctgaaaatgatctatatgttagatgataag

SEQ ID NO: 285566 - DNA, 813 bp, Cannabis indica
agtaaaaatatgcataactttcacatacaaactccaaaatgagctgattcaagatgcatttaaaaaataaaaaagagatctaaaacttttatgtttcgactttttccaaaatctgatcagaatatagtcgaatttaggcttgaagttatagctttatttcttgcaaaattttctctattttatagatcatcgtttttcgaaatttaactaatttatacattccaagtgttgaaacctgaaactaaagacaataagcataattcattccaaaaataataacaaagaaaaaaaacaactaaaatgactcgaaacttaggctaataatagcctaacacactacccgagaattaattgcactgttccaagggcaagctcgtgtccttccctcactgattgcaacctccacaagtgcgtgaggttggaaacgccaatataaaacctcatgacaatatgctatccaaggtcaatgggaagagaaatcccctttgtaaaagttacaaataaaaatttaatggcgtataagggtcgtattgtattaaataatatcgcttgagacaatactgcttgtaagactcagttaattgattttaattaatcaattataattttaaaattagactatgtcttatttataaaattttactaagttatgacttaattgtgaaaaaagagattttaggatttatttattaattaagagattttgtggagtctaattaataaataatataaatgataattttatttgataattaattataattattaaataaataattttggcatttacaggattaaaattggaaaatatga

SEQ ID NO: 285567 - DNA, 575 bp, Cannabis indica
cagttccatcactctttcccatataagttgaagacttttgtatacttttaaaatacatcttcatatctgtttgtagcaaattaatatgtgaaagaattaatattatgatttataattataattatgaattaaaaaatcctacttggattatgaaatataaaataatgatagcaaacaaataaaaaagaattaaccaaatataaaacacacaagatatactcaatagacaataaatattattaaaagttgctttttcttgtttctatatgttgtgttggtcactaatagaagaatgacacatcatctatttactaatccttctcaactaactacaactgttttacctaactgtctgttatgacagttaggatcgaacatgaaggacaaggctataaatagccatctgctgcaacaaggattgagatgatgttgttggaaacatagagagagctagttcagtgtaacatagagagaatttgtgtgtgagatgagttgtgattgaagcatggcttcttgagtgtatgtgttagtgaaacactttgtaatcaacttgtatttctctctcaatctagcat

SEQ ID NO: 285568 - DNA, 569 bp, Cannabis indica
acttgtgagttaagtaacttcactttttcaagctcttccttctcctcttccttcgagcagctgcaaccagccattagggggactatttttcttcaacaatcttctcttttagagctaaacttaatccccaaggcaacctagatcttgaggtaagttcctccttatgttttgttggtgaaatcctaggttctaaggctaggttttgataattcttgtaagttttcagggctgtagacttagttgaggtttgaatgtgatattctagttgaattaagtctaattgtatatgttttaattgaaatcatggctgttgggattgatttgtgcttgaggaagctataggaacttagttttcttcacttgagcatatgaatttgagctagagattgaactactgtaatttgcagcttgggatatgctatatttatgatattatactattctggaaagtttggttaggtttggaggagttttgggtcgaatttgaaggaaagaaagcaagggaacctggtctgccagaaccggtcaaccggttggttctagtgcatcagaaccggtcgaccggttgc

SEQ ID NO: 285569 - DNA, 502 bp, Cannabis indica
agtagaacactagtaaaacaccagtagaacaccagtgaaacttaacacagtatactgcagtatgaaacttataaaaaaaacacagtaaaaaagtaaaaaataccgctggcagtatttttgtaaaaatatggcaaaagttagtataccatgtaaattttcctaaaagtaagggctaatcttgaaataaggcaactaatcaagcctgcttctagagcccacatagcttaaaagtagggagaagttaaggaacactctttttttcttatatattaactaaatttaacttcaaataaaatttaatttaaatatacaatttttatgagtattgtacctaaattatcatcacacactcacataactaagacataattttaaatgtaatatattttattctttgtaaatagatgtgtaggcttgtgggaaagttggggcaaaattttgataagagaaaaataaaaattattataaagtgatagatgtaaaattgatagaataattgaaa

SEQ ID NO: 285570 - DNA, 588 bp, Cannabis indica
gtttgttgctcgaagtaaaatcagcgttgataaattcctgagagcaaacctagacatttttgcctggtcacatgaggatatggtctgtattgatccttctataatttcacatgtcttaaatattgatccaaatttccggccagttcgacaaaagtgaaggttgttggataaggagcgagccctagctctgaaagaagaagtagagaagctacgcaacaacaatttcataattgaagctttctacccggcttgggttgctaatcccgtactggtacccaagccgaacaagaaatggcaagtttgtattgatttcactgacctcaacaaggcgtgccccaaagactgttttccactcccaagaatcaatcaacttgtggacgctacagcagggcacaaaatattaagcttcatggatgcctatttgtggtacaatcaaattaaaatgcatccaccagactaagaacatacaagttttcgaacagatatgggtctgtattgttacaaagtcatgccatttggtctcaaaaacgctggagcgacataccaaagattggtaaacaagatgtttaaagaccagatcggatgaaa

SEQ ID NO: 285571 - DNA, 36 bp, Cannabis indica
tctatatgttccaccatatagacacgtcattaatta

SEQ ID NO: 285572 - DNA, 643 bp, Cannabis indica
gagatctgagtggaaggagacatcatattccgctgcaaccactgtaaggtttctcatactttatatgtgtttatttattatcgttttagaacttcatatttaggatgttaaacaacatacttgttagtaaatctaagatccaggtaaaatatttccaacaactctgactttgctttgctaaagatcagtatatcatcaacatagagtagcaaataggtttgattattgaaatacacacgtgagtcatacttgcttttagtgtatccaatattcaacatataagtgtcaaaccttaagttccattgcctaggtgcctgcttgaggccataaagagacttcttaagtaaacatacctcatctggattcccattgtcaaagccctcgggctgttgcatatagatttcctcttccaactcaccatgtaagaaagccgtttttatatccatctattcaatctctaggtccatgcttgctgcctttgccatcatggctgtgattgaagcttgcttcaccactggggagaaaatctcattgtaattgatgccttctttttgagtgaaccctttggcaactaaccttgccttgaatctggtaggctcattcccagaaccttctttatgcttgaaaagccatttacatccta

SEQ ID NO: 285573 - DNA, 534 bp, Cannabis indica
caagatcttagatctactcacaagtatgttgattaacaacctaaatatgaacttataaaacgataataaataaacacatatagagtatgagaaaccttacattggctgcagcaaaataatgtgtctccttccacttagatctctaacccttgattcctttcactggggtcattcgaaattgtatctctcttgtatgtatttttctcctcaagaagaagaagatatgggcggctatatatagagaaaagggaagctcaactttctgaaagaggcagtttcctgaattactgagtaattgcttaattgccttatttggtgtgagccaccactttccatttatagataactgctaggtttaggttagtaattatttggcattaaaaaattgaaaataataattggaaaatgcacacacaagtggtcggccatggtgtgattgggcctcacttggattttgcagtttccacaatttcatttctattttcccaaaaataccaattttccaattctaaccatttaaatgccaaaactaat

SEQ ID NO: 285574 - DNA, 509 bp, Cannabis indica
aaatttatgttgtgactaaaaggttaaaagtaactgttttatgtagtgtgtgcactcctgcaccacctgtgagagaaactacactaaaagaataaatgatgatgactatcagaaatctacttacaaacaggacacattcaaatctagtctaatattgcaattcaacaatttatctctaatcagtaaatgatcattcaccacttgccaaaaaatgaacctatgttagagatattagtttacaccaaacaactttaaaatagtttaccttctcatgatgaaggaggctttgatagagtttgccaaccagtattgcatgcatttaagataaaaatggctgaaaaaatcctctagagattgactagtttcctccagtatcaactaacatctgcctttgttgaatctttaagccattggtaatgaaggtcgaataagtaacaagtgaaagaaaagagtgttggatatattttatcaggatctagatttactaccatgtatgtttcattaacatc

SEQ ID NO: 285575 - DNA, 605 bp, Cannabis indica
cttcacctccacagtcaggttggccgtagactgcaagtctgcctggtgcaactcctctaaggacttcaccttggcagccatctcgtccatagcttccctggcctcccgaagctcgcgcctggccctagcagcggcctcaccctccaccttcagcgcctcctggtgcctcgcctccacctcagattccctctgcttggcctcctctcggagcttcgcctccacaagggcctccctctgcttggcctcctcccagaactttgcctccgcaagggcctcccttcattgagcctcctcatggaacgcctgcctttcggcagacaagtcccgaaggatcctcacggcctcgtctatgccctcgaattcagacatgacgaagccatggtcaatcaaggtcttggagaggcggccggtctctacagtaatctgaaaaaagagacaagagtgagattaggtgccttagacaaaatatcaagggaaggaataaatcacaagtacttaccgcagccacggcagagctgatgtcttgaaccttgtggacagagttcagagaggtgcaagcggcatatctttaggcaggactgagtcaggtgggagacgaactggct

SEQ ID NO: 285576 - DNA, 577 bp, Cannabis indica
gaatcgtgtgccttcccaaccgtgcaattggtaggtgatcgtgcctgtttccacatgcactttcgcctataaaagccaccattcttccttcatttggttactttcagcctttcaccaaatttcttcgaatttctcagagagaaaaaaatccctcaaaacccagaaaaaccttcaaacaccataggtttcttactaaccttccttcgttattgtcagtcaacacttcaccgtcgatcaacaacaactcccagttctaacactttatgtaagtttttcgcatcccttactttattgtttgtgttcatggcatgctttactgttcatctgctttttctgggtttaatgttcgaagtttctgggaattttttgccttgagtttctgtgtaacacgtttagatttctcttttctggtgtttgaatcactcttattttgcacattatatttttccaaaggcccatctattcttttacgtgatgacctttgggggtacagagaagactttgtctttctcgacttttaccctttctttttcttttcttttctttgctcatgtgtaatgtcactatctgtaagatt

SEQ ID NO: 285577 - DNA, 489 bp, Cannabis indica
caaagtgccttgtggtctattcttcaaatcattagccaattgccccaattgaatttcaagatttcgaagagatgctacctggctttgaattacaacgtcattcttggccatataatctctcattaagctctctaaagagcttgtttgagagccttgaggttggtgtggctgttgcggtcttcgttgttgagaaaatcccagtggaaatgattattttccttgtgcttgtgctccacttgaacttgctccttcacctccccatgaaaaatttggatgatgcttccatgctggattctagtttgagtatggattgctattgcggttgaaattttggttacccacatagcaaaccgaagttggatttgaagggcaattttcaaaagtatgcccatcaccacaatacacagacaaaatttctgccctttgaatggcagcagctggttgtacacttccgcccatattcatattctttaaaatgttggtcattga

SEQ ID NO: 285578 - DNA, 573 bp, Cannabis indica
ttttcactaagtaaaggcgaaatcgtaaagaaagagtttttggaatggcccttttcgttgcaatagaagcactatcctttttgctttgcattgggattagcagcctttttcttattagctattttaatagctttaagaggcttcttgctattctttcaattcttctttttgctgggttttgaagtagaggtaatgtttgcctcagccttgaccgtaccattaattgtgccagaactaggagctttagttcctcctttctgtggtcctccaatcaaattttcaaatgtctaaaggttgttgattaactcgtagaagtcaaaatccaacttgtttatgacataatttgatgtaaagagcagaaaagctggagtcaaactattcaagatcaaactcacttgagttttatgatctataatagctccatgattctaaacctcctaaaagaaactagtcatttggagcaggtgatcacgcacgttcttgttaggctatttttagcctatattttggatctaatttatgtgcgtttttcgctgtgttgggacggaattacgcttgttttctatgttttca

SEQ ID NO: 285579 - DNA, 530 bp, Cannabis indica
aaggccggtacccattgatagagaaactagcttactgcttgattctagcaacaagaaagctaaggccttattttcaagctcatcttattcgggtgtacactgaccaaccattacgccaaatatttcaaaagtcagacgcctctagatggttactcaagtgggcagtggaactgggacagtacgaaattatcttccaaccccgaacagcaatcaaaggccaggccctagtaaactttgtggtagaatgcacagacaaagaagaaagcataccaaaaaggaaccccgagccggtacaaacacctcaaccaagtaacagtgaagataagccgacttggaaactacacgtggacggatcggctacagatcagctatctggtgcaggaatcgcccttgtcacgcctcggggcaacacctgcacgctgcagtcaaatttcgactcaaggcattgttgggttttatgccctaaataaaactcatttcatataaccagatttacttattaataaagatcagaaataacattttatgtt

SEQ ID NO: 285580 - DNA, 543 bp, Cannabis indica
ttttttacatttatatggattttctttatgccatatttttgtaaaaaaaaaaatagaaatcccatatttgtaaaacaacaataagttttgctggaaaagtcgcaggcaccggaaaagtcgccgaaaaaatcacggtcaccgaaaaagtcgtcgaaaaaatcaacagaaaagttaatgtcgctggaaaagtcaccaaagtaaatgtctcatatataactaaaaatataactggttatatgaataaaatctaataactcaaaccggttataattgaaatataaccggttttgtaacataataaataaatataaataacataaaataactcaaaccagttataattaaaatataaccagttatataacagtgttataatgaataaaaacaaataacacgaaagaactcaaattggttataactaaaatagaaccagttatataacataaagaatacaaacaagtgacatgcaataactcaaactgattacaattaaaaagaaagaagaaatcagctcctaaaacactgaaatataaattaaagaca

SEQ ID NO: 285581 - DNA, 575 bp, Cannabis indica
atgaatttttgtaaaattagaaaatacggggtggtgagcacttaacccacgcgcgcggatgggctactagcagcctccctgctctgtgaaatcaaggcagcacaccatccgtacatcgtgctaatttttttttcgtttttttcgatttttaatgctatttcatggaattaacttccgatttttggtgtagttttgtatattgattttgtttttcatatttcaaatctaattattagaaataaattaattttttttaaaaaaattaagtttagatattagtgaaatttgattttgaaaatggtaaaaatcaagtttttgcttacctcttttcttattttctttaaaatttgattattttatctttttttttttttaaaaaggcctgattattaatttttttttggttaactttgaccttatttaaaataagattactataatcatagtattttaaaaagggaaataagataatttgttaattttgaaattttgttattttacttaattaaattgtaaaatcaagaaagggtaaagtagtttaccattttctatttattgtaatattaatttattaa

SEQ ID NO: 285582 - DNA, 424 bp, Cannabis indica
accaccacggtcagacctgactttctttattcttttgctaagttgattctcaacttcagccttaaaagatttgaacacatccaagacttgagacttttcatgaagtagaaataggtacgcatatcttgagtaatcatctatgaatgatacaaaatattgttgaccattccaagaaggtgtaggaaatggcccacaaatatctgtatgtatcaactctaagacatcgatagctctttccgcacccaatttctttgttttggtctgtttgcctttgatgcattcaatgcaaacatcaaagtttgaaaaatcaattgaatctaaaattccatcagacacaagtcgctcaactctatttctagagatgtgacctaactgtttgtgccataaggaacttgatttttttatatccattttacgcttagta

SEQ ID NO: 285583 - DNA, 502 bp, Cannabis indica
aattgtgcattttgggttatgattcattaaaagggaaatattaagcaaaatgagattttatttctgcattttactccagccctagcagccagcctctccctctctcaaaaactcattttttttagctttgattttgtggtgaattgcttgtggaagaaagcttagttttggagatttggggatttgctcttgcttggatttgaggtagttctcctaccatttctaatttctgagttgttgctgaaatgagaattaaaaaaaaaaaaaaagaagcatgtttttatgagtaggtgttcttgaaatgcatgggtatgaattgatatgagttggtgaaattctagtttgaatcttttgttagtagctaagctttggatgtttggaagcttagatggagatttgaatgtgagaatttgaaatctatgttgatattttcttgctgaatattgtaagtaattttgttagatttaagctctaaactcttgatgttgattagttcatgttg

SEQ ID NO: 285584 - DNA, 514 bp, Cannabis indica
atgtaactctggatatgattttttgctggataatgtagttgagttgagcatggatatgttgcatccccgcatcaaggggagtagtagtgggaaccgcttgaggcatttcttcatttggaatgttctcttcctcggggacatgaatttcttgctgctgagtacgacgtggaggaggcggttggccatagggatgcgggggtttaaggtttcgcaccattgtccaatcaatattccgttgtggctgtactagattatcataaggatattgtggcacattatgagcttcacacaattcagttataactcccgctaggccaattcccgcatgtgttgatcctgcgaccatgttatctaaactattcagaatgatacccccaaccggcacagtaatccccttcattattgcataaacaactttgagtctatccaatggaaaatctgataaatgcttactaggcataagcctagcactcacaaaaaacatccaagcgcgagcaacttgattcaattcaca

SEQ ID NO: 285585 - DNA, 725 bp, Cannabis indica
gaactcgaggatcaagatcttcatctttcttctcattttctcctgccaagattgtcattaactgatgaccggcctttctatgctgcaactctatgtgatagcaattgtgagccagcatctggtcaccatgcaccactcccacgccatccggtgtttggaattttaaagataggtgcttgatcaaactgagtgtccctagttcgattagtgctggatggcccaacaatatgttgtaagccgagggtaggtcgacaactatgaagtcttgcataacagtagcagttaaaggtgcctcgcctaaagttaatgcgagctcgattatgccaaggcaagcgatgctatctccggtgaatccgcaaagattcaccatacaaggccttaatttggccttttcaagccctattttctttagagtctccttataaatgatatttaccgagctcccattatctattaacactctcttgatcctcttattggcgagttgaatggttatgaccagcggatcgacgtgagggtatctcatgttcttctcgtcttcctctatgaatgtaatggggggttcctcagttttcaccttcttggaaggttctgtggcaaaggctgactgctcgttctttatctccttcacatatcttttctgggcgttattgctttcccctgcgatatgcggccctcccaaaataaccaggatgtcctctccttccacaggaataggttgtaac

SEQ ID NO: 285586 - DNA, 874 bp, Cannabis indica
attctcgaagtaactcttcagcaagccaaattctcttcttcttattcagcatgtgtaatttctcaaagttactctcgatatattttgctcttcgtatcatgacattttcagacatatatgggtatagccatatatggatatatatatatgatttccgtttttggtgttctctcaatcatagtatatattagcatttagttgaattagtatcatttcattctagatgatcactcttataccatatcacctccagccactgaagatatagcttgcaaagatttggaaagtggagacgaacttaaaacttcttcaatagtctaaatgaaggtgatagcattgcgttctttaggttgttatttttttttcgtttagcgttgattgcatttaagatttagagattttacatatatataaatgttagggtttacattgttgattttcataaattcaaaacaattaatgatagtaaatctctatatcaacttttacaattatcttcccattctgtagaatttgttctgtaaaagaaagtttaggatcgctctaagaaaccttacctattgtaaatgtcttccactgctgctacaaattaacttgataatcctcttgttctacttcatctgaaactcaatttgcatctagtttatcagaaacaatcactactacaagaaaaggccttttatcccggtttttaaggctttttatcccagttttcgctaaaatgaaaaccgggatgtatgccagtgggataaaaagtatttaaaaaaccgggataaaaggggtactttttatcccggttttttcatgaaaactgggataaaaagtacccttttatcccggtttttagagaaaagtgggataaaatggtactttt

SEQ ID NO: 285587 - DNA, 623 bp, Cannabis indica
taaatatattttttttaatttgataattataaactaaaataacgaaaaaagcccccacaaaattaaataaatctagtaagagtgattataatataagtataaatattttttaatgataaataagcccccacaaagtaaaaatcctgggtccgtcactgtatttacccattaattaatttattaactctaattggttaagctactattgtctagctttcatgatgataatttagtatttaaatcaattattataaatttttaagtagcaactagctaatatagacatatttttgtcaaagaaaatgtttttagctacgttataatttatttcatactaataaaaattagtatgtagttactactctatatatatgtatacttattcatactctttgtttattaatttattaaaggtatatttctgaagaagatattgtatgtggagaagaggctcacataggcttggctccacccggtaaagttggatcatggcaacttgaatctaaagtgattatctttttcctttttgctcataattatttataaattaattatatatggatgttaaatttgattttctatacttacatacacttaatattttatttctaaactaatacata

SEQ ID NO: 285588 - DNA, 473 bp, Cannabis indica
cgtcttctccgtgaacgtgatgggttggtccatcagccggggcctttgagctgggagttgagtaacctcccaaacctcattgtgtttcacggcccctgcgtatcgtttgagctccttgcgagtagttcctccgatatggggacctccggagatcatggctaccctcccgttaggtctgggcggcagaccggggatgtgctgggcgtcgcccgcgggagcagttggagctaacgctcctgctgtactccccggtgttccctgaggcacacccacagtcgcctggcccggattaaggtgaggcaacctatttttgatccactcatagaggtggcccaaccggattaggttttcaatctcgtccttgagattcttgcattcattggtgctatgaccaatgtcattgtggtactcgcatcttttgctcggatctctccgggagctatccttgtacaacggttgtggtctccggtagt

SEQ ID NO: 285589 - DNA, 618 bp, Cannabis indica
ctcatcaacaaaaagtagctcggtatttcaacaaacaagtgaaaactcggaaattcttcgtgggagatatggtcctaagaagggtattcctaaacaccaaagacagcacgtcaggtttactaggacccaactgggaaggaccatacaaggtggtcgaagttctcgactccggagcatacaaacagggtaagtatgaagaaaaatgaaactcattctagtaccacggtactggaatggagagtatttaaggaaatactaccaataaagtactcaagtcaggtagaccacttcaaagtactcaggtcggatagaccacttcaaagtactcaggtcgggtaaaccacattaaagtactattgaacattcgtttctaagtgaatggcctcttgggaggactacgcgcaaaggcttcagaaacaaaatactcaggtcgggtagaccactttaaagtacagtttcttatttgttttatgtcatgttaagctaaaagctcagattagatcactagttctgatgtaagttactccggtaacaaatacattttcgatcaataaatgaataaagatactatttccaattctattgagtggaaaaaatcagcatgattataatttacct

SEQ ID NO: 285590 - DNA, 511 bp, Cannabis indica
tataaaattcctgtgtctttttattgctttatcgtatatttgttattataaatcatttaacgcttgtaaaacaaactcattgtcgttggctaaaagcgaagttagcactaggaacaagaagttttgttaaggccattgaatagacttactaacgaaattgcctttcttgtgctcgtaatggaaagcttttggtggttcaatattaatggttttaaccatagttctcttggctttgcttcttagttttttattctgacaatccattacttatttaaactaacaatggattttcatcaccattgtcttccaagtcataacagggtgagttccttgaaactctcccactacgacaaggtaccatgaatttttttctaagaaaactaaatggtattgatctcttcggttgtgacaagacaacagaggcagtgggatcatcatatatcaaataagatgatagaacacttttggaatcaagaaaaaatatctcctctattttgctactttattttca

SEQ ID NO: 285591 - DNA, 606 bp, Cannabis indica
aaatttgtaaaaatagtgatattatatattgatgtagagatagtaatcaaggtgcaccaactgatgatcaagaagctaatcatgctataacagccgataattttaccacaatagatttatattagtaataaaaatgattatattatattatataataaaatgtacatgtatatttattgtccaacatttatatatgtaattgaaaaatttattatttgttaatataaaaggaaaaatttgccaatatatatagaaaaatttattacccacaaacataattaagaaaaaataaataagaatctgaaaaagaaaacatttattattataactgttaataataatcattaatatatatactttcttttttatttttattttttattatgaaataaacttttcattaatcaaatcgagcatatatacgctttatttctgttaatgggacattggtaatttaaaaaaaaaaataatgttgcattaaaaaacattttttaataaaaataaaaagaagctcatctagagagctcttattacattgcaagataaaaagaaacccacataaagaacttataagacatatttctacattgcaaggcaaagataagt

SEQ ID NO: 285592 - DNA, 723 bp, Cannabis indica
cgtggcgtagacctacgtgttgcgctcacacgtctaaatacaataaggccttagaacagttcatctcggttcttgttaccgagtccaacctgattatgccttgaacgcataacccttaatctcaacatatatatttatcacataattaatggtgccactgcactatttgtctatttgctatagacctgcgtgttacgctcacacgcctatatatgtctatgtggcatagacctacgtgttgctctcacacgtctatatatgtctatgtggcatagacctacgtgttacgctcacacgtctatttacaataaggccttagtaaggtttatctcggttataattaccgagtctaacctggttatgccttgctcgcataactctattcatatatatttacgtaatccatacattacgttctttcagtggtttatcctgataatatataccaggtctaaccaagttatgtcttatacacataactcttgatatatatacatacattccatatacactgtaacatataaaatcttagggtaataaccctaacttgcataccaaatagtctctcatataacatattattgcatgctcaaaataacacttatagagattaataaccctaattcatgctttcacttgattagcaatattattgtctgttgggttttatgccctaaataaaattctttacaatctgattagttatcaatgcaagaaatttga

SEQ ID NO: 285593 - DNA, 674 bp, Cannabis indica
ggtgacaagagcaagatgaaatgggatgagggcgttatgaattacgtgcaggggataccgcacagatacttgccatgttgggagaaccaggagtacatatactttgtgttgcaccttcccaaagagcgccactgggtggcagttgaggtggatatcgagaacttggagatcattgtatatgattctgatatcggtggcaccgttgaggcacgcatggagtcatatttgaagccttacagcgagctatttgcgaatctaatccgagctagcggttatttcccatacaacaattatgtacatccggtggagttgggcgatctcagtcagctcctacccctgcattatagacgagttacatctgaggttgcaccacaaacgaacagcaggtgaatctttttttttttttgtataatttgagtaatttatttaattttgcactccattatgaattacttaacttaattgttgctaatatttagtatttttttttagtggcaattgtggaatgtatgccatggagcacattgagcacttgatgctggaacggtcgttggagcatgttcatgatgataacatgctcacctttagacataggtggtgtgtggacctattttaccagaacttgacatggtagttttttgtaggtttttctaatgttattcttatacacataa

SEQ ID NO: 285594 - DNA, 655 bp, Cannabis indica
aggccgcgcggaagttgccgactgaaagggcttcggcggcgtcggcgtggcgctggtcgtcatcgagcgtgctaccgtactcgctcttgatggaccaagagtcggcggcgatggagcggtcgtcgtcggaaacgagatcggcggcgggaggagtagctcgggtctggtgagaaaggtcagaatcctccggcggctgcaatcggatcccagccatttttgttttattgggagaatagtgtttgagattgtttaaggaaggaatacgactcggacaacgactatctacaactacaactacgactacgtcttcgcccaccaagagaaagagattccagagaccgtgggttgggttgggtgggccgtttccgggtcagccgttgtgtctgtggatttcttttcaattattttatttttttactgctgtgatcgacagtaattgatggatgagggccgatgcagttttgttttttgttttttttttttaatgaaacagtgtaataaattgtttaaattaagaaatttttaactaccaaaaatactaaaatgtcacattttattactgttttactcctacacgcctacatcaacatttttacttaccatctttattttattacaataataccacttacacaccattctcatgcacagacac

SEQ ID NO: 285595 - DNA, 694 bp, Cannabis indica
tgtgatttaggagcctgtaatttgtcgagctgttgttccactcaggttgaccgacacacctgaattcagaattgaggtaagattagtataatgtcgtgcatatgttattacgtgtttaacatacatgttgtttatgcctgttagattacattgatagcagtaataatatacttagagttgtattgaatactgataaatgtatctttgttgaaatactgatcgatgatgtcacatcaatatggttagagtatgactagcatattgagtataggctgacattatggtcgatagtattgttgtatgaacgttctagacttagtaccgtgtgggacgacggggatagggttatgatcgggtgtatgggcgtcaagttataactcgggatattagtatgttttatgttatgcttttcttactgagtctgtcgactcacagtgttatttccatgtgtaggtaagggcaaggctaaagctgaggaaccgtgagagcgagcaggtgaagattatagatgtcggggcggttaggcctagagcgtacgatcttttgggacatcagggccttttgttgtatagtcgctaggcgacaaaacttttgtatatgtatagtaaacttttataaatatattttgtaacgggatcccagaattttataaatataatactttaagtttttaattaattaagaaaattttaat

SEQ ID NO: 285596 - DNA, 574 bp, Cannabis indica
gtctctaataggcgtattaggtctatgctagttaggatcaaagataggaagttgagcgttgaccttataaaattggaattaactgagtttgacattatactgggaatggattttctgtccaagtgttcgaccagtatagattgtaagcagaaaatggtgacttttcacccgaaggtgaagatccatttgtttaggatggatcagtccaggggtcttggatctcggttatctttgtattaagggttagagatttactatgcagtgaatgtgtagaacttctggcagtagtaattaatatcagcagacccgaaacatttgggcctgaggcagtcagggcggtgaaagattttctcgatgtattttccgagaagttgccggggttgccgcgtcaccacaacgagaaattgattttgtaattgatatggcaccttgagttgatcctgtttctaaagttccatatacaatggctccagcgagactcaaggagtttaagttgcaacttcaagggatgcttgacattgagttgatcctgtttctaaagttccatatacaatggctccagcgagactcaagg

SEQ ID NO: 285597 - DNA, 501 bp, Cannabis indica
ttactggccaacattgcgacaagatgctctcgcgtttgcaaagaggtgtgatagatgtcagcgaatagccacttacacccaccagcctccgagtaacctccattctatcacaagtccatggccctttgcaatatggggaatcgatttaatcggcgagttacccaaaggaaaaggcggagtcaaatatgctgtagtcgcagttgattacttcacaaagtgggccgaagccaaagcactcgcaaccatcacagcaacgaaattgcgcgagtttgtctatacctccatcatttgtcgttttggcattccgcataaactcatttcagacaatggaaaacagtttgactgtaaagagatgcgacagctatgcgacgatttggggattaaaaaggctttttccgcagttgcttacccgcagagtaacggacaaactgaagccattaataaaataatcaaacacaccataaaagggaaactagaagatcgcaaaggggcttggccaga

SEQ ID NO: 285598 - DNA, 473 bp, Cannabis indica
aaaacacatgaataacattaaaaaaaaaaaaaaattgatacaaaatagagttaatttctaaactttttgttttctaaactaattttttagaaattaatttctaaacttttattttaatactctcctatctcattctcattcacaatatttaacaaaactattagtttaaaatactcaatatatacatatacaatatataaaatactctcctatatcacatttctcattcacaatatatatacacacaatacatattcaatacaacacaaaatacatatacatatatactctcctatatcacatttctcattaacaatagatatacacacaatacatattcaatacaacataatacatatacaataatatagaaaaatacctaaaaaaattaataaaaataaaaaataaagcaatttacattactaaaattagtagaaattagatttataccttaataggcattgagatacaat

SEQ ID NO: 285599 - DNA, 234 bp, Cannabis indica
tgaagggaaaagagagagagagatttcggccaaggtagagagtgaggaaggctcagttttctgaagagagaaatttctgtcagaaagatgatctgaaaacttgtgttttgactgagccatcaataaataaataaacctagaaaactctttccttacaatttcacccctgcttagtgaaaattcataaaatcagacatagtcaactttagaattataattgatcaatcacgaatc

SEQ ID NO: 285600 - DNA, 759 bp, Cannabis indica
tattatgtatatatgtgtattatgttgtgtatgtggtgtgggtgtatgtatatatgtatgtatgtatttgtttgtgtatgttggtgtatgtatatatatatgtatatgtgtatgtgggtgtatgtatatatatgtatatgtgtatgtgtatgtgggtgtatgtatatatgtatatgtgtatatatgtgtatgtaagagtacatgtaaatatgtgtatatacgtatgtgtttatgtgtgtgtgtgtgtatgtatgtgtatgtgtttatgtgtttatgtgtgtgtgtgtatgtatgtgtatgtgtatatatgtaagtgtaagtgtaagtgtatgtatatatatttatgtgtgtatatgtatgttgatattttaattgggttttatttttatgaaattaggtcccgtttaccggcccgaagcaccgcttcctgcttgttgttgtcacttttggactgcttcaggtttgtttgttttttatttatattagtattgtaaatttaatagttttgttataagttagtatgcctatacatgttagtgaagtaggttctgtgataaaatactgcagtctgatcggtggtgtgatttattgtttttcatatgttgttatggaaagtttgtttgtgctatattcataggttttgaaaattttgggtttacgctttttaagccgttatgctgcccaaattttggtagatagttaaataatgtaatttttaatttaaataaattaaataaaaatttgttaaataatatatat

SEQ ID NO: 285601 - DNA, 647 bp, Cannabis indica
ctcagaaacaagtttaaactaatgaagacaacaacagcaattaacagcagcaagagaaccaaattaagcatgcaaattatcatctttttccttaaaaactcaagaaaaccaaagaaaaagctataagaaattacctagagtttaagcacctcaaaatcaagaagattcttgctggaaatgtagaaaaataactcaaactccagctgctcaaggaatggccgaaagagagaggaagagagaaaagcaattcttgaattttctaactttttccaattttgtaaaatgaaaataaaaaggtttcatttactcatttcagccaatataacaataataagccaaatattttcacaaaactaagtccactaaaggacaaaacatcaatgaggtaaaatgaccattttgtccctccacacaaaaataacataaaggggtactaaagggttttttggggaaattctaaattcccgaccaatcccgacattcccaatgtctaaataaccgtcccacaatactaacatattaattcgtgattttactaagcgaaacaccaagttccatgttgttgggcaccggaaatgcaaaattatgaaattcactatatgacgtaaaatgcatttcaaaattcaataataacagcataaataatt

SEQ ID NO: 285602 - DNA, 382 bp, Cannabis indica
atctctatatgtttagttcggtcatggaacacagggttcctacataagtgtacacagctttgactgtctgagtacactctaggaacctctttaagtaacttaatctctgtcaaaagtcctttcatccatatggcttctttaatagcttctgtggttgatatgtactccgattctgttgttgaaagtgcaaccacaggttggagttgggctttccaactcacacagtttcctccaagtaggaacatgtaagatgaagtagactttctgctgtctctgtccccggcatagtcggcatcgctgtatccttctatgttggtgctgaacttctgttgcttgtagatgagtccaaccttaggtgtccctactaggtacctgaaaaccc

SEQ ID NO: 285603 - DNA, 973 bp, Cannabis indica
ctagacatgcaagtctatattggtttatcaaggctgcagggttcttaggaccaactcgcatttatagaaagtcggtctcctggtttatacacggacacggggaggatactcgcatataattcgatatatgcgagctactctcttgtctcgaatgcgatcagactttggtcatgctcgctgcctctcgctgattctatcttaagcgaggtttaaaacttcgaggagtccctcatggacatctcagctttcattggaaatctgagtatacgtgtcctctaaataggggtctggtctcgagtttctaggtgagagaaatctcactataacacatgcccctagtttcgcgatgtgacaggtgcggtcacaagggaaactatactcgagagacaggtgaaaggttgtcacgaggaggtgacctttggttgtcccttcgagggtttcgaaaaatgacggctataatcattacttttattgcatttatggtgccacgtcacaaaactcttcggtttctgtgtaggcgtggccatctttggccgttggattgggcgactctaggcattccaattgccacgtgtcgtgatcccaattaatgagggatttgggtatttaaaccctctgattcgaatcaaaaatccccattttccctcattttctttaactcccttaacttctttgtttcctctctttcagagaaaccaccaaaaaacacttccataaattgcccagattttcgcttttcttcgtgggttttttctcgattctacagtgctgtcaagggcgattcgtgggaacagatttaccagaagtaaaggttagttttcgaaacttcactgcatttcgttttctgtttgagagggaacactgttttctgggtttttaatatgcatgagagagtttaagaatgaatgtttgtaggggatatgtatgaggctacgtttttaggtaaaaaaactgggtaatttcataaaaaatg

SEQ ID NO: 285604 - DNA, 611 bp, Cannabis indica
aatagcagtggctcgtggactaaggctcattaacgccccaaccacgtaaaaagtcttcatctcactttcttacagttcattattataattatattttaatagttgccgaaaacctcggtcaacaaacttaaattccaatatttttgtaagtttccctatttataatgaccttgaggcctaaattattctcatctatataattatgcttcttttgaaaaaaaaaataacccaatcctaaacacaaactcaatatcgactgacagaatttgccttacatttactacaaaaaactattacttttattgacaactttttagtcataatataattttttttgtgactaaatgtgatttttagtcacaataaaatgttacttgtgactaaaacatagtatttagttacaacttgtcactaataaagttttagtcacaacaagtattgtgactaaaaatacatttagtcataataaattgtaatttttgtgactaatacctttagtcacggaccttttagttacaatatagtaataataatttgtaattagtcacaatttttttacttttagtcatgagttttgttgtgattaaaagtaaaattttttgtactgatta

SEQ ID NO: 285605 - DNA, 507 bp, Cannabis indica
tatgctgcctgtgtaataatcaagctgaaacagtgcaacatcttttttttgaatgtgatgtggctgtgaaatggttgcaagacatcaaacagtggctgtcttggaatgtggtgtctttgaaccttgttactctacttaggtggattgcaagggccaagatttcgagatttcgcaagcaggtatacactgctgctgtagctggactggtctatagtgtgtggaaactgaggaataacatcacttggcaaggggaatcattgtcctctaatcgggtggttgaggagacaaaatggaacatcaaaaaccgaattgctatgttcatacccaagaagactaaagaagtagataaaacatggttcaatgaactataaggtagataagatgagatgtatagattgattgggcccgatttgggtgcctttagtttgtaaatacgatttgtgcaatataatgtcctgatttatcaaaaaaaaaaaaaaaaaataaatagtaattataaaaaaaatt

SEQ ID NO: 285606 - DNA, 887 bp, Cannabis indica
cttatattatcaacatcaagtccaagaatattcaacgcatctaaaagttcattaagcaaaccaagccctgatgtgtcatgaacttttatgaatcctagaaaatactcatcaacaaatattggactttctgaaacattcacacatcttaaaacaagagacatctgttcatcattacttgcatctggagtacaatctagtatgactgaaaaatattttgcttctttaattctactaattatcgagcttttcacctcagttgccagtagttgtatcatttcattttgaatcttgtgactcaaataatgataatgagtctcacctcttaaaatacgacgaacatgttcttgcatagttgaatcaaattcagcaagtaattctataatttgtaagaaattcccattgtttttctcatatagtttttcacgatctcctcgaaatgccaaattattttgcccaaatctttttacaatagcaagaattctctctaacacttgtttccaatgttttttctcttgattaatttgttcttctaaacttgcatcaattgttaacttcattttcagtcgtttttctaattccacccaactagcaattgactcaatatgttgtgtacttcgttcatgactttttaatcgatcagaaatattatgccagtcattaaaacctccctcagctaaaaaacccacaagatgcttctttgttgcaaacaatttacaacaaaaacaaaatactttatctaaagaaactgaataaatcaaccacttcctatcttgtttctctccatttggtaattctctaatataatgccacgaagaaaaattcctaccgaaagcatccctagtaaactcatccttaatgactctttttggacctctttcaactataaa

SEQ ID NO: 285607 - DNA, 572 bp, Cannabis indica
ttagtgagtaatcatccctaacggatgaacgttcattcactatttaacgtcttagaatctcgaaagataagtattatttgtaagtgttttattcctagtactgatcaccctaatggtgtctgctaggagtaagacttacaaaagtatgaaacaatggtggaagttcataagatagaatggccttgactctcgcctaaaccggacaacgctgggttctcatcttgatcgaataaaaggttgctagaatgtttgtcattttagatgagctgactactctattcaatggatgatatctatgactctcgcctaaacgggatactagtatcaatttgttggaaaccttggaaattatttaggattatatgttttagtattttcacttgtcattcctacttgctaaatgctaataatttctgaatgtgtatgattttctgttaaaccttacttgatttctatttattgatatttgtagtatccaatatgactatgaacaacaccatggtgtcactgttgattgaaaacaagctctctagtgctaactttatcaaatggagagagaacattaatattgc

SEQ ID NO: 285608 - DNA, 545 bp, Cannabis indica
cgaagttttcccacgtcgatatcgatgcctcaggtaattgggtaaaccaatcatgagcattttcctcgagggttgccgcaagaatgcggcacttcgcaagttgcggtacctggtccacttccattatagtattgaacttttctaagtaatctaacgggttagaagtacctttatatttgagggattcggataaacgaaacccttttggaagttgggcctgtcgcacttctgcagtaaaaggcgaagtgccatgcagcttgtatataggcttgcgctgctgctcgagcatcttcaaagcttgcagaagcatgctttggtcaattcctcctgtcgcaggggttggagtcgctgcgactgcggggctcgcaaccactgcggcaaggtttgctgggatattaatcccagtagtcgcgatcggcgcgataggcgggttattacctgcgttgacaccctgatcgcccgcatggggatcacggagcgtctcagtgttatgtgggccgcgggagcgtgccctgaaaactgcgttgagatgatcacgcagatca

SEQ ID NO: 285609 - DNA, 595 bp, Cannabis indica
tccacccctgaatgtacatccatatttgaatatagatgatattacttttcaagtggatataagcatattactctttacagagaatgatcttgtcaaaaccactatgaacaagacacaaaggctatagatttataaaatatgtggttgtggtctttcgatgacttaggtctagttacatcaaagagttcttagaatagtccaagtggatcttggtcacagaatacttacaatgagtaatgattctagcttggattgccactactaatctaactcaagtctaatttgcctaaagtaagcatatacaagtaggagatttctaagatcgaggatttataacatttcgggattgaatgtcgggaatatagtcatttgcgccattcaatttcataagagaatatagaatgacatcatgagaagatgatctataaaccattcatttaatgatatactatgtaagcaaatttgaaatcaataagctaagagaaaaaattaaaggataattttaaatttaacataagaatccaacgatgtctcggtaggtgagagtcaatgttattcttatttttataaacttctttattgtttcatattgtaa

SEQ ID NO: 285610 - DNA, 550 bp, Cannabis indica
gagaaacactgtacatgtatctggcagtttcagaagcagcggtcagcgccgcactagttcgagaagatgaaggaaagcaacaaccgatttactacgtttcgaagacattgctagatgctgaaacaagatacactcagctggaaaaattggccttagcgcttgtcacagcaggacgcaagctcaggccctatttccagtgtcatcctatagtggtgctaacccaatacccactccgtagcattctacacaaaccggaactttctggacgcatgaccaaatgggctgttgagctcagtgaatacgacataacatatcaaccgaggacagccatcaagtcacaggtattggcagattttattgctgacttttcttgtgttggacaggtacaagctgaaaaggaattattatgcttaaacgagcaaaccaactcgacatggatgctagcagtagatggatcaagcaatagtaaggggagtggcctaggaatcgtccttacctcccctcaaggagatgttatccagcgggcgatcagatgtgacttcaaacttac

SEQ ID NO: 285611 - DNA, 817 bp, Cannabis indica
ttttatatatatacattatatacattaatattacaaaaaaaaaaacgttatataaaaacaatccatcggtatgccgtgacacgtcatcaagcataccgtcattagcttcgataattttggaaccaccggcgatgaaggagacgcgcccacaattccatatttctcggccatctctgcgcgtggttctactgattaaaacagaaagctataaataccataggaataatacacgaaatcgaaaaacagaaaccaaaccaaacttgaacgaaaaaacaccattgacggaaacagagacctcgacgaatctaaaaattagagaatcgatcatcatatctctcaaacctgttgctgtatacaacaagcaaatcatcatctctctaattcgacctacaattcaatcgatcaataaacctatgagctgatcacaacaaacaaaaaagaaaactagagatcgttgcttcgaggaagaggaagaagtacgtcaactacaacatcgaaaactaaatctgaataaggtacctattatacattacgatacatactactgcttataacacattacaccttccaattcctgaaaacacctaaaaatgcatcatgtttgttaattttgttaaacatgattatttgacaattaatcagtactaatcagatagtttaccaattgtaatcataactgatagtaaactaatcaatactaagtactttaaaaaatacagtacactataaaccttcgtaattgtaatcgctccaatattatagttcaacatatagtcatctaattagtaaaactgcatatagaccttactataataaa

SEQ ID NO: 285612 - DNA, 615 bp, Cannabis indica
tttttcattctctgaaaaagatatttctcaagccttgcaactgccagagaatgtcccaaatgccataatgtctatggatcgccaattgatgctcactgaactcactggtgcacgggcagaactgaaatcgggggagagtcttcgcattacacatctaacctttgctcatgcatctctcatgcgatttgctcttagcaattgggttccaaactcaaacaagactgtggtgtctcaagatgtggcctcattcctctaccgtatcacctcaggagcatccattgacttggcctcccacattttgaaccaaattgtctcatttcgaagaggtaaaaagccaacttttaagcttgtgtttccaaatttaatctttaaggttttgtcctctcagaaaaatgtggcccaatctcatgaaactcttgagccttcactgactggaacaacattccaaccctcggagtattttgatggcatttttcaaaagaggcctaaagctggtggtgctgttgctgcaagctcgagttctgcttctgcagaaatccaggaggtcaagaatgaggttcagttggtgaacaatcgtcttgctaccatggaagaagttcagcaagagatgtcaaa

SEQ ID NO: 285613 - DNA, 515 bp, Cannabis indica
ctctcagactgtccatctgtctgtggatgatgggcagtactcaagtgaagttcagtccctaaggcttgttgcaaggccttccaaaaccttgatgtaaatcgaggatctctatcagaaacaatgcttgaaggcactccatgtagtcgaactatattgtctacataaagtcgagctagcttggtaagcttgtaatccttcctgattggaataaaatgagcagacttagtcaaacgatcaacaataacccaaacagcgtcatgcttcaaaggtgtcaatggcaacccagtaacaaagtccatggtaatcttgtcccacttccattctggtataggcaaaggttgaagtaaacctgagggtctctgatgctcagcctttacttgctgacatactatacacttagctacaaagctggccacatctcttttcattccttcccaccaatattgtctctttaaatcttggtacatctttgtacttccaggatgtacagcgaatttggatctatgggcctcaat

SEQ ID NO: 285614 - DNA, 552 bp, Cannabis indica
gccatatttttataaaaaaaaagtagaaattccatatttgtaaaacaacaataagttttgccggaaagtcgccggcaccggaaaagtcaccagcaccggaaaagtcatcggaaaaattgcagtcgccggaaaagtcgtcggaaaagtcaccagaaaagtcaacatcgccggaaaagtcaacagaaaagtcaacttgctggaaaagtcaccaaagtaaatgtctcatatataactaaaaatataaccggttatatgaataaaaactaataactcaaacttgttataattgaaatataaccggttctgtaacataataaataacataaattaactcaaaccagttataattaaaatagaaccggttctagaaaagtgttataatgaataaaaacaaataacacgaaagaactcaaactggttataactaaaatagaaccggttatataacataatgaatacaaacaagtaacacgcaataactaaaaccaattacaattaaaaacaaagaagaaatcagttctcaaaacactgaaatataaattaaagataaaa

SEQ ID NO: 285615 - DNA, 544 bp, Cannabis indica
ttcagaaatggattccatgaaaaagaacaaagtctgagaatatgtaaatgcacctgatgattatcatccaattggatgtaagtgggtctacaagaagaaagaggtgctggtggcgaagtcgaaactgttaaagctagacttgttgctaagggttatatccaaagataaggtgtggactatgaggatacttttagtccagtcaccatgcttaaatccatcagaattcttctctccatagttgctgctttcgattatgaaatttggcaaatggatgttaagacaactttccttaacataattcttaaagaaaccatctatatggagccaccataaggttataagcttccaaggcaagaagagaaagattgcaaactcaacaggtctatttatggacttaagaaagcttctcattcttggaacaaaaggtttgatgaaataaccaaaacctacaactttcgccaaaacaatgatgaaccttgtgtttaccaactcaaggataatcaagtggtagtattcctattcctttatgttgatgacattttga

SEQ ID NO: 285616 - DNA, 154 bp, Cannabis indica
aagcctacttttggtcagggtgatacgtacatttttggaacatggtagtgcaattgagtgggagcactaaacatagatatggaatctttagcttctttctagacatagaagtcaaatgatgatttccttccagcttggctaaatagagataaat

SEQ ID NO: 285617 - DNA, 665 bp, Cannabis indica
cttcatacttcataagatcaaaatttttatcaagagatcaagaattcaagaccctatccaaaagaggacttcaaaagctaaaagtcaaaagtcaactcgaaagtcaaagtcaaagtcaaagtcaactctcgagaaaaagtcaactttggatcaaaacatgcaaatcaagttaggaagctcatctacatcaagactacaaacaatcaaatggtataaatttattttagtcttgttaaagtgatttgcatagtatactagggtttataagtacaaattttggcccactcactaacttgtgcaacaagttttctcacccgatggttcaaaattttttttgattgaatttctaaatcacattttgtttaactaagagaacaaaattggaatttttgaaaacggataatcgagtaaagagttatgcgcgttttagtgccgaaaaatgcaagttttgaacctgcctgattttcggcctaccctttgaaaataggtagtccgtttttcgcagataggtagtccgttttaaaataggtagtccgtttttcccaggattctttttgaaaaatgtgctaacggctataaacggctagtttttgttcctacactatataaacttgtttttcactcaaaaatcaaggttggttgagcttctattcatcatataacat

SEQ ID NO: 285618 - DNA, 516 bp, Cannabis indica
ttaatgtaaattctgatggttttttttcttaatataaaataaaatataattaacttttagtttataatataaaatataatacaatttaaatttttttttttaaaaaaaaaaaaaaaagtttcaccggcgcattattacgccggcaaaacttaacactaaaaggttccagattggcacaaaactttttgccagcgcacttatagcgctggtaaaacttttggcgccaatccgagaaatggcacgaacattttatgcgccggcaaaaatatatcaaagaaggtttagagcggataagggtatcattttacaccggcgattaccttttgccgacattttgctggcgcatttcacctatgcgtcggtaaaacgttctttaccgaccaagattcgctgacatgttttgccgacaaagtattgcgtcggcaaaaggtttcgccggcgcatgtagtgtacttttgcctagcacaaggttttctgtagtgtatgttgcccaaatgatagacgatttgtggtttg

SEQ ID NO: 285619 - DNA, 715 bp, Cannabis indica
caaaataactgtgtgcttgattctgttaactctttggattagtttggatgcttagaaacctgtgtttaattgtaattactcaatctgtgaaaattgttataactgttttactatggtttgtggtaagattgacaggatagcttagaacttgcatgtttattcttttgaggcgaaatccttgatagtgttcaattggaatatgacttaggcatttgttggatagtttgagcctttcaagcctaccataataatgtgtatccctagtgaaccttttgagcctaaacctgttttgtttttcacccgttgatttgaaaaattttgcaaccacactattaattttttcttcaccatgttatccatgatatcataagctacataattagtttgggggagaggaaacatttagtgagagggagaaaaacctgtaagattgagaagaggaaaaattgtacttcaatgtcactgataaaaaaaaaaaaaaaagaacaataaaaagtgaaaaaaaaaatgtttgaaaaaaaaaaagactcagtgatgttgggaaaataatagagatatcttctatcaatcttggtaaatgtggggaacattatgggatttctaaaaaaaaaacaaacaaagtgaaaagcttgtgggttctatttgtgtgcttatgatatgttgagccaaaaaattgtcttttgcctatccctgaatatctgagccattatactta

SEQ ID NO: 285620 - DNA, 655 bp, Cannabis indica
tcaatatgccatatcgggaaaagtcatcaatgaaggtaatgaagtaattatagccgcccatagcaggtggaacaaaggacccacaaatgtcagtgtgaataagctccaatacatctgtgcacttatctgacttactctttctaaccttagcagttaactttcccttttatacaatcaacacatgcagtgaattcagagaaatcgagatcttgaagtacaccatctttcaccaatctctccattctatctctagaaaaatatggcccaaacttttatgccaaagcatggaagatttcaattctaatcttgcacgtttggaaccaacaacaacattaagagaagaagaggaaaggtaagagggagaagtaacagaaacaacatcatataaatcaagcttatataaactaggcaatatagagtcaagatacaaaattaaatttctagttccaaaagaagactataatctagtctatccaaaaagatacagaaaacaagttcctccgaatagagggcaagtaagcaacatcttgcaattccaaaaaaatgttctgtatttatctgtagtctaacagtcccaaaaaactctattctgactttagtatcgtcttccatatatgttggatattattttaccaggaccttagatctactcaca

SEQ ID NO: 285621 - DNA, 797 bp, Cannabis indica
tgaggccctaacaaagttgatgattggtagtgcaagccaaacaagctcaagtggtctgtgagatatgtggaggttcccatcacttttctgagtgccaggcagatgtggatgatttgccaatggatgaagcaaaagccattggaaattattctcagaacaacaacaactatgggttcaatcaagaaggtaaccgaaggaacagtgggttctaccagcagagaaaccagccccaacaaaaccaacaacagctgcaacaacaaagtcctagtggaggctccactatccaagctgatttattgctccaattcatgatggaaactagagcctctattaaaactctagaaactcaaatggaacaattggctactcaagtggcaaaacaagctcaaggaaattcacctagcactagtgaggcaaaaggaaaagagcaatgtaaagcaatttccttgaggagtggaaagaattatgatgggcctgatgtggtacaaccattgaatgaagaagttaaagatcaatcagcaccaactccaacatcaatagaaaagaaggctactgatagtcctgcaccacaacaacagtctccaccagtcagtattgatcatcatgtgaagataccttatcctcagagactccgaaagaccaatctagacaagcagttctcaaaatttctagaggtctttaaaagactacatatcaacattccttttgcggaggccttggagcaaatgccaacttacctgaagttcatgaaagaaattttggctaagaaaaggaagttggaagaattcgagacagtg

SEQ ID NO: 285622 - DNA, 755 bp, Cannabis indica
tttgagaaaataagatggaaaaatgtgaaaatggtaaaattgcaaagtggggcccaataactatccatggccggccacactattgaaatttaccatttatttttctattattttaatgctaattaaatctaacctaaccctaagtggtttcctataaataggtactgatggcttaagggaaaagatgatgcatttcattccttcagtaaaaaatttcaagcctcttctcactaccctagccgaaacctctatctctctctcttcctctcttcaaaactgaaccctatagtgaaagagtgagtgccgacacacatcaagtggtactcaatcatagtgtgtaaggctgtgaagaatccagtttcaagagaaggagattcaaaatcagatcttggtgatactctgctacagaaaggatacaagggttagagatctgagtggacggagacattatgttccgctgcaaccactgtaaggttcctgatactttatatgtgtttcctggtaaaaatattccaacaactggcctcagagccatggtaattgatttactttcaagaaatttggacttaaaacgatttgtgtgtgatttggatggtttcatgttgatctatgtgttatttgatgattgattgatgtttgcgaaatttttatgaaaataattggattttcggtctggaattattttgttggatattttgggaaaatgaaagcaattctgttttttttacaaaacttgatttcgatttaatttgaat

SEQ ID NO: 285623 - DNA, 538 bp, Cannabis indica
aaataaataatatatataaaaaattgtttatctttatctttttctttgtttattaattgtgtcgtgtttattttttttaattaaataatttttggaatttataaagttatgtttgtttatttattttttgatgtaagaattatacttcaatagaaaactcgttcactaactcattagaaaataatcaatatatagaaacaatagaaagaaaatatacttattttagtatagtataaattgactatgtctatttttatgtttacaattataataaacatactaataatataaaatactttgtatatatatgtttattttgttttctatttattaaacatactactttaataaacaaaataataatattcacatatgtttattatatcactctacgtgtcatgtttatttttagtaattttaagtattgatttatatttatatacattaatgtttataattttgatattgtattttattaaaaaaatcttattaaattataataattcatactaaaatagataataacatttatctttta

SEQ ID NO: 285624 - DNA, 749 bp, Cannabis indica
atcgcatacacgtcgcataaaattgcagaaaagatcaggttggtatacaacatagtaaagtcgcacaaatatcgcatatatgtcgcataaaatcgcagaaaatagcagagccgtattcagcatagtaaaatcgcacaaaaatcgcacgaaaatcgcataaactcgcaaaataaaacagtggcaaatgaaaaaatgtctaaatcgcacaaaaatcgcattgaaatcgcataaactcgcaaaataaaacagtggcaaatgaaaaaatgtctaaatcgcacaaaaatcgcattgaaatcgcataaactcgcaaaatgtaacagaggtaaatgaaaaaacatgtttaaatcacagaaaaatcgcattgaaatcgcataaaatcgttgaaaatcacagtttagcaaaacaaataccaaaacaacaaagaaagtcagattgacatacccttttctcaaatagggtagcgacatcaggttgcttcacatcatgtttcgtaaccgtgttgggggtgctccaattcaacattcgagggaatctagtccctctgcactgcccgtacttcttccccaaatcttgcatcacctcaaaggcccagtattgtagcgccggtgcatatccgtagacattgtacttcgcctctggttgagtaatttttttctccttcttccctttcttcttatccttagtagatttatcaaggtagttcttcctcaggtcagtcatacttttggctgtggatgacaacaacttct

SEQ ID NO: 285625 - DNA, 544 bp, Cannabis indica
gacgagttataggaataggatgatgctatcagatcatttatatttatatgttgcattatgtgtttttcttactacctcaaactagggctgttcgtatatgaatcgaaaaaccgcggtttaaatccggaccacgacaatccgaaccactgtaaaccgtaaccggagaaaccgtttttggtggtttggtcaatccggaccgtttatggcgtattaatggttcggttgcggttcgtaataaataattaatggttaaaccggaccggaccgtttataataaataatgaatttatatatattttttatatatgattatatgtctaattttgaattttttttgtgtgtcaagttttttattgcatgaatttttaaattttttatatgttatgtttgaattttgagtaatgtttttatatcgttatttatatgttatagatctattacttattatgttaaatatatattatgaaaaataaaattaagaacttagtaaaaatagtacaattacttaaaaaaataaagaataattataaattctacttaaacc

SEQ ID NO: 285626 - DNA, 625 bp, Cannabis indica
gcgctagagcttccgcccattctcttcctcagagcatcgatcatctgccgagacatgtctgcacagaacaaaaacagtatggttagaaaacagccatcagaaacacaaggcatgaaaatcaagaagctcaagaacaaaataaagtaaaatgcaaggtgaccgcccgcacaagacttagaagtccatcatcacctgacatcgatcttatctcagacatgacggctttcccttttccgaacacgggaggagatggccgaacaggtgaaatgggctcccttatgcaaattgcatgttcaacaagcctgggcgaggccgggagtgtcttcttcctcttttacggagtcacctgctcttcctcgacctcatcttcaggatttgaaggctcctgagcatactgtttggccctggcacctcctttcaacttagcctcgcgcttcagttgaatcaactcattctccagatgagttggttcagaccaactagcaccagatttcctcctcgtccccgtcacggacttaggagtaaagtcctcgggataaagcccgtacctcacaagattatcatcggaggtcaactggacatattccagtcttccccggcaactgggcaagtttttgagctctat

SEQ ID NO: 285627 - DNA, 533 bp, Cannabis indica
ttttaaaaaaaattataatcggttttatgaggtattatgtattatgaggttttttatcgcagaactagttttgtttttttatttatgtttcagtgttttaggaactggtttcccctttatcttttaattgtaatcggtttgaattattgcgtgttacttgtttgtattcattatgttatataattgattctattttagttataaccggttttgaattatttcgtgttattagtttttattcattataacactattatagaaccggttctattttaattataactagtttgagttattttatgttatttgtttttacttattatgttacagaaccaattatatttgaattataaccagtttaagttattagtttttattcatttagttataaccggttttgagttatttcgtgttattagtttttattcactataacactattatagaactggttctattttaattataactggtttgagttattttatattatttattttattttttattattcatagaaccggttatatttt

SEQ ID NO: 285628 - DNA, 754 bp, Cannabis indica
gcttcctagtcacttgaggtatgagtttttgggtaaagataaaaagctgccagttattgtgtcagcttctctttctgatgtggaaactgatagactactgagggtactccgagctcacaacaaggccatcgcttggacactgggtgacgtcaaaggaatcagtccttcaacagtgatgcaccgaattctaatggaagataatgccaagccgacaatcgatgctcaacgaagactcaatccacccatgaaggaagttgtcagaaaggaagtagtcaagtggttggatgctggagtcgcttatcccatttcagatagtaagtgggttagcccggtgcaagtggttccaaagaaaggtggaatgactgtgattaagaatgaaaagaatgagttgattcctacgagaacagtcaccggttggaggatctgcatcgactacaggaaactcaacaaagcaacacgaaaagatcactttcctttgcccttcattgatcaaatgctagacagattggcggggcaagaatattactgctttcttgatggctactctggataccatcagatagctatagcacccgaagatcaggagaagacgactttcacatgtccttacggtacctttgctttcagaagaatgccattcggtttgtgtaacgcccctgctacttttcaacggtgtatgatggctatcttttcagatttgattgaatcctgcattgaaatttttatggatgatttctcggtctttggttcctcc

SEQ ID NO: 285629 - DNA, 431 bp, Cannabis indica
aaaaacgaggaaaactagggtcactactacaaaattcactattcacgtcggtcaatgcgactgttcatcgcgttgacctacaaaattcactattcacgtcggtcaaaattcactaatattcgtcatttttaaaatgtcacaaaaaaataaataaatagcgtcggttctatatccctcactaattacccaaccgacggtaaaagtcaaaaattaaaaaaattcgttcattattagcgtcgttttaaaagtctcacgaatgctttgtgtggcgttttaaaaccgacggtaaagagattggaagtgtgagaaaacgacgcaaatcctcctattattcacttacccccaaactcgacgaaacagactttcatttcgaacagctctctttccctctctttctctgtaaggtctgaaggtctcgatcgaacagctct

SEQ ID NO: 285630 - DNA, 380 bp, Cannabis indica
taatctcaacaccttgatatacaaatcaagtgtagtgtgtagtatactctccgtaacaggatctgacattgtaaaattccttaatcacaaaatacttgatattgtgaaattcctctctatatgtctactctcttgggatactggattctttactattggcaactacttttgtgttagtcaggaagtaacactagtaatgaagacatgttggaactgtgccaaaaatgtatagaactttccttagactgaataagtacctttcctgcaactttaacattcagtctctctctagcagacctagagacttcagataggtttttacacttctccaaaatcactactccacccccagagtaatcaccatcttatcagcagacctt

SEQ ID NO: 285631 - DNA, 661 bp, Cannabis indica
atatttatatatctacatatatcttaattaatatattttatatttatatgtaatatattaatcaatatttgatatatgcacatcaataggaagagaaagaaaaatataggaaaatacattttttttttaaaaaaaaaaacaatagaggctgtcatcaaagctattaattatctatagacattgattaataatgttctattataataatcgtgcaaaatagtaacgtttgtacttagtatcatcacataaaaaaacaattcgatctacttaaactggatatatatatacatattaatattatgtatgcttctgatggaattataactcaacattgcatataattaatatatagtatatagtatatatatatatgtatatatattacttaaatttgaagaaaattggacatggaaaaatttagagagctaggatcggagtgtttgatattaatgtacgtatatatagcttaattagattattgtatggaaaaagagtaatttatataagaatttcttgaagatatatgcattaatatttattaataatgtataatatgtgaattataagactctctctttgttgaagctaaattaattatcatcatcattttcttggatttttatatttaaagattacaatgaagttccactcaagaaaaaac

SEQ ID NO: 285632 - DNA, 543 bp, Cannabis indica
tttttttgtttttttttctaataatgattgatttgatacgtggacaaatataaacctcttcttttgatgcacgattttggtatgttcaattgctacgtcatgttaaaatcaatgatatttaattcgttttctacctaacaataattcggttgtgtttagtttgatataatgtaattgtaggaataaaaatagtaagggaatggaataaaaattataggaaaattctacaatgcacccccttaagatggatatattgatgtacccctatctgttttagcattcgaaaaattttttggtcaaattttttctcacagtcatgtacgttatagttatttaagacatcctgcaaaattttaagaaattcagaaaaatttaacacgccgaaaactacgttcaaatagtgtgttgcacacgtgactattttattttatacgcgtgtaaaatagactgtttgaacattgttttctatattgtaaattattccgtaattttttaaaattttgtaggatatcttaaatagatataacgtacgaatatgaaaaa

SEQ ID NO: 285633 - DNA, 573 bp, Cannabis indica
aagatatacagatagatagatatagtggtacttatgtactgttctttcctttcatttggctgttcttaaagctattatcacgggtttgccactgtcacaactgtgcacgacatcgagttggttcaatcaaacctctcaaattctctgttttcttgtttgtcgggtttcataataattttcatccccgataaaataaaataatatttcattaccaatttggttttaaaaagaaaaaaaaaattgtggtcaaaccttatgtttatatttgtagataattaaagggttgagacgtaaatagccttaaattttgaaattcaaaattgagttagtaaatatttttttaaaaaaaaaaattagtaaaataattaaatataaataaattagctagtaaaaattataaaaataaatttattatagattgattattttaaaaatatatatataataattaaattatgttatataaatttttttttaatattgcataataatttattgcaataaaaataaataaatatattgaattattaaatattaataacaatatttgatatattgtatcactaaaaatta

SEQ ID NO: 285634 - DNA, 515 bp, Cannabis indica
tttttggtaagatcggttaagggtgttgaaattttagaaaacccttctacgaactgacgataataaccagccagacccaagaagtatccaacttttgtcactgtttttagtcttggccaatccctgacggattctatctttcctggatccaccttgatcccatctttgctaacaatgtgcccaagaaaggacacctgagatagccaaaactcgcacttcttgaacttggcatataacttgtgctctcaaagtcgttgcagaaccatacggagatgttgcttatgctcttcttctgattgagagtaaacaaggatgttttcgataaatacaataacacaaatatcgaagaaatccttgaataccctattcatcaaatccataaaagctgcaggagcattggtcagcccaaaagacataaccagaaattcataatgtccatacctagtgtggaaagctgtctttgggatgtcctcctctcagattctcaactgatgatagcccgatcggagatcaat

SEQ ID NO: 285635 - DNA, 568 bp, Cannabis indica
cgacctgtgacgtcgagtatatatggttttacctcacactgaaagggatgattaaactctcgattaccttgggaaccgccccagtaacagccaagtcaatggccgactttgcagtaatcgaccagtattcggcatacaatgccgtgattggtcgaccaatcttgaaggagatgaagatcgtaacatccatttatcatctcacaatgaagttccctactctcgatggagtaggctctgtgcgaggagtccagtcagactcgcgagaatgctacgatgcagcagtcaaactcgcggaaaagaagtcagtcaatgtcatctatttattagaggcgccacctcctcaccaggaagtccttaggatcgaagaggttccacacacagatggaccggatctagacccaaggatcctcgatcatgccgcagcggcccaagccgcggaagacactatcgaggtacctatagaccccatagataatagcaaagttttgaaaattggttctaaattgacttttcagcagcgagaacaactaacgacttttcttaaataaaatcttgatgtttttgcttg

SEQ ID NO: 285636 - DNA, 614 bp, Cannabis indica
ttcgaaattttttcactcatccgaatagaattcatcttataaatattatcaaaagaaagctattttgtaaagtaatatacaagtggacaaggtttagaagtcccattttgcaaccccatcaaagcttaatgtgcatacttgaggaagtgtaataagacattagtaagtactctagtttgcaagtaaaacatgagttgcattctcctttcaagaattatggacattttcactatgttaggtataggggaaaaatgtggaagggatagaaaataagtttaaaaaattgtgttagatccttattatttattcttttgagtgtatattttcatgttccttctatatctacactcagttgcctatttaccctttaacctttatactacaataaaatcttaatataattttttctatattttatattacatatgtttcattgtatgttaaaagtcaatactgtataactaacttgggtgtcatggtattgtaatagtaaattatcttaggaaaatatggttacttggaagcaaagggagactattttgcaacaagatgtgtgatttttctttttattattacttgtttattttattaattgtttgtgaactgctgtactt

SEQ ID NO: 285637 - DNA, 799 bp, Cannabis indica
actaatacttttaggcacgaactttttagtcacaacgtaggaataataatttataattaatcacaatttttacttttagtcacaagctttattctgactaaaaataaaattttttgtagtatatatttaatgaaaattaaatattaatttcttgtgtgtaaattcgtttttatggctgtcatatgtcttttaggaaattttgcataagagagaaggaattctcttttatgaaaagtttgattaaataatttatatatggtataattaattttaattgaatgttgtcttttattggtggaaaaagttggttttatttcttgtttcctcttttatttgtttttattttcttctttctttttctttttcgtgtgaaaaaaaaggaagtgttttaaaagaagttatacttgctttgtagctgatccttggtggataagtctcgtgttaaatggtagttttctttttgattttggttatttatttatggctaattagtaattttgtaacaccctaactatcttaggcgtattacgtgatttttaaacgtactgtgcagctcgttgctaatcaacgagggaatcatccagcatcacaaccatcaactgggtggttacgttggttgattgaggatgtttgaaagctgtctgaaccgacttcactgtcggagtgatgtattgctgacactcatttgaaatcatccggcgtcaccaccctccgatgggatttcaatcgggcgttcacgttgggtgattttaggtgttttgaaaagccatcttgaccgtttttcattgtcagaggatgt

SEQ ID NO: 285638 - DNA, 563 bp, Cannabis indica
gtcttaagaagagtcttcccagccactcaagaacccggagtgggggtacttgggccaaattgggaagggccatatgaaatcgaggatgagatcggctccggaacctataagctaaaaatgatggacggaaccatcgtgccaagggcttggaacgtcgatcatctccggaagtattaccaatagtccaaaaatgtaaacttaggccttgttaaaagaatttgtaccgtaaaagtgtatgcaacctctaaatttcaaataaaaattgagtgccttaaaaataaagttttcatgccacttagggggtactaacgcataccacacggacggatgtaaaataggccaaaagttaaaacaaagtcaaacagaatatgtactaaagtgagcatgtacataaaaatatcctcgcccaaagggcaggttcaaaaaaaatataataatatatagcataccaaaggcctggggacgggctgcaataactgtctccccttaaaagataatttaaattgtcttaaaggaaagaaaaaagactgtaaatagaaaagagatatatgattataatgctg

SEQ ID NO: 285639 - DNA, 650 bp, Cannabis indica
gatgttatgcattctgttctcttgtttttttttcattgtttttgtttttattgttattttgtagtgttttatgtgtgttttagcagtgtttttattgttttggttttatgattggaaatgcaagtacactcgatctcaattctaccattctagagtagtaatatctggttattactctgtaattgaagacattaaaagaattcttactgaaagccaactggaaattttttcaaaaactgtgtttggttattttcttcggattccagagtacataatccattaccaactgcttcattgtttgctattgagggaggttcagcagcctaatgggttggagttttgggtttgtgtccaagggaaatatcttaggtttagtatcgaagagttttcgtttattaccgggttagattgtcaggttgattctgatttttatcagtttaagcaagatgataatgaactggtcaaacattgttttaaggggtacaaaaaaattaccaagggtgctattcagactgcttttattgctgacaatctgaaggataatgacgatcttgcagtcaagttggctgtcttgtattttgtgcagtgttatttgttgggtggtcccccgggtaaagttgtttcgtcagaggaaatagatgttgtcgata

SEQ ID NO: 285640 - DNA, 736 bp, Cannabis indica
catctttatcagtcatagcttcttcataggacttaggttctgtcatttccactcccatagcacaaaagaatgcataggctagcacttcttcccaagctgtgaagctgaatctctgtgtaggtctaggaacccttctagttctgtctctggtcagttggtaatcttgtattgcctcattttcttgtccttcttcagtaataggttccacctgaatgttgtcatcctgaacttggtcatttccttccaagttttcatctccctgagtattttccacctgttctggttccacctgaacagtattaggttgagtgttccttgtttgcatgtccacagatgtgcctgcagggttagtgtctaaagtaggactagatatagcattgttattagtaatacaaggaaataagtcttccttaaaaacaacatccctactgtttatagctttaaaaccttgtttctctcttacccataatctgtagcctttagtaccttcaggatagcctaggaacacacattttagagctctaggctctaacttaccaacactctgatgtgcataggctgcacatccaaatactcttaagtttgagagatcaggaggcttacctgaccagatctcctctggtgtcttgaattcaatggcactggatggacttctgttcaccaggtaggctgctgttaacacagcttctccccaaaatcctttagtaagcccagattgcaataataggcatctgac

SEQ ID NO: 285641 - DNA, 777 bp, Cannabis indica
atatatatacttaattagattatttatgtacacatactgacatataattaattattttgcattataaagataaatacaaatttaaaattataagtatatattctagtcagtttttgtaattttatggcaaacactaatgaataacgatctaaaagttagttaagttacttacatcatcaatatatgagattaatattactgaaaataaagattgaaatttaattattgaagaagcaaaacaaagaaatagttaatatatcttcatctttaatgtgatatttttaaatataattaaacaattgaaattatgaaatatgtaataaatattttaaataatattttatttaaatcatattgaaaaaatcaagattaacaaatatacaagaatttcagtttatactctattatgaagaagcaaaacaaaaaaaaatagctaattatttgtcttaaattataaattacatatagctaatattttatgaattagaataataacaatctaatatgtttaaataattaaacatcttaatttaaaaaaaaaaaaaaaaacttaatagaataatgtaaaataatatatatgtaaatatataatgaaacttataataaagatcatatcttccatttgccgcctaatatatattatatataaatcaatttcaaactatttttatgtatgattcaaacgtttcaacttattataccgttggtttgtttttttttttcttttgtttaaacagtgtcaaaatattatatatatatatatatatacacgttttt

SEQ ID NO: 285642 - DNA, 558 bp, Cannabis indica
gtgggtcacaactcattggctacgcagatgcaagatatttatctgatccacataaagccagatctcaaactggctatttgttcacttgcggtgacactgctatatcctggcggtcaacaaagcaaactctggtggctacttcctcaaatcatgctgagatacttgcaattcacgaggcaagtcgagaatgtgtttggttaagatcaatgacacaacatattcgaggaacatgtggattaacatctaataaagaagtaccaacaattctctatgaagataatgttgcttgcatcgctcaacttaaaggagggtacattaaaggagacagaactaaacatatttcaccaaaattcttctttacacacaatcttcaagaaaatggtgatatcgatgttcaacaaattcgatcaagtgataatcttgcagacttattcacgaagtcattaccaacatcaacttttgagaagatggttcacaagattggaatgcgtcgattaaaggatctccatgaatgccaaaatgagggggagtaatttcatactgcactctttttacctt

SEQ ID NO: 285643 - DNA, 578 bp, Cannabis indica
tcgccgagcaaaaattacaaaaatgacatatttcacatataagctaaataatacccctagagtttaataaaatctccggaattaagaaattataactctaatatttatttctaaatattggggtccacaattaaataaattcataaataataataaaataataaaaattagtgctaattgcccaaatttttccaaattactaaagcggtcattacaattatccccccgttataaggatttcgtcctcgaaatctaacctgaatagctctggatgttgagtcctcatatcagactccaactcccaggtggcttcctccaccttgctgttcctccagagcaccttaaccagagcaatagtcttgttccgaagaactttttcttttctatccagaatctgtacaggttgctcttcataggataagtctgattgcagttcaagggcttcataactcaagatatgagtcgggtctgacacgtatttcctcaacatggaaatatgaaatacgtcatgaacagccaacaatgctggtggtaaggctagccgatatgctacctgcccgaccttctcaagtatctga

SEQ ID NO: 285644 - DNA, 754 bp, Cannabis indica
gaatgaacaacaaaaaaacgcaaaaatctggggaaagtgtaaatgttgaaaaagggggaaacgagaatgaaacttaaaaccaacctgagttcgatcttcagcagaggcacaagtttttttcccagaaatttctggaaccgtttgctcctccacgttgagcttcgttttcttcgaagaatggggcctcccacgcttggtcagtggagcatcaaaatcagaatcatagtcttcaaggatcgggcgtttacccttggatttgttggccaaagttttcttgcccattttcgatttttgtttgagaactggagaaggtgatgatgatgaacgagtgattgccatcttataaataaatttgaaaaaagatgaaactgagagggaaaaacagttgagaaatcgtgggtttagtgggagttgaaattttgtggatgaacaaaaaacgagagggaaaaaacgtgatcaataatgggtggttaagcttatcaatggaggttacttgatcttccaaacaacttaaaaacagaaggaaaaatcgaaaatgaaattgaaagaaaaggaaaaaagagagggaagagagtgggatttgattgatgagtgatggggatggcacacgtgtctgtgcatggaatgatgactaagtggtatttttgtaataaaacaaagatggtaagtaaaaaagttgatgtaggcgtgtagggttttttttgtaataaattgtgtaaattggatttttgatgtaaaaatttctattttttat

SEQ ID NO: 285645 - DNA, 799 bp, Cannabis indica
tttccaagtcttacaatgaagcttttgagatttttggaaaggatagctagcaacaactatcaatggtcaactaatagagctcctacaagccgaaaagtagcgggtgttcttgaagtagatgctttgaccgctctaaccgctcaaatggcctcaatgaccaacattttgaagaacatgaacatgggaggaagtgtacaaccagccgctgccattcaaagggcagaaatttcttgtgtgtattgtggtgatgggcatacttttgaaaattgcccttcaaatccagcttcggtttgctatgtgggtaatcaaaacttcaaccgcaacaacaatccatactcaaactcctacaatccggcatggaagcatcatccaaacttttcatggggaggtcaaggggcaagttcaagtggagcacaagcacaaggaaaacaatcatttccaccgggattttctcaacaaccaagacctcaacaaccacaccaacctcaaggctctcaaactagttctttggagagcttaatgagagattatatggccaagaatgacgctgtaattcaaagccaggcagcatctcttcggaatcttgaaattcaattggggcaattggccaatgatttgaagaatagaccacaaggcactttgcctagtgacaccgaaaacccaagaagagatggcaaagaacattgcaaagcggtaaccttgagaagtggaaaaattcttgagtcaaatgtggctgcaacaggcagtaaggagccctcttcaatccaaaaagagggggaaatgaagaaaaaaccagcaa

SEQ ID NO: 285646 - DNA, 716 bp, Cannabis indica
ccctatgaacgtactccatatacatcgcgtagaaggctagggcagtgcgataactgtttggagttagttagaaaggtgatacatcgtatcgcctaagaatggctgcgatgaaaggatgggaaggggaccgactaccccacatcggagaatgggtattgagactaccacatcctctgtgggaataatcgcagggttggtaaaagggagatgcgccctttgggtcggtttaggtcgctgaaatgcaagtcgcagcagatttaaccttgtaaaggtagtgaagtctgatttggtaaccctcgaaatcagatcttcgcacgcaaagggctcgttcagctaggtatcgtcgaccgaatctgtcccactcccttccgcctcttcttcatccttgcctgattcgcgagctggggccgtccagtcatcgtccatttcctcaatttcgacatcaagagcgtgcctcgaatgaataaggtagccgcgggccgacaccgtggactcgctgtctcgaatgtcgatggtcccaggttcggcaagttcctgcaccattctttcgatgtctgcagaagacatcgggcctagctctattggtgcggcctcctcttctgaaatcgaggttgggagaaagctgtcttcctcctggtcatcgtcgccatcgaatgcatggcctctccgagccgagctgctggctatccgacaagtccgctcagtctgaaacgata

SEQ ID NO: 285647 - DNA, 425 bp, Cannabis indica
aatgcatcctggtagttgcataaactcacacctattgatgatgaatcttaagttccaataagcaaatttacttggaattgaattatcaaaggaacgggtacaattcagacttaatagtcttcctccagagtataatgcatttgttgtatcttacatgatcaacaattttaactcttctgacatggataagctcgaagcagaattacgagctcatgaacggaatttgattgcaatgccacctcctagttttgcaaactttaatcagaggaaaaggattaagcatgaagcttctaacaaagctgcttcttcaagtacaattattagacataatgttcgaattgtaatgaaaatggacatcaagaagaacgatgtccctggcttctaaacaattcgaacgaaggtaatgcttttgtctttgaatcatg

SEQ ID NO: 285648 - DNA, 540 bp, Cannabis indica
agaaggttggacaagtggcatattgattagctttgcctccagctctttcagcagttcacaatgtattcgatgtctctatgttgagaaaatacatttctgaccctgctcatgtgcttagttatgagaatcttaagttgcaatcagacatgtcatttgaagaacagctggttcagagccttcacaaaaggataaggtccttcgaaagaagaccatagctttggtcaaagtactctggagaaacaacaaggtgcaggaggccacctgggagttagaatcagacatgagagctcaatatccagaattgttcaggttagatttcgaggacgaaatcctttcaaaaggaggataattgtaaagaccgcttagctttaatttagaaattagcaaataattagggcttaactatggaaattgtttattaactttgaattattaatttatgatgatttatttgaattcaggatgtatttttatgtcaaatatagaaatttcataattttgcatgttttgtggccaacaacattggaacacggtgtttgg

SEQ ID NO: 285649 - DNA, 560 bp, Cannabis indica
taagttgcagtagatagggtttttgttgtaaaccttagtcccagtcgtgatttagcgggtcacttatgcgtgttgttatcgatgtgatttaggagcctataattcaccgagcagttgttccactcaggctgaccggcacacctaaattcgaaagcctgttagattacattgatagcagtaatagtatacatagagttgtactgattactgataaatgtatgttggctgaaatactgattgatgttatcacatcaatatgggtagagtatgactaccatattgagtataggctgacattatggtcgatagtattgtcgtatgaacgttctagactcagtaccgtgtgggacacggggattagggttatgatcaggtgtatgggcgccaggttataacctgtgttagttgtatgtttatgttatgcttttcttactgggtctgtcgactcacagtgctattttcatgtgtaggtaagggcaaagctaaagctgaggaatcgtgaggacgagcagatgaaggttgtacatgtcggggcggttaggcttgaagcgtacgatcct

SEQ ID NO: 285650 - DNA, 691 bp, Cannabis indica
gaatggttgggattttagaatttcccaaaatacccacttagtgacctttagtcgttattagtatggaagggcaaaaaggtcattttgctcttgagtagtttgtcttttttgtgggatgtattaatttgatttttagtgttatgttggctggagttaatttaataaaagcaaaatcttttattcttttatttcaaattaagacaatcaaggaaaaagctttctctaccctctcttgcttctctctttggaaaaccctagaccagctagggttggttgtgttttcctctcaattcaagtaattctcagcaagtttagtgatttccaagccaaggtaagccccttgtggctttcttttagtttcttgaattataaggaagtgaaagtttgcatgatttgagattttggttgttgtagctgctgctagtgtttgttataattttcagtggataaattatgcttagatatgttgttttgggctggttgtgatggcaggtttgatgtttgagcaagctttcaattttagaactcaagattggcgctttagtggcatatttagtttctgagcttgtggaagtgttttattgctttgatattgttctttgaggtctaaatagcaagtctgaaaggtttcatatggtttggggttgaattggttgagttatgaatttttgagtgaatcctgcactgaacc

SEQ ID NO: 285651 - DNA, 680 bp, Cannabis indica
gttgatttcattaaaaaaaaatatatggaatagttttaatctaaatccaacctaattttcatgatcccataataaaaatataacacaaatctaacttaataagcaaaagtcttaataaacaagtcatacatcaaatgcaaatattatataaaatattaaatcaatgtgtgcaggtgcacagtataacctattaataattaatatatttttttaaaacaaaataattaaatatataaaattataaatattaaatatgattggatggacattggatgatattggattggatcggttcggttatccattggatcggatgtctcatccaacatccaatccgatccaattagatttttaaaatttgcatccgatccgatccaattatgattggatatccgattctattggatcggtcggttgggattagatcggatgactttctgcacacccctaaagttatccctttccttattttaataatgtaagtaaacaaatgtaaatgactgattaccttaccattgattcacattacttgttagtaaacatgccataattttgtaaggaatgtcattaaaggtaataaattttaattatttttattttattttttaatattaaatatataatgataattttgtctttaaaatttatcttacaaaataactatcatataatatagttta

SEQ ID NO: 285652 - DNA, 470 bp, Cannabis indica
taaataattagaattggcattttaatggttaaattggaaaattggcatttttgagaaaatggaataaaaaataacaaaatgggaaagttgcaaagtgagacccaatttccttatatgggccgcccactatgcataggcttttaccattttatttttccattattttaatgccacacaattctaacctaaacctagagggcattctataaatagaaagtaatggcttcaggaaacaacatacaattgcatctcattcttttcagagagaattcctgagcgccacttttctctctcttttcttctcttctaatttcgaaattcccttgagtgatagagtagtgcccacacacatcaagtggtacctcaatcatagtatgtaagactgtggaaaatcaacatcaaagaaggagaagaagagatccagattcagatcttgattatgctctgctaaagaaaggaatcaagggcta

SEQ ID NO: 285653 - DNA, 542 bp, Cannabis indica
tgttgatagaacccattattccttcgattacctccttgattaaacccatagttgttgttgttttgagagtaatttccaatggcttttgcttcatccattggcaaatcatccacatctgcctggcactcagaaaagtgatgaggacctccacatatctcacagaccacttgagcttgttttacttgattagacatcaattttgttagggcctctacctgagctgtcaacttggtaatagcatccacttcatgcatacctgcaacttttttagatggacctctttctgttgaccattgttggttagtcatggccatctcttcaagtaattcaaaggcctcattagcacttttcctcatgaaagctccaccagcagcggcatctatgagtgttcgggtttcattcatcaacccattgtaaaagttgtgcacttgcagccacttctcaatcccatgattagggcattttctcagtaagtccttgaacctctcccatgcttcataaagagattcactgtcctgctgggtgaagttattgatatcagc

SEQ ID NO: 285654 - DNA, 594 bp, Cannabis indica
tatgtcttatttatgaattttcactaagcaatgacttaattgtgaagaaaagaggttttagggtttatttgttaattaagactttgtggagtctaataataaataagttaaatgacaattttatttgataatttattataattattaaataaatatttttgtatttataggattaaaatgagaaaatatggtatttgtgaaataaaagataaatggttaaaaaaagagaaaaatataacgaaacttacaaaaatactacaatttgggttaagtttcaaaaatactgtgttttataaaacactagtagaacacaaaacagatcaactcaaaacaacagtagaataactaaaaaacataagtagaacaacagtgaaaacttaacatagtgtactgcagtatgaaacttataaaaaaacagtaaaaatgtaaaaaataccgcctggcagtatttttataaaaaaatggcaaaagttagtgtaccatgtaaatttcccaattataactacttgggcccatctatatggccaaccacttagtgtataatttaccattattttataattttttattccacataattcaatcctaacccta

SEQ ID NO: 285655 - DNA, 519 bp, Cannabis indica
tgttgtttgattcaggagctactcactcttatgtgtcgagtagagttattgaaagttttcacaagccatgtgatatttatgcttcagggtttggaaccttgttaccctcgggagatcttattgtatccactaggtggattcagtctttctctttctggattgatggttgtgaattaaccgccaatctgattgagttgcaattgtctaattttgacataatcctgggaatggattttctgtctaagtatggggcaacgatcgactgcaagcggaagatggtggtgtttgagcccgatagtgctaacccaacggtgttcgtgggtaagattcaggggacacgcataccaagaataacactgttgaaagcgaaggacctgatgagcagaggttgtttaggattcatagtcaccgtagtggataccagccaacctgtgacatcagggcctgagaatacaagattggtatgcgagttccttgatgtctttcctgaagcttatcgggattgccacctacccggga

SEQ ID NO: 285656 - DNA, 670 bp, Cannabis indica
atcaaaaactatataaaaaacttataagaatacttatctttcgagattaaatggtgctaacttgctaatgaacgttcctccattagggaggattactcactaaaacaatagctatgtaaaaccaacaatggagatcctgcaggacctgtctgctgaaaggcgggcattctaggaggaggctgcgcggcaggaggccctaaggccaagttcgaggaagaggctaagcaaagggaagcccaagcggaggcgatgatccgagaggaggtcgttcgaagggataggctggaggcaaagcaccgggaagcattgagggcggagggcgaggctgttgccaaggccaaacgcgagctccgggaggctagggaggccttagacgaaatggctgccaaggtgaagtccttagaggaattgcattaggcggacttggagtccagggctaacctggccgtggagccgaaggagcttaaggactttaaagaccaagccttgaagaaggctaagaaagatgagctcctttctcctatctcctgcagccgttgcatcaaacgcttcaatgatggcatctacatggccagagtatcaagcatgacttctatcgaaaacctgtggagatgattgccaaattccggagaagaagagaagcttgacgccatgctagaggcgcgcattg

SEQ ID NO: 285657 - DNA, 706 bp, Cannabis indica
acattaaattatatagtacacacacatatatatgtattatattattatagatcattatcatatacttatttccacaaatcattttctcttatttccttttaaaatataaatcccatctcaacccatctttccaaatctctatataaacacccccaaactcccaattacttacgaccaaatcaaaactctatcaatcataatatataaatattttctcatcaaccaaacaaacactaactaatatggctcctaacatcatgatcaacggtgcaacaggcagaggcaggagtctagccaagcaagcgagcggtccaagccgagcttacgtgacgttcttggcgggtgacggagactacgtgaaaggcgtggtgggtttagccaaagggcttagaaaggctaagagtaagtaccctttggtggtggctatgttgcccgatgttccacaacatcataggaatattctggtggagcaagggtgcatcgtaagagagattgtaccactccatccacctgaaaaccagactaagtttgctatggcttattacgttatcaattactccaagcttcgtatttgggaggtacctacctatacgtgtatctttattactccatgcactacacgtattaattatcacatataatattagctaaatattattttagattttgtgttttgtaaagttatagaccctctattttgttaaat

SEQ ID NO: 285658 - DNA, 540 bp, Cannabis indica
atttgtccctatttgatgtagatcatctatagaggatctttaactatttagattgaaacaatgggtaatttaaatcgcatctatttttggtaatagtgtgttctatgtaattaagagttcaattctaaatctatgtcaggagaaattaataagttagaaaatttacttggtaaattttggatctacttattgtaagcttgattacatagggtcatggtccccacactagttgagataatagtgcttgtacactcagttaattaattataattccaaattagactttttattgtttatgaattttcactaaggtggcttaatagtgaagaaaagaagttttgggttttatttgttaattaagagacttgtaaggtctaattaataaataggacaaatggtaattttatttgataattaattataattatgaaataaacagttttgacatttataagattgaatttggaaaatacggccttagtgaaagaaaagatgaattataaaataaaatggtaaaattgtaactagtgaggcccacta

SEQ ID NO: 285659 - DNA, 466 bp, Cannabis indica
tttgtgaagaagaaagatggaactcttcggatgtgtatcgattatcgggagctgaataagttaaccattaagaataaatatcctctgcccagaattgacgatttgtttgatcaacttcagggcaaaacggtattctctaagattgacttgaggtctggatatcatcagttgagaattcgagaagaggatattccgaagacagccttccgaaccaggtatggtcattatgagttcctggttatgtccttcgggttaacaaatgcaccagcagcctttatggatctcatgaatagggtattcaaggatttcctcgataattttgtaattgtatttatcgacgacattcttgtatactctcggtcagaagcagaacatgaacaacatcttcgaatggttctgtagggacttagagatcataaactctatgcaaagttcaaaaagtgtgagttctggctgtcacaagtgt

SEQ ID NO: 285660 - DNA, 530 bp, Cannabis indica
agtgttagaacatccgtgggaaaccaccaacacaagatatggcaaataagctagtcctaccctgactctctaattcggccctagcaaagttccgaatttttatgctggcagcatcatctccgagatagctgtccgaaggccggaaccagctggatgtaatgtaagctgaaggacctaagggaacgggctccggaggaccagaacccatccgagaccgacctaggaaatctcctaagtttgaaaaataaaattccttcaagtgatccccccaccgggtcgagggcatcctaaacctataaagacgctcgtcgaaccctacgggcctacgactggcatactcgccaacagaaggaacataatgaattaccaaaggagacttaccgccggcgccggaagtgctggcaccaggagcccagtgttcggctctggaaccaaaggctgtggcctgggagcccttctctccgttgaatccccaatgtgaaggggcttcccggcaatcgcctgactccttctctccaccgggctcccca

SEQ ID NO: 285661 - DNA, 517 bp, Cannabis indica
ttactttccattccttgccatttctgctcgaatttcccagagagaaaattcctcaaagtagcacgaactgtcttaatacttagacacttcattcagttttccagtgtttgacttcgccagttctcctcaactttcactcaaccacattcagtacccccagttcaacgatctactgtaagtttcttgcatccttagataataacatgcttatatttacttcgttcgttttctgggttcgtacttagaggcttctgggtgtgtgagtgtttaagttcttcgagttctgctttatgtttactgcgttagttgtagaatcgccattatcatgcccctgttgtagtcatacagctttgtttgaagagggccatgcattcttcgtttaacagttgcttagggcataggatggcttttctcttttctttttctttttgcaaaaccactttctgcgatttcactgcacccgacacttgttcagggattctctccagagtttctcatgtgacacgtgtccggaggg

SEQ ID NO: 285662 - DNA, 640 bp, Cannabis indica
tgcaacataaaatgttatttctgatcattattaataagtaaatctgattatattgaaatgagttttatttagggcacaaaacccaacaccattctatatggagctttagaaacaggttcgactccaggtgctagatcaattacaaaatcaatttctcgttgcggcgacaatcccggcaactccttaagaaacacatcgagaaaatctctcaccaccttgactgcctcaggcccaaatgtttcgggtctgctggagtcaatcaccactgcaagaaatcctacacagtcactgtatagtaaatctctagccctcagtacacaaataactgggatccgagatccctgaactgatccaatataaacaaatggatcttcaccttctggctgaaaagtcaccattttccgcttacaatctatactggctgaatacttagacagaaaatccatccccagtataatgtcaaactcagttaattccagttctataaggtcagcgctcaactccctatcttcgatcctaaccggcatagacctaatgcgcctattagagataaccaactccccactaggcattagggttccaaaccctctttctaaaatatcacaaggcctacccaaaagatcaattattcttgtagcta

SEQ ID NO: 285663 - DNA, 601 bp, Cannabis indica
ctctctctctctctctctcggctggtgtggtgtgctagggctgggattcttttgatttttcaagctctttttcattcaatctaagtgttcttcaagtgcttggtaagacccttgtatcttgctcttttagtttcttgaattttgatgaaaagaaatggtttgcatgcttagtttgagttgatgttgctgttgtgtttttaatgttgtttctgaagtttaaagctagtttgatgaatgatagtagctttgtttcaagcttggaattttatactcaaaactatggtttttcaaagtgaaaatgtgaaaatagctgctgtaaagtttgattgtgtttgagttcagtttctgcagtttttatatgcatgaatatggtttgatgcatgttagtgttgtttaatcaagtttgagtttggaactcaaagcttgatgctttaatggtgattttggtttgtttgcatgaagctcggtttttatgctttagaaatgttccttagggtctatatagcaggtttggaaggttttgtttgaattggtttggatttgagcaagttatgaatttttggttgaaatctgcgagaaaccggaattctggttgtgcatc

SEQ ID NO: 285664 - DNA, 594 bp, Cannabis indica
tctagttcttatgaaacccagaattctcgacccctaccttaatgattttggggggtatttatagtgttttcgtggggtgatccctagaatttaggtgcatgtctttctgtaatattcagtaaaggcacacattcccaatggatacatcataggaaatgcatggtctaatccctagactttttaggggtttaatggacgtagtcctttatccttccttgattgatgtgatttctcataaagtagccatcactaggcttattaatcatagcgtagtagctgcagcttcaataccccttctcccatgcggcattaaattcgaggtgactgttcagataggatttgacacctcccggagatgctttgtcgtagctttgctctccgggagtatgtgaaacccacatgccttctccgggaggcatgttaaatgttgatccctctaattaaagagacttagctgaattatcccaaagttaaacctctttagtctacgtgtctcaatccggttggtccacgtattttggacaaaatcaggagcaacatttaccccccaagccttgttaagtaagaaagtaaacaaggcttgcttagatgcct

SEQ ID NO: 285665 - DNA, 705 bp, Cannabis indica
ctccaggtcgcgctgctttgacatggagctcctaccacttccaccataatctggaatcaggcaggtgacatcttgaccctctgccataatctcctgaggtctcacaataatttcctcagggctttcagcccaagaagcattcttcatatttgaatccccctgaaagactgaagattcatggatccaaatcttttcatgcaatggttccacttgattaccagccattccatgtttcgctggtaataccgaatcaaaaataattggcatttgcggtaaagatactacaggagacctttgttgcttcaacctctgaatctcttcttcatgtcgttgaatcacagcttccatttctgcaaatctttgctccaaatccaacggagcctgtgattgataaccatcactcccgtcggaagccctccaaggactttcaccttggttacggggacaacttggactccattctctccaaccgttactagccctgaccactttattctgactctccataatgcaccaggtgtccattctataagactaacctgtcagttagtaagtcagcctggtcaggcaacgacctatttacattcttactaccgcacttatggattttaaggcaatgcacttaacataaataattataatctaatatgcttcctaacatgctttcatattcacaattatttaaaatactaaacaagtacaggc

SEQ ID NO: 285666 - DNA, 437 bp, Cannabis indica
caacaacctatttactatgttagtaaaatgttactaggggcagagtcgagatatccccctcttgaaaaactttccctatgcttaatccatgcatctcgcaaactaaggccttacttccaagcacatctcaaaaaggtgttaaccgatcaaccattaaggcaagttttgtcaaaaccagatgcgtctggaaggttgataaaatggtctatcaaactggggcagttcgacataacttatcacccaagaacatccataaagggccaagctttggcagatttcttaataaaagggataattctagatgaaaatccacttatccagcgagacgcagaaacttggaaattgtacgtggatagagcatttaatgaaaatggctcgagtgcaagggtgatactgatcttgccagataactttaagtttcactacgccctaagatt

SEQ ID NO: 285667 - DNA, 551 bp, Cannabis indica
aattataagatttagctttgtgtatgctttgaatggtaaatttggggatttctagttgctgaatttgggttagaaaaaaacatgctgaattttgattcattttggtgacttccttgtgtagcttctttatgagttcttggtgattttgctcaagttggagctttgaattttatgttgtttaatctgaaattttgatgtgttttgctggtgttcaagcataaaaattatgtatgttaatgcctatttaggtactttttatttggtgaatgattagcttgagttgtgtttgggtttgtgttgaattagatgagtttaggggctaaaattcattgctgaatgctgatttttagttgctggtttttggtgttgttggaagtgaattaggtgtaattccactctaattacttggtttatgctaggtgaaagtttggtatgattgtgaattgatatagcatgaaaattggtatttttggatgcattttcgtggctggaaacaaggttttctgggtttttaaacccagtagccgcgaccatttttggcagcttattgt

SEQ ID NO: 285668 - DNA, 525 bp, Cannabis indica
aatgcggttcaaaaaataagctctacggctgaaagcccacataaagacatggaaaagaagagtcacagaagtttctaaccctagggtttcctaagcattctttctacagcatagttacattcaaagcgtaaacatgcaaagaaaagcataaagggaatcagaaacttactcaaagattcgaatgtctgagttcaagcaaaccagcaatcgtctgtaggcacttcggcaactttgaagccagaaaactctctcttttttctcaggagtttacttaacaatgaagggtgataaaatgagttatgtgccagtgcgatgagtatttataggcaaaagggtaactgtatacaaaggtaaccttagacgcctcgacttccttgcctcaaaagcaaatatgggaaattaaaagtaatcaagtgcaaccgtcagccgtggagagagaaatttggattttcaaaatattaattgttagagtattaattagccgaaaaccgaaggacgccagtcagcttcacatcgagtctcgaa

SEQ ID NO: 285669 - DNA, 259 bp, Cannabis indica
tgtatttgtataaataggggttcaccccattggaataaacaactaagaaaattctcattcactttctttctctcttcatcttcttcttctttcttttcatctactttatattattttataacaatatcatattttttctaaaataaataaattttaaaaaaaattaaaagaattataccgaaaataagttataataaatactctaaactctattttattttaaaatttattatttattgttcatactctatatttatag

SEQ ID NO: 285670 - DNA, 600 bp, Cannabis indica
tacaatagtatctctgaatatataattcttagatagccttagcttatagcgtttcggcgtatgatctctgttttttcgtcctccctgcccagtgaacattcctcactatttatagggcaggaaacttgaggaggaagagtttcctctctcgttacaaagcgcataaacacaaagatcgtgtgatcattgctgaatgctaggatcgtgggattgaggccgtatacaccgatagtggaatcgtgtgtatgccacatccacgcaagttgatccctgagttatagggattgagctggtgactcacgaagtgcttggttgaattcgctaagtgttgctcattctgcacggctcgttgagtattccatcatggacatgccagcgaggcatcctgctcggcatgttcatccgaccaggtgctctaagttgatgccacgtgtcaccattcttgtgatgccacgtcagagtgccaattttgggataacatttgccccccaagtctgtgcgggacctccgaggttgcgtatagacttattccgagctggctctgcctttgaaaggggacacgtgtcgagcatgaccgttcgagactcgatgtgaagctga

SEQ ID NO: 285671 - DNA, 512 bp, Cannabis indica
aagcttagacattcattctcgatgaaaacaaaaagcaaagacacaaattaaatgattgatcaagggttgaaatttatactatttacttaaaataagcaaagctcaataatctatactacatgtctaagtaaagcatattatatatatatatagatgaataatgggagagattaatataagatactacagttagggctcgtttggaacgccgtattaggtcgtattgtattgtattgtattgtattatattgaattggattatatatcatatttttatataatactatgttaaactttaatttatactaaaatattatatatttaggtgtacataaaagttaataccacatatagttttacataaaaatattgacataaaatacaattcaatataatacaatacaatacaatacgacctaatacggcattccaaacgagctcttagagaaccaaagtatgtagccaattagagcaaacgataaaactgttaatcccttcaaccccaatcttat

SEQ ID NO: 285672 - DNA, 584 bp, Cannabis indica
tcctgatggcctcgaggaaattacggccatacttccaagcacatccgatcaagatactgaccaaccacccgctccgtcaggtcctccaaaaacctgaagcatccggaaggctcctcaagtgggcaatggagctaagtcaatttgacttgcactacatgccccgaatttctataaaaggccaagccttggcggacttcattactgaatgcaacgaagccgaggcaaccgcgaatatgccggtaccgccaatccccacatggagagtatttgtggacggagcctccaatgaaaatggttccggagccggagtggcgatgatatcaccaaccggactgcgactccaggcggccctacggttcaacttcgcagcttcaaacaatgaggccgaatatgaagccctaatagcagggctgaaattagcaaaagctgtaggagccaaaagagtggaagtctatagtgattcccaactggtcgtaaaccagatatcaggagaataccaaacacgcggcgagcgaatggccgcgtacgtaacaatagtccgggagctgctccacgagttcacggactacaaaatagaaagaatc

SEQ ID NO: 285673 - DNA, 610 bp, Cannabis indica
tataaggtcatgccatttgggttaaagaatgctggggcaacatatcaacgattggtgaataaaatgtttgcgaatcagattgggaagaacatggacgtttatgtcgatagatatgttaggtaaaataagtaaaaagtggaagtcataccacggacctcgcggagtgcttcgaaatattaaggaagtacaatatgaagcttaacccaaaaaagtgttcctttggagttacctcaagaaagtttctgggattcatagtcaatgcaaggggcattgaagcaaatcttgagaaaataaggctttgatagatatgccatcaccaaccaagcctaaggaagtacagtccttaacaggaaggatggatgcacttaacagattcatttcgaagtctactgataagtgtctaccatttttcaatgtattgcgaggcaacaagaaatttgaatggacagaggaatgcgaggaggcctttcaaagcattaaaaggcacttggcgacacctccagttttggcgaaaccactaactagagaaacattactcatctatttagttgtctcaaaagatgcaattagtgcagtaatagtgcgagaagagggaaagcacaaacaacct

SEQ ID NO: 285674 - DNA, 507 bp, Cannabis indica
atgtttcgaagtcgtccggagatacggtatgaagctcaacccgaaaaagtgcacctttggggtcaagtcaggaaaattcctgggcttcatagtcagccaaagggggatcgaagcaaacccggagaaaatccaagctctcctggacatgccatcccccaagaagcataaagacgtgcagagcttgaccggaaaggtagccgcactgagccgctttatctcacgatccacggacaagtgcatacccttcttcaacgtactgaagaaatgccaaaagttcgaatggtcggatgaatgcgaggaggcattcaagaggttaaaagaccacatggccaaacctcctatcctatcgaaacccgtccttggagaagacttgttcctttacttggccgtctccgagcacgcggtcagcgctgccctggtccgggaggaagaaaaaactcagcaccccgtgtactatgtcagtaagcgcatgataggggccgagacaaggtacccggtcattgaaaa

SEQ ID NO: 285675 - DNA, 526 bp, Cannabis indica
tttttattttttttttgtaaagaaagtaatctttattagacagaaacatccgctaatataatgggctgaagagcaaggggaatatcgctctcagtaaaaagacgacctgaccaataacaagcaccacatgctatacagtgcgcagctttattagtagaccgtttaacatgaccaatagaaacatcacttaaagaagataaaataaatttataatcttgaacaaataaaccaaaaatagaaagcatagagaccgaactaagaatagcctgaacaactaaaatgcaatccgtctctaaaatgacatttgacttgttattcctctttattcaactaagtgcctctttgacacttagaatttttacaattttgggtcggcaactgacagaagaaataattgaaaacgcctcaattatccgaccatcacaaccgcgtgttacaaaaccagtaacgatcttatttgtgtcttcaaaaactgccacattcacattaatttttaattttatataataatgataaataatttttt

SEQ ID NO: 285676 - DNA, 1052 bp, Cannabis indica
aaatatactaaaaaacaatatgaacataaaaaatcatatctatctttcaagaaattgaaatattttttttatgtatagtaaaacactactaatcaatattaaaattgaaatataaatctataaacaataattaatattagacttgaaataaaaaccttaaactcaaaacaatctccataaaaaagttaccaacaaaaaaaataaaatgactacaagacggacctagtattgttgatatggggctatagccccactaataaaaatattgctttttaaaaaattaaatgtaatttttttttaattttgataattatagattaaaatagtagaaaagcccccacaaaaataataaaatctagtaagagtgattataatataggtataaatattttttaattgataaataaacccccacaaaatttaaattactgggtccgtcattgactacaaccactcaagaagaagagatttagttcttattttttgttaaattcaattatttacttcgaaggggtaatataaatattttatttagttactgtttattttttattttatttttgttttaaaatagttcttactttaagagaaaaaaaactattatgtaacagaatgacaaaatttacaagtgtgggaatatttttgtaaagtcagaataattgaaggggcaagagtttacaagtgcaatattcattctttatattatttttaataaatatttaaactttaaaattctaattttaagttttagtttttatttaattttatcattttaagttttagtttttatttaattttatcattttaagttaaaacgatagttgcttttttaaaaaaagaaaaagaaaaaaaaaataataagacacgatagtagctcttcatttagatatttatacatttattttaaaataataataataaataaaaaaaaaaaaaaaaacacggaaagtagactctttcgaggcaccatgtataaccaaaaaaaaactagtacctaatttatcatttaatattgatttttttattcaaattcaaaaaaagatatacgaatc

SEQ ID NO: 285677 - DNA, 682 bp, Cannabis indica
gattttgggtcaggtatggcgagtttgctgtggtcgggttcggattaacacctgaataaatatttgcaataaaaaaattcatagtgtacagtttaaatatctcaagcactctaaacaaaaataaaataaaaagtttggcgtttatttcactgtggatggaaagtacaaataaaaaataaaaaataaaacaaactaacaaacttgtttcccatgtataatgacatgaatagacatattgaattaaaaatacttacttggcatgagactatggcctactcttgtaggtgacagaggtgaaggcaggctctctcacacattcttattctataataattataaaactgttccttcaactttcgtagtacaaattaataaaatatgtgcctaatttttggatttcggattaacacctgaacttaataattgcctttctttaaaatccgaacccgacacatgcgtggagcatttttgggttagaccggtcccgaccacacgggtttttaatttttagttttttttgcagcgggttggggcaggtggtgggttttggagtttgcgagtttaaatgttcagccctaattaccatcgcacctccttctcaaaccaacattacaaaactcacgaacccaaaacctaacccacacatcgatcggtctgtcctccctctatcgcgcgagctcac

SEQ ID NO: 285678 - DNA, 511 bp, Cannabis indica
tattttatactgtcttgctaggcttggctcatgggtgctctactgtgcaggaagggtaaggttgtttctgatcagccatgagtgtaggagctggacgaagaatgtacatgttcgggccacactagaccaagcaggttgaggtctaccagtgatgtattttgtgagtctgttttgccgcttaggtcgaccaatagaaaaagacttgtaataatgttttgtaaatacttttgggatcccgacttttgtaacttttagtttgtaaagtttaaattattacaagtttattttcactttgtttgttattaaagtttaatttttgcgctaattttattagtaatcccgtttaggggattagggtttcttaagtatcttgagtagcgtgcttaattatttagggcgttacaattgctttttgaagaaaaaaatcttttagtcatcttgcgtacaagacaagatttgcatacaggaataattccaaattttagtttgctcaaagtgttggaaattattt

SEQ ID NO: 285679 - DNA, 807 bp, Cannabis indica
ttcggatctctatccgaaactataaactttggtaccccgtgaagtcttactatttctttaacgtacaactctgccagttgatccactgaataggttgttttaactggtagaaaatgagcagacttcgtgaatcgatctaccacaacccagatagaatcgagcaatcctgtggttctaggtaacccaaccacaaaatccatcgtgatgtcctcccacttccattcaggtagggttaaaggctgtaacaaccctgctggtctctgatgttcagccttaatctgctgacaagttaggcatctcgatacaaattctaccaaattcttcttcataccactccacccgaagtaaggtttaagatcctgatacatcttggtggtgccgggatgcaaggaatatggggtagtatgagcctcctcaaggattttatttctgagttccaatactatttggaacacaaaccctagctttaaataataacatcccactgtctgacagtaaaaaatctctagcttgaccagctgaaacttcttctctgatttttactaactccggatcagtcatctgagcaaccttaattctttctaacagatcagattgcagcgtcaaattgtgaagcttgcctaccacaaattcaatgctagatctgaccatgtcctatgctaactggggtgagatctgaatcatgctagctacgtgcctgggacccttcctgctcagggcatcagccactacattggccttcccaggatgataaaagatctcacaatcatagtcttttactaactccaaccaacgcctctgtctcat

SEQ ID NO: 285680 - DNA, 432 bp, Cannabis indica
aagtgcatcaactttgctataaagttgagggacgatatccaatcgcaaccaggatacaactctgcctcaatctcctcaaacatgtcatcataatactgacccctctgcatttcatcatcaccagctctttcgtcgtcatctataggagggaagaaatcttcaatgacaccagccatctcatccgcatcgacattgatgttagcctcgacaggttcatctggctccgcatggtaaatccacttctcatagctgctctcgaaaccctttgtaaagatgtgtgcctccacagtattcaaaggatgcaatctagtattcttgcatttaacacaaggacagaaaattcttccgtcacaatccttgtgtttagacgcaagttccataaagacttggagaccttcccagtaagctgaatccttacgatttctcatggtc

SEQ ID NO: 285681 - DNA, 892 bp, Cannabis indica
cgaagtaaaaaggtaaatactacaacctttaaaatagaatgaacaacattatctttataaagtaacacttttagtcttaaaataggtaaatgactacaccttatattaataagtatataagttataataacaactgtgacgagacacggtttacattattaagtaaagtaaaaaataaaaaactagtaaatttaaaaaaaaaaaaagttgtagtaaatttcgaaagttataactcattttacaatcaaactcctaaataaagtgggttaaactttaaattaagttgaaaattgtaaattttattttttaggagattgtttgaaattatggttgagatgattgaattgaaccacaatcattaataaaggaaggtcgttggaagttatataattatttgtgcttttatttatttattattatttgcaaacaaatatatataatgatgtgattgataacaattaattaattctttatatttaatataaaaataacaaaaatgtaataaaagaaattcacgttaaataaataaactttataaaggcattcattttaattatttttattttatataaaattatattataaattttatttttaacttactcagtcgaactcataaaattttattagcgttgacgcaaaattgaaataattaataaatatacatacaattaaaaaatattaaaattacaatactacatatacataaattattaattaaatatatcataaatttaaaaaaaaacaaacgagagagctagaatttcttctaagcattatttgggttcgtcagcgtttatgctcttttttcttattaataataaatatcaatacatcatatttgaaataatttgataaaaaattaaatattatatgaataattaaaaaataa

SEQ ID NO: 285682 - DNA, 514 bp, Cannabis indica
agtttgagtttcctacagaatcgaccatcccatataaacccaacccctcaaaacctacctccaaattagagctaaatgaagctagggttagggaacacacagtgagaacccaacatgaagatatttctagtcgctacaggcgcttcttgcaagaaatatctgaaggcagacgccgattcttgcgagaagcagcttggccaaaaccacccagcgtgtcctttattcctgtggcaaaacctttgtttttaaccaacgtcgcaattgcttttgaaccaggtgacttggatttcgaaattatgcctcccaagccacgtacgtctaaaactcctcaggatcccagcgtcaccttcgaggctgagttgatagagtcgaaggtgcgatctatctcaggctatacgggcgagatgctaaagacctgtggaattgaacttggataatcatgtcaagttaggtcagtacgagagggtgaattcagttgctaccccctgcacgctttgccagcagtaacccagga

SEQ ID NO: 285683 - DNA, 737 bp, Cannabis indica
cccgttgattctgatcggtcttgacgcatttctacacgtgtgagttattttttcttattaggaattcaatttcccgcttcaggttgttgcactcatttgtgtcgtggccataatctccatgaaaatagcaaaatttggacatgtccctcttgcttatgtcctttttcatgggagcaggttttttgtacgggacaacagactgggttaccatttagattgtctctaggtcgtcaattaggacaaagaaggcagtgaatttggaggcatcttctctaggggtttattcggctttgcttgcgaactttcccttctttccacaaccttgtatgccattgttattggatattttgccactcgaagttgagctgctaggatactgtagggtctgagcagatgctcttgccgaggggacccgtggttggcctggcctaggttcgacatcggcccgttgaaggacctcttcaagctttataaacccatctgctcggtctaaaaactctgccatagatcctacaaagccacttttttttaatgtcgttccacagttctccaagtacttcaatgccccccagtatagcgaccagccatccctttctagttaatcttgctactttcgtagcttctgtcatgaacctacttatgtaggctctcctggtctttgtttcacttcgaccaagtcttctaaatgtaatgggagttggcgagaagtggagaactatgcatggaactctgaagag

SEQ ID NO: 285684 - DNA, 645 bp, Cannabis indica
ttcaagttgttggtaagtcttaaacttgttcttggttttttcttggaatttgatgaaaagaaatggtttgcatgcttagtttgagttgatgttgctgctgtgtttttgatgttgtttctaaagtttaaagcatgattattttaggagaattaagctgcttgtgatgcatgatagttaggttgtttagagttgtagaatttttagctcaaattatatttttcaaagtgaaattgtgaaattggttgctgtatttgttgcatgagtttgagaatggtttctgcagtacttatatgcatgaatatgtagtttaaatctagtttggaggcttgtaggtgagctttagccaagtttgagttttgaactcaaagcttggagctcacatggcatattttgtatttgtgttttctggatggttttgatgctttagaaatgttctatggggtatatagaacaggtctggaaggttttgtttgaattggattgaatttgagcaagttatgaatttttgattgtttcctgcgaggaaccggaattccggttgtgcaaccggaattccggatgaaggttcaggatttcccagaactagaattccggttgggaaattttcaggaaccctagattttctcgtttttatgttatttgggg

SEQ ID NO: 285685 - DNA, 537 bp, Cannabis indica
cttaaagtggtcacccgacctggtactttattggtagtattttcttaaatgttttccattctagtaccgtggtactagaatgagttgcattttttcgtcatacttacttaatttgtatgctccggagttgagaacttcgaccacttgatatgatccttcccaattaggtcctagtacacttgtcgtactgtctttggtgtttaggaatacccttctcaggaccatatctcccacgaagaatttccgagctttcacttgtttgttgaaataccgagctactttttgttaatgggccatcaactttaagtttccagttgctcgtctttcttcaatttcatcaagtgattctgtatggagtatatgattggtaccttgatcgtacgtcaatcttctgtgggaaggtggctcgagttcgacgggcagcatagcttcataaccgtacgccattacaaatgttttctgaccggttgcagttttttccgttgtacggtatgaccatagaacttgagggagttcttctggtcagtttcctttggc

SEQ ID NO: 285686 - DNA, 583 bp, Cannabis indica
ggcataaaacccaacagtacgaccactgtaccggatgcactaaagtaccaaccctctactcgtgttggtagagccataactgtactccgggaattactaagtgttgtaccacatgcacgacgtacccctggtactcgtgttggtaacaccgtaaccacattaatatacaacactatactaacactctataagtcacattcatattaatgctagtagtgcaaacatctaaaataagcatatattcatatatatatatatattcttatgctatcttacctcgttccgtgctcaagtgtgccggtaagcctgagtggaaacgcagctcgacgctttacagagccctaaatcataatgtttagaattcgatgagagacacgctaaaatacttatcggggtttaaaattgaaactaagaataaccctatcgataaataggatgttaataccctaaattacgcaaatgcgggaaaaattaaggctcaagaaaaagccccaaccagcaaaccggtttccaaccggaagtccggttcctagcaccaaccgtgtcgactggttgcagcaggcccccaggaaccggaattccg

SEQ ID NO: 285687 - DNA, 526 bp, Cannabis indica
aagtctcgtggaatgatagttgtcattcggaagagagttcccgaatgactatcatgtccactccgaaaagaaattccggatggctaatcttcctcctgaaagggagttccggatagtcaactcctgcgagctcttttcctattcgagaagtcccttcaacatacgcttcagtcctttgtcctgggaacctatgtctcatccagaagcactctgttttgtgctggcgtggagattctgttacgaagaagttgttaagttagttatggcataactaacttaacaacttatcaattgcagccaccgagcttaggatctttatcctgagcctataaataccaccaacacttatcattttatgaatgcagggttcaaacgagtttcgagaggagactttttgagattgagagaggaaaaatattgagaggtacagagtaaagagagatattgggtttagattttgtatgaagaatcttctatagatgaagacgattctgttgggttttgtgccctaaataaaacccattac

SEQ ID NO: 285688 - DNA, 693 bp, Cannabis indica
ttatttcttagtgggaaatattttagagaaaataaattatcgggtttgagcggggttatgggatttgaccattttacccctagtttggtggagcacctaagttttaagttggagggcattttagtcatttcctttagtgaaggataggtggctgccctaagaaagtgacacctagcaatttatttcagcaaagaattaagcttagtcaagctcatttatctcattttgggaaattaaggaaaacatcaaaaaattgaagaaactctttcctttcttctctctcttttcgaaccagcaaggttaagggggatttgttgctgaatgtttgtattctcagcaagggattcaagagaaatcaagacaaggtaaccctagcttcttttccccttaagttcttgaagttgtattttagtttcaacatgtgattcttggttttggggactgttaggtttagaaatgtttagggttcaatttttatgctcaatataggttgattagaggttctggtagttgattttggtacatggagttagttttaagcaagcttgagttttgaaactcaagctttgagctttaatggcaacttgagttttattggtttgttatgtgaaatactggctagaatttattgtgtatgcccttattaggtactctggaaggtttcattgcatttggtggagaattgagcaacaa

SEQ ID NO: 285689 - DNA, 938 bp, Cannabis indica
ttgtttgtgcttcattttaaagtaatgtagttagtttatgttcaattagtttgatttcgtttgaatttcattgttttggtatattttctggtttttgtgcaaaatttgcgacgtatcgcgactatgttcacgacataacgcgatatcgtctagaaaagttggggattttctgataaccgtggttttcacgacgtgttggcgatatactagcgacataattcgcgatattgcatttagtacgtaggtttcatgatttttatcgacttgtatgtgtgtttggcgacatgtttgcgatcatattagcgatatataacagttataaataggactagttttttgcatcctcctttttgtgtttagcgattcattagcgatatattagcgacgtatttggcgatttgattaggattatgtttagcgatgtatagcgacatacagcgacatgtttcgcgacatacttctaacaaatttgttgacaattttgcagatggctcctgaacttaaacttccaatttcctctcatttcacgggacgtcttacctatcggggtacagataggttcagatatatcaaggccaagtttactgagatggatttggttgagacagtgaaggctagtcctttcggacacttttgggaagctggagagttaactttctccggcgcgttggtccacagcctcctcttacgaaaaatgaaagtggacacagaaaaggaggatgaggtttggtttcatgtagggagaaatgacatgagattcggacggatagagtttggactcattactggcttacctatgggtagtgcccctacagacgaggaaatacacgccaagtccaacgaccatctagttcggacttatttagtaagggaagagttactgttcagttggactcccttatgctccaacttgagaggtgcgaagataaagatgatgc

SEQ ID NO: 285690 - DNA, 763 bp, Cannabis indica
aaaaccaataattaatcaacacaatgaatcaaacccgaaatcaaacaaagaacaacacaagattttatcctggttccggtcctagagatcaacatgatccctggccatactccagctgagaaacatcaccaattcttcattaatatgtgaataagagagcagcaatacaattacaataaccagagcaatcacagctcagatggcactcgacacacaccagagaaaacagtcacagttttctctctatcaacccgagtacaccccttgttcttgaccctcttcaagaacagaactctcagcttagaaccctaagcaactctctctaatcctctctcttattctctctcttctaccttctgttctctcttttaaaatgaaaagactagacttatatataggccccaactcaaacaaggatagcaccaactaactaactaacataaccgaaagttagttaagttagttggtttaaggagttggataataagttggtttagaggatcaatttccacaaatttccaccttgattctctaaagcaacctaccagaatcttttcactgaagtcttgatgatgtgatatctcgaaatgttcagcaagaaccaatgttcagcaaactgagacaatgcatcagtttgctgaatgtgagaacctttgttcccatgtcagcagggttgtcacttgtgtgcaccttttccaattccagaaccctgtcctcaatctttctcgaatccaatcaatctaatgtcaatgtgcttgctctt

SEQ ID NO: 285691 - DNA, 475 bp, Cannabis indica
ctaccagggacgacatcagcattcaacgacgcagcagcagagaaccagaagaaatccttgccgaaagaactgttcgtgtgaagaaaaagaagagaaaagagtacctggtcaaatggaagggccttgctgatgacgagatcagctgggagaaggcagaggacttacaacagtttctacagaagacagaagatcatgcagcaggttcgtcgaggacgccgaacaattaagtgggggagaatgtggcgtgctgccccatgacacacctacaatagggccattttgtaacatgagcatgccttggtgcttgatcattagtcaagtctttgcaccaagcacctcattagggtattttgtaatatgagcatgccttggtgcttgatcattagtcaagtcttgcaccaagcacctcatgggggttgggaaccttttgttgtttagctttctttcgttgtatttcccttcacatatgtctaca

SEQ ID NO: 285692 - DNA, 531 bp, Cannabis indica
cgtgcaaaaagtacaaggcccagcgtgggaggattcttttcaatctcttcactctatgaataggacatgtagtttcgtgagatccgccagatgactcactactacttaaagggctaggagaagacgacgaatcagatgaatttggaggtgaccggtagtctgagtataggtgagcaaggaggtcgtcgtcaatatggttgtcgcctccccaatggtcacgagcatacatctacaaacacaagtatggggagtgagcatacaagcatggaatgaggtaacaaaaaataaataaaaaaaatgctaagttaaattcacttggtaaggtagtgaggctagttaattaaaataaattagataaaaactaattcaatcacaaaaattagatgtaaactaaatttgatttaaatcaaattggaaatatctaattgtgttaagttggattggaataaacctaatttaatttaactatgctaaatgaatttaattttttaaaaaaagtattttattttattttttggcttgttttgggta

SEQ ID NO: 285693 - DNA, 508 bp, Cannabis indica
tgcccctatttttttgactgttaggtgttggtgtagggggcagtttcggctgctgtgatttcctacagtggtatcagagctcggggaagaaagaagatttaacaacacctgaaaacaacgtcaagaaacaagaaagatcatcaaaacattgaagaagccaaatatgaaattatcaagaaattgataaaaaggaaaactctaacctaaactttgtcttgttacattcttgcttttattatcttgttataacaattaaacatgagtaatagtagagtggatgttgacaagtttgatggatcgggggactataggatttggaggaagaagattagagctcttcttgctcataacaaattacttagggttcttagtgaacctataaaatggccagaagatacttctaaatctacacaagaagaacttcttgaaactgctactggtttaatcatttttaatttgtctgatgctattatcaggttagttgataaagaagatacaccagcaaaaa

SEQ ID NO: 285694 - DNA, 551 bp, Cannabis indica
tcgaggctgcacatgcagcctacttggtagccatcacccaaaaatccgatttttgtggaattttttccaaatttcggatttttcaattttcaaaccctaaaattaaaataaaatattatttttaatatatttaaacttaaatattattttttaaattaataataactatttttaatagaatattattagttccttgatattttgaggtttaaatttaaaaattgattattttatttttaaattatggtcagatttaaaaatttgttaatttctttaatatttatatattatttatttataagatcagatattttaatatttgacatattttaaattaaaagatagcattatctttttttatttgaaatattatattaaaattatcttatatgataaattaaataattaataaatttgaaattaacctagatatttttatagatattctaaccataatattttcaaattcaaaaaatttgttattttcttaaatatttaatatttataaattataagtttgaaaaaggatattttactattttatatcattt

SEQ ID NO: 285695 - DNA, 810 bp, Cannabis indica
accagacattatttctttttaattgaatcgtgaaaagcgtgaaaaaaaaaataaaaaaaattcgacctggagcccagtagtcgcgactagcctttggcctagtcgcgacctattttccaagtcgcgaccccagtcgcgacttcctgattttccagagaggcaggaaatttgatcgtaagctagtcgcgactagccttaggccaagtcgcgacttgctcacgaaaatttctataaattcaaactttccccctcattcaaccctacaccaacaaatttcaaatttcaaatcctctcagccgaccctaccctctttccatctcaaaaattcaatttttcatctccaatcttcaatcttttcatcttttctcaaatttcttaaacccaatctattcaaaaacccaatttcactcaacaatctacacatatcatcaaaacccacaccaaaaataacccataatagcccaaatccaaaaatcaccattgttttcaacttcaacctcaagctttcaagaacattcaacaatggaggtggagtaaagctttttcgggtttgtaagtatcactttcttcattctttaaagaatttgattaattttttttagattttgagtgatataaatgtgtgttgtgcaaaaatattgatgatattgggtttgttattattgtattgtggtattgagtgtttgggaatattgtttgagtgaatttttattttggggatagagaaatttaaggggaagtgctgccaattttttttttaaaaaaaaaaaaagttttaagaaaaaaaaaagaaaaaaaagaaaagttaac

SEQ ID NO: 285696 - DNA, 522 bp, Cannabis indica
aaaaaaaaatggtgaaaagatgatgatgcatgcatgaattcttagttgttgttactgctgtgttttattgataatttctgagatgtaagcatgttaatttgaagttaattaagctgttagaaatgcatgtaaattactttgtttcaagtttggaatttctagctcaaaaatgtgatttttgaaggaaatgttgtgaatctgttgctgtgttgttgttaatgtttttaattgttttcagaggttataatatgcttgtttaagaggatttgagttggtttgaatgcatgttaggtgattttactcaagtttgagtttagaactcaaagcttgagctttaatggcactttttgctttggtgcaatctgggtggttttggtgccttagaaatgttctttgggtcatatggaataggtctggaaggtttgaattgatttggagtcgaattgtgcaagttatgaatttttatgtttgctgcctgcgaggaaccggaattccggttgtgcatccggaattccggatggg

SEQ ID NO: 285697 - DNA, 575 bp, Cannabis indica
actgccataaacgacatgataaaattccttaaacttccaaaaatcatgaaatcaattccaaatgaatctaaatgcaaaaattaagacattcatatagattttatgcatcgaaaatacataaaacaaagactttaaaaatcaccaaaattttctgaaaaataattttgagatttctttgttttttcaaagtggattttcatgcttagaacaatctatattaatatatgaatgtattaatacatatacaatatatatatataaatatatatacatatatatacagaaaaataaaaatactgtatgtatatatataaacatgaaatgtatatatgtatatatttgtatatagcatttagatatataaatatatatatatacaacatatatacgtaatgaagaaaaaatatatatatatgtatatgaatatatatatatatgaactgaatgaataaacaagtatatatgtatgaaaatatatatgtatatatataattgggattgaatgaatatgaatatataaatatatacacaaacgaaaataaatatatatatcaacactgaattaaatatatata

SEQ ID NO: 285698 - DNA, 509 bp, Cannabis indica
attgatgatttattcgatcagcttcaaggaaagattgtgttttcaaagattgacttgcgatctggttatcaccaactcaaaattcaagaaaaagatataccaaagactgcatttcgaaccagatatggacactatgagtttctggtaatgtcatgcagattgacaaatgctccagcggcctttatggatctcatgaatagagtattcaaggatttcctcgataactgcatcatagtgtttatcaatgacatcctcgtatacgctcagtcaaaagaggagcatgagcatcatcttcgaatggtattacaatgcctcagggatcataagttgtatgcaaagttcaaaaagtgtgaattttggttgtcaaatgtatcttttctagggcatatagtgagaaagatgatatgttgacaagaagatgagtcagtgagaattggacgagccccttggattccgacacgcaaggggcactaaacaggaagttgacaagttgttagtcaacgatttta

SEQ ID NO: 285699 - DNA, 527 bp, Cannabis indica
ttaatatggaactgctaagtacggtttactatacactatacttctagtgtatgtgattttaattcagatcacatttgtagatggacatgtagtaaaaggtactgtgtataattagattatacatgatagagctgatatgtaataaatatctttcattaaattgtcatttaccatgaaaagaatttatcatatcacaatgatgatcattagtagatcagcctgaatcctgagtatacatgaactcctatttgtgtttattgagttctttgattcacttgttaaagtttctcggagaagatgattcttataacttctgttttataagcttaataacatgagtagctgggaacatattatacaatatggaatccaagctttcctaatggatcaaatattagttcccatataatgttaattctgagagtgctatcagttggatccaaatctgtaataagttatagattaactgttcacattaaattaatggtacgtaaggaatcaagagataattagaagggtaaaataat

SEQ ID NO: 285700 - DNA, 566 bp, Cannabis indica
atcatgaagaagacagcgacaaagaataagagggattggcatgaacgcctcctagaagctttgtgggcatatagaaccactgtgaggactgcgactggttgcacaccttataacttggtgtttgggtctgaggcagtgttacctttggaggttcaaataccttcactaaggattgctactcaactaacagacccagatgaaaatgtgcaagtccgtctagccgagcttgaagcattagatgaaaagcggcttgctattcaacaaaagctcgaaatttaccaagcccaggtagctggggcattcaacaagaaagttaaatttcgatctttttcggttggagatctagtgcttactgtgaaacgaccaattgtcataactagaaggatgaaaggcaaatttgaggcaaaatgggaaggaccttatgttgttactaaggtcttcctaagaggggcatatgaactttcaaattcagaaggccaacgcgtttatccgtgtgttaatgggaagttcatcaaaaagttctacacttaaacaaaagggtatttacccatggtgtagacagcgca

SEQ ID NO: 285701 - DNA, 588 bp, Cannabis indica
tacgaaaaatattgccagaagagattcatggaaacaaacagcaggtgctggttcgggtaggggtactgatcttggtgaccgcaggaaaagacctagtgaaacatcagcagcaggcccaaacaaaagattccagggtaaccaaggtttccgtcgtagtgggaatgaaaactggcggacttttcctgaatgtccgaggtgtaaaaggcatcacctgggcgagtgtcaggctagggcctgtttccactgtggaatggtgggtcatatgaagagaaattgtccacaattgctacggttagagcaaaagaaggatgatacacccgctcctgcccgagtgtttgccctgactcaagctgaggctgatgctggtccttctactgtgacaggtcagctttctgttgctggtactttattgactgtgttaattgattctggtgcgacgcattcttatatttcaagtagaataattgagcagctgaataaacctagtgatgtgctttctagaggttttggaaccttgttgcctactggggagttggttatctccagcaggtgggttcgatcccttccagtgtttgtggaaggaagaga

SEQ ID NO: 285702 - DNA, 638 bp, Cannabis indica
acataattattaatatttataacatttgggaagtttataataatatatattctacatatatataatttaaaagagtaatttgcggcaaaaatacctaagttttatcccgagtagctgataaatacctaagtcatatttttggcggtaaaaataccttccgtcacacttctggaacttccgtaggtacctctccgttttcttctaggtaagtgtccacgtgtcatccttttattagtccacatcattaatttttatttttcattttaaaatttattaaaactatttaaaaatcatttaaaaataaaaaatatatatttaaaatgtttaaaaaaataaaaataaaacttatttttaaattagaaaaattacaaaattaaaatacacataaaacttaagtatttttattaaattaaattttttaaaaaaactaacctctaaatcagagaggaaatagattgaatataggattggttttaaaaaaaaaaaagaaatagattgagagattgagaggagagagagatcgagaaaagagagagagtgtgaccaaaccaagaacgattgagattgagaggagagagagagggagatcggaaaatacagagagagatagagatcaaaacagatctgagattgagagg

SEQ ID NO: 285703 - DNA, 648 bp, Cannabis indica
agcttaaatcatgtacaacatcttcatcctgctcaatgtcccaaatttgccggtggtttacattctcgactattttccaatgtctacctctaagcaaatcatcgaggtaaaatacttgcttagcttgggtagcaagtataaatggatcatctttgtaccattcaccactaacattgatactaatgatgttattctcaatgattgttttcttcctctgtggattggtattgaaccatttacaccgaaataatgtcactgaatacacaccacaaaaagtgaacatcatcacatcttctaaggttccataataattgaatccttctgttcccgccacggagacaccgctattctgagtagtacgcttcttatcacgttcagctaccatgtaacgaacaccattcactaaaaccccttcataatatgttactaagtgatctgacccacatgctaaagctagcaactcttcaccattctccaatgatccaagcttgtgtaaatcatatatctaaatgaacaaaattatcttagaatgactcataattaatcatgatcattttcaaatcataattgaatcactcatatcaccttcttatgaaaccatcgctggaaaatttttttgtgtaaaatgttatgatctccatctgggta

SEQ ID NO: 285704 - DNA, 597 bp, Cannabis indica
gtttccaattggcttgagtgggtataaattttttatagaccacacattattagaaaggagtttttttcatctatatgggaaaatataggagaatttacttttataaggcataaataaataatgcagaaaaaaatatgagattaaaaataattaaagtttaaaatatagaaaaaaaaaataaaatgaatataataaaacttgtaataataagtttcgctgaaaaagtcaacagaaaagtcgtcagtgccagaaaattactagaaaagttgccaaaaagtcactggaaaagtcattgcagaagtagatgtctcagatataactaaaaataaaacggttctataacataactgaataaaaataaataactcaaaccggttataattaaatataaccgattttgtaacataatgaataaaaataaataacacaaaataactcaaaccagttataattaatatagaaccgcttcagtaataatgttataatgaataaaaacaaataacatgaaataactcaaaccggttataactaaaatagatccggttatataacataatgaatacaaacaagtaacacgcaataacttaaaccgattac

SEQ ID NO: 285705 - DNA, 504 bp, Cannabis indica
aaaattattttcatggatcatgaaaattatagaaaaaaaatgattgcaaagcctacgaaggatagcagtgaagctcgtggagcctcctataggcagatatgcctgtgaagattttacagaaaattaaaaagaatatcacattagaacataaatagagattgtgaatggaagaggtataatgggaataaaaactgaaaaagaaggtataagcgagaaaatttaaaactaaaggtaaacataagagagcctaacttaaaaaggatataggatttaatttcctcaatatatattttgtaagagtctcacatgttacactttttatttgggtttacattaaattttattagttttattaaaaattgggttgattagatagttctttgctgtgttagcccatattgttggtgataaattgttaatggacttatcatctgtgtgtaaagtctaggtaaagcagaagtgtgggtttttctagttaactgaagcctttgatgagcaggccca

SEQ ID NO: 285706 - DNA, 598 bp, Cannabis indica
ttaaggactgccctcataaaatccctacaacacctagggattagaccatgcattacccatgacatattcatgggaaatatacaactttactgatagttacagaaatgcatgaaccttaattctggggatcaccccacaaaaacactataaatacccccaaagctcattaaagaggggtcgagaattctaggttgcacaagtgctagaagagtaaaaactcaccaagaacattctctgtattgaatactatcataaatacatagactcgtggactaaggctcattaacgccccaaccacgtaaaaaatctccttcttaatttcttacagctctctaaattattactattttattggttgtcgaaaacctcagtcaacattttggtgctttcattgagagctgaagaaagcttctataaacacacactacattacaacaatggtggagactcgaagcacacatcaacctcgccctcttcaagatgctcaagatccgaatgaggaggacgtggcctcaagaggaaccgaggtttttgaggaagaagaaggaatacctaatgacgactacgagggacacctcgatgagtacgcctacgatga

SEQ ID NO: 285707 - DNA, 750 bp, Cannabis indica
acctgccactacagaagggcttgctgcatcatcagcttgagcattagcatacaccggagtaggaacaaataccacttcctgctcttgttcttctttctccacctgtgggcaatctttcttaaaatgcccaaccttgccacattgaaaacatacctttcggttgcattctccgggatggtgtttcatgcaacgtgggcactcagggtaagaataaccctggcgtccacccttgccttgaaaccttcggaaccgcttgttctgtcttaaacccaccactgatgacgtaggtttcctcttccgctcaatcatggagctcctaccactttcaccataatctggattcaggcaggtaatattctgaccctctaccataatctcctgaggtctcataataatttcctcagggctttcagcccaagaagcattcttcatatttgaacctccctgaaagtctgaaggttcttggatccaaatctttccatgcaatggttccacttgattaccagccattccatactttgctggtaataccgaatcaaaaatgattggcatatgtggtaaagatactacaggagacctttgttgtttcaacctctgaatctcttcttcatgtcgttgaatcacagcttccatttttgcaaacctttgctccaaatccaacggagcctgtgacggataaccatcactcccgtgccctccaagggatttcaccttggttacggggacaacttggactccattctctccaac

SEQ ID NO: 285708 - DNA, 623 bp, Cannabis indica
attcataatcttatcttatatcttatatagtgatggataaagattaaatgcataactgaaccaatcaaatttaattaaattatgaaaaattagatatttaattataattaaattagattagatgttaagatttaaaagttagtgaaatttcattttcataattatcaagtaaaattattgaataattaaaataatacagaactataataaagttgtttgaagagaatttaactccgttctatcagatatagaatctgacaaaataaaaatttactacaaaaagtaaaaatatagaaactaaaatgatacacaatattttatacgtattatcagtaattctttcgaattgttcctaatttacggggacacgtctagaaaataaaatttattagataaatctcaagtaattacaaaaccaaattaacttatataaataaagaccttcttctttgaatttgttgcaactgttgttaggagtgttcataaatagtcgatccaatccaatttgcacgatctaatccaatttgcaaagtacggatatccacacttgtgcggatttgggattggattaaaaaaattcaaaatcttcacttgtgatgattagatgttgattgacatataaa

SEQ ID NO: 285709 - DNA, 581 bp, Cannabis indica
cttctcctgtataaatactctgtattttacaacattcataatatacaaaattcctttctctcatttccgtattacattgtattagggttgtatgtaggtatttggtataatagataggagtgtttgcggtgcgggtggtgcagtttttgattatttttaaaaccaatctgtacatgtggttttttaaattttcaaaccgcacccgcactgcgaaaactaaaaaaaataccatatatttttttacaataaaattatcaataattaaaaattaaataaaaatcattatgtaaaaacatatgtacaatttaaatgtgtctataattataattatgggcggatccatatagagaccagacgaatcagtcaccccttaaaaaaaattggaaaaaaattatgtaatcaaataaaattttattttaaaatttgtttcaatagtattatatattatttaaaatggaatgaaatcaccaaagatacatttggtatgtcgtattacatcgtattgtattgtatagtattatattgaattgtatttatgcaatatttttatgtaaatatatatgtggtattgatttttatta

SEQ ID NO: 285710 - DNA, 627 bp, Cannabis indica
acataaacaatcactgaaatagtaaattgaatgaaattagacaaagtccttaaatccaacaatctcaatagttcagaggtatttttaacgaccttaaaagtagttcagggggcatgatttgttacatgtcaaatttcagatggcaaaaatcctttataagccttttttttattttacctcaaacttttatagtttatttaaaaaatatcactaaaatttaacttttttttttcaaattttaatatataattcattttaaatatataatattaatgtttttatatttttacatataaaaaataaaattaaaaccctaaacaattaataaattatgtttagaaaaataaataataatttataaatatacacataaatagtaaattttttcaaaaaaattgaaataaaaaaatttatatcatttgatatgcgtgtactttagtttgattcaaaattaataaaatgataagaatggtctattataaattatttgatgtcagtgttttcttagtgtgtgttgtggggactagtatggtgctttaactcaaaaatcaaaacttaagtgaatggagacctaagtcaaaaagaaaagagggattgatgaaatttgctgaccttgaattctctcca

SEQ ID NO: 285711 - DNA, 523 bp, Cannabis indica
attatattacttccatgttcaaaaatatgcatgacaaagagtactgtggtatattgaatataatccagagtttaaaatgaactacatatttcaatagtatagtccacccctaagtgtatagagcttatgatccacccctaatggatatagagatcacggttctctaagttttatagagatcatgtggagttatgaatataatctagagttcaatagatataaaagatcgttgaaatgcatattattcttaactttttccacccctatatgatcaaaagatctttctattaaacaaattcttaataattgttttagaattaacaattatacatagaaaataaaatttctaagtgtttatgtagtattaactatgtgaagagttgaaaagactagagaatttgtatcaataataaaaatacatacacatacaatcattaaaacatataaatataattggtattggcatatacaagataaagtaaatgaaactcaattcataaatgcaatttatttccaaaataga

SEQ ID NO: 285712 - DNA, 617 bp, Cannabis indica
tttgtatgactcctgcttggcctccgtggctcgtaaatgagccttccttataagtttttcgtgttcgtggagaacagactcgagccttgcacagttaggacatcctgacatggaggctgaacggagtcttggactccgtgacggtgtacctacgggtcttgtggaagaaaaaggatgcggtggggatttttgaggacttgtttcaaaagggttgaagttttggtaagggtccatttgatgtaggtaacagtaaaacggggtttgaaaaaaatgcttagtttggataacctaacctttacttatatagtggtttggtgggttgatgtacacgtgattgggttcatgtaataataatggattttttttcccaatttaaccatttaatagttaataaattttgacaatggtaatatccacttacgacaatctgagaaatcccaatttacccatttattagttaaccaattttaatagaaggagaaggtcaatcaaatcccacaaacaaaatctaagtaatatcgggaaagtactatgtgatgtgacatttttatattaaaaacaaatatacctacggttttatgatttaaataataatttccagaattaaagtaaaaata

SEQ ID NO: 285713 - DNA, 518 bp, Cannabis indica
gtcattctatattttctcttaagaagttgaatgacgcatttgattatatttccgaaattctatctgaatcgatataaatcctcaatcttaaaaatctcctacttgtatgagcaaatcagacttagagttagattagtagtggtggtccaagaaagaagaatactcatgtatatttggtataaatttaagttttttactttaaattttagattccaaatagaaatttgtatttgtattttcagaatacaatacagttacactttcacaagtgtttaatcatcattttctatcaatggattcatactgaatgtaagtatggaatatgagtttagtattatgtgaccaggatccacttgcactattctaagaactctttgatgtaactaaacctaagtcataaaaagacacaaccatattttataaatgtatggcatttgtatcttgttcatagtgtttttgacgagatcattctctggaaagagactatatgcctatatccactgaaagtataatcatct

SEQ ID NO: 285714 - DNA, 585 bp, Cannabis indica
aagaaaaaaaaagaaagaaaacttttatgttgtacttttcctagtttagagtatcaggtttggtgggtttgtcactaaaagttgattttatttggtcgtgatatctttaatttagagggttgatatatgttacttagaggtagctaattgctaatgttaaacttgggatctaatatttaaatgtaaaataaaataaaatacggtatcataatatttttattcagtaatgatacgtgtgcactgataaattactcgaatgatgtgacagtttttttaagccaatcatatcttattaaatttgagattcacaattaaaaaacagtatcatatatgattgtgcatatggagactcttctttaatttcaaggccattaatcttgtatgtgggtattgttggtgttgccctatacctaaccgagagagaaaagacacaaagcgacaaccaagtccaccagcttatcttggattttttccttttggctttggcttacctccagtattgctttcattatattcaatcagacactactgactgagggaccgcattattatatactatatagtatataacatttctgaagaagg

SEQ ID NO: 285715 - DNA, 481 bp, Cannabis indica
aattttaccaaaacagttttgcaagaacaatattctagaaatgaatcacatgatattgaaaaaaactaactttttgacatagtatgacttcgaattaacaaacattttcttcataaaacttatgggaaattgaataagcgttaaaaccacatatagattattaaaaatggatgagaattgagagagttattgtattttaagtgaaagtactttttttagaaatataaagaaaacgaattacaacaatagcataaagaggataattttcgacatagaagaacgccgaattggtgaatagagtcttgataaaatttttagaacatcgaataagctttccaacaatataaaaatccctaaaaacagatcaatatcaagagagatatcatcactttactgaaacttgttttttctgaaaacgaaaaatataataggtccgaaccttagataacatttagcattattgagcaagaaaatatttcat

SEQ ID NO: 285716 - DNA, 501 bp, Cannabis indica
aatttcggtagaatttggatcaaatttcggtagaatttagtgttagtagcatgattatcaattttgtttgttaatggtgtagatatggccaactcgagttcaggatctgattcagacccagaggcagagtgtccaacagtaatacctacaagagggcctactcaaatgaatgaaatatccaagctaatggatcaaggcaaaagagtggccctcgaggttaatgacaaaggacaatactgcgggaaaagctatgctaagctcgtatccactctaggtgtcagatgccggcagacgatagggttgtcctataaaaactggaaagaagtcaacccgactctgaaaaataaagtttggaacgacatacaagtaagctgttatttgttagaattttgatttgtttttctattaattcaaatgttcactctaaccgtgtttgtttcccttcaaactagacggggttcattgtgccggactccttcaaacatgattgtctcatcctag

SEQ ID NO: 285717 - DNA, 275 bp, Cannabis indica
taatctttcactaattccaaccaacgcctctgtctcatattcaaatctttctgagtaaagaaatacttgagacttttatggtcggtatagatttcacacctttctccataaaggtaatgccgccagatcttcaaagcaaaaaccaccgcggccaacttcacaataaactacaaacttctcgctgtctgaaggcaaagctagcactggagcggtaatcaacctctgcttgagctcctgaaaactagcttcacacttgtctgaccagacaaaccgct

SEQ ID NO: 285718 - DNA, 650 bp, Cannabis indica
cctcccagaaaaattggaggtgcctgcttccgaaacctttcatataggggttccattctgtttgccgctaccactatctcggcctgagcaacaggggcaggtgccataggagcttctggcaccggcactgcaggagcaccctgctgcctcaatctctgaatctcctgatcttgctcctctattatggcttgcatttcagcaaacctagtttcccaattctgggcttcctggttggcttgagcagcctgggcagcctgtggcgggttatcatcaccccgaccacgggccctgcccctgggacctctaccacggcccctagcatgcgggggaaactgagctccttgaccctgatttgaccctactaagttgccctggctcctggtattccgcctggcatccatctagtctgaacagcctgcgaaaaccaagagttggcacatcaggtcatgatcaactagagcttactaatgccgcttaatttgaaaattaaaacatgcgcctattctactatcaggctactaacatgcttcctatcaggtttttcttatttcatattaatcaaataaactactaaagaaataaaagcttattgaaccgtagaacgagctaactactgatgatgattgtacatgtcgtgacgatcttcggaa

SEQ ID NO: 285719 - DNA, 695 bp, Cannabis indica
ccggtccaacaaaagcgacgacccctcgatttagtgaaggccgaggccttagagaaagaggtggataagcttttaacaaacggcatgatccgcgacgtttactacccggaatggctagccaatccggtcctggtgccgaagcctaacggaacctggcgagtttgtatagacttcactgatctaaacaaggcttgtccgaaggactgtttccctctgcctaggatcgatcagatggtagacgccacttccagattcaagctactatccttcatggacgcgtacgccaggtacaactagataaaaatgcacacggcggaccaagagtgcactagcttcaggatcgataagggggtatactgctaccttgtcatgccttttggactgaagaatgctggtgcgacctatcaaagaatggtcaaccggatgttcaaaggcctcttggggcaaaacatggaggtgtacgtagacgaaatgctagtcaagtctaaagcgtgcaatagccatgcagacgacttagaagaatgtttcgaggtagtcgggagatacggaatgaagctcaacccaaagaaatgcacctttggggtcaaatcaggaaagttactggtcttcattgtcagctagagggggattgaggcaaacccagaaaaaattcaggctctcctgaggatgccatctgttgggtttcatgccctaaa

SEQ ID NO: 285720 - DNA, 597 bp, Cannabis indica
tgttgtacttgccttcaagcttggcaagcgatgagtttgaaccaaagtcagcaccaacaacataagactttggatgatgagcttggggagaagcctttcgtagctcgcagaggatataatatggtgttgatgaaatatatggattcattggtggtttattagtcaatatcattgatgaagtcgaatcaatgatgtcatgtgcttcctcatcctccaatgtcacagtatctacactttcatctaacaacccttcttcttgttgctcactctccacttggctattcataccctcacttgtgatttcatattcaatgagttcctcttcacaaggatcttgatcttcaattgtaggctcattatcttccttgtattcaactaatgacccttcttcattgtagcaataactctcataactttcattattggagttattacattctgaatcatgagccactaaattatcacataaggatctcaccatgtctgttaagcgattaatctctcctggaagtgattgtataagtgctagtagttgctcctctttttcagtttgttgggatgaatttgggcaataaggtgggtattggtgactccaac

SEQ ID NO: 285721 - DNA, 498 bp, Cannabis indica
atgagcttgaaaataaggccttaactttcttgttgctagaataaggcagtaagcgagtttttctatcaacgggtatcggccctcagcctcaatgagtcttttaatgatataatagactgggtgttgtacgttgttctcttctctgattagcacggcacttacagcatgttccgtgacagctaagtatattccaggttcttctccttccacagattttgagagtacgagaggttttgcaagttgtgcttttagctcttggaaagctttttcacactcctccgtccactcgaactgcttgtttcctcacaggatattgaagaatgggacacacttatctattgattttgaaacaaatttcctgagcacggctatccgaccagtcaatctttgcacttctttggtttttgttggcgagttcatatccaggagggcttgactcttctctagattagcttcaattcctcgggcattgacgatgaagcctagaaacttgcccga

SEQ ID NO: 285722 - DNA, 224 bp, Cannabis indica
atgtaagtagacttaggtataaatacaatctttagatgatgatgactaaacgacaattgtatcattattattttctgttaagtaaagcatatatacattcacctctaactactaaaggacatgaggataatctgtttataactaattgtcatttatatattaatgactgcttaaactgatttattaacccctttacaaaaaaaaaaaaaaacaaaaaaaactgt

SEQ ID NO: 285723 - DNA, 508 bp, Cannabis indica
agcttcatgcataaaataaaaaataaaatcaccattaaagctccaagctttgagttcaaaagtcaaacttggttaaacatcactaacatgcatccaaaccagctcaaatctacctaaataagcataacaaagtctctgaaaacaacagcaaacaattacaaacaacacagcaacccagttcatcaaattactttgaaaatcatagttttgagttaaaattccacacttagttaaaatcaacaaacaccaacacaatcatgcttgaatcaacatattaaatcatattctaacttcagagatcaacaacaaacaaccacagccacaacagcaactaaactccattacatgcatgatttcttttcttacaattcaagaaaataagaaggaaagagctaaggaccttacctagattaaagatcacaaagaatttgattgaaatccatagatgaagcagcaaattcaccaaccctagctgggttcttaagggaaaaacgagagagagagagag

SEQ ID NO: 285724 - DNA, 1002 bp, Cannabis indica
acacttttagtataattacatcttatataattattggtattttaaataaagtgcacacacgtggcgtccctgttggacagggcgttacatctcgtgtccccacccagcacatgccgagtttcctcgactgggacaccctctgctccttctcgccgcgcgctaaatgcgtgctagcagcctctgttcgaattaacatcctaatacgaatttctaaaacaatgatataaacacatataaagtttaagaaaccttaaattgggtgcagcagaatataattgtaacgccctaatctataggaacgccacgtgtgtgaatttataaaactagtttaatactaatatagtaattaattattaaaaactgtgaggataataaaaacttgactaaaataaaatactaaaaacggacattataacggcagtaaaaaggagttccggaaatccctgttataaaagatttatccaaaagatgatatacaacaacagttcaaaatacaattcaaaatacagaagacacagccagtctaaaacaactcctgtcaactcaacacgcaagctggtggggtcaatatgtacattgctggagaagatcgccatctcatggttgttctaactttgccttgcccttacctgcgccacaaagcacccgtgagtcacatagactcagcaagaaaagtaataaagaaggatacattaaatagctaattatacatttcattatcacaaaatgattaaactataacattcaacagtaggtaatataatcaatcacatgcatagaaacagatatgctcatatatttgtattgcctaatcaagcaagcccgtgtcataatgcaatatcatatataatatcattgcatcacctaatcaggtgagcccgtgccacaacttgacgctaatatatcgcatcgcctaatcagacgatctcgtacctacgctcggtactcatcatatgccactgacgcccgtacctttgcctggtacgtcgccaaatgtattgc

SEQ ID NO: 285725 - DNA, 797 bp, Cannabis indica
attgagatttatatatctgagaagactataaattaccttagtaaaccggctattacataaaaattagtagtaggaagataatcatattaggccatagacaatagatacaattaaaatcgaaagccttaactttaatcattgttaatttctcttttgaattacttgctttttaatttcactttctctttagtgttcttaaatttaattttctcttaattttgaatttcaccaaatagaagtaaagatttaattttaaagtacttaactacaattcttgtgggatcgacctcactctttgtgagtctattacttgtttacgatacgtacacttgcgtgttaaaaaataccacaacacaattttaggagaaaatatgaaaattccaattaatcccacctataaaataaaaactatcctatccaatcagtacccaaaagatttttcagtttctcctctctaaaaatgactccgagaaagatttctcctgctccagcggtgaccgccacaacaccggcgactgctcccactccatccaccgatgctacatctccatcatcgatctttgattctccttacggctctccttcagtgatctctgattctcctgatgatgctccttcaccagctcaaaacggtgctacttcgaattcgttcactgttgtggatctatggccattgtcactttggcctcgatttttcatcatgtaaagagctgaattgagttttttattattttggtttttacgggtatttggttgattttttatttgtatttgtgttacaatttaaatattttttt

SEQ ID NO: 285726 - DNA, 682 bp, Cannabis indica
ggtccgttcgtacggagggatccgaacccactccgtaaggagctccgggtgctccacagctcggaacccggaggagaagaagaagcgatggcggtattccttgacgtgtttttgctggttataagggaccacgccatcattcgaagggtgggcccggaagccgtaaaaaccgtccttaagtttgtcccccttcttggggacagaaacaagttcataaaaatacaaaatctccgccggactgggagagccccatccccgggcggagtaaaaaataaataagcctgaaagcaggcggtaagcttgaggaattagttggtatggcgcaaggccgacaaatacaaggaaattaataaaataatcttgaaggggaagcatagccccggtcatcagatgcgtctggctccaagccccgaagcctccgtaattgtggttaggggtctccgcatctcggggcggccggtggtacgtcccggacgtcgagggcttgataccagccacctccacgatgttctccagttggtgagggcaagtcaaagtggagtgaagctcggccgcttcccatcccgtagcacggggtctatacccctcctgggcaacgggacccaccatgaccttcttccaaggtggccagacgctttccacccttcttggaagatttggaactggatgcagacattttggt

SEQ ID NO: 285727 - DNA, 563 bp, Cannabis indica
attctaaaattagactatgtctagtttgtgaattttcactaagcaagggaaaaattgtgaagaaagagtttctagggcttatttgttaattaagagactttggttagtctaattaataaatatattaaatgacaatattatttaataattaattttagttattaaatagttgaaattggcatttaaatggttaaatttaaaaattggcgtttttgagaaaatgagatgtagaaatgataaaacagcaaaattgtaaaagtggggcccattatcctatactatggccggccacatatgtaggtcatttataattattttttcattattttaatgccaaataattctaacctaaccctagaaggttgactataaataggtagtgatggcttcaggaaaaagatgatgcatctcattccttcagagaaaactcaaagtcttcttcctaaacctagccgccaccctctcttcctcttcttcaccactgaaagcgaacccttgagtgatagagtgagtgctcacacacatcaagtagtacctcaatcatagtgtggaagattgtgaag

SEQ ID NO: 285728 - DNA, 402 bp, Cannabis indica
tttggtgaatggtatatttgtttttttgttatacagtatattaaattttttaaataattatgtaagttcttattttctattgtacttttgttaacatgatatataattttattagcatcatatattatttttatttttatttgttgttattattatatatatttctattgtaaggtatatattttatgttatatggtatataagttttattgtatagtatatcattttattttagataatgcatgtttagtttttattttagtatacataaaggtgatatataattttgttaatatgatatatataatttttttaataatattatattattttgttttattttttattgtaggtatatacgttttattgtatggtatatgatttttgttgtctataatatat

SEQ ID NO: 285729 - DNA, 531 bp, Cannabis indica
atgaaaagaagcaaccacaaccaggggctaagggataagaagataagtgagagggagtcaaagcttaaagtgggcacttatattggagttgactatgttggcacatttattcttgaattacagtttagtgttcagattgttttgaacagtactttcttgattcctacttttaaagtaattcagtttcgcttccgcttttagttaaacaatgattttcttttcgttttgccaattatagtgttgacattatgtttgactccgaataattggaaactgtttttactctgatattcttttcaaattatcattgacttccttagcttcctttttcaatgttgtgaatattgtggataagaaatcttatattaagataacatccttattattatggcacgataaatcgggtcatatttctaaagaaagaattgatcgattacttctagctaaaattcttcctcctgttgatgtttctggttgggatacttgtgctgattgtacttgtgaaaaattgactaaaataagaaagcagac

SEQ ID NO: 285730 - DNA, 479 bp, Cannabis indica
aaaactaaaaacacaaccaaacaagctcttagtatctagaaaaatctaattagttataacttctttatttaattaaatacagaaaaatacatctagtttatcttgaatgtgtttcattaaactaagtttatttttcttaaattaatttcaaaataatctgatgaaaaaaaaatcatgtatttcgaaattaattatgttgctaatcaattttattaggttaaactagtgtaattaacctattacagttattcaaataaggtaaatgggcctttacaattagggttgttcatgtgagggagtgctgggttcagtatgtcgtacacactactagtggccccctaattctcacacaaggcccaaatgagaggaatctaaccttaattaaataactgttattcattgaataggcccaatactaattgaagataaataaaatctatcacatgtgacaattttatttagcaacctagtccatttta

SEQ ID NO: 285731 - DNA, 637 bp, Cannabis indica
catgcaaacactacagccaccaaaacctcaatttttctttgaaaacccaagctttttcatagaaaatctatccaactagaacaagaaattcaagcatgcaattcaatctaattaaacctacttaactcaacattttaatcaaggaaacaacaacaacaataaacagcagcaacatcaccaaaatcatcatgcaatattcatcttttcatcaaaattttcaagaaaacaaagtaagaaattgaacaaagaaatacctctactaaaatcacttaatcttgctgaaaaatcacttgaaaaatggagagaaaacaccacctagcttgctgcctcaagtggccgaaaagagagagagcttgagaggaaaaattgcttttcttttgaatattttctaactttgaaataatggagtttttgtaaaataaaaataaagagttaacttaaccatttcagccaacaataagagtcaaataacatttattttcaattaataaactcactagaagacaaaatactaatggggcaaaaagaccattttgcccctccacactaaaaccacataaatcacactaaaggggtatttatgggaaattctaaattcccggccattcccgacattcccaatgtctaataaaccgtc

SEQ ID NO: 285732 - DNA, 549 bp, Cannabis indica
tcccaagactcacctgggttcatctacaaaagacaacacgtaagatgagtgttggacggagtatcaagcgaaaaaaacaagcaaatatgccgaccaggagtacccaacagattaaagaacagccatgttcgaagaaaagtctaaactcaagaagtcagaaagtttttcttgagttaaggcaagaagttcatgaagcttgaagaaagtagaatgaaaaaacagacgcaatgtagtcctaaaataagccttacagctgaaagctaatgcaaggacatggaaaagaagagtcgaagaggtttcaaaccctagggtttcctacagtgttctttctacagcaaagatacattcaaaggcacaagcatgcaaaggaaaaacataaagggagtcagaaacttactcaaagattcaagtgtctggattcaagcaagcctgaaatcgtctgaaagctcttcaccaactttgaagccagaaaactctctcttttgctctgaagtttccttaacaacgaagagtgatgaaatgaggaaatgtgccagtactccaagtatt

SEQ ID NO: 285733 - DNA, 657 bp, Cannabis indica
gttgaattggtcgagttatgaaattttgaaaaattcatgtagtgaatcggaattccggttcagcgaggcctgtaggaaccggtctaccggttggcttccaggaatttctaccagaaccggaattccgattggggatccggtctaccgattagggaaaatttgggaaccctagtttttcccatttttgtgttatttagggtatttccatgttatttaccgatagggaaacttttagtttcaagtttaagtccccgggaagtgatttagcgtgtcacttatcaatgttgtgattaatgtgatttaggagcttgtaaatcgccgagtaggttgaccggcacacatgaattcggaatcgaggtaagattagtataacagtatgcatatgtatttacctgtttagcgtgcatgttaggaagcctgttagattacattagatatgtatgttagcttcgtaccatccgacagtatcgcattgctacggctagagtaggactagcgtaccgagtataggctgatattatggtggatggtactgtactatttgaccgtatcacatcggtatgcttagagtatgacttacataccgagtataggctgatacagtaacacatcggtacggctagactaggactagtgtaccgagtataggctgttact

SEQ ID NO: 285734 - DNA, 554 bp, Cannabis indica
atttgattcaataacaatcatacaagctgcgtcattatatgaaaataacttgcaattttattgataaatgaaattggcgacaacgccttattacatcactacgtagtagtatgtgattaaaactaaagcaaatctaaaagaaaagactaaatactaataaagattctaagttgcttacgggcatacccttagcatgaattgtcgctgaaaagcaactgttattgataatatttgcggaggtgttggccgttccaatatcggggtactggtataaggttcatgttagagtcataccggcctagcctatacgtgccggggggtacaacttctgtaacttcgtatggaccttcccaatttggccccaatactcctgctgttgggtctttagtgttggccaagactctgcgtagtactaaatctcctaccttgaagcttctttccttaactttggaattaaagtatctggctactttttgttggtatgctgctaaccgtatttgtgaggcctccctacgactttccaataggtccaacgattcattcatcagctggtg

SEQ ID NO: 285735 - DNA, 881 bp, Cannabis indica
tacagaaggggcaactcattgctatcggggaagaagaagattgattgtgttggcttagagatttttgggcttgggcttaaaaaaataaaaagaagatgaaatgggctgtaattagtatttaccttatatgtttgtgcttatttttagttttatttttaattttaccaccaagaggagaaggttgaaaaatattagaatatgaaaatattattggtgcttaatagtaatttgcaaagaatgtgaaagtctataaatatatagttgtgtagctattattagatatgaaatgagataatagaacttttttcaattagaagattaatgacacatatactgacacatattttatttttataaaataaatcattcaaataattatactattttaattattaattaaaataaaaaaaactaaaatattaaataaaactaacactacgtgacttggcacgtaacaatcacccagtatatataaatatctatataaaaaaaataacaatgcaaaatccataataaaaaaaactaatccaaattttaaaaactagttttcaaacatacaaattttattttatatactatgaaataccccagtaacttcacaacaaatagtacatatacttcatgactatttcattttaagccagaaacaattcaacagtagacgaaaaactcaaaaaaaaaaaaaaaaaaaaaaaaactaaaaaaaactaaaacaaactaaactaataacgaaaaaaagaaaaaggaaaagtaaaagtaaaaaagtaaaaaagtaaaagtaaactaaaaacaaaaacaaaaacctaaacgttaaaaaacttaaaaaaactaaaaaagtaaaaaaagaaaaaaaaaaaacttaaaaaaaaaaaaaacgaaaa

SEQ ID NO: 285736 - DNA, 457 bp, Cannabis indica
ctaagcaaaagcttgagttttcaatatgaaattgtgagttttgttgctgtgtttgttgaggtcgaattcttgtgtttcaagaagcttttatatgcatgattaagtaggtctaatctaatttggatgcatgttagttgattttaaccaagattgagttttggaactcaaagcttgggctttaatggcactttttgtttctgtgcaatctgggtaagtttgatgctttagaattgttctataggatgtttagaacaggtctggaagctttcgtatggtttggagttgatttgagcaaagtgtgaatttttaaatattttctgcgaggaaccggaattccggttgtgcatccagaattctggatgggtttcgaaaattcccagaaccggaattccggttgggcaaccggcctaccggttggggaaaattcagaaacactagttttcctcgtttttatgtt

SEQ ID NO: 285737 - DNA, 515 bp, Cannabis indica
aataaaaaaaaatataattatatctatatattctgtatatatattacttgataatatatagaacagttgaaacgttcggaattacacatccaccacctatgtttatatttatgtgtataaaattattaatatgtccgactgatatatgatatcgtcatatggtactgatcattttcatttatgtatattaattataagtgacttttatatatacaaaaatacatgagtgtcgtaacttgtagtaaaattgatattatatatctctggttgtggaaatattggaagtttagcaatgaacgttgatcgaggcatgtaaaatatggcccttgatctataggtcccacgggagctgctactcatgttctatgcatatcagttgtttttcattgggcactactacaaaacaagcctttagagtcgtttttttcagcataataattaataaccgatgccatagggttgaaaatttttagaaaggaatttgacgccacttttggcgtcggttatttggaaat

SEQ ID NO: 285738 - DNA, 490 bp, Cannabis indica
aaataatttccaacagttgtaacattctcgagcagattgctcattccctctaagacaccctaccccatttttggttgggaacttcaagcacgagtgaaatattgatgtgacagcttttaattgatacaaggctggtcggcctagcattacgtaaaaggctgaaagaacatccaatatcagcaattgtgccatgatagttatgctcatcggagcttgtccaactgtgaggggtagcctaatttgtcctagaggtgcaactccttggccggagaaaccatagacgggcttaaggtatgcagttaaatccttgagctggagccccatcttctcgtaagctgtcttaaacaaaatgtttgaagaagccccattatcgatcatggttctggccaccattttgtttgctctctggacttccacaaccagcgggtcgttgtgcagaaatcttatctgggcagcatcttcttcgttgaatgttatggttggctctcct

SEQ ID NO: 285739 - DNA, 935 bp, Cannabis indica
ccccagaatgctacgatcagtgaaaaatcgggagcgcctagcaacaaagtgggcaactcgatttgctgatcgtctaacaaaacgaatactaacattatttaaaactgacaatgaacttttacaatctctaataaccaaaccgaaagtagaggacataatttgattactaaaaattgcttgcaccgttaccatactatcagtttccatgtcaactttattccatcctttgtccttcaaccaacttagagcttctttgatgccaagagcttcaaccacctcagctgggtagtttcctccctgatatgtggctcggagatcaacaatgtggcccgtcgaatctcgagcaacaatgccaaaaccataagcactttctctctcaaataacgctccatcaacatttaacttgactgtatcagaatcgggtttagtccaacgctcaatgttattatcatgttgcaagagtgacaatgataataaactagttttatcttgagcagtacgccagtggtcaagtgtagtccatgctgaatgaatgacttgagttggagaggaagtcttcttctcccaaacaagcttgtttcgagacttccaaagtgcccaacagatcatgatggcacggcaagctatatcatcaccatacaatgcgaatgtagagtcaagccaataaccaatagttgatgaagtatcggattggatggtgaacccacaacgctcccaacaactgaaagcaaatgagcaattcaatagcacatgagaagcagtctcacccgcattgtggcagacagggcacaaggaggatagatcgacattccttgaagccagttcaaggcatgtggggagagtattggtgacagcgcgccacatgaagttcttcacttttggtggtattttaaggtgccaaaacctgtgccaaaatccagagtttggttgattct

SEQ ID NO: 285740 - DNA, 541 bp, Cannabis indica
ctatatcttaattttctttttattcttcttctttatgctatcactattaattgaggcaattttccagcctaaaagttggataaaaagcctattcaaaatgggtccttatattacatagaccatgttcgtgctcagtatagtcagttatgctttttcttctttttttttttttccctaaaatgaattattcacctgataaaaataatgaagatgacatatacagtaaaaattaactgtgcttggttttagggagtggatgtgaattgagttaattggattttttttgacgtctccggccatatgactcggatattgcctgccactgctttgaatctttgacacagatgagattagtggatattgctctcaccctctcaatttcagtgaactcactacaattattcaattgagaattttctaaatagcacagtagttgtgtccaacacttcactttgttataattaaagtattgctattaaataccgatcatatataacacttttttataggtagtacgattgattaataatattttttaaaa

SEQ ID NO: 285741 - DNA, 696 bp, Cannabis indica
atcaggaggtaagatcaacactttggaggcgtttggttgggaggaatgaaaatataggaatgggaataggaataggaatggaataaaatttaaaatacataaaagaaattgataaaaaaatcattaaattttttttgttgttacattggaatggtcattcctttctttttaaaatggaatagccattccaccaaaatggcggaaagagcattccattggaatgctattccaatactttaaaatgcaaccaaacaaaggaatggaataaaaattgttttctttccattccattccatttcattacctccaaccaaacgccaccttagtatatagatcgtacatggacagtagttggagtcagcgactctcgtagggttctctcatctagaattcctagagatgagaattaagttggcccttgcgtacgtataccgaaaatatataaaaatatctattattaattaaaaagaattattactataatataaatttaattctttcaattatttgtttttgatgaacattccttttttttggtcgccgacatttaacaacatccaataaactcaaaactcctcatcttcttatctttatatattggcccccaaggaaatatatccaaatgactctaatctaaacttgtccacttaataatcttaatggttgattttttttttgtataattaataactatat

SEQ ID NO: 285742 - DNA, 651 bp, Cannabis indica
agtatggaaggggtctcccttcctgcataagaacagtgcaatacctataccagaggcatcattgcgatggtgctgaaatctttcacaaacctcctagtaaaaactagcaaggccatgaaaacttcaaacatgacctatagttgagggggctggccactcttcgatggccttcatcttttcttcgtcaacctacaaaacatgtagcactcaacaacaaatcctaggaaaataatcctatcggtgcaaaaagtgcatttactatagtttctgttttcgaagttacatccaaaactgtattgcaaaatgtgaagcatgatcatgcaaactcttactataaattagaatatcatcaaaatacacaacaacatatttttcaatgaaagcacgcaaaacatgattcctgaatcgcgtgaaagtgctaggtgcattagttagtccaaaaggcatgactaatcattcatagaatccatgttagttttaaagaagtttttcactctctccttctttcatacgtatttgattatacccactcttaagaatcaatcttagaaacacaacaggaaccatgcaactcatctaacaaatcatctaaaacgcggaaatgggatgtttgatattttaccattatgttgttgatggctcgacagtcaa

SEQ ID NO: 285743 - DNA, 547 bp, Cannabis indica
gtggaaaaagtggacacagaggataaccttgctgagccattcaccaaagttttggcagaaactgcatttgaaaagcaccgtcagaatttaggattaattgaaatgaactgattattttatattagtgcaagtgggagtttgttgggttttatgtcctaaataaaactccaatttcaatgtaatctttatcttttacatatcaataaagaaacagaagtattttcatcacttatttgtgtgtcatttggttcatgttatcatttaattgtttatttgatttataaattcatccaaacccatgtcacatttatattcttgtttattgtgtcatcaacacagtgaaaagtaatcaagattatgtgattaaatatgtattcctagatttatcagtacacagggtttaactgatatgtgaatctacaacatagtttacttgcaccttggataagtgctatgttctttccagggcattggttaaagtaaagcttgggttggatgcatggagtatgcatcggaagggaccgatattgaactttgattcagatat

SEQ ID NO: 285744 - DNA, 738 bp, Cannabis indica
acgttcaacacatttcattctacacttacattcgggtggaatccattcaccttcttctacgaatctccttctacttttgtatgagttactggaagaagacattacctaaactaaagatgatttgctgtgggataagcaaatatgaacagagcaaaatttttttgaaggcaaaaaaaaaacgaaagaggcagagaagaagaagaagatcgtgaggatattagggttcctattttatgttctttttttttcatttttctaattaaattaggtaggggtattaataaactttcaactaccatcaaattactatgacacctcagattttcttatgccacatcaacaataaacgggggtgtgtttaaaaatccaacataaggggtacaataatatactagttatatattagggagattttttaacagtccttatattttaggggctacaactcggtagtgacataagttcagggagcaaatttgctaattattctttctttttatatatatatatatatataaacctactattttagaataaaaaaaaaaaaaaggaaatgcatgataaatctaattgaaatttattttttaacacatcatataaataaaaatttgacgacaaaataaatttttatttcgttttactctttacattttcgtctaaaaattttaattaagtgacacggtaaactgtcaaaaaatttagtggtttacataatattattaaatattataataataa

SEQ ID NO: 285745 - DNA, 1432 bp, Cannabis indica
cttttacttatatcaatattatgttaattatttcatttgcataacatatataattagttttgattttgttttatataaatttataagttgatacttgttctactttattttaggaattataattcatgtaaattttaatttggccctttaaataataattgagagtttagaattttgatcctagatttgattcaaatttaggtggcgtttggttggaggtaatgaaatggaatggaatggaaaggaaataattttcattccattcctttgtttggttgcattttaaagtattggaatggcattccaatggaatgctctttccaccattttggtggaatggctattccattttaaaaaggaaggaatgaccattccaatgtaacaagaaaaaaatttaattatttttttatcaattttttttatgcattttaaattttattccattccattcctattcccattcccattcccattctatagtgtttgtagagactttaatagaagatcggtgaaatagattttttatattatatgtttttgttatatataattaaagaaataataaaattaaactaatttatatttattattgttggttgtagatttttttgtttttgctgagagtttttagggtgtaagaggtattaagtagataaatattttttagattaattaatgtaaaaaaaaatagaagaaaaaagaaaagagttgtaacaaagcttattttaaagtaggacataaatataaatatataatgatcctatatattaataataataatactgcccattacttttaataaaaatatctaattttatttacaagacgttaaacgacgaaaaatcacaatgtggctatttttatttaatacttgaagatgttcacaactggctagttttcgtaacaaaagacaaaataaataataactaaaataattgcgacataacttaatagcgtaaataaataaacaaagcgtcgtagaccgcccgcagttatatgaccctcaacgagttcacacacacaagcgtctaaagttccactcgccaccggctttctagactttcaactaccttggtctgcacatggtaatttgataagggtgagctactaaactcagtaaggaaatgtgtgtcagatagttacataaataaaaataaaacacaactaaaacgtacatgcacatatttagacaagtagcaatacataaacttaattttatcactagcaactaataactagattcaaagctaaatcacataataatgattactgttgtagagcaaaattcgcaacaccaaaaatgaataataatactaataataagaagaaattatatgaagaacaaatgcgagtattcgacctaaaacagcgagtactcgaactgggaacgtaagtacttagtaaaaactggaaatatcaagaagacaaaggt

SEQ ID NO: 285746 - DNA, 466 bp, Cannabis indica
tcacactattttcaccaaaaatcacatttttgcatagaaaactcaaagctttgaacaaggtagcctatatgcatttctaacagcttgaatcacctcaaattaacatgcttacaatccagaaattaatacaaaatcacagcagcaaccatatatcaaaatcatgcatgcatttcatcaattttacttaaaattcaagaaaacacaaaggcaagttaaaagtgatcaaaccttggctaagattacacaaagatgagttgaaattcacaaggatttgaggagaaaaacccagcttttgaatcccatgcaccagccgaaatagagagagagaaaagagagtgtttcctttttcaagattttctattttttttctaagtgttgaaatgagaatgaaaagagtaaatgccacatatatcatattatttcagccatcaaataacacttaaacatttatttttcaaataaacaa

SEQ ID NO: 285747 - DNA, 581 bp, Cannabis indica
cggccaagccaaccacaacccatgcagaggaggctctgtcgttgtcaaaatcgtcgatttttgtcccgctggttgccaaggaaccatagatctctctcaagaagccttcgctatgatcgctgatcctaaacgccggaaaaataaaaatcaaattcattgagtaagtactatataactaataaattaaagattttgtctacattttaattatttatttataaatagtgcatccctagctatttatttgtgtagaattctaatgtgttttgatggtattttatctatgaatttgcagggtttgatgttgagatcttataacaagggtatatatacatacaatatagcttgtaattagagctatatttatatttaatatattaataaactaaaaatgtatatccatatgcacgaagagctatgtatgaagtttctagaaacaaattaataaagaagcccttgatttatttttcctttatttaatttttttggttagtacgttaaattttattaattatcttttttttatttggtattaaacctaaggtatagtgtacgtataacactggatataattaaactta

SEQ ID NO: 285748 - DNA, 537 bp, Cannabis indica
tctataggcaccagatcaccagcaaatttagataaccgatcaaattccagagtatactcggccacagacatctttccctgagtcaacttcacaaaatcttcctgatgtgaagttctcacagcaacattataaaacttttcttcaaaaagtttcttgaatttttcccatgtcataacactgacatctcgggtctgacccactatgtcccaccagacgcgggcatagtcttgaaacatgaaggccgcacaattcaccctctcagctcccgtcacccccatattatcgaggatacgggtcacaatgctcatccactggtcagccttaataatatcaatacctcccaggaaagtcggaggttgcagcttcacaaactgctcaaatacagaatccttatgcggcattacaaacccctggttacccatcactagcacaagtgccggtggtaacacttgatcaacaggggcagccggtgccggttgccttaaacgacgcaactttcttcttcttgacgaagtatgatacctcgcattccttaaa

SEQ ID NO: 285749 - DNA, 576 bp, Cannabis indica
tgctctctttttttttttttttattttctttctaaaaattattattattattaggaagtggttagttataactattatactattacaatatgacatgccttattaaaagggatttcttttttctttggttttgtcttgttttgagtcatgggtaatgggagaactattatgttgtttgattatgttttaaaatcaatattataataattatgtaagtcaatttatttttaatgaagagaattataagggtgtgatggtaatttttttttttcaattttactttaataatagataaggttggaaactaaggttttcaatgaataattgaatttttgttataatgaataaatgagtgattcaattatgcataatagaggaaagcttgagattgtacttttgttactaacaatatttaatacatcaataataactaccaaccataaactcaaatataataactagcaaccataagtactaaacactacaatttgttctcatccatgtcctcactcatatactaaaaagaacaatgtactttctaatcatcaagatcaactacgtaaggctcctgcaaaa

SEQ ID NO: 285750 - DNA, 504 bp, Cannabis indica
tatcactagcataaagtggtgtatggtacaaagatgatccgtacattcttgccagtcaagctaagcaagttttctttgtggatgatctagttagaggtcgtaattggagagttgttcataatgtccatcaccgccaagtttgggaaaatattttggatgcttctaatgagacagatgatgttgatgttgtacatgacacaaactcatcaaattttacactatcagtggatttgggggagttgaatgtccaacgaactaatgattctccaacaattgtagatgtccctcaaagttctgagatggttgcaaatgttgatgatagtagggatgatgaagatgaagaaattgcagaagacctggaggatgatttgcttattgatcatcttgaagatgaaattgaagaagcgcccgcaacaaatttgcatttcattagtgatgatgattgtgaataatggattttagtactgtttgtattgatgagtagttatatttttttaatccttt

SEQ ID NO: 285751 - DNA, 573 bp, Cannabis indica
gtatgtttcaaataaatataaaattaaaggcaaatttggttaattaattaataaaagtagacatttttcaactttaccccaatttacatggtatactaactttttacattttttttacaaaaatactgccagtacggtattttttacttttttactgtaattttttataagtttcatactacagtatactgtgttaagttttcactggtgttctactagtatttttagttgttctattgttgttttgagttgttccgttttgtgttttactagtgttttataaaaacacagtatttttgaaaacttttccgtgtgatagtatttttgtaaaacttaactcaaattccaatatttttgtaagtttcccattatatatcatttcaaatttccaacgtttttgattatatcatttcaattatatatcactactctttctcagtatctaaattttcttttgtaaatttaacctttttatttttttaaatgtattaagattttgcttagggaaatttacacccattactgttttttctattttttttttcgtttgtactgtgacacggtggaatttac

SEQ ID NO: 285752 - DNA, 591 bp, Cannabis indica
aaagaagcaaggaagaaaaggaacacaagctgaaattgggctgattgctaaagcaatgttgaagcaatgttgaagtgaattcagcatcctggcagtgacgtggaaacacgaatttcacttatccacctcagcaacttcggtccagtcactcaaattacaccagccagctgacgtggaagaaaggggtctaaccctagtgggccaaagtgaaaaagtttgggcttctattttggggtaggaggttggtaccctaaaaacccaacatcaaaaagaagagaaaaatgaagtacaccatttatcatcttcatcaattttcgtacttgagcagctgctgcaactcttttggaggagtaaatgtagcagaaagtacaccatagaagaaggaagaggggaccaagcctagtgtttgaattttcttttaccctttcttgatagtcttctttattttcctcttttattgttgtttgtacttagtatcaaaaacttcttgagattgttaatttgggcagcagccatggatgaattatttttagcttggattttaacttcttacttgaatatgagctaaacttttgaggcttgaatggctat

SEQ ID NO: 285753 - DNA, 559 bp, Cannabis indica
ccacgggaaattgaactaaatactactaaattagacttatttttttatttggcaaacaataatattgatgaagataaaagaaaagaaaaacaagaaaataaattaacgcaataaaaatatttaatcaaggaagggaaatgaatcctgttgtttcagttactcaattattaatgctaattactattccgctttctttaagtgaatgacagattataaaattaacctaacatcttttaggtcctaaatcatacgttatctattgcatctctgagatagactaacatacaatccgcattaaacaataatatcaatgtcacataggctatgcaaatactttcattttacatcaaaacctagcttatcaaattttagcattgtcaatactcacttttcaaattttgtattgagatcattaagcatgcctaaggtgatcaatctcaaacatgaaattaagcacaaatatggataaattcacaattaaaaaagaagaaataacaattatcattaactcaatgcataatttcaatcaacattcatcatctccccaaatagaaggttt

SEQ ID NO: 285754 - DNA, 434 bp, Cannabis indica
agtccgggaactgctccacgagtttagggactataaagtggaaagaatccccagagaaaagaacgctcacgcagactgtctggctaagttagcttcagacagtgaaatcgagaaactaggggtggtacctgtggaacgcttggcagagctaagcatcaaaataaaagaagccataataacggttgggcaagaacctagctggattgtccccatcatcgaatacataacaaaaggtgagttatcccaagaaaaggcactgtccagaaggattcatatcaagctcaccgttatgtgatgatggacaaaattctctatcgaagaggactcaccatgccttatttaatgtgtgtatcggaccctgaagctaagcaaatcatgctaaaggtccatgaaggattatgtggagatcatactgtggggttttatgccctaaa

SEQ ID NO: 285755 - DNA, 367 bp, Cannabis indica
atggggtgtacttaggaatttttggggtgtaaataaaatttccctaattaaaattatataatatatagaataattatcttttttacccctgtacttatgacactatactattatgccccttaatctattcagcttgttacaaatagtccttgtataattttatatgcatacatttagtccttctgtttattttgtttaaaaatactgtttgtattgatgatgtggtattataacaaaggatagagtagtaatttcatctctttttagagggaaaattgactatgaggtggcataataactgacaatgaaagatgattaaaaatgatttcataaccttttaaaaaaaatttaataaaaataattttat

SEQ ID NO: 285756 - DNA, 582 bp, Cannabis indica
tggcctataaaagccaccacctttccttcatttggctactttcatcctttcgccaagtttcttcgagttttccagagagaaaaaaatcctcagaccagaaaaccttcaaacactttacagatttctttgctaacctttgttcgttactgtcagtctacatttctttgttgatcaacagcaacccccagttccaacacttcatgtaagtttctcgcattcctcactttactgttcgtgttcatggcatgctttactgtttatttgttttcttgggtttagtgtttgaagtttctgggaatgttttcccttgagttttcacgtaatatgtctagatttcccttctctggtgttagggtcactcttgttatacattattgttattttttgtgaaggctcacttattctctgtgtgatgaccttcgagggtatagagaagactttgtctttctcgattttctgcccctcccctttccttttcttttatgcgcaatgtcactttctgtgagacttttgcacccgacttttgtccaggaaatacttccaaggctttcttgttgacaaccgtccggagggggcctcttt

SEQ ID NO: 285757 - DNA, 565 bp, Cannabis indica
atggctcgtacgaagaaaaccacgcgtctggccgacgcttctgatcctcaagtggcttggcttgccactctgcccaacgccgaacaggattcggccgtcccgatggaggaggaccgtgagggggactctgatgtccaggaggttgaggagctggacgaggtgcgtccgggcagtccttccgaggcggagggagaggaagaggttgaaccccctaacttcggggagtacaatgaggctgggcagccagtcgatgctgacggagacgtcctggttgagggcgtggactacgtttgtgaggagcttgttgaggcggttcctcataggaggcagggtgccttgggcgccaggtgggtaagtccttcgtccaagattttggaggcacgcctctgaactctcgactaagacgggtacctgggcgagctggactgctatattcccgcccatgacaatcgcgccataaatcctgataagggaatgtgcgcctggtcgggggctcacggctagcaaggggcgttattgcccttgcacaagtacttcagggatgtggcagacttctttggcctct

SEQ ID NO: 285758 - DNA, 318 bp, Cannabis indica
tgagagctgaagaaagcttctgcaaaaatacacttcacgttacaaaaagggtggaaactagaattactggtcaacctcgccctctagaggattctcaagatccaaatgaggaagacgtagcctcaagagcagctgagggttctgaggaagaagaaggaattcctgatgatgactacgagggaaacctcgatgagtatgcctacgatgaaggtagctactcagagttggtgcttctaaggcaaaaagctatcgatcacgaagctgagatcgaagcccaaaaagcacaaaaccaaaaatgcaagaagtaatgctagccat

SEQ ID NO: 285759 - DNA, 482 bp, Cannabis indica
aaatacccctttagtgatttttagtgattttatggtggaggggcaaaatggtctttttgccccattagtattttgtcttatgtgaattaaatggattaaatgtttatttttaaataattgttttatgtgttttaatggctgaaataaattagttaagtagcttcattcttttagtttatttcattttcaacacttaacaaaaaaatagaaaaacttggaaaaagaaactctcttttctctctctcaaattcggctgtgcatgtgtgtgtttggagctggattttgctcaatttttcaagtggattctcatccaaggttaagcattttcccaagctaggttagctctcttgatttctccttgaaactatgaaaaaaatgatgattattgagtgaaatgcatgatgattttagtatttgttgctgctgtgattttgttatttttctaaggttcaaagcatgattatttgatgatgattgagttg

SEQ ID NO: 285760 - DNA, 1073 bp, Cannabis indica
acaaaatccatagcaatatcttcccatttccactcaggaatatcaagagattgcaacaaccctgcaggtctctggtgttcggccttaacttgctggcaggtaagacattttgctacaaattctgctatatcatttttcatacccggccacaatacctacctttcagatcattgtacattttggttgatcctgggtgtaaagaatagggtgtagtgtgcgcctcttgtaagatttttgattgcaactccgctttcttaggtacacacacccttgccttgtatagtagaataccctcttcattaactgagaagtccccggctttcccattttgtagttcgacccgcttcttgattaaaaactcatcttgggcttgttcttctttgatattctctaataaatttgattcaattgtgaggttagctagctttcctgttactaactctattccagatctctcgatttcctgttgcaacgcacttttaatgccttaacattgataagcttgcatagttgcgtctgctaagtgcatccgccactacattagcctttccaggatggtacagtatctcacaatcgtaatcttttaccagttccaaccaccgcctctgtctcatgttgagctctttctgcgtaaagaagtattttaggcttttgtgatctgtgtatatttcacacttctctccatagaggtagtgcctccagattttcaatgcaaagaccactgctgccaactctaagtcatgagttgggtaccttgtctcatactcctttagctgcctagaggcataggctaccaccttctcattctgcatcaacacacagccgagcccttgctttgatgcgtcgcaatatactacaaatttgtctttgttagttggaacacacaggacaggtgctgttatgagtttatctttcaatgtctgaaagctttcctcacatttatctgtccatgcaaatttttgttgctttcgagtcaaattcgtcaatggtgtggctatttttgagaacccttcaacgaatctcctataatatccagctagtccgaggaaactccgaacctcacttgcggtttt

SEQ ID NO: 285761 - DNA, 650 bp, Cannabis indica
atcatgttccatatactgcactggttcactcaactatggtaatttagtattgcatctctctctctctctttttaattttaaaaaaacaaatagtatttaattttgatattaagaatattaaattttaaaagaaaataaataaatgtaatacatttgagccctccatgtgtctatatttacgataagttaatggaagtggtagtaacggtgtaagagaattgcaacattaggtatttttgcctccaaaaataaacattaagtatttaagtgtataaaatctgaaacattaggtatttatgccgcaatttacccaaaaaataatcttaattaatatattttggtaaacccagttatatataaataatgggagagacccagattaataggtaaattagacatattttattacatgtaaatattgttcatcgagcagaatagacttgtaaagtcttttttttggcaagttagttgacaaaataatttttccttttatggtaagattgttgtgcattcatattcggattcttaccttataaattcggtttttagttgctcttttccttgttaggaaagttgcactttcagctgaactttcctttgttgaaaacttcttaaaagagaagaaattctcttttggaaagttgtctttt

SEQ ID NO: 285762 - DNA, 213 bp, Cannabis indica
cgcaccgcaccgcactattttttgcggtgcgattcttgtgggtttttaatttcgtgcagtatgaaacttataaaaaatacagtaaaaaagtcaaaaatactgcctaacagtatttttgtaaaaaaatagcaaaagtttgtacacgatgtaaatttcccaaaataataataaaattacaaaaataattttgaatatttttacattttttttatt

SEQ ID NO: 285763 - DNA, 581 bp, Cannabis indica
ggataaaatgggataaaatgatggttttattaaatcatttcagccaaaataagctttaaaaatctgatttctcattaacataaaattcactaaaagacaaacatacaaatgggcaaaaagaccattttgccctttccacactaaaaggcataaaagggtacttaggggtattttgggaaaactctaaattcccgactaatcccgacattcccaatgtctaaataaaccgtcccactatactaaaatactaatttgtgattctactgagccatacaccgagttccatgttgccggacaccgaaaatgcaaaattatgaaatttcactatatgacataaaaatgcattctgaattcaaaaataacagcataaataattatttaaatatctataaataattttccataattaaacataattaactgctaatttccaaattaaactaagcggtctttacatatagtataggcgacgacctatactatacccacctgacggttttaaaccgtcaggtataagggcccattaaaaaaatcgtcacctacttctcgccacatttcccacgtgcctacctacttttttt

SEQ ID NO: 285764 - DNA, 530 bp, Cannabis indica
atgtgcagattgaaaatccacagagatctcttcctgaaggttgaagatggagttcgaatctgcttgatctgaagggagttcagattactttgctgaaggtggttcagctgtgtgtttcttgtgtttgagatctaaatgtgtttagatctcaaagcttgaggttgttcaagcattaggtaactttgtacaaaagtcaatttagattacattgtttgatttggagaatcagaactggatattgtaattgaattgattgtttagtgaaagttactgtacccggttcaagggaacccaagcactactcggttggaatgcgtttccaatgcagaggaagcttgtaaattctgtgttcattgattttaaattcaaggtcataacatagaattactctgttaagaatcatcaattagaacttgtagtaattaggactttcagtttagactttttcataatttgctttgttgaaaagatgaaggtatttggaagggttaatttcacaaatgcacaaaaacaacaaaaatacggtttca

SEQ ID NO: 285765 - DNA, 630 bp, Cannabis indica
aggagttggttcgtttaaaatcaacagtcgttggattgattattttggatctataatacttagtattttgcttcgtgccattgaattaccaaaatatagtatgttagagttgagcttggatgattgagcaattgcacaacctgaaaatgctaattataagtaaatatgcataagagccaactggtgcaaaaataagaaaatatcactcttgcataagaaaacataatataatctttaattttaatcgttaattcataaaataatgcaatattaatatagtaatgaatttatttaaatttagataacaaaataaataaaatgggatttcttcataaaataaaaaaaaaatacatgaattagagaaccaaaatccaaccaagccaaaacttaactttaaatttaacacaaaaaagaattaactttaaatttaacataaaaaagaatgaacaaaatctcaatttatattctatttgttttacactaattgaggtagagaatgatgctcatgaatatgtatatgtattgtttataaaaaaaaaaataatgtatatgtattatgttatgtgagtatatatacatatataatatgatacatttatataaattagaaaaaaaaatataataataaaa

SEQ ID NO: 285766 - DNA, 751 bp, Cannabis indica
aaaaaagcatcctcgatggctttgtggtcaatagtttttacaccacggaaacatgtttctaccaattgatttgtttcctgtgaaaacaacaacttgttgcaatcaccgaaacaatctaaaccagaaatcaggtaaaattcttcggcactaaaccgtatgcaacggccagcaaccttagcccaaaactctttaggattgggctgtaaaacttcccttagtaataaactatgtacgacttgcggatgaaaaacaaactcaggcatatccagaaaatgcccaaactgagtttgacgaaacaaagaaagcaaattaacagataaagtgttcttaatattatctatcacggaataaacactggtgcatacacacttagatctgtaaaaatcagaaggactaaatttacagtcccaaacctgcaacataacgaaaatggccaaaataaattataaatcctgaataaaacagtatgaaaactgtaatacaactacaaacaaactacaaacaaactatcaatgacaaacaactacacagaaaaaaacagtaaagacctgaaatcgtttggaaacataaaaaaaacagtaaacaactaaccctaaaggaaatcgaaaaacacatcaaacataacaacacaataatttttaatagtgaaaaatacagtaggaaaagaacaataaaactatatacaaacaacaaacaaactacaaaacagatacaactatacaaaaataaagagcaaagatttgaaaatcgt

SEQ ID NO: 285767 - DNA, 297 bp, Cannabis indica
atcaataaagaaacataagtatttttcattcatttgtgtgttatttggttcatgttatcaattacttgtctatttgatttataaattcatccaaacccttttcacatttatattcttgtttattgtgtcgtcagcacagtggaaagtaatcaagactatgtgattaaagatattcctagatttattagaacacagggttttactgatatgacaatctacaacatagtttacttgcatcttggataaatgctatgttctttccagagcattggttaaagtaaagcttgggttggatgc

SEQ ID NO: 285768 - DNA, 724 bp, Cannabis indica
tgaaccggttttataacaaaataaataaatacaaaataactcaaaccagatataattaaataaaactcgttctataacaatattataatgaataaaaacaaataacatgacatgactcaaaccaattattattaaaatagaattggttctataacataatgaataaaaacaaataatacataataactcaaaatggttataattgaaaaacaacgaggaaatcagctcctaaacacactgaaacataaattaaaaataaaacttaaatccacaacaaaataagtataaacgaataacacataattctcataaaatcgattataatttttttttttaaaaaaaaaaaaaaaaaagtaggtagatcaatttcaaaaatactaaaggataaatataaataaatttaattccataataaataaataaaaacaaatattaccacacaataactcaaaatataatataaaaaactggttatatttatcaactagttaaaatttgaaacaaaaaattgattccgtaaagcaaccaagataaaaatttacacacaaaaatcaattaataaaataaataaattaaaaaatggttacttgaatcaactaaatcaaaaattggttctcaaaataactaattaaaaacaagttccttaaattaataaaaatcaaaagtcgaatttctgaaataaaaattacaagaaccgatttctaaaaataacttaaataaaaag

SEQ ID NO: 285769 - DNA, 569 bp, Cannabis indica
tttaatctgttgggtactcctggtcggcatatttgcttgttttttcgttttgtatactctgtccaacactcatcttgcgtgttgtcttttgtagatgaaccctggtgagtcttgggagcccgagcatcaaatttaccaggagctgcttcaacttctgcccgaagtccaccctcgtcttcgtgctagttctccttcaagagaaggatattcttctgattccatacccagccataggatgatggctcgtacgaagaaaactacgcgcctgactgacgcttctgacccccaggtggctcggcttgccactctgcccgacgccgaacaggattttgcggtcccaatggaggaggaccgtgagggggacaccgaagtccaggaggttgaggagttggacgaggcgcgtccgggcagccctcccgctgctgagggagaggaagagattgaaccccctaattatgtggagtacaatgaggtcgggcaaccagttgatgctgaaggggacgtcctggttgagggcgttgactacgtcagtaaggagcttgctgaggcggttcctcacaggaggtagg

SEQ ID NO: 285770 - DNA, 515 bp, Cannabis indica
aaacccattatgaaaaaattgcttgaccatattgatgatatcatctttaacaatcgaccaacacttctgaaaaaagccaggggtcataccgtcgggccctggggatttatccggatgcatttggaacaaagctttgcgaacctcctcatttgaaaccgaaagtaacaactcaacattctgctgtgatgatacacgagtttgcacactgcttgtgacttctctccaatcggtttgagaagataaaaaaagttcattaaaataagaaaccataagttagtccaaaccactatcccagtcaacccacgcaccagaatggtccttaagttttgccacaaaattattttttcgtcttgtagttgcagcaacatgaaaatatttgctattattgtctctttcttgcaaccataattgcttcaatctttgatgccataaaacttccctttgcacgtaactttcagccaaatttctctttgcttgtttgtaattggcaacggatacttcatctcgacccaatt

SEQ ID NO: 285771 - DNA, 799 bp, Cannabis indica
tactaatcttacctcgattccaaattcaggtgtgctggtcaacctgagtggaactatctgctcggcgaattacaggctcctaaatcacattaatcacaacactgataagtgacacgctaaatcactttccggggacttaaactagaaactaaaagtttccctatcaataaataacatggcaataccctaaataacacaaaaatgggaagaactagggttcccaaattttccccaaccggtagaccggttttctaaccggaatttcggttctaagaaaaattcctggaagccaaccggtagaccggttcctacatgcctccctaaaccggaatttcggttcagtgcaggaatttttcaaaaatttataactcgaccaattcaaccccaaaccaattcaaactttccagacctgctaattagaccccaatgaacatttctaaagcaataaaacagccacccatacacagaaacacaattcaccattaaagctccaagttttgagttcaaaactcaaacttggctaaatccaactaacatgcatcaaaacctgttctaatccactcaattaaacataaataagcctctgaatacaacaacaactaaccacagcagctacagcaagctaaacaacattcactcataaaaccaaagtttgagttcaaaactccatacttgcttaaaatcaacaaacaaccacaaaactctgcttgaatcatcatattaaaacataattaagctttagaaatcaacaacaaacacaaacaacaaccacagccaccaaatcctcaagcatgcaaaa

SEQ ID NO: 285772 - DNA, 647 bp, Cannabis indica
ttattcacaatttagtaacaagatttaaaaaaaatggggttttgatgattagaataaaaatagcaataataaaaattaaagaaaacaaatttaatgtgagactacgatatgagagactagttaaaggttattcgccaccctcaacaatcattcctaattcctattaaagaatgtaattttttagtttccaatcaaactattaatcccgcagataatgctgaagcagtcaattatcccaatctccctattgtatgtaatcaagacgaatcgctcaataattaattattttacctaaagcagtaaatccatgaagcatgcaatttatttaacttagataaagcattgagatttatgaagatagactaatctaggcaacaaatcaatgaatcatataattcatttaacctaggttctattcttcatcacaaataaaaattataatttgtcacaaacacttagaatcctagactattaggtgaatagtaatcttaagatgacagtagattaaagtaaaacctaatttagtggccatctaaacaagattaaaacaataatcatagcattgacatagaagaatagaagcaatttgatatataatggaaactagaaattaacattcaataatgaaattaaaaattcatgtctcg

SEQ ID NO: 285773 - DNA, 641 bp, Cannabis indica
ctgccgaaattttagtagaattacaaaatttgatatattatggtgtgttttgtatagggtccactcgctcaatcgccttcaagacgtgatgcgtcgaaggcgaaagctcccatgctttctccacaaggcggtcatgatgatgaagatatattattctcgctaaaagtcatggacttgatccctaaatcgctaaaattgatggttgttgaatttctgaacctcaaagataaacgtgatataatcacaattcctgtgcctaagggattcataacaccgcgtacccagatcacgttatctggagaggatttgcagcaggttgcattgtgtgacttcatcggcaaccagggaatgttgtttggaatgatgtatactcttctttaatctaattaaccttatatatcaaattctagtcaaattattataagacactaatacttaacaatttaatgcaggcacatctgggagagcatcaacgatttgagaaaaaatttcaagttttacgacccagagcttcttgcagtgaatggtatcaacgatgaagagaagagtcagtcttttgacaatgcggcaagacgattggctgcttggttatcatcgatgaataacaaccaccaaatgttctttattccttggaatatcgg

SEQ ID NO: 285774 - DNA, 581 bp, Cannabis indica
atcctttttggaaaggaggtacttaagagcagagtggtcggtgaagaccgtgataggggaaccgatcaggtaggaacgaaacttgtcaagtgcgaatactacggcaagcaactctttctcagtagtagaatagttcatttgagcactattaagagttctacttgcatagtatacgacgaagggcttcccttcccttcgttgaccaaggacggcccctatagcgtaattgctagcatcacacatgatctcgaatggcaagttccaatcaggtggttgaatgataggggcagaagtgagtttggtgacaagtgtttggaaggattcctcacactcgggtgtccagttaaacaccacgtcttttgccaagaggttcgacaaaggtcgagctatcgtcgaaaaattctggatgaacctcctatagaatccagcatgcccaagaaaggatcgaacatccttaacagtcttgggggcgggcagctttgatatgagttcaatcttggattgatcaacctcaattcctcgttgtgaaacaatatgccccaagactatgccagatggcaccatgaaatgacacttctccc

SEQ ID NO: 285775 - DNA, 486 bp, Cannabis indica
tcacacctcctaatttttttttttcgattttcaaaaattcataactaaatcaaataaaatcgaaattaagttctgtaaaaaaatgaattgcttaatttttttatactatccaataaaataattccataacgaaaatctaattattttacgtaaaaagtttccaaacatcaatcaattatcaataaacacattgatcaaaaagtgaattgcttaatttttttatactatccaataaaataatttcataacgaaaatccaattattttacgtaaaaagtttgtaaacatcaatcaattatcaataaacacattgatcaacatgaatcacattcaaatcacacacacatcattttaaatccatatttcttgaaagtaaatcaattaccatagctctgaggccagttgttggattatgttttaccaggatctagatttactaacaagtatgtttttaatatcctaaatataaatttctaaaacgatgaaa

SEQ ID NO: 285776 - DNA, 686 bp, Cannabis indica
atgttaatgaaacatagttgttagtaaatctagatcctggtaaaatatttcctacatttattacctgagttgaaaatttgacatggtctgaggtggagcaacataagaacatttcagcctttttaccaaacattattgcctccaaggaaccacttgagtcattaagttgtacagtgattctagttctgaatacattgcaatgtaacatactatatgtaatgttttgtcacgtgtgaatttgaactgaagttattttttataaaataaaacatatttgatatgataatatagtgaaatggagaaattataaataatttataaaacatgagaaagtaaaatatagaaaatagaaaatgtagattgcgttaaaagtaagacaaatcgtggttcaggtgttgcatttttagtgcattttatacaagtgaatgcttgattgaagtcagtagttgtaattcttttacactcgctacataccatgtaccaaagtgtttgtgttgaatttgtgatagtaattgaagttgtggtccaatatgtcttaccctaaaacattaatcaattttgtttggagttttggagtggtaaacaaatgcagagataattaaagttcaacaagtaaattagctcaactggtttaatggcatttataggtgtcataagatgtagttgaggttttattagatgggaca

SEQ ID NO: 285777 - DNA, 692 bp, Cannabis indica
ggcattggatactttcaatacagcaattgtttctcctatctattatgctatgttcacatcttctacaatattggccagtgcgatcatgtttaaggtatcctctctcacacatggtgatgagaaatgatgtgccctgtgtgtgggtagggacaatttcttattatctgggactataatgattaggaatttgtttttaaatatttttaggactattctggtcaaagtgcaagcagcatagcatcagaactttgtgggctcatcactgtattatctgggacttctattttgcacagtacaagagatccagatccaccagccattgcaggtttgttagtatgcttacgattcattactacttttcatagcattggcataattgggattcaaataacatgtttgtaaaaggaacctcaactcttgtgtatctctattgcatttgcttacctaggtctcataatatgcttgtttaattgataatgcaatcattagttgaaaaaataacttaagacaaaattgaactgtctagaagtagaattcttatgaattttaccattttttctagaaggaaaaatcaatattcagatgggtcctgaacaaactaactttaaaagtatacatgtagaagatacaaaattaaaatgaatgagtgtgagctccctaaagcatgaggagaacaaaaaaaccgaaaaata

SEQ ID NO: 285778 - DNA, 571 bp, Cannabis indica
atagtctaacatatagatatattttatttgtggatgttcgattaagatgaggtcttataagcctcataaaggaatatggactccaaaatagtaaggaactatactcaactgtatactctagtaattaaaagctacaaattttgtgatctcacactatggttcaattttgagacgagaaactttaataattttgagtatgttgagtttgggggagaaattagattattatagatatttttcttgaggaagaattaacgttaaacttaattctaattattacttttaacagcatttaggttttcatgactttctttgatcaataagtgaatcctgaactttgataagacactatctaaaaacttctcattcaagatatggtatatattttagataatcaaactcaacaacctcaaatatcagtgtcattgaagaaatccatgagagaaatgacataaaaaaaataatagaatgatagacgatgatcaaatcaacttttatcatgccatgaaagttgaaactctcgaaactagattgatatcataaataaggaatacaaattgatgtgagacaa

SEQ ID NO: 285779 - DNA, 638 bp, Cannabis indica
agcaagaagaagtaatccttgcgtaaagagaggaagcctaaaatcccacgggcaggagagcccaccataacattcaacgacaaagatgctgtcgaaatcagatttccgcacaacgatccgttggtcgtggaggtccagatagccaacaagatggtggccagagctatgattgataatggagcttcttccaacatcttattcaagaccacatatgaaaagatggggctccagctcaaaaatctaaccccctgtcttctgcctgtatatggtttctccggccaaggagtcgcacctctaggtcaaattcacctacccctcactcttgggcaagcttcgatgagcataactataatggcacaatttctggtattggacgttccatcagcctttaacgtcatgataggccgaccagccttgtatgacttaaaggttgttacgtcgatattccattcatgcctgaagtttccaacaaagaatggggtagggtgtttaagaggaaaccagcaaatttctcgggaatgttataaccttgccgtagccaaggctaaaaaggaagtatcccctagctagagcacggacaagggaaaaagcatttctaagtagggaacttcccaaggcggggatgaagatgtagatcc

SEQ ID NO: 285780 - DNA, 765 bp, Cannabis indica
tagccaacgacaatgagtctattttataagcgataaacgatatgtagtaacagatatacgataaagcaataataagacacaggaatttatagaggttcagccccgagcagttcggtaatagcctaatcctcgttatttgtattgacttaagatcaaggagaaagattccttttcttatagctcttacaacagtatctctgaatatataattcttagataatagtatagtcttcgcttagctgcttttcgaccgaccctctgcccagtgaatatacatcactatttatagggctaggaagcttgaggaggaagagtttcctctctcgttacaatgcgtataaacagaaagatcgtgggatcaatgttgaatgcaaggatcgtgggattaaggctgaatacactgatagtgggatcgtgtgtatgccatatcaacgaaaattgatccctgagttatagggattgagctgatgactcatgatgcgaaagctgaatttgctaagtgttggttgccctgcgcgggtcgctgaataccctgctctgggcatgccagcgaggcatcctgctcggcctatcattccagagcagatgttccaagttgacaccacgtgtcaccattcttgtgatgtcacgtcagagtgcaaaaattgggataacatttgccccccaagtctgtacgggacttccgaagttgcgtgtagacttcatccgagctgattctacctttggatggggacacgtgccgagcgtgaccgttcgagactcgat

SEQ ID NO: 285781 - DNA, 561 bp, Cannabis indica
cctcaaaaaccaagaaagtagatgacggacaacagcttgcccttctccaagcaggcatccgtacggggactccattctggaacgaactacaacaagaaggagcttcaaacctttaggacttccagaagagagtccaaaaatacattaacctcgaagaggcccaaatagtggcctatggaggatattatcccaccggggtagcagcatatgtgcttggagcccagctctcgggcactgtgccggcagcagctccaccaatgagcggcatacagttctatgccactcccggatatagccagggccaggccctggcccccgcatcgtcccattttggaaatccctcagggataaatggacaagccccctcgcactccgctccgacagccagtctagccggtccttcccagggctcgaggagtaaaaggtcctccaaaggcagcacccggacggaggaaaagcgacagaaaagggggtatactccccaatatacccagtacacggagttaacggactcctaagaacgtgtgtactttgctactaggcaaaatacgcactaccgga

SEQ ID NO: 285782 - DNA, 549 bp, Cannabis indica
aaatgtttgtcaaaatctatatcgacattatattacttttcattgtcctcaaagaatacaagaacatatacatgaatatgtattcatctctttcattatatatccgtcaactatataatgaatattacgtttgcataatcttcaggatatatgcaagattttattgaggatgcataatcttcaggatatatgcaatattttatcgaggatgcataatcttcaggatatatgcaatattttatcgatgatgcataatcttcaggatatatgcaatattttatcgatgatacataatcttctggatatatgtataatttatatagattttctctatcatatcataggcacacatatattgtaaatattatgaatgataagaacataatatatatatgaaatcaataataaatatataaaaatatatacatacatatataatatactagcaaaaagctacgtgcgaggcacgtatactaaattttatgctagttttttctatgttatttaaaagtgatacaattaaaattaaagaaaaaatattattagtta

SEQ ID NO: 285783 - DNA, 487 bp, Cannabis indica
attgcttgaggccgtagagagattttttcagtttgcacacttttccttttgagaatcggtcctcaaatcctggaggaatgtccatgtatacttcttccacaaggtcgccgttaagaaacacatttttcacgtcaagctggaataaaggccattcattgttgacagcaatagacaagagaactcggatggtgttcaacttagcaacatgagcaaatgtctcttggtaatcaatgccatacgattgggtgaatcctttagccactaatcgggctttgaatctttcaatactcccatcagccttatacttgaccaagaatatccatttacaaccaactgtgcgtttgccatttggcagatctgtgataatccatgttttattcttttcaagtgcttttatttcctccattgtggcagcattccaattgggatcctgtagagcttcctgaaccgaatttggaatttgaacttgatccagagtggtgataaa

SEQ ID NO: 285784 - DNA, 615 bp, Cannabis indica
tagggaaagggtaaatccctagtaaagattgtgcaatcaacagatgtggttgaggaaataattgggaaaagggttgtagaggtgtgtgatttcatttatttttgttctatttttttatgcttgtttttgttattctttaatttttggtgttattgtagtattttttagtagtgttttcttttattttttttaggattgggaatctaagtacacccgatcagaatactaccattctagagtagtaacttctggttatagccaatatcactggagagtttgctgctcttcattttcaagtactatgttcaaattttttggtgttattgtagtattttttagtagtgttttcttttatttttttagaattgggaatctaagtacacccagtcatgatactaccattctagagtagtaacttctggttatagccaatatcactggagagtttgctgctcttcattttcaagtactatgttcaaatattaaaagaaatggaagaagaagaagagaaagtcagtctattacttcaattctcttataataatacccttagatgtttgcaagcccgtttggcactgaagttagggaccaatatccttatccatgtgaagcaaa

SEQ ID NO: 285785 - DNA, 592 bp, Cannabis indica
ttgctgattttgatattgtttcttttatttttgctaaacagtctgctaataaggttgtgcatgctttggcgcgatcttctctttctgagactgaccgtacttttagtagagactccttaccttttgttattgcatctttggttttggataggggtgttcatcaaaccgctcaaaccgcccgcaccacaccacaccgcaaaaaaatgcggtttgaaattcttcgcggtgcggtcgcggtttgaattcttcctaaaccgcgcggtgcggtgcggtttgcggttttgaattgttaatatgcggttcaaaccgcaccgcaccgcaccgcacattataaaaacaccaattttatattaatttaggtccaatatgtgaatgttcaacccaaagtccactaattattgtattgttgaaacttaatttttttgtcatttttattttcaagacttatggtatttttgataagtgttgctcaaattttgttgtatttgtgatagtttaatcatttggggatagtccaaaccgcaaaaccgcaaaaaccgcaccgcaccgcaccatttttgcggttgcgagtgcagtttgggaaattgaaaaa

SEQ ID NO: 285786 - DNA, 588 bp, Cannabis indica
taccctaccgccaatatttttttccctaaaatttgtgaaattaagacaaacattgactcatggatgtcatcagatgtgccttttattaaggacatggcaactcaaatgatgtctaagtttcaaaaatattggaaagagattcatgggcttatgtgtgtggcggttgttttagacccgagatacaagtttatgttgctcgaatactatttccctgtaatctatggagatgagcaatctgtaactcaaattgcaaatattcgtgagctttgttgcgagttactggaggagtatgggtctaagtttcctgatttgagagagagaagggttcaggtagataatgtatcatcttcttcgacacggcgaatggatgctctttctaactttgacagatatgttagagcttcctatcgagtagaaaatatgaagtctgaactagatttatatttggaggagaacttggtacctaggactgaagagtcatttgatatatgcaattattggaaggtgacgggcctcaaataccctttgttgagtatgattgctaaggatgtgtttgctgtgcctgttagcactgttgcatcagaatct

SEQ ID NO: 285787 - DNA, 550 bp, Cannabis indica
acaggaaatcagatcatttggaggtcgtagggtattctgattctgatttcgctggatgccaagatagcagaaggtctacatcaggctacattttcttgttagctggaggagctatatcctggaaaagtgtcaaacagacacttgtagcttcttccactatggagctgaattcgtagcgtgttatgaggcatcaaatcagggaatatggctgagaaactttgtcactaggctgcgtattttggagaatgttgaaagaccacttaagatattttgtgacaataaatcagcagtgctgtattccaataacaataggagctcatccaagtcaaagcatattgacataaagttcctagttgtgaaagaaagagtgcagagtggacagatttccatagagcatattgggacaaactccatgatagcggatccgctcacaaaaggattaccacccaaggtctttcatgagcacactgctcatatgggtgtagtattacttgaggatatcatgatttagtgggagtttgtattttctttgctttatgtttgtttaaga

SEQ ID NO: 285788 - DNA, 685 bp, Cannabis indica
ccttgcttagtgaaaaatcataaactagacatagtctaattttagaattataattgattaattaaatcaattatctgagtcttacaagtagtatgctctgaactagtatggggaccatgggcctgtacaaccgagcttccaataagcagaactagaatttaccaagtaaactccctgacttattaattccttgttacatccaccatagaacttagaattgcactctcaatcatatagaacgctctgatctcaataatcaaagatcctctatagatgatttacactgagtggggacaaatttaccgtttcacccatcaatgtattttatccttaaaacacttagctgcctataaatgatatttcggtgagctaatataatcattgaaacaagagctcttccatttatctctattaagccaagctcgaaggaaatcattgtttcacttctatgtcaagatagaagatatagattacatatcgatgtttagcgctcccactcaattgcactatcatgttcgcaaaatgtacgtatcaccctgaccaaaaagtaggcttaactaataaatcaaagaacatgaatagcactcctgagattgaacataagcatgtcaagattaagatcttttgatctaagatcaaccagtgatattgacttacaaagatacaacggtaagattataatatc

SEQ ID NO: 285789 - DNA, 741 bp, Cannabis indica
taaaattaaattagtaacaatttatatttaaatattatgttttattcataagctaattttttattgtgaactaaaaattatatttagtcacaaagtttgtctactttttttttataatatatatttgaaagaaaaaagaaaaatcaaaagaaaacaatgagtgatagttgttatatactaatttgtttatttaaatttgtaagtagattatttaaagtgtatataataaaattaagaagtgttaacctctatgtcatttggacttattattgatgattgtacatgtctttttctcatgtttatgtgactaattggttggttcgatgtgcttgttcttcttctggtaattaggggtttatccctcctgactgacttggcaattatttaattagcagtcaatattgattaatgaaattgtttatttctcttaaataaaagtgctaacctagtcaccttattaagatttggaataatataaaaaagctatattaagtaatacttattcatcaaaaaaaagtaattttacttaaaatgaggctagctagatctctcacacattttttattctatatcttgaatttataatgcatgtcaatatgtcatatatagctttacacgataaatctatttctttcaaagtaaacaagctataatgtaaattaattagttggtttccagataaaactcgttttagggatgatgatatgaaaaagaaaaagaatccttttgtttcattaaagg

SEQ ID NO: 285790 - DNA, 182 bp, Cannabis indica
aagaaaaactacaaaccctagcagccgtaggaatttcgagaagagagagaaagggaaagagagagagagagagaaaatggcttccttttcttaagaattttctaattttccttcttttagtaagtgagatacaatttgattattaaacattgcagccaacaaagtttaaagaaacttaatat

SEQ ID NO: 285791 - DNA, 518 bp, Cannabis indica
aggtagcagtatacccccttatcggtcctgaagctagtgcactcttggtctgccgtgtgcatctttatttggttgtaaccggcgtacgcgtccatgaaggacagtagcttgaatccggaggtggcgtctaccatctggtcgatcctaggcagagggaaacaatccttcggacaagccttgtttagatcagtgaagtctatacaaactcgccaggttccgttaggcttcggcaccaggaccggattggctagccattccgggtagtaaacatcgcggatcatgccgtttgttaagagcttatccacctccttctctaaggcctcggccttcactgagtcgaggggacgtcgcttttgttagaccggcggcatgtccgggttgatgttgaggacgtgggtgattacgtggggactcatgccagtcatgtcctcctagcaccacgcaaaaatgtcagtggcacccttcagtgtctttattattttttccttctcctccgggtctaggctctttcctagccg

SEQ ID NO: 285792 - DNA, 747 bp, Cannabis indica
aaagttttttatggcattcctcaagattttttcccatatttgtaagttttttaaaaaatatcatatttagtgtaataaaatttttatgccatatatatcaaaacttatctttattttcccatatttttgtaaatagcccttgaatctaccatgggagaaattcaacaatacttattttttttatatacattaactaaatttaactctaaataaaatttaattcaaatatacatctttctatgagtattttacctaaattatcctcacacactcacataactaagacataatttcaaatataataaatttgtgttctttgtagatagatgtgtaaatttatggaaaagcttaagcaaaattttaattagagaataatgaaaactatcataaagtgataggaataaaattggtaaaataattaaaaagagataaatataataaagtttttaaaaaatacaaattaaaagtgtcaaattaaaaaaaaaaaatatagtgcaatttcgtccagacttctctccaggcttaatatattttttccctattttcttttgtatataatttattaaagcgcatacaaaacctgtcctagcaagtagcgacttctccacgcaacatctctatcttagatttcttgccaaattttatttcaaaaataaaatattttactccaagctagctagtagctacccatgaaaattcattacataaaaccatataaattgttattttgaaaaaaaaaaaaattat

SEQ ID NO: 285793 - DNA, 547 bp, Cannabis indica
atttaatttgttactacataaaaattaggaattattacacaaaatataaattgacattttatttacaaaaatacctctaaggtaaagacaacatttataccttcatgtgattttaattactaaaataccacttacactatcacaacttacacaatcaaacgatggttgctgcgtggttgcacagtggttgcatcagacgaatcagacgatagttgcagggtggttgctagatggttggccgaaggttgcatcagacgaaggtttcaatcagacgaaagtttctgagtggttgctgggtggttggctgaaggttgcatcaaaggaaggtttcaatcagacgaaataactgttagcaaaaagttaggcaactgtaatgcaactgcaatgcaactgttgtgaaacattaaaaatcaaaacagtgtttccacgtacgtaactctatctacatgtctcttaatgatttaatatgaataaattcaccattagaaatttggaaaacaacaaaaatacaccaggataagcattttactatagtattgatgtaatt

SEQ ID NO: 285794 - DNA, 543 bp, Cannabis indica
aaataataattataaaaaaataaaaaattatttaattattttttcaatctatatataatataaaggaaagcacaagaagagtttatgtgtcattttataaattattcttcctatttttcctaatttctaacacattttcttattttgtttgaaaactaaccacacaaacaaactaaaagtctcacattgtttaaaaactatttaggttttatctatgcatgttataaataatattcttattacaatattttcctttgtctaaaaaatgttattttttatgggtgattgatttatttcttactcaagtttttattttgcctaattagtttcaattttttaatatttttacttttttcaatctttgcaaaatatttaaaattaaaaaaaaaaaattcagtttttaacaaataaatcaatatgtatataaaagaaaacactaaagaaaatgaggtggcatcctacaatattttaatccatttttactataaaaagaattttagtaaatttagtttattttataaatttatagatattgagaaatat

SEQ ID NO: 285795 - DNA, 510 bp, Cannabis indica
gaacctgaattttcaattaaaaaaatctaattatcagaataaaattgatttttcttaattttttaattaattaaaattagttttagatattagtagcctttgaatttaaaaatttaatttttcaacaaactagccttatggttaattttgaaatttttgattatttttgtctattttatttattttaattataagatcagatattacttattttattattaaaatttgaaatgatcttcttttgatattaaaatattaataaaatttagaaataatctagttaaagtttcaaatttgctaaccatatcatattttaaaaattttttatttttgaaatatattttattaaattaaattataagattagaaaaacgttagttttaacattttatcttattagatatttatttttaattaaaattttatttttggcaaaataagatgaaattttgaaaagtttgttaattttagtttgaatagaaattttacggtttctaaccctaaaatttt

SEQ ID NO: 285796 - DNA, 489 bp, Cannabis indica
ataatggcaaaattgcaaagtggggcccattatccaacccatggccggccactatgcatggattttaccatttgttttttatattattttaatgctaattaaatctaacctaaacctatatggttacctataaatagatagtgatggttcacacttaatgattgatgatatttcactttcgaaaaaactttcatgagccttttttctattaggccgaaaccacttcttctcttttcttcttcaaattttcaaaccttgagtgatagggtgagtgcccacacacatcaagtggtatctcaatcatagtgtgtaagactgtgaagaatccaatcaacaagaaggagagaaagagatccatgttcagatcttgataatgctctgctacagaaaggaatcaagggcgagagatctgaacggaaggagtcattatattccgctgcgatcaatgtaagatttcctaaaactttatatgtgtttatttacattatt

SEQ ID NO: 285797 - DNA, 502 bp, Cannabis indica
tgcgattagactttgtcatgcttgctacctctcgccgattctatcttaagcaaggtttaaaacttcgaggattccctcagggacatctcagctttctttgggaaatctgagtatacgcgtcctctaaataggggtctcgtctcgagtttctaggtgagagaaatctcactataacacatgcccctagttttgcgatgtgacaggtgcggtcacaagggaaactatactcgagagacaggtgaaaggttgtcacgaggaggtgacccttggttgtcctttcaagagtttcaaaaaatgacggctataatcattgcttttattgcatttatggtgccacgtcacagaactcttcggtttctgtgtaggcgtggccatctttcgccgttggattgggcgactctaggcattctaattgccacgtgttgtgatcccaattaatgagggatttgggtatttaaaccccctgattcgaaccaaaaatccccattttccctcattttct

SEQ ID NO: 285798 - DNA, 876 bp, Cannabis indica
atttagatcaagcaataataggttctataaaacttccacataagctaaaacacatactcctgcaacaagttgaattggatagttaaatttatgatttatttaattttaaattaattaattaaaaaaaatttcaaaaataattaataaataaaaaataattttttttccggattttaaataaatttaaataaaataatttaatatttaaaattaaacctacaaatttgaaaaatttggtttcaactaacctaaatatcatttcaaaaaaaaaaatttgctaactatcttttaaatttcatgttattttataaattaaatattcaataaaataaaatgataattaaatatccttttctgattttataatttaatttaaataaaaaaataataaaatttaaaagttagtaaaatatcttatttctattcaaaatatcatgattatagcaatcttattttaaatttatataagatcaaataatttaaaaaatataataatttaaaaaaaataatctcaccttaaatttaaaaataagataaaataatcaaaatttttaaaaaagaaagaataaaaaattaaagcaaaaagataaatctttacctattttcaagttcaaattacactaatatcttaaattaatttaaaaaatccaattaatttatttctgataattagatttgaaatatgaaaagtaaaattaaaatacaaaactacacaaaaatcggaagttaattccatgaaacagcatgaaaaatcgaaaaaaaatgtgaagttgtacgaatggtatgtcagttgcataccccatccgcgcgccgtcaccgagtgagcagaccgcgaaatcgtatacgcgccgacggagggtccccgtgtccgatgag

SEQ ID NO: 285799 - DNA, 724 bp, Cannabis indica
atcgatgtgcccccagcctttctggatttgacgagcatgtcatccacgtacacttccatatttcgcccaatctggtctttaaacattttgtttaccaatctttggtacgtagctccagcattttttagaccaaacgacatgactttgtagcaatagagacccatatctgttcggaaacttgtatgttcttggtctggtggatgcattttgatttgattgtagcctgagtaagcgtccatgaagcttaatatttcgtgccctgctgttgcgtctacgagctgatcgattcttggaagtggaaaacagtctttagggcatgctttgttgaggtctgtaaatcaatacagactcgccatttcttgttcggcttgggcactagtacgggattcgcgacccaagccgggtaaaaagcttcaattatgaagttgttgttgcgcagcttttcaacttcatccttcagggctactgctcgttctttgtccaacagccttcgtttttgttgaactagtcggaagttgggatcgatattcagaacatgtgaaataatacaaggatcaattccgaccatatccgcatgtgaccaggcaaaaacgtctaggtttgctctcaaaaattttatcaattctgattttacttcgagcaacaaaccctttccaatttttagttttctggtcaggatagctggatcgatctcgatctcttctaattcttccacaggtccaac

SEQ ID NO: 285800 - DNA, 905 bp, Cannabis indica
atctttttcatttttattttgagaggtacgatttaatagttgtcaaagtttataaggcaaaattgctaattgatttaaatggaataatgagacagaacttaacagaaggactaaatttttgtaaatataatagtttaggagatttttaacaagccatatattttagggaccaaaattaatatttttgaaagttgagaaggaaaaattgttaattattctttatttgaacttcttcacaatgttttatatgttttttttttttttgaaaacgggatttttattgtatttaaaaatcaattttcttatttaataaaaaaaaaaaaattttaatttacctttgttaacttgttgtcattcttagtcctcaccacctcatgatcaatcctcaccacttcaggcttattcagattatttaggttattgattatttttagactagcttttggctctccatccatgggaagctcctcattttccaaccagtaaccagtaatgtcgttcattgagaagttgggagttaaagacgacccctttcaagattctttcttcatctacagtacacactaattccttttgtttttatttacaatttctttgttttagattcgctttcaatgaatttatgttcgtactttgacattttttttattcactcaagtgtttgtagaaatgtcccactgagtttgttcttgctttagattctttgttttcctgatataatctgcaaaaaattccaccaaattcaagagaacttattcattcatccctattccattaagaaattgattaataaactatgaaaattttgattttaaagaaaaattgagaaaataataaactagaaagatttacctcaaagattttgggatattgtatattatgattgaagagagaagaattttatt

SEQ ID NO: 285801 - DNA, 521 bp, Cannabis indica
aaaaataaatgtttatttgtttaattagtggctgaaataaaatggtataagtggcttttattcattttcttctcattttcaacacttagcaaaaaaatagaaaaatttgaaaaagaaaactctctcaagttctctctctatttcggctgggtatgtgggtgcatgaagctgatttccttctttcattttcaagcaaattctcttccaatctaagcattcttcaagctaggttagcttctcttgttttcttctttaaaattgttggaattttgatgaaaatatgatgatgcatgcatgattatttgagtatgttgctgctgtattttattgttattttctgtgatgaaagcatgtctatttgagggtaattaagctgttagaaatgcatgtaaactaccttgtttcaagtttggattttctagctcaaaaatgtaatttttgaagaaaatgttgtgaaactgttgctgtattgttgttaatgtttttatttgttttcagaggttatattatgctagtttaag

SEQ ID NO: 285802 - DNA, 518 bp, Cannabis indica
gctttatccttgagtgagaaaggaaagaacttcaatctcaccaagttaatgatgtcagcttggttgttgaatgtggccaccacctcttcgaaggcctgaatatgcacatatggactctcattttccataccatgaaaggttggtaaaagttgaatcatgccaggtttgaaatcgaagttgggcatattcatgggatacattatgcatgaaggtgtggccgtacgcgtaggatgtagataatcctgtagcgttcttggttggatttcctgttgttgagccatcattggaagtgcaggaagtatgggtgatggtggtgaatgagaacgagtggaagaagacgatttaggagagttttctaaaatttcaatttgttgttttacaaatctccctaatttgtctctatttcgtgacattcactttttttttgtgtgtgtattttcacttgttaaataatgtaaattacaactatgtaataatgcaagggtattcacacaagatattcccaggccgattgggaa

SEQ ID NO: 285803 - DNA, 533 bp, Cannabis indica
ttggccgcagcctcgccctccaccttcagctgctcccgatgcctcgcctccgcctgagcctccctctactgggcctccttccggaatgccctcctctcagccgacaagtcccgcaaaatcttcacggcctcttccatgccccgaattcagaaatggcgtacccgtgatcaatcagggtctttgagaaggcggtcggtctctgcaatgatctaaaaaaagaaacaagaatgaaatcagaagccttaagacaaaatataagcaaaaagaaaggaatgaatcgcaagagctcaccgcagccagggcagcgctgatgtcctaaacctggtaaacagagttcaccgaagcacaagccgcgtatctcttggctgggaattgagtcagatggcagacaaactggctggtcatctcaaaggcgaaggggcgagagtaggaccgatgaagcggttgaaccagtccgtcaggggatccatgttcaggtcccaaggatttctgaaggcgtcctcacgtaaggtgttctgttgctcctctcgcag

SEQ ID NO: 285804 - DNA, 532 bp, Cannabis indica
ctgaacaagtgtcgggtgcagtaaaatcgcagaaggtggttttacacagtaaggggaacagaaagaaaaagaccccattctatgccctaagcaaccgttgaacgaagaacatatggttctcttcaacgaaaatgcacgataataacagaggcataataatggcgatcctacaactaaagcagtaaacacaaaacagaatacatgaagaacctaaacacttgcatgcccagaaatctcaaaatgcgaacccagaaaaaacaaacaaagcaagtaaaagcatgtcattaccaaaggatgcaagaaacttacagtgaagtgttgaactgggggtcctgagtttagtcgagtaaagacgagaaggactgataacagcaagcaaggaaaaactgggaaaaaatggcaaagtgttcagaaggttcgtgctgtttttgaagaattttctctctgggaaattcgagcaaaaatggcaaggaatggaaagtaaccgaaatgaaggaaagatggtggcttttataggcaaaaatgcatgagg

SEQ ID NO: 285805 - DNA, 810 bp, Cannabis indica
gtaaggtaaggacccccgaacgaggaggacttccacctattggtagtatcgcctcaagtgctcactgttccacgctcgcggcacttgctccccgttaaggcgagcgagcttgtatactccaggcctcaagacagtttcgatctgatacggtccttcccaattgggcccaaggaccccagctgttggatcacgcgtcgctaagaacacccttcttaacaccaagtcgcctattataaactccctattacgaacacgagagtcataatacttctttacccgttgctggtgagcggcattacgtaattgtgactcctctcttctttcatcgagtaagtctagggcctcctccaggagtaggtggttacggtgttgttcatagtactgatttcggtgtgaggggacttgggtctcaactgggagcatggcttcactcccataggtgagtgagaagggagtatttcctgtagctgttcggtgtgaggtcctataggaccagagtacttgtgggagctcctccggccatcttcctttggcagcctctaggcgcttctttaatgtagtcttcaatgttttgtttactgcctcaacttgtccatttgcttgtgggtgagctactgaagcaaaactcttgactataccattcttcttacaaaattccgaaaataaatcactatcgaattgttttccattatctgatactattttttgtggaactccatagcgacataaaatgtttttcacgacgaagtcgagcaccttttttgaagttatggtggccaaaggttctgcctcagcccattttgtgaagta

SEQ ID NO: 285806 - DNA, 753 bp, Cannabis indica
aaaataattccagaaacgaacattcaattatttttcataaaatttctaaagcatcaatcaatcatcatataacacacagatcaacatgaaaccatccaaatcacgcacaaatcattttaagtccaaatttcttgaaagtaaattaccatggctctgaggccaattgttagaaatattttactaggatcttagatttactaacaagtatgttgtttaacatcctaaatatgaaattctaaaacgattataaataaacacatataaagtatgagaaaccttacagtggtcgcagcagaataatatgtctccttccacttagatctctaacccttgtatcctttctgtcgcaaagtatcaccaagatctgagtccgaatgtccttctgttgaatctggattcttcacgatcttccacactatgattgaggtaccacttgatgtgaatgggtacttactctatcactcaaggggttcggttcaatagtgaagaatagagaagggagggtggcggctagatataggtagaaggtacttaggtttttctctgaaggaataagatgcatcatctttttctgaagccatcactacatatatatagtatgccacctagggttaggttgaaattatttggcattaaaataatgaaaaaataaatgataaaacctacaatagtggccggcctaggctttggatattaggccccacttttacaattttgctgttttatcatttctacatctcattttcttaaaaa

SEQ ID NO: 285807 - DNA, 92 bp, Cannabis indica
atttttccatcctattttctcaaaaatgccaattttccaatgtaaattcactgtcttcttaattccttgttgcatccacacatagaacttgg

SEQ ID NO: 285808 - DNA, 663 bp, Cannabis indica
atgatgtcttaaaaaaggccttgaggctgaatatgatatatatatataaaaaggagataaaaagagaagtgtttaaacagctggagtcccaggctcttggttcggttcttctgggccaactggagcaggaggatctgttgttcgaacaggagaggcatcagcagcctggccagaggttgacacagcttggccggaggttgaagcagccgcctcgttcctaccataagcaacttgggccgcacagtactcaaggtacatgtccttagccttgcccaagtagtctaaattggcccggaaatagccttccacaaatcgaagaagagctcgaggttggctgtctctaaggcattgaccttctccttcaacctgtccgccgcggccaccttggcgtccttctcctccttcatccgaagaagaacttgccgcagagaagtcctctcatcctgaagactgttaacttcagcagataagatctcgatggtctcctcaaagcgatcagcaacttcgagatcctttgtcagcatggagatcttcttctcggcagcaaatagcttcttattggcttcgcccaactccagccgaacagctccagcttccgccctggcctcctcagcttcctttttggccaagtccgcctccgccctcaaggtgtcgaacagagcc

SEQ ID NO: 285809 - DNA, 587 bp, Cannabis indica
gtcgggggcctagtcacgatggagaattgccggaaggccaagcttatcctgccacaccaatcagtggaggactctaacctttctaaggttatctgtctgaatgtgagggtgcctgttgcggagaggaccttccgggatgaactcatcgccaccgcagagaagaagtaccaggaatatctctaccggaaggtccaggagaaggcttattctaaggcccaggcagcttccgagaggccccttcgagtggggagcccggtcgagaggagaagccaggcgatcgctgggaagccccttcgcattgggagcccgtctgagaggagggctcctaggccaaagccttcggtttaggtgccaaacactggggctcctggcgccagcacttctggctctggtaagtctcctttagcagtacattatgttccttatgttggcaaatatgccagtcttaggcctgtaggattcgattagcgtctccataggtttaggatgccctcgacccggtggggagaccatatgaaggattattatttttccaacttaggagatttcctaggtcgatcccggatgggttctggtcctccggagcc

SEQ ID NO: 285810 - DNA, 751 bp, Cannabis indica
tgaaatttatttggtattatttgagtgtgaaatggcaatttcgcccttgtgaatgcttatgcatgttatatagccctaagggcaaaatggtcatttgaccataattaatttacattgaattaaatggaattttgatgaaatgaaatgtatttttctggttgcttctccctctcaaccgaaccctctccctctcttttacccttttgattttcaaagcctaaatttgtgaagaactagtatgatttgaagcttgttggttgaaagaaaggtgttggaggcttgaggcttaattgtgcaagtgattgaggtagtttttatggttttagattgtgttttccttgctgaaataatatggtagaagcatgttttaggttgttgatctttatttttgcatgcttaatcttgttaatttcttgatttttgttgaattgagcttagagagtaattcttgaatgcttgtcaagcttgaaattgcttattcatttgctgtttgtggttagttgctgctggaaattaggtgtgagtattgggttttagctcaaagttcttgagtttgaatattgcaagtttaaagcatgagtttgtgtgtcatgcaatctgaaatcttgggtttattgatggaaattgatgtttgaaacatgagttttatttccttgttaattgttagcatcaatatttggttaattgaatgtttggttgagttttgggatggataagattgagttttaggctgaaaattcgagttgagctt

SEQ ID NO: 285811 - DNA, 662 bp, Cannabis indica
ggacgaatgcttcaaggtcctcagaaagtacaacatgaaactaaatcccttaaagtgttcctttggagtcagctccggaaagtttcttggcttcattgtcaatgcccgaggaattgaagccaatctagagaagattcaagcactcctggatatgaagttgccaactaaaaccaaggaagtgcaaagtttgactggtcggatcgctgcactcagcagatttgtttcaaaatcaacagacaagtgtgtcccattcttcaatatcctgcgaggaaacaagcaattcgagtggacggaggaatgtgaaaaagctttccaagagctaaaagcacagcttgcaaaacctcccgtactctcaaaacctctggacggagaagaacttggaatatacttagctgtcacgaagcatgctttgagtgtcgtgctaatcaaagaagagaacaacatacaacacccagtctattacatcagtaaaagactcactgaggccaaaggccgatacccattgatagagaaactcgcttactgccttattctagcaacaagaaagttaaggccttattttcaagctaatcctgttcgggtgtacactgaccaaccattacgccaaatattgcaaaagccagacgcctctggacggcgactcaagtgggcggtggagttgg

SEQ ID NO: 285812 - DNA, 748 bp, Cannabis indica
atgtaaaaatataaaaaaaaaaaaaaaaaaaaattaaacgtaaaaatataaatttttttttacaaaaaatattgtcttatgtaattatctcaatatactagcaggtagcacacactaaaaatgagtataccaatacacttttatccatttagtcatttaggaaaattttttgttttaatttaacagactatttgaactctgttttaatttcttaaaataacgtacacgttaaaaaaaaataggctaaaatattttcttagatatcgaaataattaggagttcatctagaggcggaaccatagttaaatagttggggtgaccaatattgacagggcatatacaacaaaattaaattttgatgactaaaataccttttaatggtgtgtgtcaattgtagaaaatattatcttttaaaattttataaatattttatagaatattttaaaaaaataataataaatcaaataattaaattaaaaataaactatgagtggtactttaaaatgtgacagattcaatttaatattatcaaaattaatattaatttataatttatttcaagtcagtcctcgcacatgggatgaggatgttgtgagggacctatttgttggtcgtgatcaggaccttattttgtccattcaacttagtaattcggccgctaatgatggttggagttggcgaattgagacttgtgggaactattcggttagaagtgcatataaattcttgcaagaatctaagggtgctt

SEQ ID NO: 285813 - DNA, 1556 bp, Cannabis indica
agaaatcagaactaaaggttagttttcaagtcattgcattttcgttttctgtttggagaaaatatgctttactttctgggttcgggtattttaaaggctttttaggaatgtatgcttgtatgtgcttatgaggctatgtgttttaggtaagaaaacctgggtaaattcatagaatatgacctgtaaactgacataaccgcacacaatacataggcactgtttcacgtcttgaatactcgcggatattcggatgaacaacttgaatattcgctggtgttcagatgaacaacttgaatactcgcgtattgccaagatttacttccatttgactgttagctagatcttttaggatttttatatgtcgcgggctgagttgcgagggtatcaatcgccgttccaaatggtgggtgtatctcagtattctaatggtcatatatgcgattatatgccccttgagatactgaggtacacccagccatttgcaatatgcgatgatactcaaatgatcgtactctttggctgataggtagtctcggaacggtgggggtctcccagtaacttcagggttatgctcgaaaacgcataccccttgagtcactgggaaactcccagccgtttctggaggtataccgcttggccgaggatgcgtgaattacttgcccaagatagttttatctcttctcgcatattgaggggatggtcagtattcgcaaggaggctgaccattctgtcgagtgcgactttataatctaatgcgggtgagatcacttactttgcttttcacacatccatcacgctgaaaagatcttctatctttcagatgagcgatttgtcggatagccaacagctcggctccggaggccgtgcatttgacggtgaagctgaccaggaggaggacagttttctccccacttcgctttccgaagaggaggccgctccaatagagctaggcccgatgtcttctgtggacatcgagaagatggtgcaagaactcgcagaacctgggaccatcgatattcgagacagcgagtccacggtgtcggcacgcgactaccttatacattcgaggcatgctcctgacatcgaggtcgaggagatggacgaggaatggacgactccagttcgcgagtcaggtgaggaagaggaggaggcggaagggagtgggacagattcggtcgacgattcccagctgaacgagcccttcgcgtgtgaggatttaatctcgagagtttccaaatcagacttcaccacctttgtgaggttaaatttgctgcgactcgcatttcagcgacctaagccatctcagagagcgcatcttccatttactaaccctgcgatcattcccatagaggatgtggggtatcagtcccctttcaccccttcatcgcagctattctcaggcgatatgatgtatcgccctttcacctaactccaaacagctaccgcactactctagccttctatgcgatgtacatggagtatgtccatagggctccctcagtagaagaattcagctatttctacgacataaaaagcgtaggtcttcataatagctt

SEQ ID NO: 285814 - DNA, 693 bp, Cannabis indica
aaaactcattgaatccaaacatgccattaaagatcaaagcttaagtttcaaagcacaaacttatgcaattccatcacaactcaacaaaaccaatatccagtacttagaatcaacctagaaataagattacacaaactttaaaccctaacagcccctatctttcaaaattacataatcaaaccaattaaaactagagaaacacataacttaaagagtgtctagggtttacctttgcttcaagaacccttggatcttggctgaattccagaaaaatgaggtaagaaaaaagtgattcctccttggtttattgctggttcgaagagagagaagggaaagagaggtattatttgatttttttggcttttccttagttttctcaaaatgattaaggattttctaagttaatccttgctgaaaagaaaatgaagctaggtgtcaacaccccaaggcagccacctaccactcatatggaaatttactaaaatgcccttgttacataacttgagcctattttaatcttaggggtaaaatggtcaaaaaccataaccccgcacaacctcgacatttaatttccttcaatataaatcccactaagaaataagattctaaacttacccatgtgatcaaactagccatccatcgcattttccgttgtcgccgagcacaaattataaaaataacatatttcacata

SEQ ID NO: 285815 - DNA, 562 bp, Cannabis indica
cgaaaatatgacccgaaacttagactaattttagcctaacaaattcccccaaactagattcttactcgccctcgagtaagataaatactactaactactaatctactaactacgctatcagataatcacaatactactgcctcatgtgttgttctcttccattgctcaaactagaatttcaattccaccaactctaacaattaatttagatgctcagtttgtcacatactgcacaaacacaagatgacttcacaatcgaaacaatgttataatggttttactctttccaaccattccactacccgataactcatatgcttgcatgcttacctctctccactaatgttgacaacatcctttcggaatcaatagggctttttgaggtttagaaagtatggcttagatatttggaaaatgaaaacaattttggctaaagatatcataagcacaaaaataacccacaagcttcttctaatttcaaatttcccaaagtgttcccacaactaaccatgattgagaagaatttattttctttcttttcctaacatcactgaattttatt

SEQ ID NO: 285816 - DNA, 450 bp, Cannabis indica
tataaatcaacgataaataaatttataaaataaacgaaaaaaaaaaacaaaccaagaaaaataaaactaataaaaaaatataatagcaactataattaaactataaaaaattaaaaataaaaaagtttaatgtttttactgaagaagtatttatataaataaaaaatttaaagagtaaaaatgaaattttttctatattaacatatttttataatgttttttgatctattatgtaaatatttctatattattaacatacaaaatcctaaaacatgtttttaactgaattaatatgagtttaatgataactctaagatttagagttattttgatatctttaagtttgaattttaaactaaataatagagtaattagtgtctatattatgtaattgtgtctttgtaataaaataaaagtgtgtgtgtgtgtgtgtgtgttaattaaatagtt

SEQ ID NO: 285817 - DNA, 545 bp, Cannabis indica
taagagaaaaaattaaaggataatttcgaatttaaaataaaaatctaattatgtcccgataggcgagagtcaaagttattcttatttttataaacttcttcattatttcatattgtaaatacttgtctaagttgtcatctattgatgagcaactagatgttgcatttacaaatatttatctatcgagatctaacactgttatgtttgtctaatggatgacaatcttttgggatttgtcccattaaaaacaacaagctaagttagaccaacaatgaagattcgaaattaaactacaaataatgacagaaaataacatgattcaatataaattcatacacaattcaaaaattattaagcatttagcaagtaggaatgacaagtgaaaatactaaaacaaacaatcctaaataatttccaaggtttccaacaaactgataccagtgtcccgtttaggcgagagtcaaagataccatccattgaatagagtagtcaactcatctaaaatgacaaacattctagcaaccttttattcgatcaagatgaaa

SEQ ID NO: 285818 - DNA, 561 bp, Cannabis indica
ggagatcttctctgtggggcttaatgccgatgattgattctggtgggaggatgtgggattgggtaaagtttttgtgggagttattaagttctgacaacacttttagaaacactttttcaattttttaaccatcacttaatttttaatagtttaggtggcgtttggaaacacttttttaattagttttctagtttttaaaattaaaaaaaaaaatatatattttttaaaaacatgttttataaaactattttcactttaaagtttttaattgagaattaaaattttaaaaacaaaaaaaaaatcactttcaatatttttttaaacagttttgtttcttaattaatattttggactctgaccagagtaccggacccaaatccccccccccccacggtcccagcgctaaatccgacgtctaacccgcgcgaacctgattctgactccgaacctagacccgacttaaataaaatcaaaaaataaaaatgaaaataaattttacagaacacacttttgttttctatttttaaaattgaaaaacaaaagtggttacagaatatattt

SEQ ID NO: 285819 - DNA, 390 bp, Cannabis indica
attctgatatggttaggttcgatctcaagagtgttatttatgttcttagagttgttcgttaaagcctaccaattggttcgggtaacacatacatcttgggaacatgataatacaattgagtgggagcgctaatcatagtacgaaatctatagcttttatctggacatagaagtgaaatatataattaagagtacaatttcgaatctatagtggcgcaaagagaaattaataagttagagaatttacttggtaaattctaaatctacttattgaaagcttggttatataggcccatggtctccacactatgcttgcagactcggttaattggttttagttaatcaattataattctaaaattaaactatgtcttatttatgaattttcact

SEQ ID NO: 285820 - DNA, 644 bp, Cannabis indica
taagacaggtcagaatagtagaaagattgtgacatagcaagataaataaggctttggtctgtggaagccttaactatgagaattgggatgagtgtttaggacatctgtgaaattaccattaccaaatagaaaaagagtgattgtatttgttggaatgagtaatgcagtagtggggcatccctgaaaaaagttaaactctaactataccttccatctaagcatcataccccatatgaccatttaatcctccaatcaacttgcttctttttgttttcatattttatttgggccctacaattttccctaccacttcaggaatgttgacaggcacacagcatatcttgatttctgttcataaaaattgtcttcttccaaatctgattccaaattccctatatcatctcttttacacctctttaatcaactttagattattaagttgtttattcgttttgctttgggaaaaatgttcacattactatttctagtaagtattatccaccaagaaacattagaatagaatagtgatgccaataagaataaagtaagaattaagggctcgtttggaacgtcgtattaggtgatattgtattgtattgtattatattgaattagattatatatcatatttttatataatacta

SEQ ID NO: 285821 - DNA, 582 bp, Cannabis indica
gaataacctccgtcgctgacattgatttgtctcgccaaaccacatcatttcgggcaaaccaaatcgcccaaagaaccatgagtaattcttcctgggccgtggttgagtgttgtagcagaatgtggctaaaccaatcccaaaaagactccataggcatatgactccaatttataaccgaaagatgccaacaagaccgtgcaaaagagcattgcaccaacaagtggaaaatagtctcaggcacctggttacacataggacaaatttggtcaagaggaatatgtttgttagtaagttgaaccttagtagataaacaaccagataaagcacgccacatgagttggtgcactttgggagggacatgaagcttctatgcaattttccatatcttaatctcaaaatcactcgtattagtgatctccgaatggtgcaacaaccgatatgcctctctcacagtatagaaaccatgaagatccttatgccaataccaagtgtctatgggagtctcctgatcaatgttggttcgaaggataatctctttatctcgatcattgaatatatccgagaccacctctagatcccaag

SEQ ID NO: 285822 - DNA, 529 bp, Cannabis indica
ttagtttttaaggcactcagttttatttaaaatatagaggttgcatacacttagacggtacaaactctttaaacaaagcctaagttatacatttggactattggtaatattttcggaggtgatcggcattccaggcccttggcacaatggttccatccatcctttttagcttataagttcctaaaccgatttcgtcctcaattttatatggcccttcccagtttgtcccaagtacccccactccgggttcttgggtggccgggaagactcttcttaagaccatatccccaatagtgaattctgtttttaactttggagtaaaaatatttggtcaacttcttttgataagttgccattcgtatttatgactcgtcccaaagttcttcaacttgatccagcgcttcttgtaataaagcttggtttgtagctggatcgtaagtcgttctcctgtgggacgggaacaacgtttctaccgggaccatcgcttcacaaccgtacgccattgaaaaaggcgagtgaccggtcgtgg

SEQ ID NO: 285823 - DNA, 536 bp, Cannabis indica
ttgcaggcgtcgattcgtttcttgtccattaattgattacggtgccttaatgggtgtcagacgaatactcaagcgtttccaccacctcgatgacaaaccaatttagtcgttggatcttgggaattcgaatcgtgtgccttcccaaccgcatgattggtaggtgatcgcgcctgttccacatgcgctttggcctataaaagccacccttctcacttcatttggttactttcagactttcaccaaatttcttcaagttttccagagagaaagtaaccctcgaaccagaaaaccctcaaacaccatagatttcttactaaccttccttcgccattgtcagtcaactttttaccgttgatcaacaacaacgcccagttctaaagctttatgtaagttcttagtatctcgtactttattgtttgtgctcattgcatgctttactgttcatctgctttttctgggtttgatgtttgaattttctgagaattttcgtcttgagtttctgtgtaatacgttagattcctcttttctagtgttcg

SEQ ID NO: 285824 - DNA, 968 bp, Cannabis indica
atcatgtaataatgtaataataattgagtgatgttatgtaattgattagattgggcgagtgttttacccaattgggtatggagcagatccaactggggttgaagatagtaccgaggcgataatgaaggcagtggaggatgcatttcatgttcataataatggcctggaattgttgcctggaatcaatgacttgggaggtgtggttattgattttcaaggtggaaactacaagataagccaaacccataaggtttccttcaggtggaggcaatgttgtggtaagtgttctctgttatattcttctaaaagtttgtgctttaaaatttcatacgattctcaatttaaacgtaattaattaagcttttaattttacaaaaaaatatgttgatttaataatatcattcatcgtcagccaacaattatagtttccccttacttttttgtcctcgaaattggaacttgtcaccattcttctgtaataattattccccggagaaatgttaatcaaaaaaaaaaaaaaaaaataaattaattccccggagaaagaaaacggtaagtaaaatgtatggcagtatgggaaaaaaaagtgtagaaagtaaaggtaagaaaatggtacatttattttttaattttttattgatatttttttttggtttgcatcgcatgtgtatttatttatagtttagatacatattaattatatatcattcattatattatatattcaattttaaaattattctattattaatataattatttatttaacttaaaaaaaattaatcattttaacaacactaacgcaagaagacacaagaagacaaagagaaaaaaagaattaacaatataaagttgtaacaaaaaattttattagaaagataatgtagtaatacaaaaagataaatcaacttgttaaaactaagtaaaaaaaatcataatacaaaaacatattggggatgttgttttgc

SEQ ID NO: 285825 - DNA, 648 bp, Cannabis indica
tttttacagtcaacaagtttgagatatctaaagacaagaaataagcaaaggaaaagaagaaagaaaaagataaagagaaggtaagagaaattcaaacacaaaaacttgtgtccttctcccttgcactttggtcccccttttttcttcttcctcctctgtacttctgcaattaattctctcaaaaatggcagctgccctccttcattacataatggaagatgatggaggtgtacttcctttttctcctcttttagttgttttgttcctagggtaccaaacactcctcaaaatgagaagcccaattctttttgcactttggcccactaggtttagtccccttccttccacagcagccagctggtgtattttgagtgattgggatggatttgctgatgtggataagtgaaactcgtgtttccacgtcactgccagaatgctgaattcgcttcagcattgcttcagcaatctgccccaatttcagcttgtgttccacttcttccttacttcctcttctttttcctatcaatttaattcttcctttttcaacaattaattggaaaaacacacctaacaataccaatttttacaagacttaaaagttagcttattaaatagaaaatgaaactaaaactaactaaaattaagcaa

SEQ ID NO: 285826 - DNA, 631 bp, Cannabis indica
aaatttaaaagttagcaaaatatcctatttcaattcaaaatttcatgattaaaataatcttattttaaattttaaataaggtcaattaattaaaaataaataaatattaatatctgaccttaaatttaaaaataagataaaataatcaaatttaaaaataagataacaaactaagcaaaaagatagatttttacctattttcaaattcaaatttcactaatatcttaaattaatttaaaaaatactaattaatttaattctgataattcgatttgaaatttgaaaaataaaaattaaaatacaaaactacataagaaattcgaaattaattccatgaaaaggaatgaaaaaatgaaaaaattagaaaaaaaaaatacaatttgtacggatggtatgtgcacaaccgaaaaactcggccaagaaggcagccagcagcatttctgtgcgcgcccaaagcttcagacacggtcatgagcgtgttccttcgggacagaatgctgtcctaatgcgcgtgcacgaccggtgatcacccgtgtcccgcgcgcgcacggtggtgtgtacccgctttcaattttttttttcaaacttttcaaaaaatcataactaattcaaataaaatcaaaattaagtt

SEQ ID NO: 285827 - DNA, 579 bp, Cannabis indica
aaatatgaacttctaaaacaatggaatttaaacacatataaagttcaagaaaccttacattggttgcagcgaaattaaatgactcttttcactcagatctctaacccttatatcctttctgtagcagagtatcaccaagatctgagcccaattctccttcagttgtttagattcttcacagtctcacacactatgactgagtaccaacttgctatgcgtgggcatgtactctatcactatagggtttgaaatttagaagagaaagagagagagaaggattcgaaattttagagataaaaagagaaggctcaaagtttgactgaatgctaatgaatgcttaagcttcatcaactgtcagttttgagtctatcactatctatttataggaatccttctaggttcaggtttggattatttggcattaaaaaattgacaaataaatggtaaaattaagcactagtggccgaccataggatgtgagcccaccacttgcaatttttccattttttaactatttatcctattctttcacaaatgtcatattttccaattcaatcacttaaatgccaaaactattta

SEQ ID NO: 285828 - DNA, 1235 bp, Cannabis indica
cataattgcacaacttttcctggtcctgtgatgatttataacgagaagcagtaatggagaaagagaggttggggactaaataccacatgcgtttccaacgatttgaaagaaagcttgtggaaacggcatccacagtgggaagaaacgagagtatgtgtagaatgagtgcatcaggtattctcgaaattctgtcctcagcagatgatgatgatgatgatgatgtcgttttcagccttttcttctgcaccggacggactcttttcttcgacgccatttttagcaataaaaatttgaatgtggactttaacagcaaagaaaacaaaccctcataaaccctaacttctttgaaaagagacgattatgatcagagcagaggatggtttttagaattttaaaaaataaaattatcattatatttaatattaaaaaaattaaagtcattaattatcagcattatttcttttattcatttatttaatcaagttttcacttttttaataataaaaaaaaagtaaataaactaatgactatcttacgatttatttcacgtgattttaaggcaatatcattaaaatatacatacatacaatttaattgatagttagattatgaactacaatcctatacaaatttaacaatgcaatttaaattttaatattcacactgctataattaaagtcacttaaggggattgttcatcctagagatgacttcattcatgagaggttcatcctagaggtttcattcatgagaggttctgatgatgaaaatcatttaattcttgttttgagttgctgtcttcgatttcggttattgttgatttgtgatcatatcatatacaagaggttaatttgcaataaaattgaaaaacaaatacaccatatctaattaagctctccaattttggggtccatggttaatgaaacttgaaaatttattcaaaaagacaaatctatactgtatgcaactcagttttgaacacattttcaattgatagagctgaaccagtccaatcccacattacgaaacttaacccaaaaaactaacaaagggtcatgagagaaacagagaagaaaagcaaggctttgatttattccactgaattgaattaatgagtacaaaggcatagattggtttatataggctgagctgttgacagagttggttagaataactaacttgacagctcagtctttaaccaaccaaaagtaacagaatttacagttaaaggcaga

SEQ ID NO: 285829 - DNA, 605 bp, Cannabis indica
cctaaataaaatccatttcaatgtaatctgatttgttctcaatagaagattagaagtcatttatgtttacatgtagttttcatgtttatggtttaatgtgtacaaaatctgttaagtccagaacatatagttattcataattacagtgatgtcaacacagtggaaggtaattgtgattatatgcttcaaaagataatgtcccttgattcatcagtgcactggatttacattgatgtgataatcagcgataaagtatacttacatgttggataagtgttatgttctttccagaatattggcaaagtatgctagtttgatatgtattgagtatatgttggactgggaccgatattgatcttggttaagatattataatcttactgttgtatctttttaagtcaatatcaccggttgatcttagatcaaaagatcttaatcctgacatggttaggttcgatcgcaagagtattatttgtgttccttgatttgttagttaagcgtaccttttggtccgcatgatacatacattttgggaacatgatagtacaattgagtgagagcgctaaacatagatatggaatttatagctcctatctggacataga

SEQ ID NO: 285830 - DNA, 508 bp, Cannabis indica
cctccgtttcagatttttgttttcatttattaatttactattcttagtttaattccaattaatgtttttatggggttaaaattataaggagttcattccttaattaattttaatgttgtgatcgtgtttatgtgttgaaactaatttagtttttctattagtcttgtcttttgacatggttcttttagtcttgtcttttgacatgattttttagtctttttcttttagttttttctggttcgagtcttgtcttttgtcatgggttgtgtagcttagaatcatcatagtactatggtagaagcattcaagaaggggaagattggatgtgttcaactcaaaattgctgagataatatgcattaaagaaacatgtggattgcaactcattcgtgggatagagtcgtgttagaaacagatagcttggtgtgtgtccaaatgattcagagcggtattttatgccttcacaattttgtgttttgtaaaactatctccaaataagttggctcatt

SEQ ID NO: 285831 - DNA, 901 bp, Cannabis indica
actttctttgatgtgatggttgcgagtggttcagcctcagtccacttagtaaagtaatcaaccgctacctctgcatactgcactccacctttacctttaggtaattgtccgatcaggtcaaccccctaaatggcaaagggccacgaactttgcatctgtgttaactcttgttatgtaattctcacacttcttaatataggcttttgaatcttcaatcattgtcggccagaagtaaccttgccttagaattttcttggataagctttgtctagaggcatgatttccacagaatttgtcgtgtacttcggataggagtcgtgcagctttttcttgagtgacacatctgagtaatggcatcgaggatcctcttctgtacatgactccttctactatgatgtaccgtggaactttccttctcatttttcgagcttcatttcggttatctgggagtttcccagactcgaggtaggcctctattggtgtcatctagtttggggatgtatcaatcatttcgatttcttctgtgccagtgatgctacgctcttcaaggaactagataggaaccaggtttgccttgtcacttacattgttgcttgccaattaagctaacgcgtctacagttgtattttcttctcttggaaattttctgagactgtagcttttgaattgtgcgagcagatcatgtattttgctcagatatggtatcatcttttctccctgagctttataatctccggatacatgatttaccactagctgtgaatcactgcagatttcgatgtgttgggccttcatctcctgggctagtcatagcccagtgattagagcttcgtactcgactttgttgttagatgctttgaatcctaacttgactgcaatgtgcaggtgttgccccccaggc

SEQ ID NO: 285832 - DNA, 223 bp, Cannabis indica
actcaatacaacatgataccatccaaaacattaaacaatgtttttaaagtccaaatttcttgaaagaaaatcaattaccatggctctaagaatttcaaaattcaatgaagaagaaagagaagaagaggtcggccaaagatagggagagagagaggctcagttttttcttaatcaaaagtgtaattttcctgaagcattcactatctatttatagcattccact

SEQ ID NO: 285833 - DNA, 880 bp, Cannabis indica
aaacagaaggattgtgtaaaggctttacagttgccatggtatttttcgaaagccacgtgtcacttggccacgtaagcaacaaaacaggcacaaatcgtagcttgagttgtggagtttacctggttcctcatatgctgacacgtgtcaataagtaaacacatgtgtgccctaccttctaacaatttggacttgcagccaatatgtaacactatacactagtgcagtccctagggatctctagcacatggaggggaaaattggtggagagtcctactctagaaaataaaatttattttaaaatattaaattataaaaaaaattaaaatattacacattatttaatattcgatatactatttattatacaaaatacaaacttaaaaaaattaaaaaaataacactaatatacaaaaaatacaatacacattataaaatattaataaaaagacaataaatatatgaagcaggtcttcttcaggatggggagtgtcattttctgttccccgttctgtttaatgtttagagacaaaaaaataatattcgtttttcgctccattaaaaatagatcccccgcgtgcctatcccaatagaaaaagtatgcatccttactagtgccacataaaaaatataatatatattatattaaactacacgtaacgccatttccaaacaaaaataataaattaagaacaaataatatcttcatttattcttttttcatccttaaattatatatatacagttgatctaattcaatctatattattttgtttatagtgcatctgatccgtactaagtgtacattttatattttggattcaattcaatccgctcaatagctcaaatctaatctaatctaatccacaaagatacagatgag

SEQ ID NO: 285834 - DNA, 221 bp, Cannabis indica
ccctatacttaggattttttttgtatgaaaaatatctaagtataagtacaagagtgaacatagtttaataatgcgagtactattgataatataattttaaactctcgccattccaagctcgtggaatcgcagtcccatcgagtgttgcaagtcggtacgtggcatcaccaaatttccctgcgatgagatatggtccttcccaattatccccaaagactcca

SEQ ID NO: 285835 - DNA, 554 bp, Cannabis indica
tttcaagagctaaaaatgcaacttgcaaaacctctgtactctcaaaacccttggatggagaagaacttggaatatacttagatgttacggagtacgttgtaagtgtcatgctgatcagagaataaaacaacatacaacaaccgatctattacgtcagtaaaagactcattgaggctgaaggccgatacccattgatagagaaactcgcttactgcctaattctagcaataagaaagttaaggccatattttcaagctcatcctgttcggttgtacactgaccaaccgttacgccaaatattgcaaaagccagacgcttctggacagctactcaagtgggcagtggagctgggtcaatacgaaattaccttccaaccttgaacaacaatcaaaggcaggccctagcggactttgtggtagaatgcacaggcaaagaagaaagcatactagaaagcaaccccgagtcggtacaaacacctcagccaagtaataatgaagacaagctgacttaaaactacacgtggacgggtcggctacagatcagctatctggtgc

SEQ ID NO: 285836 - DNA, 980 bp, Cannabis indica
tggtctcttcctttcttccattatcctttcttttattttttgtattattgttgtttgcaacatatatagttaaattattacgtaactttaaaaactttgctcctggaaactatgcatatgccgagctacttagaatctatttattagttagttaaacttttgtttggggttttttttcgccattgatgtcttgtattttgtgtaactttgaataaagtcactacttttttttttttttttattattattattacttatatattttgttattaagttgtgaagaaaaaaaaagagaagtgcggattggaatattatgtgtgatcccatgggaatgtccaaattgtaataggaaaaggaatacaataaataattaaagaaaacctaatcgtagatgtacaacagcaaaaacccaatcgtattttttttggatttaatgggatttattttatttattttattatatataaatgaaaagtgacccatgaataaaaagaaaattaaaaattaaaaagaaacacaatgtgtgtaagataaaaagaaaattaaaaattaatctctaaattgttgataattgaagataacatttgcttcgacagagacaatagtataattttttattttgcacttttcattctaaccgagtctgcatataactggattgtccatttttttgtgtataaatcgaatatggtagtgtcgacaaagcggcggtgttcctgcaaatagttatttattttcatttaagatgattagacatggtgtgcataattaatttaattaaaaaaatttacttatgaaagacaagtaaagttattttatttctttaaaactacacctctgcagtataatccattaattggacaccagtacacgcttttttcttaagataaaacgaaattagggtaagtaattttttttgttttgtatattatttttattaatatttttttaaaaatcatcaaaaaaaatttaaaaaaata

SEQ ID NO: 285837 - DNA, 498 bp, Cannabis indica
tacattcattggtgctatgaccaatgtcattgtggtactcgcatcttttgctcggatctctccaggagctgtctttgtacaacggctgcggtctccggtagtgtgtattttgcctagtggcgaagtacacacgttcctgggagtccaatagctccgtgtattgagtatactggggggtgtacccctttttctggcgcttctctcccgtccgggtgctgcctttggaggaccttttactcctttatccctgggaagggcctgataagctagcagtcggggcagcacgtgaaggagcttgcccatttactccggacgcgttgccaaaatgagaggatgctggtgccagagcttggccttggctatacccgggggtagcagagaattgtatgccacttgcttgcggggtcgcagtcgggacagtacccgagggcgatactccgggcataaaccctgctattccggtagggtagtagcccccataagccacgatttgggctt

SEQ ID NO: 285838 - DNA, 546 bp, Cannabis indica
ggacatgtggaagagttagaagatatcgagatcgatccagatatcccgaccagaaagctaaagatcgaaaagggtttgttgctcgaagtaaaatcagaattgataaaatttctgagagcaaacctagacgtttttgcctggtcacatgcagatgtggttggaattgtccttctattatttcacacgtcctgaatattgatcccaatttttggccagtccaacaaaaacgaaggttactggacaaagaacgagcagtagccctgaaggaagaagtagaaaagttgcgcaacaacaattttataattgaagctttctaccctgcttgggtcacaaatcctgtattagtgctcaagccgaacaagaaatggcgtgtctgtattgatttcacagacctcaacaaagcatgccccaaagactattttccactaccaaggatcgatcagctcgtagatgcaacaacagggcatgaaatattaagcttcatggacgcttactcaggctacaatcaaatcaaaaaacatccatcagaccaagaacatacaagtt

SEQ ID NO: 285839 - DNA, 935 bp, Cannabis indica
aaaaatcttgcccttcaagtctcgaagggttggatttttggtgacgatggtgttgctccagttcagaatcctgggaatagaagatgaaactctcttacagaaagagttcaccattgcaggacagcattcataaaaccaaaccgtgaaaacccaaggacatcccaatgccctataccagccatcatattggcctcccttctctgcctttctatttttcataatgatcccatgctcaatcctacctttgaatgagtcaattgtcaattcaaatgattccctaccccaacaatactcatcccaccgaccgctatcaactacatctagaacaaacctagacacttctttgtcaggagtattgctaagaagaaaacactgaatgaaatacaaaacagccattttcaaaccaatagactcatccaaaccccaccgactacccaaaaaagcatcctcgatggctttgtggtcaatagtttttacaccacggaaacatgtttctaccaattgatttgtttcctgtgaaaacaacaacttgttgcaatcaccgaaacaatctaaaccagaaatcaggtaaaattcttcggcactaaaccgtatgcaacggccagcaaccttagcccaaaactctttaggattgggctggaaaacttcccttagtaataaactatgtacgacttgcggatgaaaaacaaactcaggcatatccagaaaatgcccaaactgagtttgacgaaacaaagaaagcaaattaacagataaagtgttcttaatattatctatcacggaataaacactggtgcatacacacttagatctataaaaatcagaaggactaaatttgtagtcccaaacctgcaacataacgaaaatggccacaataaattataaatcctgaataaaacagtatgaaaactgtaatacaactacaaacaaactac

SEQ ID NO: 285840 - DNA, 567 bp, Cannabis indica
cttcgactctaggcagccctacggttcgacttctcagcctcaaacaatgaggtcgaatatgaagccttgatagcagcgctgagactagcaaagaccgtgggggccaaaagggtagaagtctacagcgactcccaactggtagtgaaccaggtatcaggagagtatcagacgcgcggagaaagaatggccgcgtatgtagcaatagttcgggagatgctccacgagttcacggactataaagtggaaagaatccccagagaaaagaacgctcacgcggactatttggctaagttagcttcagacagtgaaactgagaaactgtgggtagtacccgtggaacgcttggcagagccaagcatcaaagtaaaagaggccataacaacggttgggcaagaacccagctggatggtccccatcatagaatacataacgaaaggtgagttgccccaagaaagggcactgtccagaaagattcagtatcaggctcaccgttatgtgatgatggacaaaattctctaccgaagaggactcaacatgccttatttaaggtgtgtatcggaccctgaa

SEQ ID NO: 285841 - DNA, 502 bp, Cannabis indica
tttatttagaggctatttgttatattagttgttttgtttaattttttttcaaaaaaccgtgataggtgatatataataaatttagatttattattaatattttataatcattagttaattatatttaaaaaaaattactattgattttttagtttcaaatatgaatttccaatttatattttcttattattattttatgtttttctcatttattatcattacctaaatttaactatttttttttataatttttaattagttttaaatttgaattcccattagattagatattttctcattttttatttaacttttttaatttattgttattaattaagtttatgattaattttaaagtattattaattttttttttaaaaaaaagaaaaatataatgaataagagtaaaaggagagacaaaaataagtatgttattgttaggttttatgccctaaataaaactccatttcaatgtaatctattttattcaacatcaataaag

SEQ ID NO: 285842 - DNA, 742 bp, Cannabis indica
tgtactctcatgatgtctatggatgtgcttagttaggcggtgaactctgattccatctggagttagcctagtgaagatcaagaaactctcgtggtagtggtggacctccatgtaaggcgtgcattccaacacattagagaaaagtacactaattagtaaagagtttatatatatttataaaattaatcatactgacaccgttaaatttaacagaatattcttatattcttataatatttttttgaaccaataaaatattctgtgacttaaatttaactaaatatattatttttgattaacgtcatattgttaaaaaaaaaaaataacatatatcattttatgatatgtctcattacttaaaattcaatacattcttatttaaaggtaaatgttgataaatatgagaaaaaataagtttacaaaaatttattaaatttaaaataagatagagcataaaattgaataataatttgaatttttttttttttattttgtttcattttatactcataggaaaattcattagtaatcttcctaaactaaaattattggtgtactttttgtattttctacactagcagttataattctttttttattagtttagcattataagggtaaataatattttgaaatatgtatttttgcaaaaattataaattggactctctattttgttaaatgataaaataaatcctatattttttaaaattgtacaaataagaccctaaactaatttttt

SEQ ID NO: 285843 - DNA, 498 bp, Cannabis indica
tttaactaagagaaaaaaattggaatttctaaaattggataatcgagtagagagttatggccgttttagtgcaaaaaattgaacttttcccactgtctggatttatgttaaccagtttcaaagaggttatgtaatgccctaacaattaggcacgctaccaaagatgattaagaaatcctaatcccctaaacgggattactaataaaattagcacaggaaattaagctttaaacaaaatggaatgaaaatgaacttgtaacaattttaactttacaatcaaaatttacatgctttgggatcccaaagataattcacaaaatattaaaagtcttttccccttagccgacctaagcgcaaaacagagttacaaaaatttcaacactggtagacctcaacccgcttggtctagtgtgacccgaacatgtacatacgtcgcccagctcctgcactcatggctgatcagaaatagatttaccctttcctgcacagtagagcacc

SEQ ID NO: 285844 - DNA, 654 bp, Cannabis indica
atttgattgtctgatgaaactaggttcagttaactttataattaatatttacattttgttatgattttttatagcgtcaaaactagtttcataggtcgaaactggtttcacatgttttaactattctgtaatggggttgctccatttattattgtattttaaataatcagttttattattgtataaaaccagttttattattgtatgatatttgaacaacaattattattttattttaaataatcagtttctgatacacatattattttattattttcataactggttttttttaagtaaatagttttcataacttgtttttttttttttattattattgttcataattgagttttaagtttcaatttttatttgattatttcaagaaactggtttttatttatttgttttactaactagtttctcacattccactgtttttttttttgttattctttaatggtttttattgcatttttgtctctttaattttttttgtttcttttttttttctcttcttagatttttatttatgtttctctttgtttacatttgctacataatatatgttcaaatcaattctattttttaagtcaagcaaataaaaattaaattccaaaataaagaatgaagttagaagtttggttattaggt

SEQ ID NO: 285845 - DNA, 772 bp, Cannabis indica
cctgaataactctggatattaggttctcatgtctgattgtaactcccaggtggcttcctccactttgctgtttctccagagtactttgaccaaagatatggtcttattccgaaggactatatcctactggctgctcctcatatgacatgtctggctacagctcaaggttctcataactaagtatatgagtagagtctgaaacatattttctcaacatagatacatggaatacgttatgaactgctgagagagctggaggcaaagctaaccgatatgccacttgtccaaccttctcaagaatctcgaaagggcacaacttgcctcttttcccgaaacatttaatccccttcattggagacactcgtagaaacacatgatcccccacttggaactcaacatctctgcgtttcggatctgcataactcttttgcctactctgagaggcaacaattctagctttaatcttctcaattgcctcattggtgcgttgcactgattctggacctaggtattttctctcccctgactcatcccaatggatgggagatctacactttctatcatataacagttcatggggagccatcccattagtactctgataactgttattataagaaaactctatcaagggtagatatttactccaagagccttcgaagtccataacacaggctcttagcatatcctacaatatctgaatcatcctttcgaactgcccatctgtttgaggatggaatgctgtactaaatttagtttcgtacccatggct

SEQ ID NO: 285846 - DNA, 502 bp, Cannabis indica
tggaaatcgtgattaattaaaatttttgctttttaattaaacttatcttgctcctctattctggcttgcatttcagaaaacttaacatcccaattctaggcctcctgattggcttgggcagcctgaggcgggttaacatcaccccgaccacgaaccctgcccctgggacctctacctcggcccataacacttggggaaaactgagctccttgaccctgattagactcgattgagctgccctgactcctggtatttcgtctagcgtccatctagtccgaacagccttgaaaccccgagttggcacatcaggtcatgatcaacgagagcttactaatgccgcttaatttggaaattaaaaacaaaacatgcgcctattctactatcaggctactaacatgcttcctaccaggcttttcttaattcataaaaattaaataagctactaaagcaataaaagcttactgaaccgtagaatgagctaactgctgatgatgattgtaca

SEQ ID NO: 285847 - DNA, 555 bp, Cannabis indica
ctcaaaaaaccaaaagctgatgggaaaaagacacaagaaaaacaaaaagaaaataacgacaagtatcctccatgtggcatttgtaaaagaaaaagtcacttggagaaagactgctggtttaaaggaaaaccacagtgccaaaattgtaaaaaatttggccacactgaaaaaacttgtcgtttaaagaaatcccatcaagctaatttttccgaagagaaaaatgatgaaagtactctcttctatgtctgccaagctgcaacagaagaaggaaaagatacttggtatcttgatagtggttgcagtaaccacatgacgaaaaatgaaagcatcttttgtagtcttgatagatccaagactaaagtcaaaatcggtaatggtgacttcatggaagcagtcggcaaaggcaccattgccattgacactaaaaaaggcaagagatacatcaatgatgtactcttggtacccaacattgatcaaaacctacttagcgtaggtcaaatgattgaaaaagggtactctttgcattttgaaggagattcttgcacaatctatgat

SEQ ID NO: 285848 - DNA, 530 bp, Cannabis indica
catccacctaggactgtgaatgcataaccggttatagatcttcttgtatctatacttcctgcataatcagagtcaacataaccattcacttcaattccatcttggaatttgttatcatagacaagtccaatgtccatagaccccttcaggtatctaagtatccatttcacagcagaccagtgttccttgccagggtctgctatgaatctactgaccatgatgagtgcataggctaagtcaggcctagtgcacaccatgcaatacatgaggcttccaacacaagaggcatagggcatggaatccatgtatatcttttcttcctctgttttaggtgactggttttgagttagcttgaaatgctgagccagtggagtgctaacagacttggcctcattcatacagaacttgtctatcaatttctgaatgtaacccttttgagataatgaaagtctttcaggtctagttcttttgatgtcaatcccaagtattctcttagcttcaccaagatccttcatttcaaattcagcact

SEQ ID NO: 285849 - DNA, 926 bp, Cannabis indica
gtagaggattgctcccccaccccatacccgcttcctaaattcaccacatacttacctcaatacccgtttaaattaaagtaggggcgggacggggactacccgatagtagaaggatccccatcgggtacccattacatatatattttttttaaaaaataatatctcaaagagaattaaaaaaaataatcataaaaacttagtaaaacaataaacttaagtggaatagtgtatatagtgaaaaaatagagtacaatcaataaaaaacctaaagcatgaagttattttaattatagtagtcatgattttaaaacataaatatatacatatataatatcggggaaggttcgaggtgaatatctattccctcgcccccgccccatttccgactcgggtatgaatatttaaacccatacccgctcccgcctctgaaagtcaatcccgcccccgccccattagtggcacaactcgcgggtataattggtgggtatccaaacctgtaggtataattaccatctgtatactactgtgaataatttagagaccatttgtaaccggttgaaagttcaagaatacaataatacatatatcggggaaaattttttgaatagttattattatttaaaaataataataaaaaaattaacctatgtttgttgtgtcacaaataataatatgaagatttaattacttaacaaaaatatatacttttacttatttctctaatatataattatagtattgatatatatacctccttttcccatagtagtatatttttctaattgatatatatgggtgtaggttatttataaaaacatgatctaagttaatattaattttaagagaattattttatatatttttttttaatttttttaaatttacggtttgagtttctaaactggttacagcgctagttgtaatag

SEQ ID NO: 285850 - DNA, 493 bp, Cannabis indica
atcaatgatgttgaggctggagagaggcgggctgttcagggaaaccagggatggttgtgggtacataggtgctttacctttggaagtggtgggaagggtggtggtagtcatgatggggtgagttggtagagagcaatggagggtggggtggacggtttgaggctgactggaataggtagtgttagaagtaggaacagtggtgtgttggataaaattaggggatggagaggaggcaacagtaacagggaaggtggtaggcatggtagtcgcgaggaatcgatttgtttggtcttgaaggctatggtgatcaaggttggtaagggatggttgttcctcaaagggaatggagttggacagttcaaagatactcttcttataaatggatttggcagcggcccgtagggcatccatggtggtcatagtgatggggaaacttatcacacttgttgaaagtgtggtcaagtttaccacaatgatagcagtagttttgaat

SEQ ID NO: 285851 - DNA, 497 bp, Cannabis indica
aaataaaaatatgataaaatattttattatatatttatgatatatagttaattatataagatatattattttttttgctatgaattatttatttttatttatttattattatatatttaattttaatttattattatacatttttattttaatttaagtttttctttttctaaaaggaaataaataaaatagtccagtctattcttaagccaaacacaagattactttcagcataatttaatcttgtccagtccaatccaatcctcttcagtccaatccagtctaatcctgcgtaccaaacgggccctaagggaactctcatggaaatagctttgagaattatcaagccttatagggttttctaacaaagcgttttcttgatagaaaactttttcattctcaaatgactaccaaagacctccttttataatagtttaggtgatcatacttagaattcaaacaccccatctcattctctcatataatgagcattaata

SEQ ID NO: 285852 - DNA, 129 bp, Cannabis indica
atactttagtaaactaatatatttactgaaatgagtttcacttctaaatacttatagaagctatagatttcatatctatgatcagcgcccccactcaattgaactaccatgttcttaatctgtatgtca

SEQ ID NO: 285853 - DNA, 517 bp, Cannabis indica
gcaatcccatacagatggaagatataataaatatggcatatcatcatatgatcaaataagaacgtaaatttaaacataaaacaaaagagaaaaagtaacaggaccataaagtattcttcaggattctactatcatttaaacaaaaatattatcactttttctgaggacacccattagtcccaaaccaaatatgtctttatggaataagaacatgtaaaagttagtactgcccatggcttttcattgctctaatcaaatccactctttcttctttcctggtgtaaatagttactgcccaatgcccaccttcacctacctactataaaaaagatagccttaccagatttttagacttaaatacgaacacaattctgacaactgagtaaataatctgacagaaatacaccagaaaaattggccacagaaaaacagagaaaagtaatgagacccatcaagcgaataagaatgatttcaaaattatattgatgaacccaaaaaccaaaccacaaccaaatca

SEQ ID NO: 285854 - DNA, 574 bp, Cannabis indica
acgcttttggaaatggttaggtccatgcttagctactcaactctacctacgtccttctagggatatgctattcaggtggaaactgacattttaaatgttgttccatctaaatcagtccctaagacacctttagaattgtggaatggtcgtatacctagtttacgccattacaaaatctgggggtgccctgctcatgtcttaagaaagaaagatggcaaactagaaaagcaaactgaggtttgcatgtttatagtcgcaaggatgataaagtatttgtttccacaaacggcactttccttgaagatgactatattaagaatttcaagccgcaaagcaaagtagtattggaggaaatgctttcagatataactccttctaatgttccatcctcttctactcaagtagaggataatcgcactccctctgttgaacctttgcaagttgatacaactgagaaatctaccactaatgttcctgttcagaagaccacgactcctcgtcgtagtgggagggtttccacaaaaccatctcgttatggcttggatggtgaaatctaggactgaacatcgggcgg

SEQ ID NO: 285855 - DNA, 701 bp, Cannabis indica
aaaaatccaagaaaccgaccaaaccgagtaagccggccgtccgaacaccgaaaaaaccgaaaaccgaaaaaaccgcattcggttaaaaccgccttaaccgccttcggttaaaaccgccttaacatggtcggttttagtgtcaatggaaaaccgaccgattaaaccgagaaccgaccgaacatatatattatatataatatatattatttttgtacatatttaatatacaattttattaaactaattttacttatatcttttttatttaaagtctcaattattcattattttattttattataatttgatgcatttacgtattatatacacacattcataaaataatactagttttttaatataactcattaccatattagcacaaataatttgaacaaatttaaaaaagtttattttacattatttatttaactaagaaagttttatttttaaattatatgatatttgatacaatactttaattttttagttttcaaataattataaaaaatttaaaaacttatttttttttttaaaaaatgaagttcggtttggtcggtttaaaccgaccaaactatagattaaaactgtcggtttttttatatttttataatggtcggtcggttttcggattagaaccataaaaactgaaaaccgaattttgaattttttttgtgtaaaaaccgaccaaaccaaccgtt

SEQ ID NO: 285856 - DNA, 510 bp, Cannabis indica
atcatgattatattccactgtgctgaagacactataatcatgaacaaatatatatatttttgacttaatagaatttatatattaaacatcatcatgaaataaatcatgtgaaccatgcaacataaaataatttttgatcttatattaatatgtaaatctgattatattgaaaaggggtttatttagggcacaaaacccaacaaacacccacttgcactaatataaaacaaaagtgcatttcaaataatctctacaccttgatatccagatcaagtgtagtatgtagtattctctctgtaatagaatctgacaagttgtattcaatacaaccttttctccaccagtacatttccttaatcacaaaatccttggtactggattcttaagtttttggcaactacttttgtattagtcaggaagtaacactgtagttaataaattgttggtacaatgccaaaaaatgtatagaactttccatagactgaataagtatatttcctgcaactttaa

SEQ ID NO: 285857 - DNA, 523 bp, Cannabis indica
aaaagtttatatataggtatggattagtgtaaatgtgtatgtgtatgtgtttattagtgtatatatgtgtatatatatgtatttctgtatgtgtatgtatgtatgtgtatgtatgtatgtgtatgtgtatgtgtatgtatgtatgtgtatgtgtatgtgtatgtgtatgtgtatgtgtatgtgtatgtgtatgtatatgtggatgtggatgtatatatgtgtatgtatgtatgtgtatgtgggtgtatgtatatatatgtatatgtgggtgtgggtgtgtgggtgtatgcatgtatatatatgtatatgtgtatgtgtatgtgggtgtatgtatatatatatgtatatgtgtatatatgtgtatgtgagagtatatttgtgtttatgtgtgtatatgtatgtgtatgtgtttatgtgtgtgtgtgtatgtatgtgtatgtgtatatatgtaagtttaagtgtaagtgtatgtagatatttatgtgtgtatatgtatgttgatattttaattgggttttatttt

SEQ ID NO: 285858 - DNA, 626 bp, Cannabis indica
ataattcccctctactatgatatatcgtgcagccttccttctcatttttcgagcatcattctgattatctgggagtttcccagtgttgaggtaggcagctattcgtgtcatccagtttggggaagtatcaatcatttcgatttcttccgtgccagtgatgctaggctctttgaggaactggataggaaccaagttcgccttgtcacttacattactgcttgccaatcgagctaacgcgtctacatttgtgttttcttcccttggaatttgtctgagaccgtagcttttgaatttgtgcgagcagatcatgtattttgctcaaatatgctatcatcttttctccctgagcctcgtattctccggatacatgatttaccaccagctgtgaatcactgcagatttcaatgtgttcagctttcatctcctgggctagttttaggccagcaattagagcttcatactcggcttcgttattagatgctttgaacccaaacttgactacaggcgtaacaagggcaattcctgcaccagatagctaataagggaacgaacccgcctaatcttcactgttacttggctgaggtgtttgtaccggctcggggttgcttttgttggaaatattttac

SEQ ID NO: 285859 - DNA, 531 bp, Cannabis indica
gatcgcgactggcgattactgtgtacgactgccaagctgcgagaacatcagctgattccagagaacgcaagtcttcaaagagagccagtatacaaagaaccgtctgagagacaacaagagcggatagacaaacgcctctccaagaaaacttctcgaccagtctcaggtaatttatctcgtgttataaactgatgccttgaattttatttatacttatcttttatttatcttcgcagagattacttttctgaagtccgcgcccgtcctcaaaatcaagccgaagagtggaacagcgacaacatcgcccgttgtcgcccagaagaggaagagcgatgtggtggctactcttgccgcaaattcttccaagaagctggctaagaccacgcaggacaaggggaagaaaattttgatcgagccaaccgtccgagcccgcgacttcctggctatgcaggagaagttcgtagaagaggagttcatgtccaaggcggagaagatcccttctgaggagcttgttccgcgttctgtggagtt

SEQ ID NO: 285860 - DNA, 827 bp, Cannabis indica
agggtgttaataaacatacttgcttgacatagggtttacccgacccagtgtgtcaccctggggagctccagtactgtttgttaagaagaaagatggatctttgcagatgtgcattgactaccgggaactgaataagctaacaatcaaaaataaatatcctttacctaggatagacgatctttttgatcaacttcaggggaagactgtcttttcaaagattgatctccgatcgggctatcatcagttgagaatccgagaggaggatatcccaaagatagctttccgcactaggtatggacattatgaatttatggttatgtcttttggactgaccaatgctcctgcagcttttatggatttgatgaatagggtattcaaggatttcctcgatatttgtgttattgtatttatcgacgacatccttgtatactctcagtcagaggaggagcatgaacaacatcttcggatggttttgcagcgacttcgggaacataagttgtatgccaaattcaagaagtgcgaattttggctgtctcaggtatcttttcttggacacattgttagtaaagatgggatcaaagtggatccgagaaagatagaatacgtcagggattggccaagactgaaaacagtgacagaagttagaagtttcttcggtctggatggctactatcgtcggttcgttgaagggttttctaaaaatttctaactccctttaaaccgaactcaccaaaagaatcagcattttgtatggacggataagtgtgaattaagttttcaagagctgaagcagaggttattacagctccagtgttagctctgccttc

SEQ ID NO: 285861 - DNA, 758 bp, Cannabis indica
ttgggtaaaccaatcgtgggcgttctcctcaagtgttgccgcaagaatgcggcattttgcaagctgtggtacctgatccacctccattatagtattgaatttttcaagataatctatagggttagaagtacctttatactttagggattcggatagacgaaaccccttgggaagttgggcttgtcgcacttctgtagtgaagggcgaggtaccatgcaacttgtatatgggctttcgttgctgctcgagcattttcaaagcttgcagaagcatgctttggtcaattcctccagtcgcaggagtcggggctgctgcgactgcgggagtcgcaactactgcggcgagatttgctgggacattgatcccagtggtcgcgatcggcgcggtaggcgggttattgtaagtgttgacaccctgatcgtccgcatggggatcacggagtgtctccgtattatgaggggcgcgagaacgcgctctaaaaactgcgttgaggtgatcacgcagatcacctcgatgtacctggtaatgtcctccctgttgcgtatgtacagagccggaccttgtatatctactcggtgtacgaccatgcgatgacgaagaggctgattctacgtcgttgtctcttgatggtcgactgcgaggattgcgtcgttcagggtcttcatcaacctgcgtgccttggtttggataccttacggattgatcccttgatgttggatggttcaggtccaaaccttcagggttggttcttcgttccc

SEQ ID NO: 285862 - DNA, 566 bp, Cannabis indica
tttgagtatcatttcatgatcttgtggtgatttttattgttgatctttagatgaaattctagggtgcttctaatgattgaatttggtctttagttgttaattatgctgttggaaaatgtttggggttgaaggatttaaagctcaagttcatgagcttgaactttgttggtttaaatgcatgattttgaattgattgtgtaatttgaattttgagagttgttgttgatgttgtttgctctctgttgtgatgatttttatctgtaagaagttaattttgggtatggtttggttaagtttcgaatatatgaaaaagtgggcatttctagaccttaaaatctggttttttgggtttttcgaacccagtgaccacggccagatttatggtcgccgcggccataaaacccagcagagagccatctttttcccgattttgttttgaccataacttttgattcgggactccgttttggacgttctttatatcgttggaaagctcgttttgagctctttatgtttatctatattttgaatgccaactttatattttgtgaaagtgaaattaggga

SEQ ID NO: 285863 - DNA, 252 bp, Cannabis indica
acttagcttcctttaaatgatatttcagtgagctaatataatcactgaaataagagctcttccatttatctctattaagccaagctcgaaggaaatcatcgtttcacttctatgtcctgatagaagctatagatccatatctatgtttagcgctcccactcaattgtactatcatgttcccaaaatgtacgtatcaccctgaccaaaaagtaggcttaactaacaaatcaaagaacatgaatagcactcctg

SEQ ID NO: 285864 - DNA, 809 bp, Cannabis indica
agtgatatttaaaaagaaaaattataagttaataattatttataaaaattaatgaaattaatgttaaaattaagtaatttaagtaaatgaaatttgtattttgtttaaaaaataataataaataattaaatatttaataaataacttttattagttgagaatagataattaataattgaataagtaatgaatttaatattgaataaattcttacaataaaaaatattaataaataattatattaataaaaaaatataatattttattaaataaaaataatttaaataaaagaatttcggtaaaattttgagataataaaaattttgttattttaataatttataataagttaatagtttcttataaaactagtaacaagttattttttaaatggacaattatttaaattaatatttatttaacaaaattagtgaaataaatcctaaaattaagtaattgaatttaaaagattttttgtatatttataaaaaataataataaataattaaataattataaataactttaattagttgaatataaataattaataattgaataagtgataaattttataattaataaatccttgtaataaaaaaaattaacaaataatttgataaatactataatatttaatgtaaataaaaataatttattatacttacaaaaaaatattaatgtaagtatagtttaaaataaaaagttaaaaaaagtttacaataacaatgacataagattatggagatgtaaataagtgatgaaaaactaaaatatagctcatttaacaaaaagtgtgctccaataat

SEQ ID NO: 285865 - DNA, 568 bp, Cannabis indica
catttggtccttgagtgtaagtgtcaaaattttggactccaattattgaagttgtcctccaacatggctttgtttggacattacaacaccactcattgtgactccgccatgcttccaacattcaataggcttcatcgattgatagttggtaaaaattagtggtaccatctcctctttctacccattctcgtgtgcttggattcaacccattgaggaagacctctaattgacactctttggacaacccatgatatggaaaccacattagaagtgtcttgtatctccaccatacttcatacaagaactccaagtcatgttgaacaaaattcataaggacttgtcgatgagacatcccaagtaccttgaaaaaggaaccaagacaaacaaacaaagcgtaaaatagaacaaggaaaataaaacgaaacaaatgaaaatctaaaaaaaaaaccaaaatttatagtaattaaaacaaaatttcactaaatcaatccccggcaacggggccaaaaacttgttgtgaaaattgtgcacgcaagtatacgcaatcgtaacaagtaataaagtgata

SEQ ID NO: 285866 - DNA, 654 bp, Cannabis indica
tgtctaggggttcatagtttactacagtggacactagccaacctgtgacatcagggcctgaggatatgaaattggtatgcgagttccttgatgtctttccggaagatttgccgagattgccacctgtccgggagattgaatttgttattgaattggctctgagagtggatccagtgtctaaagcaccgtaccgaatggctccagctgagttgaaggaattgaagatacaattgcaagagttactgaatctgggattcatcagaccgagctactcaccttggggttctccagttttgtttgtgaagaagaaagacggaaccctgtgaatgtgtattacttggagttgaacaagcttaccgttaagaacaagtatcctttaccttgaattgatgatctgtttgatcaactgaaggggaagacggtcttttccaagatcgatctttgctcaggctatcatcagttgagaattcgagaggaagatattccgaaaactgcgtttcgtacttggtatggacactatgaatttcttgtgatgtcttttggactcactaatgccctgatggaattcatggatttgatgaaccgggtgtttaaggattacctggataggttcgtgattgtgtttattgacgacatttttgttgggttttatgc

SEQ ID NO: 285867 - DNA, 569 bp, Cannabis indica
aaaagaaaagacagagaaaatttaactaatcttaactatacatatatacctaaacaatgatgaagatgagtccgacagtggcggtgggaatatcgacaacggtgaaggcagtggaaatgtcgttgtgtggtcgaaacggtgggctgctagttgacgatgaacaaggggagatgaataaaagttttgatattgaggatgaagaaggagagatggatgtttgtaggtcaaaaatattagggatgaagaaggagagaaagaggagacaaagagagagatagacaaataagaatactgatatatatataaataaaaactattagaggcggaggtccgctggtaataataggatccgctggtaatagttattagcggcggacttccgccggtaatagtccgctgctaataaatttaaatattatttaatgttattagcggcggacttccgccggtaatagtccgctggtaataaatttgaaatttaaaaccgggaaaattcccgcacaaagcaattccttcaatattattactttcattttaaaaaaaaccatactattaccggcggatctagt

SEQ ID NO: 285868 - DNA, 161 bp, Cannabis indica
atcaagaatttataacctaaattcattgacttattaattcttcgttgaatccacaaatagaacttagaattgcactcacagtatatagtactacatacatccgatcctggtaaactttgccaatgtcctggaaaggaaataacacttatccaaggtgtaag

SEQ ID NO: 285869 - DNA, 639 bp, Cannabis indica
tgcatactgtccgtaccacatgcaatttttttccaatttcttcatttttttcatgcttttttcatgaaattaacttccgattttttgtgtagttttgtatttagatatttactattcctatttcaatcctaattatcataattaaattatgatattagtgtaatttgaacttgaaaataggtcaaatatctatcattttttgcttaattatctatcttatttttaaatttgattattttatcttattttttaatttaaggtcagatattaatattttttttttttaaattattctattttttaaaattatttgaccttatttaaatttaaaataagattactataatcatgatattttgaatagaaataagatattttgctaacttttaaattttgttatttttttatttaaattaaattataaaatcagaaaagatatttattatcattttttattttattgaatatttaatttataaaataacatgaaatttaaaagatggttagcaatttttttttttggaaatgatatttaggttagttgaaacctaatttttcaaaaatgtaggttttaattttaatttttttttattcaaaatttattttaaaaaccgaaaatatttttttttattttattat

SEQ ID NO: 285870 - DNA, 489 bp, Cannabis indica
actttaccaataccctggaaaggacataacacttatccaaggtgtaagtataccttatcatcgattatcatgtcagtctaaatctagtgaactgacaaatcattgaaattaaacttttgaacatataatcataattatattccactgtgctgatgacactataatcataaagaaatatatgtatatgttctggacttaatagaattaatacattaagcataatcatgaaataaatcatgtgaaccatgcaacataaaagcgattctgatcttatattaattagtaaatatgattatattgaaataggttttatttagggcacaaaacctaacaattgagagggtcatgagatacctcaaaagaacccttggattttattatcaaaagtttccagctatccttgaagggtacagtgatgctgattggaacattttatcagatgactccaaggcaactagtggctatatttttagcataactggtggagct

SEQ ID NO: 285871 - DNA, 506 bp, Cannabis indica
taccagaagtcaaggcaattcggtcgggtcaaatgaaggtcagggagctaagtttcccctaaatgctcggggccgagctagaggtcccaggggcagggcacgtggccggggtgatgctaacccgccacaagctgccaaggctgcccaagctacttaggaagcccagaattgggaaaataggtttgcagaaatgcaagccagaattgaggaacaagatagtgaaattcagcgattgagacagcagggtgctcctgcagtgcctgttccagaaattccagtggcacctacccctgttgtccaggccgaactagtgatagcggtgaatcgaatggaacctctgtatgaaaggttccgcaagcaggcacctccagtttctctgggaggttcagatgttatgaaagccgagcagtgctaactgtgattaccaagatattaaatttcatgggtgtcactggtaacgatagagtggtctgtgccacttttcagtttcaagaagatgcattggt

SEQ ID NO: 285872 - DNA, 598 bp, Cannabis indica
tatacacaaactataaaaaaaaatagactaaaaaaaatatctcaaatgcgaaaacaagtaaaaatacatcaatatactacttttttttaaaaaaaatatattataatttcataaattaaattaataatataaatatatattaattaaatataatataatatatataaaaaaaaaaaagggatgccgtgtggtacagtgcacgacatatataccgtggactgtagcttccactccaaattcaacatatatatgcagcctccttggataagaatttatcaccaaataaaagatttgtcgcgtccttggtgatgctcttacaaaggcaactagaccaacaaactacaccaacggcatattataattttgcaaaaccaaaaaaaaaaatactcttgattacatataattttggcttttctgtaagacatagattttgattgcaaaaaaaagaaaatcaaatattgagtagggttgttcatgcgatccaatccgtatttttttttggtcaaataacatccaatccgcactaagtgcggatcctaaattttggatccaatccaatctacatgacagtttaaatccaaatccaatccacaatagt

SEQ ID NO: 285873 - DNA, 751 bp, Cannabis indica
aaagaaagagagggagaattgagaatttcctcttaaaatttttttttctaactttcctttcaccatatatcttgctcaagccaccatttctaatttaagataatatatggctgcatcaagagccttctacaagccaaaataaagaggaaaaagacttaaaatgaccccttgaccctaataaaatagttataaaccctcaagggcaaaatggtccaatttaatccccgaaaattctaacgcctctaccatacaacaataataccccgataataaactaaattataaaatgcaactctctaggcccaacgtcgctttccacagcttccgaacacaatcacagaaattaggtaaataaatataaaatagcataaaaacatatataatataaaatatatttctaaaatatgcattccacaattattaatacataatctttaaatatttaataatacaaagtattccttcataggcggtctttacaattatccccccgttccgttaaaacggaatttcgtccctccgaaatactacctgaataactcaggagtactgggcccgtccatatcagattccaacttccctaacgtaggcgttcttccactttactgtttcttccaaacgtaaccttcgaccaactgatatggttttggtttcggtaggaaccttttcccttttttatttccacgaatttgtcactggttgttcgtcatatgataagtcagattgcaattccaactgcttcgtaactcag

SEQ ID NO: 285874 - DNA, 697 bp, Cannabis indica
tccactgtgctgacgacacaataaacaagaacaagaatgtgaaaagggtttggatgaatttataaatcaaatagataagtaactgacaatgtgaaccaaaaaatacacaaatgaatgaaaaatacttctgtttctttattgatattgaataatacggattacattgaaatggagttttatttagggcataaaacccaacaacatcatcaacatgaaacaagttatgaaccagcgactcattccacctgccatcctcatctattagataatttacctttgtatttggagggacatttacccgaacccgaagggagaagggaaagcttctaggaagccatctatcttcattgattctagtattagaccccgaacaaagtctccaacagagccccttaaccagcaaatcacaaccccagatgaaactacgtcacatataggaagtgtgagctattaattgcacctataacaacccctagtttgggcagtaagtctctttaagaacccacgccagcaaagattgaggttttgtcagaattttccaacataatttggcaagcattacttgattgaaatgtcccatgttctgtaatcccaaacctccacgacatttagggtgacaaagcttatcccaagacccccaatggatctttcgatcggttgtagcaccaccgtgttggaatttattttaccaggatct

SEQ ID NO: 285875 - DNA, 536 bp, Cannabis indica
ctagttgagacaaactgcttgtaagactcaattaattggttttaggtaatcaattataattctaaaattagactatgtctagtttataaattttcactaacatatgacttgattgtgaagaaataggattttagagtttatttattaattaagagactttgtggagtctaattaataaataatataaatgaaaagtttatttgataattaatttaattattaaataattcgttttgacatttataggattgaaattgcaaaaagtaatatttgtgaaaaatagattaatggttgagaaaagtggcaaaaatctaaatagtattgggcccacttcatggctggccattaggtgttaattttgccattattttatcattttttattccaaataaatcaatcctaaccctaagtgaattagtataaaaagaaaagaaaggtctcattatccaactaatgctactaatgactcttgacctagttttcattctatctcacaactagtgagtttgagacttctttttcttcttttcttctct

SEQ ID NO: 285876 - DNA, 667 bp, Cannabis indica
aggaccgaaaaagcgtttccgtgcaccaagagcccggagggagaggaagaaggggacagaaatgtcctcccattgatctgaggaatcagattaacgggaaccaaggtgacctccgggatcaccttgaccaaaagaaatacggacccgcggtctccacgggaacgttaaacgaaggaatcatggcggaactcgccatacttcgaaaagacatcgcccgagtctcccggagacagaaaggcgacgactccgactcagactgtgaggaccgggagccatgtgccaaacacatcctggaagcagagctccccaaaaactttaagatgcccgaaatggcagcttataccgggaactctgatccgagcgatcacctgtcacgattcaaccgagtcatgacggtcatgagagtcagcaatgacgctaagtgtttgtgcttcccgcttactctaagcgggccgcggaagagtggttcaagaaattggagccaggatccgtggattgctggaataagctacaaaccagcttccggagacagtttgtcgccgcaaggaaagtcaacctggaggttagcgccttgactaacatcaagcagatgcctacggagacactaaagaatttcataaagaggtttcgggaagaagcctctaaaaccaagaaagtagatgacgga

SEQ ID NO: 285877 - DNA, 501 bp, Cannabis indica
gactggagatcccaagaattaggttcaacgggtaataacaaattatgagttgatatgtgttgatcatgctatagttatacgagaagcatgaagtcctgaagcgataagaggatgagttaatagaaactcttaatgagatctatactctatgtggagtggagtaccgagctacaggagtactcttgatagactcacctatgtgaatgtgggagtggggccgcttcctatgaaatttggggcaaaatttctagagcgttcactatactgggatagacgtgcatggccattaacgcacgggcttatttgaatacacccttgaaagattggtgcgtggtacgacgttagagatagagttcaagacttcgagtcactctagtaaaatctaaatcgtattcactatgcaagattcaaatcgaaagatatctttgctgaagcactgtcttatagttgttgaggttgctcgagaaaatatttttaaaaatttcaagtgggggattgttg

SEQ ID NO: 285878 - DNA, 644 bp, Cannabis indica
atccgcttctagtttcgatttcagtttcaagtcacggggtacgggttttggttgagtttggatatgagtatgggttcgggtcgtgatttgggtctgaggcaaggtttaggtccaggtttcggtctcaggtagggttcgaggctgggtctcggcctaggtcccggtcccgttcaaagatcttggtccctttctaatacatgtttcgatttttgttcttgagtgtaagtctgggtcttcgtatgtgtccagctcttagtttgagttcgagtttgggtttgagttctggtctatgtccttgatccagacactgagtacaggtcgggtccaagcatcgagtcccggatcccaggttctgaggtgggtcctatgtccaggtttgggtctggggtcgagtccttgatcccgatcaaagttctgagaccaatttttggtcctagttcgggggcccaatttccaggtctgggtcccccatctatgtccaggtcctaggtttctgtccgaatctaagttcgggttcgggttcggtccgagtgtaggtcgcgatttggattagggtccgagtatgggtcacagtcccattcttggtctgggcttcgagtcccaagtctcagtctggttcttgggtcctgagtttggccccgatg

SEQ ID NO: 285879 - DNA, 994 bp, Cannabis indica
actacttgaaacgatacgtacacttgcgtgtgctaaatatcgcaacaagtttttggcgccgttgccggggagtgatagttaatattattaaaaattaaattttgttctaatttgatttttctttctaatttaagtactaactctgttgtctcaagatcttattctgctttcaggttcaatagtttatgagaagtcaaggaccaattgccagattacctgttgaccctgagatagaaaagacctgtagaagaaacagaaggaggagaaaattggaaagagcggcactagagattgaacaagaagaagtcatggctgacaacgccaataatggtaacaatggacacaacggaggaggtgtagaagaccaggctaatggacataacaacaatgaccgtagcctgagggactacttacttcctaacttgacaggggcccgatcctgcataaggccacctgctgttgacgcaaacaactttgaaatcaagccagccatactgcagatggtccaatcttcagtccagtttgggggactgccgtcagaagacccaaacatgcacctcgccaacttcgaagaactgtgccagacattcaagatgaacggagttagcgatgacgccatcagactaaggctgttcccattctcactaagggaacgagccaaaagttggtttatttctttaccaactcattctatcaacacttgggaggaattggccctgaaattcctatccaagttctttcctcctgcaaagattgccaagctgagagctgatatcaataacttcacccagcaggacagtgaatctctttatgaagcatgggagaggttcaaggacttactgagaaaatgccctaatcatgggattgagaagtggctgcaagtgcacaacttttacaatgggttgatgaatgaaacccgaacactcatagatgctgctgctggtggagctttcatgaggaaaagtgctaatgaggcctttgaattacttgaaga

SEQ ID NO: 285880 - DNA, 987 bp, Cannabis indica
atcctctttggtctcttcttcaggttcaaaatccgatgaagaaatggaaggtggattttctttgagacttttggcctttgaggatgaagacaccacctttttccctttggagacacttttgggcagaaccacttcgggtttctttggtgtggataccttggacctagttcgagaactcaccgtgggcaagggcactattactttcttgacatttgaaacaccattcgaagaagaagacttcgacaatgagtgattggatgaatgggattcatcaagatcaccaagcccaggagttggggtagcaattggagaggcaatgatcggaggagaactgagattgtaagtcgacttttgagcttgggtttttgactttttggcagttttcgtcggagcagacaacgacccaggaactctggtcactggagctggtggcgcaggtggggtgatcggagaagtagaggcagagacatgagaaggcttcttggaaggttgagcatttttggcttggccatttttctttgaaaaccctcaaaagcaaaacacactctcaaacttgaagaaggttaaacttttaaaaaaaaaaaataagaagaggaagtgaatagtggtgatcgtggaaaatggtgggtagtggaccataaataccactttggaattgaataccccaaaaaataaaaaaataaaaggaaagtaacttcctttacctttgtcaccacgtgaggagagaaaataggaaaccaaaaaagatatttcaaaatatagtcaaaggttaccaaaaagggaaaaaggaaacaacatatccctaaaaaatctaaaaaataaatacaccaaccaaatccgaaaataccaccaaaaagaaaaccaacaaaataattaattaaataaaaaaaagtttcctaaaacaccacaaaaaataaaagcaaatccccaacaaaaaaataaaagaaacacaatagataaaatgcaataaaaacatgtttccataaa

SEQ ID NO: 285881 - DNA, 517 bp, Cannabis indica
ctgatcttcgcaggattggcttctattcctcgctgattaaccatgaacccaaggaatttcccagagccaactccaaagacgcatttcagagggtttaaacgcatcttataccgtcgtaatatatcaaacatggtctgtaagtgggcaatatgatccttcgcatgttgagattttacgagcatatcgtcaacatatacctccatggtttttccaatgagatctgcgaacatcatgttcactagcctttgataagtcgcacctgcgtttattaaaccaaaaggcattactttgtaacagtatagtcctcgatcagtaatgaacgaggtatgctcctggtctggttcatacatcgggatttgattatatcccgagtatgcgtccatgaaactcaagagttcgtgacctgcagtggcatcaacaagctggtcaatgctaggaaggggaaagctgtctttgggacaggctttgtttagatctgtaaagtcaacacatgtgcgccatgagccattaggcttag

SEQ ID NO: 285882 - DNA, 722 bp, Cannabis indica
aggtgtgactccttcactgtattgggacactccgaagcctaccaatagaaaaagacaacacaaagatgatagttcgactaaggctttgaaagacgcatttgaagaaataatttgtccccaacaagaacaacacaaacaggaacaaaaaagtcttgaagatcgactttgtaaacaagaagaaatgttaagagctatcatggctcagcatagcacgtcgggctccaatattggaatgcctagcccaccatatgtgccagattcaccttatatgcctgacccatcgacacgcgtgaccaccccaccatatgtgcccatgccaccatcgccaccacgaccaactacagcactacaaccattattacaacaggtaattataattttaccacagtatatagagcacaaagattaattagtacactaatcacttgttattcaccattaaatatggaacatattttttaccatatatttatcacttggggtggctattcataataaaatttggtagaatggtagttctcatcatgtgtagagaggagaaagttactaatatataataggcaactttttgtctttaaaaagttacttttgatgaaaggtaaaatcaaattgtaatggtaaaaagcttctacaataatgggtcataaatattgtaaactactatattatcttcaaattaattattatatatatatatctttagctatagccagcagctaggg

SEQ ID NO: 285883 - DNA, 847 bp, Cannabis indica
ttatatatatatatatattgttatattttcacttagtaatatgatcagattttttaaaatccctttaaaaatgtagttataattttacttactaattttggacagtttgatcataagtgatatttttgacttatagtggctcttttcggctcaagtttggtctagacatgtgcctagtatctacctaatccaaaaatccaaaataaattttcttcttttaaaattacatatatagtttttttttttactaattttacaaaataccatatatatatatagatttttttttttaaaataagacccttaaattattttttcttatgaccattatattttaaggttagctcactatccccgattacaaataattttttggttcttcctttttagatcaattattagatttggatcaaataatgtatgattgaaaaagaagaatatggtgtggtaagacgcgggttacgtcttaaaattaattaacaattagagaaataatttatgcatcttatacatagcattatcttgaaataatgctctaatatcagtgatccataatgtatactaaattcgatacaattaaaagttgtgccaaaatttcacatgaaatgaaatatataggttaaatactattttagatttatattttgtaaaagttattgattgaatattctctattttgttaaatgataattttaattttgtatttctcaacacagtctaaataggccctaaactcaattttcgtctattttttttaaatatatatgcagacaattttaaagcctgtttctaacatgaacgaatgaaaaacaaaaaaaaaaaaaaagaaaataaactacactactac

SEQ ID NO: 285884 - DNA, 521 bp, Cannabis indica
gacattatcttgaaataatgctctaatatcagtgatccataatgtatactaaattcaatacaattaaaagttgtgccaaaatttcacatgaaatatataggttaaatactattttagattttatactttgtaaaaattatcgattgaattctctgttttgttaaatgacaattttaattttatatttctcaacatagtctaaatagggcctaaactcaattttcgtctattttttttttttaaatatatatggaggcaatttaaagcccgtttctaacatgaataaatgcaaaaaaaaaaaaaaaaatgtaaccaacttgggtatataatacctcgaggtcagattattattattaagttttatactttagtaaaaattaagctcaaatctagtttgtaccattataaaacatatggtttgataattatcatttaaaaatagagagcccgttcaataatttttgtaaagcatgaagtccaaaatgcgcacttaattcttttttaaccctccccaaaaaata

SEQ ID NO: 285885 - DNA, 541 bp, Cannabis indica
ctgagatgcaactcatgctcttattctgactcagagtacaccaaaatatcatcgataaacacaatcacacatttatccaggtaatccttgaacacccgattcataagatccatgaatgctgccggggcattggtgagtccaaaagacatcacaagaaattcataatgtccataccgagtacggaacgcaattttcaggatatcttcctctcgaattctcagctgatgatagcctgagcaaagatcgatcttggaaaagaccatcttcccctttagttgatcaaacaaatcattaatttgaggcaaaggatacttgttcttgatagtaagcttgttcaactcctgataatcaatacacattcgcagagtcccgtctttctttttcataaataacactggagcaccccaaggtgagtagctcggtctaatgaatcccagattcaataattcttgtagttgtatcttcaattctgtcaattccgctggagccattcgatacagtgcttttgatactagatgcgctcccagaaccaactcaataa

SEQ ID NO: 285886 - DNA, 620 bp, Cannabis indica
tcttgtgcgtgcaaatcgttggactaataccccttatgtccgccatagtccacccgattgctttcttatgctttttcaacacctctagcaaagcaccttcattttcaactaccaagtttgatgctataataactggcagcgtgtcattctcccccaaataggcatacttcagatggcttggcaagggtttcaactccaacttcggtggttcttggatggagggttttggaggcttaaaattactttccttcaactccaaagattcaaagggcttcttgaagttaggaataggttgcaatggctccacccaagcaacttggttgtcttcatcttcactcaagtcttcaagctcatcaaaagaacttataaatttctcatccctccaagcttccttgtgaaatttttcagccactagcgagtcaattacacttatgcgggaacactcttctatctcatccggaaatctcatagcattgaacacattaaaggtgactttttgatcattcaccctcattgtgagctccccattttgcacatcaatcagagttctcccggtagcaaggaatggtcgacccaagataataggcacatctctatcagcttcatagtctaggatgatg

SEQ ID NO: 285887 - DNA, 501 bp, Cannabis indica
gctcggcactcaccaggatgatgcttcttgcatttaggacattctggatatgatcggaatgaggacccgcgaccctgacagccacctctgtttccccaaaactttttatttccccctgaagctctggaaccctcaaccttccgtttgtgctcagggttgccactgtcggtccccttactgacattaccaccagaaggagggtttgatgccatggcggcatcctttgcagcccgctccttcattacttgctgctcggcctcctcagcaattaaggccaagtctaccactcgcttatgcagagtgtcatgtgatgtggtaatcttcaagtctcgactaattgtagcatttagtcctcgaacatatttttgctttctggtgaaatctgcaggcaccagatcaccagcaaatttagataaccgatcgaattccagagtatattcggccacagacattttcccctgagtcaacttcacaaatctcttggtgttaagtcctcactgc

SEQ ID NO: 285888 - DNA, 584 bp, Cannabis indica
tagttgttatttatatgttattatctgcaagatgggacatagcttaatttatgtagtacaaatataagtggcagaggttttggataccttgaagccttttgtggctacttttaatgagaaaatgattctttgtttctgtattgtcattttttatctgagtaacattctttgtctagtatgatatatatattgtatgtatctaccttttgtttttgcatttttggctattcgaccaaatatacaatttttttacatcactacttttattcacaatgcagcttttcaattgtggtagtatctttcgcagaaattgcttgaacgctagcttggaattggtaagctactcaaattttttttttttttaatattttataatcctagagagtttgaatatcctagatattcatccatagtgaagtaagttctgggattgcatgactgcgtcggatgggtggtaatattgtactgttaattatatttttgtttgtttgtattattgtggatgttttaatagtttaattgcatgtttgaaatttttgggaacgttccgaattatagatgttatgttgctgaaattttggtag

SEQ ID NO: 285889 - DNA, 1077 bp, Cannabis indica
  modified_base (939)..(939): a, c, t, g, unknown or other
ttatgaacagaatgagtgaggagctcggggaccgagaccctatatttataggtgagatactccatcagtatctacgccacattaattgtcagaatattttgacaattaattcaggaaatcaaatcaggtaatgaatatagaaatctgaccatatatagaatattacataattgattttgtccagattcaatgaatataaaatattcatttaacagaaaatcaattatttatttatttccttaaatagaaaatcatttccttaattagaaaataatttccataaataaaatattctaatatatatttcactaaacaatatcggaaattaatttttaatccaatgttaatatattttacttaatatatatgacatgtacgtaatataaatatgcatgtatatatgctttcatttaatttggagttataataagtaaaaataaagaattaccataactatcatatgaacaaataaataaaataaaaataaaatacatccccaacaactacatatattatgttgataggttaaattattaatttaccaaaatgtggtgattagtggtttatatatctataaataagtatgaaatctatatatatatatagtaaaattttattttgtagctaaaataatatatttttttataaattactgagtaaattatattataaaatgaatttttaacttatactccacgacgaactcataaaattttaccagtatttatgcaaaatttaaataattaataagtatattcaattaaaaaaattattaaaataataatattatatacttataaatcagtagtaaaatatactataaatgctaaaatataaaaacatgaggggcgagaatttctctagacattatatgggtttggcagtgtttatgctcttttttcttattaatagtatatatgaataaagcatattttaaanatttttggaaaaaaatttaaatgtcacactaaatcttaaaaaaaattaaaataaataaataaataaaatataatcaaacataatatttatcaaaatattaaattaaaaaaaaaataatttgaattaaacacaaaaaat

SEQ ID NO: 285890 - DNA, 693 bp, Cannabis indica
atatatactcccctatatacttaggatttttttttttataaaaaatgtctaagtataagtacaaagcgaacataatttaataatgcgagtactattgataatataattttaggctttcgccattccaagctcgtggaatcgcagtaccatcgagtgctgcgagtcggtatgtggcgtcacctattttttccgcgatgagatatggtccttcccaattatctccaaagaccccatgcgctgggttcttggtatttggcattactcttctaaggaccaagtctcctgctcgcaggacttttgcttttaccttagagttaaagtatcttgcagttcgccgttggtaagccgcattttttaagtgtgcttgatcgcgtttttcctccagaagatcaaggtagagtgactgcttctcttcgttctgcgagatgttgaaaacatctctgcgtagggaacctgccccaatttcaactggcaccatggcctcgcacccgtaggaaagcgagaagggtgtttcgccagttgtggatcgaggagttgtattataagaccacaggacttgcgataactcgtctggccaagtccctttacgttcttctagtctccctttaatggtgtgttttattattttgttaacagcttcagtctgtccgttgctttgcgggtaagcaactgcggagaacgcctttttgattc

SEQ ID NO: 285891 - DNA, 681 bp, Cannabis indica
agaaactcgacccagacccaaaccacaacctagacctaggacctagattgggacctggcacctaaactagaacgagataaggacccaagtttgggttcatgatctggacctagggcttggaccggacccgtagtcagtgtttggctttgcgacccgaactcggacccacacaaagactcacacccagaccaggacccgaactcgaacccaaatctaaaattgaatccatacaccatgacttgagaatcaaacacgcaccagagaacgtactaggaccctagaatgcgaccgcgacaaagacccgaaccgagacatagaccagggacccaaactcgaacctagactcggaccctgccccgaaccaaaaccagaccagaacctagacctagacccagactgaactaggacccagactcgaaccctaacccgacatcatactcgaacccgggaaccgaacttagagccagacgcttaactagactcgaatctggacccaaacctaaaatgggatcaaaactcgggacacggacccacatacaaatcgagctcggaactagggactcggacccagacctggacctggacccagacccaaacctggacccaaacaggggacccaaaccaagacctgtacccagactcggacccaaacagagatctggacccggacccagaccctga

SEQ ID NO: 285892 - DNA, 920 bp, Cannabis indica
tttaatatattacaagtttattttcagtctgtttaatataaaagtttaaattctgcgctattttaattagtaatcccggttaggggattagggctttataagtattttgggtagcgtgcctaattatttagggcgttacactagctggggcccaaacatgagacaatgaattctaggcatggtcaaccattagtgagctccgagggacccttgtccaccaagccttaaatcaaaatggtcgattagatatagcatcaggatccactgtatgaatatatagggctctgtggtctgaattgtaagtatggagtgattggaacaaagctttaggaaaatacgtaaccgctcctcattgaccactactttattaatggctaatttaatatgatccaggccatccctatggttatcctgttggaatatgttttaccaggatctagatttactaccatgtatgttatataacatcctaaatatgaatttctaaaacaatgtaaataaacacatataaagtttgaagaaccttacagtgagtgcagcggaattataatagctcttttcactcagatctctaacccttgtctcctgtctgtagcagagtatcaccaagatctaagcccgaatctccttctcttgaatttggattcttcacaaccttacacactatgattaagtaccacttgatgtgtgtgggcacttactctatcactatagggtttgaaattatgaagagagaaaaagagaagagtggttcgaatagagtagaatagatggctcaaaaatttgactgaaggcaagtgtgttcatcatcatttgatttgaggccatcactatcaaataaaatttccatttaacatatttattaattagacttaataaagtctctcaattaacaaataaaccctaaaatctcttttctt

SEQ ID NO: 285893 - DNA, 661 bp, Cannabis indica
catatagagtctcttaattaataagtaaaacctagaatctcttttcttcacaattttgcccttgctcagtgaaaaattacaaactagacatagtctaattctagaattataattgattaatgataaatcaattattgagtcttacaagcagtatgttctcaactagaatggggaccatgggcctatattattgagcttccaataagtagcgaaccgaatttaccgagtaaactcgctaacttattaattctttgttgaatccactcttagaacttggaattgcactctcagatatatagaacgctctatatgttccacgatattgatacgctatcacatttaaccatcgttataatcttaatttgatcaaagatcctctatatagatgatttacaccgagaagggataaatttaccatttcacccctcaatgtatttggctccttaaaacacttagttacctataaatgatgttttagtgaactaaaatataatcactgaaacatgagctcatccatttacttctatttaactaagctcgaaggaaatcatcacttgacttctaaacacctatagaagctatagattccatatttatgttcagcgctcccactcaaccatactatcatgttcctaaaatatacgtatcaccctgacccaaa

SEQ ID NO: 285894 - DNA, 679 bp, Cannabis indica
aacttagattgaggactttcatgcttcttgatactggttcagaagcgtctcccacaacataatcatgttcttgcaaatagacaaggtagtcatcatgaatagcaggtttgcgagctctctcagatcttctcaatacaacttcaccaccctcaatatcaggattttcatcttgcatatgattctgaggttcatcatgagcttctgtgggaatttgttcaatcacaggatcaatagtaggagcggaagcaacaggtacagggacataaatacgttcttccctgaacacaatttctcttgacccttgacttgaaccaaattcatcttcaaaatagacagctctatctgattctatcaccctggtggtgtgagaaggacaatagaatctagaacccctcgaaccaatagtgtagcctacaaaatagccgctgatagtcttgggatcaagcttcttagattgtgggttatagggccttacttcagctttacatccccaaacatgaaaatgacgcaagctcggtttcttgcctgaccacaattcgtatggtgtctttgggacggacttgctaggcacttgattcaagatataagcagcagtccttaatgcctcaccccataaaaattctggcaagctagaatgaatcaacatacaacgtaccatgtcaagaagtgtgcgattcct

SEQ ID NO: 285895 - DNA, 871 bp, Cannabis indica
ttgaccctcttcaagaacagaactctacaacttagaatcctaagcaactctcttaaatcctctctcttattctcctacttttaaagtgaaaagactagacatatttataggcccaactcatacaaggaaatagcaaccaactaactaactaacataaccgaaagttagttaagttagttggtttaaatgagttggataataagttggtttagaggatcaacttccacaaatttccaccttgattctctaaagcaacctaccagaatcttttcactgaagccttgatgatgtgatatctcgaaatgttcagcaagaaccaatgttcagcaaactgagacaatgcatcagtttgctgaatgtaagaacctttgttcccatgtcagcagggttgtcacttgtgtgcaccttttccaattccagaaccctgtcctcaatcttctctcgaatccaatacaatctaatgtcaatgtgcttgctcttctcatgatatacaggattcttgcacaggtgaatagatgacagactatcagaatagactgtccctttgtctttgagcagtagcagctcttgcagtattccttgtaaccaaatagcttccttgaaagcttcagtggtggccatgaattctgattcagtagttgacagtgccaccactggttgttgttgtgatttccaacatatgcagcttttgttaaccatgaatacataggcagtggtgctccttctattgtccctgtttgatgcataatcagcatcaacatagccttctaacctcacatcagatgtgtctttctgatagatcaaaccatacttgattgtccctttcaagtatctaatcagccattttacagcattccaatgctctaaccca

SEQ ID NO: 285896 - DNA, 630 bp, Cannabis indica
aatgacaattttatttgatagttaattttaattattaaataattagttttagcatttaaatagttagaattggaaaaatagcatttttgagagaataaagataatattgtcaaaagtggaaaaattccaaagtggggcccattagtgtgggcggccacttggttgctaatttccacttaatattttcattattttaatgcataataaatcctaagctaaacctagtggttacctataaatagatagtgatggctcacacttaaagaggatgaaaattcttgccttcaggaaaaattgagccatctattctatacccataaatgaaccacttcttctctttcttcatcatattttcataccttgagtgatagagtgagtgcccacacacttcaagtggtatctcaatcatagtgtgtaaggttgtgaagaatccagaatcaattgaaggacattcgggctcagatcttggtgatactctacgacagacaggatacaagggttagagatctgagtggaaggagccattattattccgctgcaccccaatgtaaggttttctgaaactttatatgtgtttattttcattgttttagaaatttatattaggatgttaatgaaacatacttgtta

SEQ ID NO: 285897 - DNA, 431 bp, Cannabis indica
aaatgcattgctatgtcattcagtagtttcatattttgcattttcggtgcccggtattttggaacccggcgtttggctcagtagaaatcacaacttagtatgttagtagtttggggcggtgttttagacattgggaatgtcgggaatggccgggaatttagaatttcctaaaaatcccctttagtgatttttatgtggttttagtgtggaggggcaaattggtctttttgccccattgttgttttgtctttagtgagtttattaaatgaaaatagatgtttattttatgtgtttaattggctgaaatgaggttatatgttatgtgagtttatttcattttatcaaaaattactaagttttaaaaaaatagaaaaaaattggaaaagctctctttctctctttccctctctctctctctctctctctctctc

SEQ ID NO: 285898 - DNA, 559 bp, Cannabis indica
agcagatcatacgcctcgtttgcacttttcctcataaatgctccaccagctgctgcatctataagggttctagtgttacccaccagcccgttgtaaaaattgtgaaccagcatccacttctcaataccatgatgagggcactttctgatgagatccttgaacctctcccaagactcatggagagattcattatccagctgacaaaaattgttgatttttcctcgcagcttagcagactttgctggaggaaagaacttagatagaaattttgttgccaagtcagtccatgtggctatagaattggtggcaaagagatcaactaactcttggctcattttctcagcgagaatggaaacagtctcaaacggatggcatcatcactaacaccattgactttaaagtctcacacaactccataaagtttgacaagtgcagattggggtcttcggaagggagtccaccaaactggactgaagattgcaccatttgaagtatgacaggcttaatttcaaagttattagcatccactgctggttgcctgatgcatggctgaaccccc

SEQ ID NO: 285899 - DNA, 814 bp, Cannabis indica
gaagaattcatctttaaagggagttttatttggaaaatccacaatgatcttacgatcgcttgtgtgagtcccaaggtagtaaaaaccccatgctgcattcttcctcgcaggaacagccttgacagagtaaggatactctatttcgtggggagtggggcactccaaattcaaaattttatacaaaaccttcaaacttgtgaggattctgtatgaaatgagattcaattggaatggggcaagcccgagatggtttaggaagtccttgaaatagtcttgcagggggataatggctccagccctgatgtgttcgaggctctaagcgcctatcccaattgagccactcgtactggccttgccactggctcctcagatgcttcgcgagtaagtcgtactggtggataacaactgaactcgccaacaaccaccgatctaactcggcagtcctgcttatattcaataccacaagtccttagggtattacctacgtaatctccaatggctcgcacctaaaactctattagttcagcctcgaaggtgacattaggatcctggggagtcttcgatttttgaggcttggaggtcatgatttcaaagtccaggtcacctggttcaaagcaattgtgactctaggtaaaataaaggcctagccagaggaatagacgataatcagggaattcacgccaagcaggatctcgcaagaaccgacaatttccttctgtaattcttgcaggaagcggttgtggcgactgacgatgtcatcttggtaggtttttactaagtgttccctaatttttgcatcatttatctctaattt

SEQ ID NO: 285900 - DNA, 131 bp, Cannabis indica
tgaccagtgaaccgagtataggctgatactgtaacacatcggtacaagctagagtatgactagcagctggagtatgaccagtgtaccgagtataggctgttacttgtcaatagtaccgtcttatgaacgtt

SEQ ID NO: 285901 - DNA, 445 bp, Cannabis indica
aactccattgactttaaaagtttcacatagttccatgaagtttgataagtgcagattgggatcttcataagggagtctactaaactagactgaagactgcaccatttgaagtatggcaggcttgattttgaagttgttagcatccactgctggtggcctgatgcatgactgaacccccgtaagagttgggaggatataatctctcaagctacggccattagcttgatcttcaacggcacctccgttattaccgttgtttcctccattatttccaacattagcattatcagccatgatttctggtgtttcagcaggtgctacaactctctcttgccttttattccttctgtttctcctacaagtcttctcaattttaggatacacgggcaatatgactccttacccttgacggcgcatacactcaaaatccctgagatagataaaa

SEQ ID NO: 285902 - DNA, 648 bp, Cannabis indica
ttttatgtggaatgtccttatgtcttttgactgatgtgactcttcatagtgtagccgtcgatagacttaaatgatcattactttgtagctacagatcgggggttgtgccgtcagactttattgcgtgtagcagtcccaacacgcttcctcccatgcggcattaaatgcgacttgattgctcaggggaagcctgacacctcgcggagatgccttagcattacttgggcttccgggagcgcatggggctccttatgtcttctccgggaggtatgttctgggtgctgccttattacataaagccttagcaaatagtttaaatgataagttatttgatccacgtgtccttgtctagtttgtccatgtatattgggcaaaatcaggggcaacatttacccccaaggccttgtttattgaaaaataaagcatttaatgatggcttttaatgcagtgattcacttttaatggagcgattcacttttggcagaggtcgattcgtttcacgcccattaattgatacggcgcattaattgtgtcaaacggatactcaaacgtttccaccgccttaattacaaatcaatccgatccgttgatccttgggaattcgaatcgtgtgtttccccaaccgttcgattggtaggtgatagtgcc

SEQ ID NO: 285903 - DNA, 575 bp, Cannabis indica
gagggcgcagttggatgtatgtcggagtcggctagtactccagggagtggcggggctcctactcctcctgcatcaggatttagcaggggaagtagtggttcggccatggaccagaagaagagaacatccactgcatccggtggctcggggcagaacaagaggttccgggggaaccagagtagaggcagccgtcagggtggtgctgagacccggttttcgtacccagagtgccctagttgcaaaaggcatcatatgggtgagtgcagaggtcagggatggtttcagtgtggcatgctcggacactacatgagggattgtccccagctacgaccagaggcacctagggctccggcgagacccactccagctagggtgttcgccatcacgcaggctgatgcagatgccagcccctcagttgtaacaggtcagctctcagttaataactcgtattactcagtactgtttgattctggggccacacattcctatgtggcagccagaatcttttgtacgttgggtagaccgtttgatagttatgaatcagggtttggaaccctattacctggcggagagtt

SEQ ID NO: 285904 - DNA, 691 bp, Cannabis indica
accttagtattgggtttatgggcattttagtcttttggttaaggggagagtgaggtggctgcccaattaattgacacctagcaaattaaccttcagcaaagggttaatcaaatccttttccaatttaggaaatcaaagaaaagaaaaagaaattagaaggaaaaatcattttcctcttgaactctctctctctctttctttcggctgggacaaaccaagggcaaagaccagattttccctttcatttctttgggtttaagaaaggattcaaagctattacaagtgaggtaaaaccctagaccattggttatatgtttttaaagctttttctttggtttgagtatgtgaaattgtaaatcagtagctgttaggttttcatatgcttagggttcaaattttagggtccttttgagttgattttagttcctagctgctgattttgctgattgggttaagttttgtgcaactttgaacattgagttcaaagctttgagctttaatggtaatttgagatttagtgatttgttctgtgaaatactggctgggttttattgtttatgcattgaataggaggtctggaaggtttcatggaaattggtggagaattgagcaacaaatgaagagtttggggaaacctggtgcaaaccggctagccggtttgcagtgccacaaaaaatcggctagccggttt

SEQ ID NO: 285905 - DNA, 719 bp, Cannabis indica
atctttgtcttttcactcgctctgcacttgttgttgctgaattttttgctgaacgtttaaaaatatcatcaacaagacgagagcctatacaactagcactatcattatcatcaatatcttgtatgtctacatgatctaaatcattttccatctccctttcatcatcagtattgggtggacctgaagcagcagaacgatggtgtaaaccagtcgcagttgatttactaaaaattagttccaacaatctaaaatgatcacatcctttcttttgatattgtgctgcccttggatgtgcctaaacaaagaaaaggaactaacttatcactttatttgattaaagactaactcttttaaataataaacttaattagttcttacccttatataattctgccatacttcttcaggagcagtcacagtatctttttcacgactccatccaaatccagtttgtttcgacaattcagaaaactcacgatacctggtgcgtaacctatgaaacttttgcttaacttgtttcattacatactttcgcttacttttactttgcaaatcctcaagaattcttgcccatgtctttgagctaaactgaccacttgtcatatttcccttattcacttcatcaaccatgatatcaataaaaatttctctatagttggtccccacaagcatgtatcatcatctatattctcagttgtcatactcatttcaaatctagc

SEQ ID NO: 285906 - DNA, 501 bp, Cannabis indica
attgatatcgtttctaatgtattcagcgtcgtcttcctcaatgttacgatcaattcccatgagttgctcatgaattggttgtccaacaatgaagtcatcgtaacataagtcagcattctcctcatcctcttcagtctctaagaacctcctctctggtgtcgataaactttgctataatggtattccttaaccacccaatgattcggttataatgttttactcaacacatcagatactccatgattcggttcgttcaactttgctataatggtattccttaaccacccaatgaaagtttgacgatgttggtctgcaacccatttttgtttatttttttgatttcttggaaccattgattgtaacagctccatatggtcactgtaaaacaagtaagataaatcaagttgttgttcatcgtgacttaagtaatgttaatcaaacaaaaggtacttacgttatatatggttgaacctctgcgttattgttcatcacgactaattg

SEQ ID NO: 285907 - DNA, 541 bp, Cannabis indica
atttttgtagactatatttataataagagaaatgttaaagggcaccagtggtgcctagcaccctcctatgtgtcaatatcgctattggtctaactaagtatcgagtcccatataatttaatataatagcttttaggaagtatcgatagccagtcgcaacgcgacatgtcgagaaggtgctaggcaccactggtgcctaatagcaatgctcttataataattatcatacttactctattttaagggcggagagtaacgaaacagaaattaaaaacgcaatagcaaactgcttgacatatgaatcttctccaaaatcttttgttggattacacgaaatagtgactaacatccaaatttcagagttgacgaaaaatctgcaactgaatgaggtaaaaactactacaatatttactttataaaacttttgtttcaatatcttactattattaacaccatttgatttggatgtagaaaaaatatttttggattgaggcggcaataaaaataactgatactctccagaatttttattacatgtcatg

SEQ ID NO: 285908 - DNA, 564 bp, Cannabis indica
aataccccaaataacataaaatcgaggaaaactagggtttctgaaatttccccaaccggtagaccggttgcccaaccggaattccggttctgggaattttcaaaacccatccggaattccggatgcacaaccggaattccggttcctcgcaggcagaaattcaaaaattcacacaatgctcaaatctaatccaaacaacctcaaaccttccagacctgttctataggacccaaataacatttctaaggcaactacacagtccagaacacacataaaccaaaaatgccattaaagctccaagctttgagttctaaactcaaacttgatcaaaccccactaacatgcattcaaatcagcccaaatctacttaatcatgcataaaataacctctgaaaataaaagcaaccatctacagcaagcaattaacagattcaacacaattctttgaaaatcatatttttgagctcaaaacatccaatcttgaatcaaagcaactatcatgcattaaactagctctaatctacttaaaataacaagattaaatctctgtaaactacaacaaat

SEQ ID NO: 285909 - DNA, 893 bp, Cannabis indica
attcgatggagaattttgtccatcatcacataacggtgagcctcatactgaatctttttggacagtgccctttcttggggcaagtcacctttcgttatgtattcaatgatggggaccatccagctgggctcttgcccaaccgttgttatagcctctttcactttgatgcttggctctgccaagcgttccacgggtactacccccagtttctcaatctcactatctgaggctaacttagccagacagtctgtgtgagcattcttttccctggggatcctttctactttatagtccgtgaactcgtggagcagttcccggactattgctacatatgcggccattctttccccgcacgtctgatactctcccgacacctggttcactaccagttgggagtcactgtagacttctactcttttagcccccacggtctttgctaatctcagtccttctatcaaggcttcgtattcggcctcattatttgaagtcaaaaagtcgaaccgtagggctgcttggagtcgaagtccgcttggagatatcattgcaacccccgctccggatccattctcgttggaggctccttccacaaatactttccacgttgggaccgatggtgtcagtatgttcgtggttgcttcggcttcattacattaggtgatgaagtctgctagcgcttgtccctttatggaaatacggggaacatagtgtaagtcaaattgacttaactccattgcccatttgaggagccttctggtacgcctctggggtttttgcaggtacctgtcggagtgggtggttggtcaacaccttgattgggtgagcttggaaatagggtctcaactttctcgaggccattaggaggcaaaaaaaactagtttttcaatgacggggta

SEQ ID NO: 285910 - DNA, 71 bp, Cannabis indica
ttgaaaggctattcgtgttccttgaattgttagttaagcctacttttaggtcagggtgatacgtacttttt

SEQ ID NO: 285911 - DNA, 534 bp, Cannabis indica
tttattgtcgatgtgttagcgacaatgtcgcgacattttcgcgacattgttgctgatacagaatttttttgtttctgttttatttgtcgacatgtcgcgatattgtcacgacattctcgcgacatggtgacatttttaactgttctgtttaacgacatgtcgcgacactagtcaaattcttctcacgacattgttcgcgacgtttcgcgactttatttacgactttgattaatcttctcttttttttttatgcagcacatagatgccatatcacacttgatgaggaggagacgccttcattttccagagttgtaccctcagccaggtgtgattttggacacaacacttccacaattcctcataggcatttggggctgcgagactggtgacagaagtacgtttgaatggccagatgcagtgaaccagtactatctgggtatggagagccgttacatgccatgttggaaggatcagaacttcatatacttcgtcctgtacttcgatcataaaaaacattgggttgctgttgaggta

SEQ ID NO: 285912 - DNA, 669 bp, Cannabis indica
cattttttaaacttataatttataaataattaaatatttaaaaaaataacaaacttttgaatttgaaaatattatggttaaaatatctataaaaatatctaggttaatttcaaatttattaattatttaatttgtcatataagataattttaatatcatatttcaaataaaaagataaagttatcttttaatttaaaatatgttaaatatcaaaatatctaatcttataattaaataatttataaatattaaagaaattaacaaatttttaaatctcaccataatggaaatatttaaaattggaaatatttaaaattggaaatatttaaaattgaaaaaaaaagcagattttgggaaacaatcccataaaaaatcggatttttggggaaaaatcctacaaaattcgcaatttgggtgaatgctgcccaggaggctgcacgtggagcctctagaggctgcaaatcaagtttacgggggcgggcaggaaggattgcagccccatctgccgagaaatctcggcgggctacaaggtgaccctcggacggacagcagggtgcttggcgagacacacgcgcgcgaatcccaggttgttcgagtgcctggtgcacaacgatgcacccactcgacagccatggagtccaattttccaaaattcataactttctcaat

SEQ ID NO: 285913 - DNA, 541 bp, Cannabis indica
tagttacagaatataattatgtaagtgcagaataaaaaatcagtaaaaaaaaataaaaaacggataaaaatatacggctaattagaattttttttctcaaaactttgacatgtatcaaattataccgcctgaacattttttagacattaaaaattcctcctgaactattgagattgttagatttaagaacttttgtctaattacattcaattttactgtttcagtgattgtttatgagctaaactatgttccctaaactttgatatctaccaaatcatgtccgttgaactttgatatgtactaaatcatgtctcctgaactttcatccatgttagaatttttttttactgaaattagacaaaagtccttaaatctaacaaccttaatagttcagggggaattttgaacggccaaaaaagttcaggagcatgatttagtacctatcaaagttcggggggaaaaattgctaattagccattttttaatcacaaaaatgaaattagaatttttatttttaaaaattgtttttgaaaaacaaaaa

SEQ ID NO: 285914 - DNA, 530 bp, Cannabis indica
gtttttatgtttttgtgaaataatccctatatttattaatcatgatttatatgattattattaatggattaaaagaacgatatatattgttggatatattattgtaatcgggtatatgagtttcgacaactgaatgtgtgttttattgtattcattttttgtttatcttgttcattgaattgatgagtacacgtttggtcttttaaattttatttaaatttatgataatatgttttcttataatcatatatatcataattcatttgtgttcttggaacaagaatgtggagaccttctttattgatttatttatatatactaggttgatgttatgcataatatacttttagttaagaattcaattaggtgatgttaagtgcattacatgtatgtttaattttttttttgaattaagtaatgtattttttttttaaatttttgaaatgaaatttgagattttgatctttaagaaatttcttttaacttttgctacattggtgtattattgtgattatatatatacttatttt

SEQ ID NO: 285915 - DNA, 1063 bp, Cannabis indica
catatataaacctcacttgtgtcaatgaggacattattgtcattacatatgccacaaccattgacatgtcagcaaaaccatggtttcccgtaggtgagacaaaagcaacatctcttatatatatacacatcttaattagactaattaggattttattttaacatatattaaattatattttttaaattttattaacatcattttaacatcttaattagattactaaatttaagaatttttatctaataattttactaaagaatgatgttgataaaagttcagagacataattttataaatataaaaaatttaaaaacataatttagtacatcaacaattattgtatctagtctaatctaacaatctcaatataattctgcattgaaaaatttgaaagggataatttaataaatttcaaaattgagaaggtaaaaattataatcagaatatatataattaattaaaaataattaaataatatgtatatatcatattatgtgaagatgattatgacaattggtttttttaaaagggggaccggtctacttgctatatagctacctcccaaaaaacaaaatttttcaaagcatttgcatattaatttataaattaaattatcataagaggactagtaaggataaattaaatattactgagatgtgtctacattttaaactggccagtttttgtttattataaaatgaacttaaatacaatatatatatatatatatatatatataaaataaaaagtcacacaatatatgcattgaaaaatgcacggggatgagattgaataactacccctaaaagtatgtttacgcaattaccttcttagagtgagtaactatcccgccggagtacgtttaagcgatcactctttaagatgagtaactaactccaaaggtatgtttaagcgggtgagatggacacctgcctatatttggacatagatagcaccaaggtcgcgcgtctcttgatgagacgcatatactattttctttatataaggggtcacccataattgaaaaggggatccaaaaattatcactcaaagagcaaaa

SEQ ID NO: 285916 - DNA, 630 bp, Cannabis indica
ttttttttttttgagtttatttgtgatatgaatgaccattttgtcctagaatgcttttaagtgtgttatatggccttaggggcaatatggtaatttggcctacatgtattatttgtagtaaatggaattatttgtaaaaaagagattgtattttctagtttttcacacccagccgacccctctctttctctctccctaaacttcttttccaagttttgatttttgttgagaaagagcttgaatttttgctaacttttggagcttggaatttggaggtgttggggattgttcttgctataatttgaggtagtaattactgttttaaatttaactttcccttgctgaaatttgttgagagtaatgtttttgggctttgaatgcatgagggtggaaaagaggagctaatggtgatttctttgtaacttgaacttgtttaattatggattttgcacctatgttgttagcaagttttagggttgttttccaagttgagaaatctgatttttatcccaatttattgttgttggatgatggtgaagcatgtggggattttcaagttcttgaattgcatgtatgtcttaattgagttgttcttgatgttatgaacttgtgatgtcttaaactcttgat

SEQ ID NO: 285917 - DNA, 984 bp, Cannabis indica
attattatattagtaaacaaaaaatgaaataaatatatgtattaatatttaatatattgtattactgaaaattaatataccatagttatcaattataatatacaaaaaaaaattataacaatattaaattaatactcaaaaaaatatatatatcactattaaaatatgtatacataccaaaaaaatttatatataataaaatagaaattaaatatcatcttaaataaataatatactctagacaacaaaaaccatataccaaaaaaaaaaaaaaaaaggaaaaaaccgacaaataaaaaataaaaaaaataatataatattattaaaaaaattatatatatcatattaacaaaattatgtatcacatttatgtataataaaataaaaccaaacatgcattatctaaaataaaatgaaatactatataataaaatttatataccatataacaaaaaatatatatcttacaatagaaatatatatataataataacaacaacaaataaaaataaaaatatataagatgctaataaaattatatatcatgtcaccaaaagtacaataaaaaataaaacttaaatattatttaaaaaaatgacattccgtataacaaaaagtacttataccattcaccaaaatatatatactaaaaataataataataaaaatatatattactaatatatatatatactatactaataaaattatatactacaattaaaatatacataccatgacaacaaaattatataccaccattgtatataataaaataaaaactaattaaatattatttaaaataaataatcatacaatcaaaatatataaaaataataattaattatatgtagaatgctaataaaattatatacacattaaaatatttttattatgctagcaaaattatataccactattatacatatcaaaataaaaaactaaaatgtacatctaagaataataatataccatacaacaaaa

SEQ ID NO: 285918 - DNA, 538 bp, Cannabis indica
aaagatatgaaaaattaattaaatgagaaagtgggtgaaattatgagcagatcgaagggatatagaaaacagagaaaaaatttcataaataataacttaaagctaattaaatgagaaaaaattaatataatgaaagaaattatacatgggaaaaatagattaaaaagcttataattattaaatatgaaaaattgagatgatagggactaaaggaagaagatcacataatatattttttttgtgatttgttttatataaattttattgaattgttgtaaaattaagagacaaaatgagaaaagaacaaaatgagaaaataataataaaaagaagatcaagagacaatcatacaaattaatcttttttgcagagattgagaaaacaaagcttcaccaatcaaaactttcctattatttcagagagagccaagcaagtggatcggagggcagtgactttgaaagctgggcaattcgtaggtgtagagagagagataaattaggaaaaatgtttttttcctttcataagaagaagagtttat

SEQ ID NO: 285919 - DNA, 573 bp, Cannabis indica
tgccttttggtttaataaacgcaggtgcgacttatcaaaggctagtgaacatgatgttcgcagatctcattggaaaaaccatggaggtatatgttgacgatatgctcgtgaaatcacaacatgcgaaggatcatattgcccacttacagaccatgtttgatatattacgacggtataagatgcgtttaaatccactgaaatgcgtctttggagttggctctgggaaattccttgggttcatggttaatcagcgaggaatagaagccaatcccgcgaagatcagggcattggtggaaatgccatcaccaaccaagccaaaggaggttcaaagcctcacaggtaaagtcgcagctttaaaccgctttatatccagatcttctgataagtgcaaggagttttttcagattttgaaaggcaacaaaaagttctactggaacgaaaagtgcgagcaggcctttcaagctttaaaaacacacttggggcaacctccaatcttgtcaaagccattgtccggagaagtcctatccatctatttagccgtttcagaatatgcgattagttcggtactaatac

SEQ ID NO: 285920 - DNA, 533 bp, Cannabis indica
ttcctttacctacacatggaagtagaactgtgggtcgacagactcagtaagaaaagcatataacatatcatataatttctgacttgtatttaggcgcccatacacctatttacaaggcttaacagatgagtacaaatgttccatacaagggtatagccactataccacatgcactacatacctcaatgtacgagtgttggtagggtttgtttcataccctgagtaccactgagtgatataccacacactcccagtacctctccgtacttgtgccggtatcacagtactctcagataacattcactataccaatgcactctataccataactgtataagtgttggtagtgcaactaacattttaagcatgcatatacacataacatatacatacactcagatatccatatcacacattatatacagttcttaccttctttccgaattcaagtatcctggctgacctaaacggaagtctcgtgctagatgaatgccctaatcacattaatcacaacataggtgagtgacacgcta

SEQ ID NO: 285921 - DNA, 436 bp, Cannabis indica
attcggcctcgttgttagaagctgagaattccaaccgtagggctgcttggagtcgaagtccgttcggggatatcattgcgacccccgctccggatccgttctcgttggaggcgccatccacgaatacctcgcacgccgagactggtggtgtgggtatgtttgcggtagcttcggcttcattgcacgtctactaacgcctgcccttttatggaaatgcgtggaatgtaatgtagatcaaattggcttaactccattgcccatttaaggagccttctggatgcctctggcttttgtaagacttgccggagctggtggttggttaataccttgattgggtgagcttggaagtaaggtctcaactttcttgaggccattaggaggcaaaaaactagtttttcaatcaccaggtatcacgtctccgctcctatcatgcgct

SEQ ID NO: 285922 - DNA, 298 bp, Cannabis indica
attggagcagtggctcgagatagtgatggacaattgattgaagctttcactgctctgaaatgtggagtcgttcaaccagccgctgttgaagcttttggaattaaggaggcattgagttggatcaagtctaagggatggtctaatgttattgttgaaactgattctattgtgtcagttcaagcactttctagttctctttttatgccttcaatttttggtttgttaattttggattgtaaaagtttgttaaactgtttggttaatgtttatgtgtcttttgttccgcgatctgctaaca

SEQ ID NO: 285923 - DNA, 649 bp, Cannabis indica
cagtaaatggcaactatctcacacaaacaaatttagagataatggtctctcttgctctctcctaaaaaaacaaaactatagtaaaatggttgtatatgtttctttatttattttatagcatcatagtacgtaatatcttttttcttatattgtgaggctaacatatttgatatataccgatgtatatacgtgttatatacttaattagtacatcaaaattttcatgatattataactaccatacagaagtttgaaaatgaccattaccatggctcgaaaatttgaaattcatttacaacattatcctgataactattccttttgggatgatttgggaccatttagatcggggcaaaataaatgataataataatggggtccattgtggagaatctagccaaattttgtttctctctgtgtgtaatggttttgtagtgtgggacgagaggaaggacaaagcaaaaggaatagagaacaaaatatccatggtcgagtttataaatttgtatatatatctttattatttgtttattttatgggtaaataccattttggatcccgtgttttgcaaaagttattaattggacatgtgttttgttaaatgacaaaatagaccttgtattttttaaaatagtataaataggaccct

SEQ ID NO: 285924 - DNA, 784 bp, Cannabis indica
cttttctattcaattatcaataagaaaaagatttattttcattacttgtttagtgtgttatttggttcatgtgatcatttatttgtttatctgatttataaattcatcaaaatccttatcacattgatattcttgtttattgtgtcgtcaccacagtggaaagtaatcaagattgtgtgattaaatgtatttttatgatttatcagtacacagggtttaactgatatgataatttacaatgtaatttacttgctatgtcctttccatgacattggttaaagtaagcttgtgttggaagcatggagtatgcatctgaagggaccgatattgaacttgaactagatatgataaacttacggtaatatctattcaattcaatatcacctagttgatcctagatcaagtgatctcaatcctgagatggttaggttctaattcagttgcattatttgtgttcttaaatctgttcgttaaagtcgaccaaatggttcttctcgtgacatataggttaaggacatggtagttcaattgagttggagcgataatcatagatactgaatctatagcttctatccagatatagaagtcaaacgatgatttgcttcgagcttggcttaatggttgagtactcatttcagtgattatattagttcactggaatatcatttataattagctaagtgttttaaggataaaatacattgaagggtgtaacggtaaattagtccctactcaatgtaaatcatctatagaggatcattgattattgggataataacaaatg

SEQ ID NO: 285925 - DNA, 545 bp, Cannabis indica
acacaacccttttttcattttagctgacttgttaacctacataaaataaaataataatgataaatataccaacacttattaaaaatcaagcaataagttttcatttgaaaatattttttacccgaataagcctatcccacacttcatctggcgcagtaacttgtccagtcactacactaaatcctatgccagtctctttcagtaaagacttgaaatccttgtgcttttgtcttaacagattgtatttgttccttaattgtgtatcagtgtaacttctcttcgcttgtgcataaagctcctcctttatacgcttccatgattgctttgtaaaggttgtagtattcctatttcccttcaaaacttcttcttccataagttcaataaaaatttcttcatgtttttcaggccaaacagaagcttcgctattatcaataataaccacctcactatctgttcctgtcatctattcaatctacatgtaattataaaactaattctaaaacttatgtaaaaaaaacaataaaattaatttaaaaagttacaaa

SEQ ID NO: 285926 - DNA, 841 bp, Cannabis indica
ccgtaccgatgtgattacgtcaaatagtacggtgctattgaccataatatcagcctatactcggtacgctagtcatactctagccgtacccatgtaatactgtcaaatagcacaaaagccaacatacatatctaatgtaatctaacaggcttactaacatgcacgctaaacatgtaaatacatatgcatactgctatactaatcttacctcgattacgaattcaggtgtgccggtcaacctgagtggaacaatctgctcggcgaattacaggctcctaaatcacatcaatcacaacactgataagcgatacgctaaatcacttcccggagacttaaactcgaaactaaaagtttccctatcgataaataacatggaaataccctaaataacacaaaaaagggaaaaactaggattcctaaatttgccccagccggtagaccggttccccaaccggaattccgattctgggaaaaaattcctggaagccaaccggaatttcggttcctacaggcctccctgaacgggaattccgattcagtgcaggaaacaccaaaaaattcatatctcgaccaaatcaaccccaaaccaattcaaaccttccagacctgctaattagaccccaatgaaaatttctaaagcaacaaaacaaagcttcatgcacaattacaaaaatcaccattgatgagccaagcttgagttcaaaaactcaaagcttgctcatccactaattagccattaaaacctgcttaaatcactttaaataaacataatataactacaaaaaacatccccaaacacaaacaacatccacagtagctaaatcaccatttcaccattaaa

SEQ ID NO: 285927 - DNA, 879 bp, Cannabis indica
atcatttggagcttctgcattttctattgtttatttttttttatttagcgtatttttaagtaactggtttctatatttaattttgattttagttatttaggtaattggtttatgtgaattaatttttaatttaattattttacgtaactggtttctctatattagatttttgctaagttgtttattgtaacagatttttgttatttagtttataagttatcgttaaaaattattttatggtatgtattttttcttttttaagtaattgatttttataattgatatatctttttattactttaggcttcatatgtttgttcactttttatttaattgtaatatgaaattggtttctgtattaaattattatttttgttataatacataactggttctaaggtttagtttttaatttggttaatctacataactagtttctcggtgtcatatttttaattagctgataaatattactgatttttcattgtcaaattcaaaggtccaactccgatgacaactcaaacgtccaacattggtgacaacttcgatgtctaactacgatgactttttggtagcgatgacttttccgacgatgatagcaattttgtcgaatgttctcattttattttctacttttattgtggcaaatattttgttttagtagacagtgattgttttgtgtagtgggttgatggtcgagtcttggagtttctcgaaaacttgtaactggttttaaatttggtcttgtattgattttagttttggtagtggcttggaggtcaagtcttagagcttctaagaaacatgtaaaatttatatatgacttttggtatttgtaactagtttttttcgttcaaaaattaatttttaattacatag

SEQ ID NO: 285928 - DNA, 577 bp, Cannabis indica
ccaattatttattatcatttactatttaaccataggttaatcatgtaatctcataatatatcaatcaaccaagttgtcggggtaaggatactatatacataattggcaaatcatgccgaacagaccttactctgttcatcgttactatacctcctacaccccacttgtatctgatttgctactagagactcactttttataattatttagccagggctctttgactcgtacttcctaaactaccctaaaaaataagtccatacttcacttaagcatcttcattccatatatgaatgcaatcatatacatccatttctctttccttataagttcctcacttccaattagataaactttagttattttccaaacaatggctattgtcttattccatcttagtatgttcctctaggatattgctccattactagccctctgggtcgagaaagtttcaaatatttgtctgaattcttagctcttgacaactttaacttttggcagatctgatgtcattctttcctttaacactatatagcatagaaatgccacctctcttgaccaacattaacacttttgt

SEQ ID NO: 285929 - DNA, 780 bp, Cannabis indica
gtgagtaattaaaattcattattcttatttttcaaagtttcaaaaaagttagaaaaattgtgaaaaagctctctcttttcctctctattcggccctccttgggcagcaaggaggtggattttcctttgtgattcaagtgttttccagcaagtttaaagtaattctagtagaggtaaaccttgttctagcttcttttctttgttttcttggaattttggaagaatttgatggtttgcatgcttagtttaggttgattttgttgctgtttcagaggtttaatcttgttattttgagtagattagagctagtttgatgcatgttgtttgctttgattcaagcttggtagtttttagctcaaaactatagttttcaaagaaaagtgatgaattttattgctgtagttgttgctgctgtttaaaggtgttttctggagttttattatgttgaaataggttgagttatacttgttttagtggctgtttggagggtttgtcaagttttgagtttttgaactcaatcttgaacctccaatggtgaaatgagtttctgtggttgaagctcgattttaatgctttggatttgttcttaggggtatctagaacaggtctggaagatttgatatgctttggtttcgatttgattgagttatgaatttttgaaattagtctgcgaggaaccggaattccggatggggttctgaaattccggatggggttctgaaattcccagaaccggaattccggttgggagattttcgggaaccctagattttctcgtttt

SEQ ID NO: 285930 - DNA, 226 bp, Cannabis indica
gacacatcccggagaggcttcatgctatacgagcttccgggagtaccttgtattccgggtgtctcctccgggacctatgcccatgtcgctttcctggtggcgtacaaagacttatcaaatacttacaagttatctgatccacgtgtcccatttcgactggtccacgtattttcggcgaattaaggggcaacattcgttgaatccactcatagaacttagaattgca

SEQ ID NO: 285931 - DNA, 621 bp, Cannabis indica
ttattattattaattaattaatgactactttaggtcttaaatatttaaatttaatttttgtaaataatatttaaatttaatttttgaatgttttaatatttaagttatattttttgaaatttcggtaggtactagtcattattttcttatggttaaatagaatttttgttcgcttaactttgaaatgtatcatattatgttcttaaattattcgtgttattaaaaatttctcagaacaattaaaattattggatttaaagattttttatctaatttcattcaatgttgttagtgttacgattgttcgtgtactaaatcgtgtccaactttaatatgtattgaattacgtctctaaattttcattcacgtgagactttctttagtaaaattagactaaaattcttaaatccaacaatctcaataattcgagaagaaattttttgatttggtacatgtcaaagtttggagtacaaaaatctaaattaacctttttttttatgggtataactaaattaatctttaaataaaaaataaaaatattatgacctgaaccaattaaatattatcacgtgatcattgacttaacgcttaacaatcaattatttatggaagttttaaaaa

SEQ ID NO: 285932 - DNA, 733 bp, Cannabis indica
tatttgaattcagaatgcaattttatgtcacatgtagaaatttcgtaattttgcatatttttgtgctcggcaacattggaacgcggtgaatggctattagaatcacatctttgcatttttagtttaacggggcaatagtttagacattgggaatgtcggaaatagtcgagattttagagtttcccaaatttcccctaagtgcccttttatgttgtttttgttggaaaagggtaaaatggtcattttggccactagtctttttgtctttagtgaattaaatttattgttaatgatctgatttttattagttagctcaaattatttttagaaaagctaagttttatttcattttccaaaataagaaaaaaaaaaacaaattgaaagaaagaagctctctctctctctttcaaagttcactctctctcgtgaaccctagaaactagctagggattcaattgttcttcagcatttcaagcatagtaagcagatattttgtgaatccaagctctaggtaagatctcaagcaactcccttttagtttcttgattttaaagaaagtgaattatgcatgtttttgatgttttgcttgctgttcttgttgttgttgggttatattttcagtagttaaattatgtttttatagagtgatctgagcaggttttgataggtagtttgttggatgagcaagctttgagtttttgaactcaagcttggctcatcaatggtgattttg

SEQ ID NO: 285933 - DNA, 707 bp, Cannabis indica
ggcgcaagaattgcccttgtcacacctgggggtaacatctgcacgcagcggtcaaattcggattcaaagcctccaacaacgaggccgaatacgaagccctaatcgctagactcaaagtagcgaaggagatgaaggccgagcacatcgagatctgtagtgactcacagttagtggtaaatcatgtatatgcgaataggaggcttggggagaaaaaatgatagcatatctgagcaaaatacatgatctgctcgcacaattcaaaagctacagcctcagacaaattccaagagaagaaaatacaacagcgcgttagcccgattggcgagcagcaatataagtgataaggcgaatctggtcccgatccagttccttgaaaagcctagcatcactagcacggaagaaattgaaatgatcgacacatctccgaactggatgatgccaatagcagcctatctcaattctggggaactcctagataaccgaaatgaagctctaaaaataagaagaaagggagcacggtacatcatcgtagacgggatcatgtacagaagaggattctcaatgccattactcagatgcgtcacaccaaatgaagctgcacgacttctatatgaagttcacgacggattctgtgaaaatcatgcagccagacagagcttatcaaagaaaaaactaaggcaaggctacttctggccgacgatgattga

SEQ ID NO: 285934 - DNA, 614 bp, Cannabis indica
tggagtagcaagaaggtgttcttaacaactgaggtaagaagagtggacatctgtgcacagggtgtatgttgaaacatacgactttattgtgggtttgatgttcatgtgtttatgagattttgtactgtgaattgttgtttatgttagtattgttagtatgtgatagtgataaggcttttgactgtttgtgtgagaatagcacttatagggtaggttttctactgctggtgtgagcatagcactgcaggatatattttggctgcttgtatgggtttacttgcaggttatcctatcatgggtgagtacaacttgtgataaggggttgccctattggatgccgagtgtgagaacagcacgaggcagggcaggttacacttcatgtctgatcaacatgagtgggagtatgttatcgtatgtgaggacaatgtgcgataagatactgtgtgttatgtgtgtgagtatagcatgcattaagattacactgtgatatgatgttatattatatttgagaatagtatgtgatatgatatgttggtatatgtatgctagcatggtatgaattaatttgatgttgtgatgttattagtttatgactatgttatctagttgggggg

SEQ ID NO: 285935 - DNA, 529 bp, Cannabis indica
gtggccaaaggatttacacaaaaagaaggcatagattttaatgaagtatttgcaccagttgcaaaatacaaaactataaggataatgctaagtctagcaactcaatacaacctggaaatagaccaaatggatgttacaacagcatttctacatggtgaactagaggaagagatctatatgaggcaacctaaaggctatacagaaaaggggaaggaaaactatgtctgcaagctagtaaagtcactatatgggttaaaacagtcacctaggcaatggaataaaaggtttgatggattcatgctaaactgggattttctagaagctactatgatcattgcctatactacaaaggaactgatatcaacaaagtcatatatctacttatgtatgcagatgatatgcttataatcagtaaggaaagagcaagagtaaacacaatgaagggcctactcaagactgagtttgaaatgaaagacctagggcaagctactaagattctaggcatctctattaagagaaacatagcaga

SEQ ID NO: 285936 - DNA, 586 bp, Cannabis indica
ttatatattaattataattttagttgactttttttgtgaaatttgtaacacttggttgttatatatatttattttcatgatgttttgttatattttattacttagaaatattattgttttagttgtttcaaacgtttagttacattacacttgtaacaaagatatttttatggagtattaagcttaaaaattaatagtgatatttagtttttacgtatttatcttcatatttttaagttaatattaaaaattaggtgtataattagatatccaattaaaaaaccgatccaatctaattagtaattggatcggattggattggattttgaggtctaattggatcggatcggatgatttttcaaatcaaattactaattggattggattggatgaggaaaaaaatgttagattagatcggatgcacacccctactttaaaccatcaagaaagtattaatgttattttcctcaattcaacctttttttttctaggaagaacatattttcattcaaagagaatacgaataatataagaacaaacgacaacaaggccaatgaaccgacaaaacaagatacgacacccttca

SEQ ID NO: 285937 - DNA, 823 bp, Cannabis indica
aacccaagcactagtcggctgagatgtgttctcagtgcagatgaagcttgtaaattgatgtgtgatttacagcttgacttttaattcatatcttgaaatcaatcaatctaaagatgtacaacttggtaacttgaatcattaaaatctactagttgcactttcaattggtatcagagcttgaaattttataaaaatttgtgttagatcctactactgtatgattcttgatcgttgattcttgaatcaaccttaacgatcgattctgtcgcaactaacctcctctgagttctctctcaaagaactacagaacatttgtgtgtctgtttaccacttctgtgtgcaggatggaaatgtttagagaaggaggctccacctcgagacctcctatgctggaaggagccaattatccatactggaaaaccaagatgcgtgctttcttgagagctgtagatgaaagagtttggatgtccatagaagaagggtggtggaaaccaacgatgatggagaatgaaatcgtcatacccaaacccatgagtcaatggaccactgttgaaatggaaagagcgaatttcaactcaaaggctcttcatgccttgtttaatgctgtctccactaaccagttgaaggttatagccaattgtgaaattgctaaggaagcatgggagaagctaaagattaagaacgagggaactgatgctgtcaagaaatcaaggctgcgtgccttggcaaaggctttcgaaaatctcaccatggaggaggatgagtctgtggctgaattccatgcaaaactttgtgacatctctaatgaatcatatgctctggg

SEQ ID NO: 285938 - DNA, 687 bp, Cannabis indica
gctaacacccaacagttatcgcactgttctagcattctatgcgatgtacatggagtacgcccatagggctccgtcagtagaggagtttagttacttctatgacataaagagcgtgggtcttcataatggcttcttttgctttagtaaatgggcgacttctgaaataaacggtgttgaggggatggtctcgaacatgggcgactggaagtcgaaatggttttatgtttttaaggttcctgggatcaggaccgactttaatcgcagacccagtatgtcgcatatttgttgacttagataaaatctgttactttgtttttcgagatcttttgctaactcgttcttctttgttgtcatcgcagatagaccagctcgaccaacgcttgacgcgaataagaagggggtagctgaaattcttgggagtcttccggtacaagatcgcgactggcgattactgtgtacgactgccaaattgcgagaacacaaactgatccctgagaacgcgagtcttcaacgggagccagtatataaagaaccatctgagaaacagcaggagcggatagataaacgtctttctaagcaaactcctcgacaaacttcaggtaactcgtccttttgctataaattgacgggtaggattgtgatttttacttatctgttccttgtgttgtagacatgactttcttgaag

SEQ ID NO: 285939 - DNA, 600 bp, Cannabis indica
ggagtatccattaactaaaattattttcatattataattcgttaatataaaattacttttgtaagtgggttgcttaatgcacatttacttttcactttaatttaacatgtaatttacattagtttaaaaaatataatgaggacattatttataaaagttgatatatctgacaaaaacgtagaaataaaataaaaattaaaacaaataaaataaaataagtatacaatataattgtattttttttttagcaaaagttattgagtgaatccctattttttttttaaatgataatataaatttgtgtttttttaaatattacaaaatagtattctaagctttctaattacttgttttaatttttcaactcgttaaaaataataccgaacctattatcagtcttagtcttgtaaaaggttcattttgttaaattttgtcacattatatagactaagagaatatataattggttattactatcgtcatcgccaaatgtatgtctctattcctttaaaaaattaaagtttttaataatagttttactatttttttccaattataaatttatttttagtttaaagatttattttttttaaaaaaaaa

SEQ ID NO: 285940 - DNA, 75 bp, Cannabis indica
agcgctaaacatagatgtggaatctatagcttctataggtatttaaaagtgaaacgatgatctccttcgagcttg

SEQ ID NO: 285941 - DNA, 514 bp, Cannabis indica
ataaatcgcatgtaagtaagtcgcacagaaaaaatgaaaaacacaataaattaattctgttaagaaataacttacagcatcgtcgagccattcgttcagcaccatcaatttcacgaaccaagatctagtggcttcgccagtgtgaacatccctaggacggccattgtccctagcataagtaatccacttctggaaaaattttaacagccgggggtccgccggtttcagtgtgtctactaccacgggcccatgtctttgtttcttcttcccagctgtgtagtcattcaagaaaaccggcttccgctttcgcctaagcctacagaactccaccccatctggtggcccctgcaactcttccacatcctgagattctgtatcacccagcgaaatgacaatggcgtttgcaggagtagaaggaacgtcacatacgtcaggttgccaatcttctgggtagacatcatcatcatcatcatatgtcggcggtgatggatgtaccgtctgtaatggctctgcc

SEQ ID NO: 285942 - DNA, 333 bp, Cannabis indica
tatgattataaaaataattaaattaaaatacttcaatttgaataccaaaaataataaaaatagaacagaaggtcctttgtagcgtatatttgcggcagtcattttaaaaaggaaaaattccactttactacatataatttcactttattatattaatattttaataattactttctttcatttttaacttatatttttatattattattatttatataccgacttctataatgttatttggaataattacataaggcactattttttataaaatatttacatttttacgttcaaagaatgtttttttacatttttacggttttccaaaaaata

SEQ ID NO: 285943 - DNA, 567 bp, Cannabis indica
tataatctaaaaaaaattacatcaatactatagtaaaatatttatccttgtgtatttttgttattttcaaaatttttaatggtaaacttattcatattaaatcattaagagacatgtagatagagttatgtacgtgaaaatactgttttgatttttaatgtttcacaacagttgcattacagttgcctaaacattttgctaacagttatttcgtctgattgaaaccttcgtctgatgcaaccttcagccaactacctagcaaccacctagaaactttcgtctgattgaaaccttcgtttgatgcaatcttcggccaatcacctagcaaccaccctgcaaccatcgtctgattcgtctgatgcaaccaccgtgcaaccacgcagcaaccaccctgcaaccatcgtctaattgtgtaagtgatgatagtgtaagtgatattttagtaattaaaattacataaaatgtataaatgttgtctttaccttatggaggtatttttgtaaataaatatcaatttatattttctatgtaataattcctagttaaaatgtatattattataatttt

SEQ ID NO: 285944 - DNA, 820 bp, Cannabis indica
agagtcatatcttatattttgatgtatgttatttgctcggggtattttgtttaatgctaatagtcgggttttggaaatgaccaaattgtccttaggttgtttagtttttgatattttaattgatgggtaaataggtcattttgcttttagtgttttggcttttagtggaaagtagaagcttccttttatttaacctatgcttagataataataatattatcaaaggaaagaaagattaagtgagaaatagatgatcaagcttggaattttcctctttccctctctctttcgtgcaccctagaaaaccagcaagaaaaagggtttgaattgctgattttatagtctttctaatctcttgaaggagaatttgtataaggtatggattcctagtcttcttctctttgtttctagttagtataaagttaggttttgagatttaaattaggaattttggttctgtagttatagttgttgtttgaatttaatttctgttgattaagtgagtttaattgagttgctttatgctgcctttgttagttgtggtaaggttttgacaaggtttgagtttgagaactcaaaccttgacctccaatggtgtttttggaatttgaatgaattgttgtgatttgtagcttgggtttggtttaaaatagtgtatgcaggtattctggaagtttttagaagatttggttttgatttgagtaaaggggaggaatttttgggttcccagctcagaaccggaattccggttcctggggccctgttgcaaccggtcgaccggttggtgccaggaaccggacttccggttggcaaccggttt

SEQ ID NO: 285945 - DNA, 362 bp, Cannabis indica
acccgacctgagtacttttgttcctgaaacctttacgcggagtccgcccaatagaccattcacttatagcgaatgtttaatagtacattaatgtggtctacccgacctgagtactttgatatggtctatttgacctgagtactttgaagtggtctacccgacctgagtactcatttgtagtatttccttaaatgttctccattccagtatcgtggtactaaaatgagttgcattttttcgtcatacttacccagtttgtatgctccggagtcgggaacttcgaccacctggtctttggtgtttaggaatacccacttaggtaccatatctcccacaaagaatttccgagctttcacttgttt

SEQ ID NO: 285946 - DNA, 730 bp, Cannabis indica
aatataatagaaaaatagcaatggtgaaggaggaaaattatttatttctttgacgtttcaatattaattgtagccacagctcatctggttcccaatttccttctatatacgaataggactatggctgcccatttaataccatacatttcttcttcttctttcatgtatatgcatggtttctcttaaataaaatattattcatagtattattagagtgagtagcaaaaatggctacccaaaagtgcagttgcgtagtttcaattggcgctgttcatcgcagttgcgttacctctcctcactattcttccacagtaccttccacatttggtatatgtttttctcaattgtttaattatttcgttttctaagaaagcatcacatcacctcttctaaataatactttttatatctatttatttttcctttttaaaattattgctcattgtttttttaattatttattaaaataaagaggagagtcatattcattcattactaaattggttaagtcataaattaaataaaaattctaatcaccaaagtaatttaatatgttttttcaaaaaaaaaagtaatttaatatgtatatatatagagatctaaaacagaaagaaaataataaatctatagaaaattcatcatataattttaaaacaataatcatcaccgtatctcatttatagtcactattaaatttaaaattgaatgtcatcaccgtatctcacttata

SEQ ID NO: 285947 - DNA, 703 bp, Cannabis indica
atttttttgaaataaggacataaactaacatagttttgtgatttggggtcatttactataatttccctttttttatatcgaaaacttccctatcgtcaataacttcgaattattcatgatttattcattaactttaattttttgttggtatttttttttcaaaattatattttataatatatttcttggtagattattaattttgtcaatattctctctactttattttttctattacatatatatatcttaaatctttctctcactcatcaaaatatttttcgataatttagagatatatagactttttttttatattgacaacttcatggccattgataatttcgaattattcaagaattatttattagtataaattatttgatgtagaaaaaatcaattttttttaacgatagaactcttaagattcatgaaataaggtcataaaaagttatagattaaagttaaaaatgaaaacggtaacttaacatcataaaacacgtgctctacactaattttcctttttttcctaatatatttttcaagtccatatatttatataaaattaaagtataaatcagtgatgttgaccgaggttttcggcaactaataaaatatgaatataataatgagctgtaagaaagcgagatgaagactttttacgtggttggggcgttaatgagccttagtccacgagccactg

SEQ ID NO: 285948 - DNA, 695 bp, Cannabis indica
ggcataaaacccaacataaatgaccagtgccgcgatcaaggagtccttgtccccgagggaaaaattccagaggtcgaagcccaagaagacgcagcccatggagacagtgaagtctgaagttggccaaatctcctccaaagaaggagtcctcgccgaaaaggaaaggtggaccacgtttcgttaactaaaccgaactcgcggtgccacgagaccacatctatgaaattgaggaaaggaatggagtcttcaagaagccgccccctattaagggaaaccgcgacaagagagaccccaaaaagttctgtaagtaccataaagatttggtcacactactttggaatgttgggtcttgctggatgaaatcgaggagctgattcgaagaggaaagttcgacaaatacaaaaagaacgaggaaggtcatccccgagcggatgacaaagaagaaaataagaacgcgagtggttcgagaacacctcgcaacatattaacaatcattggagggccccaaatcgcaggagactcccgcaaatctcaagagcgatatgccaaggaagctaaagagaagccgctcaccaatggaaaacaatctcagtgaacggccagagaaattgtttaaaaagagaatgtgacgacatcacctttatggaaagtgatgcgagatgggtccagtcacccgcattctgacgcactagtca

SEQ ID NO: 285949 - DNA, 607 bp, Cannabis indica
ttttttctttttaatggggcaatttttttcaaaaataatatgcaatgtgttaaattttcactgttgttttacgattattttttagttgtttattttaattgttctgttttattgttttataaaaggtaaatatcatttcgaaccctgtgttttacaaaagttatcaatcgaatcctctattttgttaaatgataaaatggatcctgtatttttcaaaatagtataaataggatcctgaccttaatttttgacaactttttatgaatataatcaacttaaaaatacaaacagatacagaaaatgtaaacagttttctcataacacttttagatcggatcattattaaattttattttgacaaaaaaatcagttcagagtcctatttataccattttagaaaatacaaggtccattttgtcatttaacaaaatagagagtccaatcacaatcagtaagttttgcaaaatacacagtctaaaatggtattcacctttttataaaaaaacagtatttttataaaaaattcccgtgtgacagtaaaattctaaatttttatccgaaattcagtattttcgtaaaaactcgtaaatttaaagagaagaataag

SEQ ID NO: 285950 - DNA, 586 bp, Cannabis indica
attatggttatttttaaaatttaattagtttagtttagtttattaattttaataataagattagatatttatatattttattaataaaatttgaaattatcttattttgacattaaaatattaagaacacttaaaaataatctaaaaaaaattttaaaattgctaaccgtgtaagtttttcaaaatttttatttttaaaatatattattaatttaattataagattagatagatgttaattatttgacattttatcttattatgaaatttatcttaataaaatttatattttttgttaaaatgacatgcaatttttgaataattagttaatttttttaatagatatttttgagtttactaaccattaaattttcacatttaggatattttattttatttatttattaaataaaattaataatatcctaaccataaaaatatcatatttttaaatttatttattttgttaaatttaatttattaaattataagatttgaatataacattagaaatatctcaatttttaaattaagatattatattatattatcttattagctatttaattaatttaaattattttaa

SEQ ID NO: 285951 - DNA, 563 bp, Cannabis indica
gatttaaaccaaaatcacaataataaatgcaattaataacgccgaaattcgtaataaatgtaaataaaagacaccggaatttaaagaggttcggccccgaatgtcggtaatagcctactatccttgagttttattgatatgagttgcaatagtcaagaacaggctcttgattgcaaagaatgagaagtctttatttttctaagtgtttcagattgcggatccccctcccaggtcatgggtgaccccttatataggggagggggtacagtgcttctcgcttcaggagacgcgaccaacgcggagccatctcaaccgtctccttgattttggaggcggttggagtctgatatttaagaaaatatcccgctattttcgtcggttgacaactgtctttgagcctttcgcgggatgtgaacatttgaaggagtcactgatgacaagggtcccttttgggtgtgaccatacttgggggtaacaccctcgagactctcgctgaggggggatgaccactatcatagttaggtgactcccccatgatccaacttgagagagagggggggtcc

SEQ ID NO: 285952 - DNA, 604 bp, Cannabis indica
tcctgggaagaagcttcatgttaaggaataaaaaagcaatatgtgagtaaggtggtcataattacttgagcattcaaatatgactccttcctcacccttttctaattatatttttataattgtatagtcattagtcaccatgggtgtgggtgagatattttatcacttgagtatcacgtgcagaggtttggtgattgattggatcaaagaacagttgatcacattcacatttacatgtccaagtacataccaccatacacatgtgttgacttcgcttttagccaacgataatgagtctttttaataagcgaaaaacgatatgtcgtaatgagaatatatatatgagaaaggagtaataagacacaggaattttatagaggttcagccccgagtaattctgtaatagcctaatcctggttatttgtattgactttagaacaaggaagaagtttccttttcttatagctcttacaacagtatctctgaataataattcttagataataatattaccttagcttaactgcgtatcggcttataatttctcggtcctttgcccagtgaacattcctcactatttatagggttgggaaacttgaggagg

SEQ ID NO: 285953 - DNA, 1338 bp, Cannabis indica
gtatgagtagtgcccacacacatcaagtgatacctcaatcatagtgaggaagatcgtgaagaaagatcatcagcaaaggagtttcagcatcaaagattcagagaaagagatccaggttcagatattgataatgctctgctacaaaaaggaatcaagggctagatatctgaacggaaggagtcatattattccgctgcacccaatgtaaggtttcctaaactttatatgtgtttatttcatcgttttagaaagttcatatttaggatgttaataaacatacttgtgagtagatctaagatcctggtaaaataatttccaacaatacataggccacaacataatgatatgtcaagacttaattaggcattatgggaagaaatctaataagcttggttgcatgatcaagttagatcttcagaaggcttatgatatagtagaatggggttttattgaggaaattttagctgaatttaaatttcctcctcaatttattcaccttgtgatgaattgtgttagaacctccaaattctccctaatgtttaatgggtcaatgcatggtttttttgcttcaaagagaggattgagacaagggtaccccatgtcccctctactatttgttttgggaatggagtacttgacagaatcatgaaagagtgggagaaaatctgacttctggtttcatgatagatctgaacactacaactatcattcaacttgctgatgatgtgttgttatttgtaatggtgattacaaaagtgtgatctatttattgcagggtctgaaacttttttcccacacttccgggctgttcccaaatgcagccaaatctgcaatatactgcactaccatggcagagcatgatgtatctagaatacttgcagcttttggcttctctcaacaagagccaccttttacttacttaggggtaccaatctgtgctaagagaatttcgagcaatgattgttcaattttagtagaaaagatgactcaaggatcagaacttggagcactaggcatttatcttttgctgggagagttgtctggatcaattctgttttgctaagtattcatgcctactggagtcaagttatgttgctgcccaagaaagtaatcaaggagtatagaggcaatatgcagggccttcttttggaaaggccagcatctatgccagcgtgcatgggccatagcctgggacatgattttctagacaaaagcagctgggggattggattcaagagagtaaaagaatggaataaggctgcaaatggttaagtatgtgtgggcagtttgcaaaaaaaaaaaaaaaaaaaaaaacaaaaaaagaaaagaaaactagag

SEQ ID NO: 285954 - DNA, 548 bp, Cannabis indica
agagatccaaagtttacatcaaaattttgggtgagtcttcagagagctatgggtacaaagctgaagtttagcacagcttttcacccttagactaatgggcaatcagaaagaacaattcagatactagaagatttactgtgaacctgtgtcatggactttgagggttcatggagtaagtacttgcctctaattgaattctcctacaacaatacctaccagagtacaatagggatggctccctacgagatgctatatggtagaaaatgtcgctctcctattcattgggacgaaactggagaaaggaagttcttaggttcgaaattagttcagaggaccaatgaagatatagacaagatcaaggctcgaatgcttgcttctcaaagccggcagaaaagttatgctaatccgaagcgcagagatgtcacatttcaggcaagggaacatgttttcctgcgagtttcacctgtgaacggtattagacgcttcgggaagaggggtaagttaagccctaggttcattgggccatttcagatacttgagagagtcgg

SEQ ID NO: 285955 - DNA, 676 bp, Cannabis indica
tatacttgatggattggctatctagtcacggcgcgacaatcaagtgtcgaaagaaactggtcgtttttaaaacaaaggctggggatcggtttattttcaagggcgacaagctggcccttaggactccattaatctcttccctaaaagctagtcagctaatgaaggcggggtgtctggcattcttggtcagtgtagtggatcgagcaatagagacgcaactaaatgtggagaatgtgcacatagtctgtgaatttccagaggtctttccagaagatctaccgggactacctccaaatagagaggtggagttcgtcattgaattagccccagggactccaattttaaaggctccatacagaatggcacctaatgagttaaaagagcttaaaatacaactacagtagctcttagacaaagggttcattagaccgagttactcaccttggggtgcgccggtactcttcgtcgagaagaaagatggaagtatgaggatgtgcgtggactaccgtgagctcaacaaggtgaccatcaagaataagtaccctctgccaaggattgacgatctctttgatcaattgcaaggctcggctgtgttctcaaagatagatctaagatctgggtatcaccagctgaaggtccggaaggaagacatacccaagacagcattcagaacacg

SEQ ID NO: 285956 - DNA, 422 bp, Cannabis indica
attacacagtaaaagaggaaactgtttatttggaaagttgagctctcccttttccctatatattgccgccccctctcttctctttgtatgcatcagtatcacacgaaatcaagagagaaagagagagaaatttcgaaatccttgtgagagagaagtgcccacacacagcaaccagtacctcaattacctcaatcatagattggaaggctatgaaggatcacatccatctgaaggacattcgggctcagaatctgagtggaaggagacacattatttcgctgcgatcactgtaaggtttcttaactttatatgtgttttatttatcgttttagaagttcatatttaggttattaaatcaacatacttgtgagtaaatctaagatcctagtaaaacaaattccaacaactggcaccagagccat

SEQ ID NO: 285957 - DNA, 608 bp, Cannabis indica
attttattttaaaacttaatattcttaatatcagaaactaaatgttacttgttaaaaaaaacgttttctcattaacaattttcacatgatattggcacttcaattcgataatcatattctatatactacactggttcactcagctatgttaatttagtattgcatctctcttattttttaaaaaaataagtaatatttagttttttatattaagtaatattaaattttaaaataaaataaataaatgtaatgtatttgggccctccacgtgtctatatttatgagttaataacggaagtggtagtaacggtgtaagagaattgtaacattaggtatttttgtcaccaaaaataaacattaaatatttaagtgtataaaatcggaaagtatttatgccgcaatttactaaaaaaatttattaacttatagttaacgcaaaatatttgatgagaatgattattttaaaaaaaaataaatataaataaataatatatattttttcttatttccatatattttaaaaaaatatgttttgatttgttttttcatcatattttggcatattaaaaattaatataaaactaaattaataaataaataataaaata

SEQ ID NO: 285958 - DNA, 610 bp, Cannabis indica
gtgtgagcgctactcaaagatatggaatctataactcttataactatttaggagtgaaatgataatttccttagagcttgtctaacagacataaatggaagagctcttatttcagtagtgatattagtttactaaaatattatttataagaagctaagtattttaaagataaaatataatgaatggtagaatggtaaatttatccctactcgatgtaaatcatctatagaggatctttaattatttagatttaaacgattgataatttatagcgcctctattcttggtgaatagagcgttttatgtaattaagagtgcaattctgaatctatagtggagtcatgaagaattaataagatagagaatttacttggtaaattctagaactacttattgagagcttgattacataggcctatggttccacacttgctgagataatattgttttgtagtctcaattaattgatttatttagtcaattaggattcaaaataatgactatgtcttatttatgaatttaacgaggaagaccataattgagaagaaaagagaattcaatgtttatttattaattaagagaccttggaaggtctaattaataaatatat

SEQ ID NO: 285959 - DNA, 729 bp, Cannabis indica
catacaattctaacctaaacctagagggttttctataaatagaaagtgttggcttcaggaaacatacaacttacacataacttcacacattgtttacctcagaaaagcaacacgcctctctctcttttcttctctataaattttcgaaaatccttgagtgatgagtagtgcccacacaaatcaaatggtacctcaataatagtatgtaagactatggaaaatctgcatcaaagaaggagaaaagaagatctagattcagatcttgattatgctggaaggagtcataatattctgctccacccactgtaaggttctctaaaatttatatgtgtttaatttcattgttttagaattcatattaggatgttaatcaaacatacttgttagtaaatctagatcctggtaaaataatttccaacaaagtggtcccgggcaggtttgcaccacggttttgatagcctctcaactagcctctgagatggttagtgcagggattgagtttgtagttggaaagttgcacaacttgacacttcagtctgatctgttagagagaatcggaaaagctcaactagaagatcctgagttagtcaaggttcgagatgaggtaatggttgatcggcctagagacttttagtctcgataatggaatgctatgtataagctcaagtttgtgttcgtggtgttgatgagcttaagaagagattcttgatgaagctcacaccacacctt

SEQ ID NO: 285960 - DNA, 539 bp, Cannabis indica
tgaaacaaggcttgctcacgtgcctccggttgactcctcagtttcctggcgcgagctttgagcgcgtgagggtgtatttaatgatggcatttaatgcagcgattcactttttgcagaggtcgattcgtttcacgcccattgattgatacggcgcattaatggtgtcagacggacactcaagcgtttccaccgcctttattgtaaatcaatctggtccgttgatctttgggcatttgaatcgtgcgcttccctcaccgttcgattggtaggtgatgacgcctgttcctcatgcatttttgcctataaaagccaccatcttttcttcatttcggttacttcccatttcttgccaactttgctcgaatttcctagagagaaaattctcagacctagaacaaagccttcaaacactttgcgattttcccagttcttctttgctcgttgctaccagtccttctcgtctttactcgacttgcatcaggacccccagttcaacacttcattgtaagttttttgcatcctttgctattactgaatgg

SEQ ID NO: 285961 - DNA, 335 bp, Cannabis indica
tttttttttaaaaatttaaggtcagatattaattttttaaaaaaatattattctattttaagtaatttgaccttatttaagtttaaaataagattactataatcatgatattttaaaaaatattattctattttaagtaatttgaccttatttaagtttaaaataagatttgttacattgtcttgtaacaaattttgttggttaataaaattattattttccattaaaaaaaatagaaataagatattttgataacatttaaattttatcattttttatttaaattaaattataaaatcagaataggatatttatttatcattttttattttatt

SEQ ID NO: 285962 - DNA, 462 bp, Cannabis indica
actaaatccaaaatattcgtattacaatatccagttcactcttaggaatttaatacaatctttacagcaattagtaatgaattaccaacatcaatcaagaatcttgattgtatgaacacaatcccttgtgcagcaactgagttcgtcttcgacacttctcttcaatctggaatccctttagatctgatgacgaagatgacactgaactcccttcagtctgaactcagaaacatcaggctctgatctttctgctatagatcaccatcttcaagctatgcaatcagacctgaaaaacaacaacaagcaaaacaggatactacactaactacacgatataatcgaactaaccaaagatatcaattagctagctaattcatttacaaaatgaaaatagctatttataggcaatagttcagccgacctaacaattagggctgttcatccgatccaatccgcactttt

SEQ ID NO: 285963 - DNA, 572 bp, Cannabis indica
taattcaatttatttcaatcaccatgtaagtataattttataaatattaaattaaattctaatttagaattttaattctaaattggatatttaatgaaaatacattttaaggaatgagctttattattaagatattcgttctccattgtttgttttacatagcgtttgttttagtgagtaatcctccctaatggaggaacgttcatttgcaagttcgcaccgtttaatctcgaaagataagtatctttgtaagtgttttatatggtatggatcaccctaatggtggcgactgtatttgacttgcaaaatatgaaacaatggtagaagctcataagatagaatagccttgactctcgcctaaacaagacaacgctggattccaatcttgatcgaataaaaggttgctagaatatttaacattttagatgagcagccaactctattcaatggatggtagctttgactctcgcctaaacgggacactgatatcagtttgtggaaaaccttggaaattatttaggattgtatgttttagtatttttactgtcattcctacttgctatatgtttaat

SEQ ID NO: 285964 - DNA, 577 bp, Cannabis indica
tgccgccagatcttcaatgcaaaaactaccgcgcccaactcaagatcatgagtcgggtatcgctgttcataatcgtttaactgatgggaggcataagcaataacctgatcggcctgcatcagcacacaccccagaccctgtctggatgcatcgtaataaactacaaatttctctttgtctgaaggcaaagctagcactggagctgtaatcaacctctgtttcagctcttggaaactagcttcgcacttgtctgaccacacaaaccgctgattcttcttcgtaagttcggttaagggtgttgaaatctgagaaaacccttccacgaaccggcgataataaccggataaaccaaggaagcttctaatttctgttactgtcttcggtcttggccaatccctgacggattctattttcccaggatccaccttgatcccatctttgctaacaatgtgccctaagaaagacacctgagatagccaaaattcacatttcttgaacttggcgtaaagcttatgttctcgaagtcgttgcagtaccatctgaagatgtaactcatgctcctcttctgattgagagt

SEQ ID NO: 285965 - DNA, 572 bp, Cannabis indica
agggttatggatttgggtttcccaggattagggttttggtcatgtaacttacccggtttcataatgtgattaaggcatccatctagcacgacactttccgtttaggtcggccagcacacttgaatctggaaagaaggtaagaactgaatataatgtgtgatatcaatatctgagtgtatgtatatgttatgtgtatatgcatgctttaagtgttatttgcactaccaacacttatacagttatggtatagaatgcattggtatagtgaatattggttaggagtacagtacagtgataccagcacaagtacaggaaagtactgggggtgcgtggtatatcactcagtggtacttagggtacgaaacaaaccttaccaatactcggacagtgaggtacatagtgcatgtggtatagtggctgtaccttagtattgaacgtttttattcatctgttgagccttgtaaataggtgtatgggcgcctaattacaactcggaaattatatgatatgttatatgcttttcttactgagtctgtcgactcacagttgtgcttccatgtgtaggtaaagga

SEQ ID NO: 285966 - DNA, 474 bp, Cannabis indica
cttgaatcaccttatcacaggccatgccatgtgctcgcttagtttttgttcggatctcaagcgtctttgcactatttggatctcgtgcggctggctaaccatctggatatgtgtggatcgaaagcccactagggatatgactctaataccatgttgagaatcatggggttccatctcaaaaccaattggtgatgagttgagtagcccatgttcttatatatggctcaatacttttacatttaatccatgtgggacaatgttctccaatattattggtttaaaatgttgttaaatgccaaactagtacatattttatagtataaaaatataaagttaattaaattttaaaaaatattttcatgaaattaaagtgatattttaaaaatattttatgtaagattagttttatctttgtttataaataataattagtatttatgacataattgagaaaaagaaataaaaagataaaaa

SEQ ID NO: 285967 - DNA, 781 bp, Cannabis indica
atatactaaaaacttaatttaatattccacgtgtttttttttctttccttcatgatatactaatgaacataaagacaatatttcctagtgaaatataactatacctcaaacttaaactaatattccatattttttaatttccgtctttcgttcattatataccatagcacattaaaataatatactacaatcttaaactaatatactacctttcagttatttcaaaatatatatattacctttcagtttttttaaatatattattgcacataaaaacgatatactattgtgcaaaataactataccaaacacttaattattcaaggttataattgtaattttatcatcaaatttttaactaaaaggacattttgttaattttttaaaaaagggacatttattaacttaattgttagatttagggccattttgcatcttgacccttattttattgtagagtataattttttcaaaaatatcctgtactttttattctgtttactttactgtgttaagtttcttctattaataaatgttcatacccaagttggaaatttggcggggaatagatacccagcccaaacccaccctgatatgatatatgtatatatttaagttttaaaatcaaaactactacaattaaaataacttcatattttaggctttttattgattatagtaatgagacatttcagttttcatgaaaatatttgcagtgatgcatattaataatcacacttaactgctttaaaaaatgacacttaactatttattttcgatt

SEQ ID NO: 285968 - DNA, 856 bp, Cannabis indica
gattcaatctatgcataccggaaaatttttgaaattacaagggcaagaggcttgggaagctcttgaagaattatctgttaattcacaacaatggaattattctgagcctaggtctagagcaaataattcacctaaaagaggaggaaaatatgaaattaaagaagaaactgatttgagaacatcttttgaaaaattagcaagaaaagtagaagccttagtcataagtcaaactatgaattctcatgttcaacctaaaaaagatgtttgtgctagtacttgtcataatgatcaatcatgtccttcttttcttgaaacattttccgaagaggctaatgcattacattcatatggtaaaccaaatgatagcccattttctaacacatacaatcctaattggagaaaccatcccaatttttcatggagacaaaaccaaccacaaatgaaccaaggaaaccaattcaacatgccaaatccgaatcatgcccaaccaagtcaaccttaccctccacaaagaaagccttccttagaagacactttacaacaattcatgcaatccacccaacaaatcatgcaaaatcaatctcaatccattgccaaacttgagacacaattgggtcaacttgccaatgccgtaactgagagagaaaaagggagatttcctagccaacccgtcccaaatcctaaaggccaatatgaagtaggaattccaagtcataaagaagaagctaagtctatttcaactcttaggtccgaaaaagaaattgccaaacccgattacatacctcaagttgaaaaagaccaaagtcaacctcaaagttccaacacaaatgacttgtcaaaagataatgatcaaatt

SEQ ID NO: 285969 - DNA, 732 bp, Cannabis indica
tttatgtgtacacatatcattatatgtacataccgagtgtgtcacgaactgtgaagtcttgcttgcggcccaagcattgtaatcaagaccaggtttccatccagatgaatcaccaacaatgtaatcaactgcataacaaacatttacagccattgcaataacaacaattgcaactagtggaaatgactttgccattttgtttttgaataattataattatatgtgtatatctatgctctctatatataatattgtgtaacaacttaatattgctttgtaaattcttcatgtttgcacatatatttatagtgctttccatgggagagagtagttgtgtactgatcgagcaaatcaaatcttttgcaatttaagtaattaataaatgcaattaatctaattaatataaatatttgactgtaataaattaaaaatatttgttttgccattgatatcgtatatttaatgtaatttacttctctactgaacaatttctgtatttattattttttatctgaataattataattaaagaccttttaaatgtgttttatattttaggaaaattaccccatttatctctttgtaactttttttgttctttacaatttttgttttctttctatttttacgatttggggttgttctataagttacaattggggttacaatttgaattaggttatgatttaagttgttcggtaaattacaccgtatatttatatttatataaat

SEQ ID NO: 285970 - DNA, 588 bp, Cannabis indica
ttttaaattctagttgtaatttcctcttaaattcaaataactaaatagaagtaaaagtttaattttaaagtactttactataatttttgtacactacaaaaaatcttacttttagtcacaacaaaacttgtgactaaaagtgaaaaaattgtgactaattataaattattattcctatgttgtgattaaaaggtctatggctaaatgtattagtcaaaaaaattacaatttgttgtaactaaatgtatttttagtcacaaatattgtgactaaaactaaattagtgacaacttaaaactaaatactatgttttagtcacaagtaatattttgttatgacttaaagtcacatataatcacaaaaaaattatgttgtgactaaaaagttatcactaaaattaagtaacagttttttgtagtgataggatcgatttcactctttgtgagtttattaattatcaacaatacgtatacttgcgtattaaaaatcctacaacattaaccatatatgtaacaccccgatttcccgagatgtcacataggatagtacgtataaaacattttaataagataaagacaatcaaatact

SEQ ID NO: 285971 - DNA, 811 bp, Cannabis indica
ggccagagaggacaggtgcatcatcttcgacccacacttcttcatgtccttctaagtcatcaaatttcacgttcattgattcgaccacagatagagtccttttgttgaatactctgtaagcacgactgttggtggagtaccccagaaatgtcccttcatcactcctaggatcaaacttggccaagtgatcacgatcattcagaacataacacgtacatccgaaaatgtgcatgtggctcacgtttggaggtcttcctttccatagctcataagcagtttgagaggtaccagtgcgaagatgaactctattgcacacgtagcaggcagtattgacagcttcagcccaaaatcgttttgaaatatccttggcctgcatcatgacacgagccatttcttggagagttctgttttttcgctcaacaactccattctgctgaggagtttttggggctgaaaattcatgatgaattcccattccattacagaactctgagaatatggaattttcgaactcttttccatggtcacttctcagtctaaatacttttccaactttggagtctttctcagtttgcagtctcaatatcaaggcagagaatgatccgaatgtgtcagacttgtctctaagaaattcaacccaggtaaaccgagagtagtcatccaccaagaccattacatatctgttcccactgatactttcattctgcattggccccattaagtcaacatgcattagttccaacacacgagaggtgagaagtctattaattgggggatgaggtgtcttatgctgttttccaagctgacatgg

SEQ ID NO: 285972 - DNA, 591 bp, Cannabis indica
cgtgccttagcattagggcgttacacttatctcttgtctctactacgagtacattggtggacaaaatttattctcttgtctttttgtagtagtggaaatactccttgatgatccgatctaccatgatctttgattgctctcattaattattgataatgtgtgtttttatttatattttagattaactttttatctttattattattactattatttttgttatctttttgttgctcttgacatgctccatgatgaggtatgaccattttaaactctcaactcttttactttcaatttataatttatattttgatacattgagaacaatgcataaattaagtttggggtggtgggtccctatggttatttccttcatctgcttgaaaaagtgtaaaatatttttcacttaaaaaaaaattattatttggatgctaaagtagttatattatatattttattttttttatataaaaaacaaaaaaaattatatgtttattattgtttttctagtaaaaaaaacccaaaatatatttatttactttattttatatatgtattcaatcttaaaaaaaaaaaaaaaccttaaacgtt

SEQ ID NO: 285973 - DNA, 629 bp, Cannabis indica
ttctcatcaattttgttcacaactttgattatttaagattccaaattgcttcacaatattttttttttttaattccacattgattcatttacttttgagtccaaaattgctcttccaatttatggctcatttcacaagtttggatccacttttgatccatttgttcttgctattctcatgagtgtaactctcatagtttacttttatttatctcataatatgagatgattatctcttataatccaataaaagatgtaacttctcaaaagccatcttttattatctcataaagtgagatgttcaccaccaaattgaataaaaatttaaaatattcttcattcacaaaataaatgataataattctcacaataataataaacactattttattactatcaacattattatcatgctatgtaactcatatattaatataatatgtatgttactaatcaatatctcatatgtaacatacacataatatcaatattaaattcacaaatatatatgttacatatctcatatatataacatatatactataatatacatatcatatacacataatatatatattaattacacaactatatatgttacatacctcacacatatataacatatatata

SEQ ID NO: 285974 - DNA, 112 bp, Cannabis indica
gcttcttcgagcttgatgaaaccttcagcccggtcaaggaaatcactcattgagtcgaccggtccgtttttccttatgtccttccatagttcgccatggacttcaatgcccc

SEQ ID NO: 285975 - DNA, 756 bp, Cannabis indica
agctctcggtcaacaacttttatttctctgtactgtttgactctgaggccactcattcttatgtggcagccagaattttcagtaagttggatagaccgcatgatatttatgaatcaaggtttggaaccctattacctggcggagagttagttatctacaaaaggtggattaggtctatgccaatcaggaacgaggatagggagttaagtgctgacctaatagaaattagcttaccaaattttgatattatacttggaatggatttcatgtccagatattcagccagtattgactataaaagaaagatggtaatcttccaaccagaaggtgaagaactgtttgttgttgtcagttcggttcagggatctcggatcccggtaatttcggttttaacagccaaagaattgttgtgtgatggatgtctagggtgtctggccgtggtattggataccactcgacctgactctattcggccagaagacatcaaggtgattcaggaatttcaagatgttttttcagatgaacttctaggtttaccaccttagcgagaaattgattttgtgattgatttggcacctagagcagaactggtttctaaagccccttatagaatcgctccagcagaacttaaagaattgaaaattcaactataggggttgcttgacataggatttactcggcctagtgtgtcaccctggggagctccggtattatttgtcaaaaagaagatggatctctacgaatgtgcattgacta

SEQ ID NO: 285976 - DNA, 473 bp, Cannabis indica
tgtcccccacaactcaaatcgagcccaaactctaccatactctctagaacacctgcatatactatactaaatccatttcaagcaacaggatacatcaaatagctcagaaattaaaaacaccattagagagccaacttaagctctctaatttcaagtttgagtaatctgtagcacaactagctatctcatcacaaaattaactaaaataaacctatcttaaccccagaattcaaatccaaactagttgcacactacaaaatctcaaatcactaaaatcatgcaattaacctatcttgagctaaagaaaaccataaagaagaaggctaagcattataccttgaattggacctcctatttctgattgaaaactctttaattgcaacaagggtagtttagtcatttaccactcccgacaaatccccaatatctccaatgcctaacaatagtaccccgctattgacattctaaatcat

SEQ ID NO: 285977 - DNA, 525 bp, Cannabis indica
aaaagatgcccggtcagcccgttgtccaaaaaatgaaaaataattccaagtttaaagaccgcttggccggtcgagatgtcttagaaaaagcccgaaggctgaataagatatataaaaaaaaagagataaaggaaatatttaaatagctcgagtcccaggctcttggttcggttcttctgggccaactggagcaggaggatctgttgtttgaacaggagaagtatcagcagcctgaccggaggttgaagcagcttcactggaggttgaagcagctgcctcgttcccaccataagcaacttgggccgcgcagtactcaaggtacatgtccttagcctcacccaagtagtcaaagttggcccgaggattagccttacagaaatcgaagaagagctcgagatcggctgtctccaaggcattgaccttctccttcaacctgtccacctcggctgtaagctcctccaccttggcgtccctctccttttcatccgaagagaactgctcgcagagaagtccgctcatcctgaa

SEQ ID NO: 285978 - DNA, 521 bp, Cannabis indica
tatttgccttgaagaagagaattcaatatagaactctctggagaactcttcccaagaattaaatcttcctggggccagcttgaaataccattgttgggctacttcagctagagttgctggaaagattcgacatcgcacatctccgatatacttgtaggagatctgtttggatctcaaagtacttcaggtgtactaggggatcttttttctccgtatacatcttgaatttgggcaagggcaaggcgttgatgtatgccgagaatggtgatccccttgacctgtctagctcaagttctaaaggttttagaccagctaggccctaatcatgtctcgcaattgatccaactgtgcttgcacgaaaggatctcttattgtaggggcctagttgattgactcttcttgatgagttgtagcctcgaattagctatagcctggccgaccatatcttgggagatggtatactcaaggccgatcagctctgagtctggtgcttgtacaaggtctgtaaagcccgcttagtt

SEQ ID NO: 285979 - DNA, 795 bp, Cannabis indica
tccttggttctaatcctggtttgggttagagtttgggtccaggtcaaggtctaactttgggtctgattctaggtgcgggtttgagtttgggtcggagtctgtgtccgtgtttgtgtccaggtctgtaccccgatctggctctaggtaagggtcaaggtccaagttcgggtccgagtgcgggtccaagtttggttcttcgtcaagatctctgtcaagatctaggtccagcatttcgatccgagtcttggtcttggtccatctccaggttcatatccgaatccctatctatgtcaaagtctgtgtttgggatcgtgtcccagatttaggtccaggtccaggtctcagttccggtctgggtacacgatcgtgtccaagatcgagttccagtctcagttggtgtctgaggttatgtctgtgttcggttctacgtctaagtccgggtcctggtcacggtcctagtcttaatctagggtccttgttcggcgattcttgttcaggttctaattttgggtcccaggtctaggtctgggttcgggtttagttcttcgtctgtgttctggtcctagtctgagtcccagatctagacaccgactactggtctgttccaggcttgttacccgaatcccgagtcaagatctggatcattgtcacgggtgtcggtctggttctggttcaggttctaggtcccgtttctaagtttaggttcaagatcgagactggggtgcggttctaggtcccgaccctggttttgtgtccctagtctagttccatgtttgggtctgagttcaggttcgg

SEQ ID NO: 285980 - DNA, 539 bp, Cannabis indica
aaaattagtataattaaaaatataaattttatataaaataaaaattatcaaaatgtggtgcttttagaatttaattgtcttttttcttctcatctctatcatttttcttcatttattttctctttcattatttttttttttttcatttcctctatttccgcccatccttttgactctcttttctttttctccataaattttaaaaaaaaaaattaaaataaattttaaaaaataacgtatattattttataccaacataaaaaaaatatatattagtttattaagtcggtttgaacttccataaattttacaaccgactaagataaatgtttcatatctgaaaaaaaaacactactatcaaaaactatactaattgagacacaaaatcacacttgtatttataatgatacgattaatatataagctacatcttaaacaatcatacatattatatattatatatataacaataaacaaatgtaatgaaaaccacataaaagagaagaacaaaaataaaaagtagctcgaaagtttaagcc

SEQ ID NO: 285981 - DNA, 634 bp, Cannabis indica
atccctatagagatacaaaaactttattaaagtgtttcattcaaaggtagaggatcttgaaagtaaggtttccaaagacaaattgaaaagaatccataataagataaatgagcattggagtaattgtattgatcaatatttggaccaagaaagtaatgatggtgatagctctgattatgtttttgatcagtggattttcttttctcaagtgttgagtgatgggatttaagaaagaaggagtgaatatgatccaaaattatggtaactttgttcttctttagttaattaataaatttttttatcattgtaatgtttttgtgaagatttatcaataatagaaagaaagattgaagaatttattattattattattactattcaattatttatttattttaggtttcaaataaaattgaaatgaagataagtatagtttttattaaacaacctttggtcaattatttaaacttaagatattaaaaaaaatctattaacacacaataaaggttgtttaattttatatttgaattaaatcaaaattactaatttagaaattcaaacagttcaaaattttaatcaaataaaaaacatatcacttagttgagtattattaggatactcataaatatcttaa

SEQ ID NO: 285982 - DNA, 698 bp, Cannabis indica
ataactctatacagctcgttccatgtcttcactaattcccttgatactccttgtaaagtggaaactagtccgggacctctacggctgagtgcatccgctaccacattggctttaccgggatggtacattatctcgcagtcgtagtctttgactagctccaaccatctcctctgcctcatgtttaactctctctgggtgaaaaagtactttaaactcttatgatcggtgtagatttcacatttcactccatagagataatgacgccagatttttagtgcaaaaaccactgcggctaactctaggtcatgtgtcgggtatctctgttcgtattcttttaattgccttgaagcgtaagcaattaccttcccttcttgcattagaacacaacccaacccttgtttagatgcatcacaatataccgcaaattgtccctcttctgttggtaaactgaggattggtgctgagataagtctattcttcaactcttggaagctttgctcacacttgtctgaccaggaaaattttagattcttcctagttaattctgttaagggtgtggctatctttgagaacccctcaacaaaccttctataatagcctgctaaacccaaaaagcttcgaacctctgaggcggtctttggtctaggccattctttcactgcagcaaccttggcaggatctacttttattcccccgtt

SEQ ID NO: 285983 - DNA, 603 bp, Cannabis indica
aaaccataacaaaaccggtcaataggttggttcaaattacgtctttcaaggaaaatttattagttggttgggtatgttgaactaacggttttcaatgcattgacaaaatcaggtttgtattggtgtcatatcaccccatctttagccgtaccagtttgtattaattattattttttaatttttgaaaagactacacaacacaatcacatccacaagtactatatatacccctctacctgtccttactccttcacacctcaatttagtattgttctctttcctagagaactcactcccttcctgtacacatatgtgtagggataatatataaaaaaataaattatgtattgttgttgcaccgaagtgaagatgtgtaaacagaaggattggtatgcactacaaccgtgtgttgtagatgcatcaaggaaatttcagcaattcaatcaatcatctcataacaaatctgggtaataactcaactatttttgtctatttatttcaatagtatattattacaaattgattcttagaaattttatgtacgtactacatgtatattcaggtaatgttgacgaagggttcggatgggtggattaggctgga

SEQ ID NO: 285984 - DNA, 668 bp, Cannabis indica
tgaattctccagtagccacaaagttcacataattagtttttattattatatttgtctgatacatatatgtaggaatgtttttgtattactaaccgcaaaacaacattagaacaaccctaattttttgtatgaataattgtactaatttatcaactatttttttcgaatcattttgtgttacaaacgtcaaattaacaatagaacaaccctcatttatctttttgcataataaattaaagaatatcacatttgtgttttcgtttttttttttaaacttcagatctaaatctggggttgtttttttttttttttttttggtttcgtacttaagaattaaattaatttttgggttttgttgtgtttacctctgttattttggggggacagtgttctgtagttcttgttcttcaattctgcttccttttaccaaaaactcttcgccggatttaatggttttttcttggtgatgtccgactccggcgactccccacacacgaagcaggtcgttttcccgtgttttttactgttcacagtataaatgttaagttgttgggcttgggcagtacaaaagtaaagaaaatgggctggggcagtaaaaaagttgtttttgccgtgtcccagtatttttgtaaagttttggtccaaaaacagtatatatgtaaatttcc

SEQ ID NO: 285985 - DNA, 448 bp, Cannabis indica
aagtggtcggccatgcatgggttaatgggccccactttggtattttgcaattttgacaattttcatttctattttttcaaaaatgccaattttctaattctaaccatttaaattccaaaactaattatttaataactaatataaattattaaataatattgccatttaatatatttattaataaagtctttcaattaataaataaaacttagattatcttttctttacaatttagcccttgcttagtgaaaattcataaactagacatagtctaaatttagaattataattgattaattaaaatcaattatttaagtcttacaagcagtatgtccaataagctgaactagaattctccgggtaaatttcctaacttaataattccttgttgcatccactcgtagaactttgaattgcactctcagtcatataaaacgctctatatgtt

SEQ ID NO: 285986 - DNA, 602 bp, Cannabis indica
cgctcattccattattgttgctgcctaattttatttgttgccttatcatgctgaattgttggatattatggatgtttcccttagtctctcctcactagtttatacttgtatttattccaccatgctttgcctttctcatacgattatttcacatgtaattttagcatctagaattggttagtgcatctccttgaagcgaaatcctagttagacttgtcccttagaaatgatttaggccttccttggacgtttgagcctttctaaccctccctatcaatcaatttttccctagtcacccaagtttgagccgttagcctcgttttgttgtgcaacccaatcacacatatcacatccatcctaaattgcatttccacatatgtcctaacttaattgctcacttgtcaagagccaagtttcacattaagtttggggtgagtgcggtgagtgtaatttgtggcgagctaattcaagattatacttttagccacattggggacaatgttgggttgtaagtttggggtgggggaattagctcacaaggtatattagtatgcatttttaataactttctcttgctatatataagtataatatagtactaa

SEQ ID NO: 285987 - DNA, 883 bp, Cannabis indica
gggtccaagtttgggtctgagtcaagatctcggtccacatctagtccagcatttcgatcccagtctgggtctttgtcctagtcaaggttcgtatccggatccctatctaggtccaagtatgtgtttgggatcgggtgccagatttgggtcctggtccgggtctcagttccgttctgggtacacgaccgtgtccgggctcgagttccagtctcagtttgggtttaaggctcggtctgtggtcggttctaggtcttggtccgggtctgggttcgagtttggttcttcgtcttgttcaagtcctagtctgagtcctagatctagacaccgactactggtctgttccaggccccgttacctgaatcccgagtcaagatctagatcattgtcatgggtctcggtctagttcttgtttaggtcccaggtcctatttctgagtttgggttcgtgatcgagactagggtgcggttctaggtcccgaccctagttctgtttccctagtctggttccatgtttgggtctgagctcaggttcgggttcgggtcccgagtctaggtttgggttgtcatccaggtccgactcccaattcgggtctaggacggatttggagtccgggtcttggtccggttacggttcttgatctaggtccaattttagttttgattccacgtccaagtcctagttccagtcctggtcaacttccgattttggttccaattttgggtcacagggtacgggttcaggtccacttttgcgtttgggactgggttcaggtccgggtgtggggccgggtccttgtcagggttcgggtccagggctgggtccctaatccagacaccgactacaggttttgtccaagccctgggtccagatccggatcccaatc

SEQ ID NO: 285988 - DNA, 666 bp, Cannabis indica
ctggtgttgcaaaattcactcgacaacaaggatcgagaggaccgaaaaagcgtttccgtgcaccaagagcctggaggaagaggaagaaggggccagaaatgtccccccattgatctgagaaatcagattaacgagaaccaaggtgatgtccgggaacacctagaccaaaagaaatacggacccgtggtctccacgggaacgttaaacgaaggaatcatggcagaacttgccatactccgaaaagacatcgcccaagtctcccggagacaaaaaggcaacgactccgattctgattgtgaggactgcgagtcgtatgctaaacacatcctggaagcagagctccccataaactttaagatgcctgaaatggcagcttataccgggaactccgatccaagtgatcacctatcagggttcaaccgtgtcatgacagtcataagggtcagcaatgacgccaagtgtttgtgcttcccgcttactctaagcagatccgcagaagaatggttcaagaaactggaactaggatccgtagattgctagataagttacaaccagcttccgaagcatttgtccccgcaaggaaagtcaatctggaggtcagcgccttgactaacatcaagcagctacctacgaagacactaaaaaaatttcataaagaggttcagg

SEQ ID NO: 285989 - DNA, 826 bp, Cannabis indica
agtctagaaagtcaaaatacctattatacaaaatgactaatttacccccaaagaaattaaactttaaaataacctaggggcattttggtaattttctaactttcccgatttaacctagttctcaacatcttaacctagtccggtataatttccaatataacacaatttcaacaatcgtgacatttctgaccattctgtcgagttccacaattgccaggcccgaaaatattttattcgaattatggtatctacgatacccacatatttcaatacaatctccgtaattaatcaattacgctttattattcatttactcatattttcctaatcaactcgtaattagtttaagtaggattataatcctactctaatacccacttaatcacatatttaataaaatatgtccaattaaaatatcaatatatttttcgggatattacaactatcccctccttatagaaatttcgtcctcgaaattattcaaataagtcaggatacagctcccgcaactacgaatttaactctcgaattgcctttcaatcttgttattctctcagggcactaaaactaacggtatagtctttacttcgcaacactttctctttcaattcagaaaatctataccgactgttcctcatatgacaagtctttttgtatttcaatattttcataactccatatatagattgcttctacctcatactcctgaaacattgaagtgcatattagaaaccctagataaagtaggagtatggttagctagtaagctaccgacctacctttccagaaattcagacggaccggttaacctgagacttaattttcc

SEQ ID NO: 285990 - DNA, 607 bp, Cannabis indica
ctaaggaggatgggcaaactactatggcctacggctcatggctaaaggtggataatataggcagaatagaatccaccaaaagagaagacacaatgaaaaactcacaaccagagggattagaagcaataaatcaccaatcgattcccaaaatggtgcaccagacaaatgaaagagaggacttcacatataacaacaacacacaatcaggtactttacctataacacctaacattaataattataatcaattgaacatgtgtgttgaagaacccaatttaactcccaattttcatgctatctgtaatgaaatggttgaggaaactacaccaacaataacaaggatgaacaaagatcaagaggaacagggcattcggaagagatctggtgcagcaataaaaaaagaagcagtcttgaatgcaatggaggaaagggcatgtaaagccaaactcatggaaccagaaacctatatacaagactctactggcatcctctttgacatcccaattacctatgaatctggaagttgctcgcagaataaagggagctatgagaagaggaggaagtttgttccaaaaacaacaaactgtcaaagaaaacccagggggac

SEQ ID NO: 285991 - DNA, 488 bp, Cannabis indica
aaaagtaacatgtttttttgtttttgtatttttatcttttatcctgctttctaaagtaacttggtacttgaaaaatttaaataaaatatcattgcattcctttataaaatataatatcaaaatgttaatttatattcaaataaataaaaaaaatactttgtaataattaagttaaaaataaaataaaccttctacatatattaataaatagattttttaaagaaaaaataaaatagaaatttaagttaagaaagaatgattatgtagagttaaaataaataaaataattataatataaaaataatataaatgtatatatatattaatgatttgctttaaaaaatattagaaatctctaaacataagttaataaaatgaaaatgtgactttatttaataaaaacttaaaaatatggaaatatttttccatacaattaacttaaattgtaaaaaaagtcataagttaagtaaatctctaatttttccata

SEQ ID NO: 285992 - DNA, 591 bp, Cannabis indica
agaagaaaatatttttcgatacccgtaagtttaagttaagtggatcctaagcacaggcctaacctacttatatctagagtcgagtcggatgtgaatgatttcattaatgcctaataagaatgctcccccatgtatgtcttgtctacacacttttctctatatcatattcaattcatcattgctttcttacacttttttcttccccactcacatatagagagacaagagaagagaagagaactcaagtaacactctttcattaatattttactaaattttctttttcaatagttgtacaaacaaagtataatataaaaaaattaataatttacactataaatatttaagtataatttttaattgtaaataaatacttaagtttaatttttagtgataataatatttaagatatatttctaaaacttctttaggtatcatgtatatagggattaccaagtgaccattgacttaatatttaacagtatggtacctacagaaattttgaaaatataactttaagtattattatagctaaaaaattaaacttatgtatttatctacaattaagacttaaacttaagtatttacgcc

SEQ ID NO: 285993 - DNA, 240 bp, Cannabis indica
tgaagtttcgaaaaaatcagggtcgtgcaacccactcacgtgcgcggatgagggtgataccctcggacagcacgcgttcagacagctgctcgaccgagtttttgtccaaaactcatccctgcgcgcgcggaacaggctgcatgcagtatgcacagcatactgtccgtacagctcccatgcgcgcacgggcagtatgcacagcatactctccgtacaactcgtaattttttcgtttttctt

SEQ ID NO: 285994 - DNA, 500 bp, Cannabis indica
tttaaagagaagcatgcaataattatgcttcacatattctatacttttctattaactcataatatacaattcaatatataataataaattcataatttttaactatcataaagttatgtataatagttttaaaatataaaaattataattaatttatttagtaagatataatgcatgtatacacatttttttttagctctaactatatatatacacttaaaaataattgagtttttattaatctgattatttaaataattttaaaagttaataaatttagagtacaattcttattttttttaaaaaaatagagacggcaaaatgcttatttattttatacacattgcattgatattactaaaacacactaggatttaatgtgccaaatcagttttatattaaccatataagatgaaaagtaagagaaagatcacaactcagtatcgagaatatttaacatcagtaatagtttagagaatttttttttttaaatcaggaga

SEQ ID NO: 285995 - DNA, 595 bp, Cannabis indica
gtcgcaggtttttattttatttttgtctatcaaattggcaaaggaggaaattgtaaaatcttttattcacatatttattaaaatagacaaaaataatttttgtggtacttttaaaattggttttgtttgtacatttattattttcaaaaatatgtttttttttcttactatgaaaagtcttttaaatcagtttttgactttatttgtaaataaatatgagttttctttatttagattatttgatattatctttgtatatttaaggaaaatcttaatcatatttatttctttgttttatctgatttttcaatcaagaaaccgtgtacaaggtgttagagataaaagttaataagtttccttattaatttgtttatgaaaactttactgaaaaattgtccaagtttaatgtacctgtctgaacggaccgattgtctgtttaaacagattctggcttgggaagattttctatttatctatttgtttcttgattccttttccatgacctttagggtttctaaagtgtataaatatacccttaggtcgtattggttatctctcttggggctcatttggaacgccgtattaggtcgtattg

SEQ ID NO: 285996 - DNA, 501 bp, Cannabis indica
acgtccccgcttcaagcctccattgggtccttacacccacggaatgaatggctcttatacacgagtacgccactctggctgcttcctggattgatgactggccctacagaccaacacgagtgtttccagcgtgctttgtcctcactcgcacgcttcctgggaaaacttcccaggaggtcacccatccttaaattactccaggccaagcacgcttaactgtggagttctttcgtgatgggctaccgaaaaacaagatgcaccttgttgatataggtagtaccaatcaatccatttaagctctcttcaactgtgtagtcccatacctacacagtctcagaatcatcccacttgaccttccccaggcggtgtgggattgcacagcttacccggttggtgtttccctttaccggtagtcacgggacgtactgactgtcacaggaagggacgtgatattgaactttgtaatcagatatgataaatttaacctactaataatctatt

SEQ ID NO: 285997 - DNA, 430 bp, Cannabis indica
attaaatagttagaattgacatttatatggttgaatgtaaaaattggcagtttttgagaatatgggaaacagaaatgataaaataggaaagttgcaaaagtgaggcctatttccatattgccatggcaggccacatgcattgcttttatcatttaattttttcattattttaatgccaagtaattcaaccctaaccctgtgtggtattttataaatagaaagtaatggtttcaggaaacacacacaacacatttgcatctcattcctttcacagtcctgagccgccacctctctctctttctttcttcttctttatttcgaaatccctaagtgatggagtagtgcccacacacagcaagtagtacctcaatcatagtgaggaagactgtgaagaatcaagattcaacaaagaaggacattcggactcaga

SEQ ID NO: 285998 - DNA, 680 bp, Cannabis indica
cttggtcaaattgacctcccaagtaaagctttaatcgctgcctgttaactttgaaagtctcggagctttcacctttcagttctaccgctccataaggaaacaccttgaccactgtaaatggtccggacaaccttgactttagcttaccaggaaacaatttcaaccttgaattgaaaagtaaaacttgctgcccaggttgaaactccttcctgactaagttttggtcatgccacttcttggctctctccttgtagatcttagcattctcgtaagcctcatttcgaaactcttccagttcattcagctgtagcaatcttttctctcctgcagctttcaagtccatgttgagggtcttcatagcccaaaaggccttatgttctaactccaccggcagatgacaagccttcccaaacaccaaccgatatggtgacatcccgatcggcgtcttaaatgttgttctataagcccatagtgcaccatctaactttcgtgaccagtcttttcttgatctatgcactgttttctccagaatcaactttatctcccggttagaaatttcagcttggccattactttgtggatgatacggtagagctgttctgtgatggacgccatatctcaaaaggagtgcttcaaactgtttgttgcagaagtgactcccttcatcgcttatgattgct

SEQ ID NO: 285999 - DNA, 603 bp, Cannabis indica
catctactttatattattttataacacgtatgtgtttgtgttttattagtgacacaaaatctatggtatattcttctctgcaaagagataataccacataaacactttaaattttatttcaatgtttatgaataattgttaatcctaaagcaattattaagattttgtttaataaaaagatcttttgatctgataggggtggaagaagttaagaataatatatgcagtttaacgatcttttatatccactgaactctggattatattcataactccccatgatctctatttcacttaggggtggataaagctattgaaatatgtagttcattttgaactctagactatactcaatacactacagtatctctatgacacacatatttttgattaaacatggatgtaatatttattagaacttattcttaatcttgatttttgttccaattaacatattactgttgtaataaattaataccaataaagttcttggacatagtgtcacagtaccttatttgagtgggagaattttaaaattctaagcccatctttatttggatgaaacttgtgataggaactttagaatacaactgagaaagtaaa

SEQ ID NO: 286000 - DNA, 910 bp, Cannabis indica
gaaagatcaatgacctccccggtaggcctcttttcctttgtagaggacccctcactgcccttagacttcttggctggaggagaggcgctagagcttccgcctattctcttcctcagagcgtcgagcatttgcttagatatgtctgcacagaacaaaaacaacatggttagaaaatagccatcagaaacataaggcatgaaaatcaagaagctcaaaaacaagacgaagtaatatgcaaggtgactgcccgaacaagactcagaagtccatcatcacctgacatcgatcttatttcagacataacagttttcccttttccgaacacgggaggggatggtcgaacaggttaaatgggctcccttatgcgaattgcatgttcaataggcctgggcgaagccaggagtttcttcttcctcttcagtggagtcacctgctcttcctcagcttcatcctcgagattcaagggctcttgagcatactgctcagcccttgaacctcccttcaacttagcttcgcgcttaagttgatgagttcattctcctgatgagcttgttcggttcggcccgcaccagatttcctcttcttccctgtcatggacttagaagtaaagtccttgggatagagcccgtacctcacaaagttatctttggaggtcaactggataatatttcggtcttcccttggaagccgggcaagtttttgagctctatccctaagagcaagagtgaggggagggcggtgataggtcggaatctgttggaaccgagtgcgagtgatgctcgtgccatccaccatgaagtacttatcagtaaagcacccaatctattgatggtcttattgtttgtgcccatcaaccacttgaagcctggttgagagaaagtagaagtacccaaacctgccttgcttaggg

SEQ ID NO: 286001 - DNA, 623 bp, Cannabis indica
aagaaaaggaaacttcttccttattcttaagtcaatacaaataatgaggattaggctattaccaaactgctcagggttgaacctctataaaatttctgtgtcttgttattgctttattacatattctcattacgacatatcgtttatcgattatcaaaaaaattcattgtcgttggccaaagcgaagtcaacagttaggttagatttatttggcattaaaataatgaaaaaaattaaatggtaaatttctcattaagtggccggccatggatattgggccccactttgcaattttgccatttttccaattattcatcttattttctcaaaaatgccattttttccaatttaaccacttaaatgccaaatctaattatttaataattaaaattaattatttaaataaaattaccatttaatatatttattaattagacttaataaattctcttaattaacaaatagaccctagaatctcttttcttcacacttaagccttagtctagtgaaaattcataaactagacatagtctaattttataattataattgattaattaaaatcaattaactgagtcttacaagcattattgtctcaagtagtatggggaccatgggcctat

SEQ ID NO: 286002 - DNA, 462 bp, Cannabis indica
ctaatttttaaaaatgatgtagatatatcttttacccttttacttaagtgttactaatatttttatgtgttagcattatttcaataacgtgttatctcaattctaaagaaagaatactggtttttttctctttcccttttcctttatttttattgtctcattttatctctttattcttttctcattttccactttctaactaatttttcaataatatacataatcaatctatatataaaaatgaccttatacaaataaaagcacgcacttgactcattatacttaaccgaatcaaacgaggtggcatcaaatctgcagaagatgtaaccaataaaccttcactaacaccaaccttctcatcaactattttgaatcattaaaatactacactattaccttctgttgagaatcatggggttccatctcaaaaccaattgacaatgagtggagtaccccatgttc

SEQ ID NO: 286003 - DNA, 807 bp, Cannabis indica
tcgaaaaatgacggctgtaattattagtttttattatctttatggtgccacgtcacaaaactcttcggttttcgtgtaggcgtggccatagttggccgttagattgggcgaccttaggcattctggctgccacgtgtcacaatcccaattaataagggatatgggtatttaagcgctttgatacgaatcaaatttcccatttttccctcttattcttaacttccctccagtgcatacacttcgaaaaaatccattcccagattttctgccatttttccacaacattttcaatctcagaagtgatcgagagcaatcgcaggaatcagaactaaaggttagtttctaaatcactgcattttcgttttctgtttttggagaaaatatgctttattttctgggtttgggtgttttaaaggcttttttaggaatgtatgctagtgggtgttaatgaggttatgtgttttgggtaagtgaacctgggtaacattcatagaatatgacctgtaaactgatataaccgcacacaattcataggcactgtttcacgtctcgaatactcgcggatattcggatgaacaatttgaatgttcgcgggtgttcagatgaacagcttgaatattcgcatatttccaagacttatttccacttgactattagctagatcttttaggatttttatatgtcgcgggctgagttgtgagggtattaattgctattccaaatggtgggtgtgtcacagtattctaatggccatatatgcgattatatgccccttgagatactgagatacacccagccatttgtgac

SEQ ID NO: 286004 - DNA, 481 bp, Cannabis indica
agccacacccacagccacagccacaaccggaagaggaggctcggacaccggaagatgacttcattctcccaaatgattaccaaccggatgatgatgacatgttctgtacacctgagaagacgaatatcaccagcatcggggatactcaggattctgaggtgcaggtgttagagacagctccagaagtcatggagaaccggaggaagagaaggcggcctaggtggttcgctgagtacactgaaatgaagaagaaggctagggctacttcgacactcgtgaatgcggacccacttagagtggttgatcggaagctgctcaagacttttcacaattgggtactcggccagattgggaacaattacccgagagagtgcttcaccggtcgataccattcgtcttggttcctcgaactgcatactccgaagttttggcttgggaacgatgtaagtttttaagacttttttactgcttttgcttttaa

SEQ ID NO: 286005 - DNA, 591 bp, Cannabis indica
aaggcaggccgtttttctaggtgcctgaaaaaaggccgaccctttttcccaggaaagggagagtttgggtttttctcctcaagtccgatctgattcggggtttctttcggagtggaattcagggtgttttagagatggttaagttagtttgatccgggggaaagtagggtgtgttcgattgtgagaattagagttgattatcagaaatttgattaaggtttttattgagttttggttgtcgtgacataggaccgggatcgcctagcttgtttttccactcgagtcggcccgtgcgcttaagttcagaactaaggtaagaaaagtattaaatactgtataaggttaatattacgattgttacaatatcgattaagattgaaatctcggtgatttaaccttaatcgaggttaacgttatgtattggttgtgactcgattatgatcgagggaaataataggaaacgattatcatcgttgagactcgattataatcgagggtaatgatatgaaccgattattatcgttgtgactcgattatgatcgagtaaaagatacggtcattaccgttatgagtaattactcttgaaaccgc

SEQ ID NO: 286006 - DNA, 625 bp, Cannabis indica
aaactaatattccacatttttttaatattcatctttcgttcattatataccatagcacattaaaataatataccacaatcttaaactaatatactaccttttaggtttttttaatatattattgcacataaaaacgatatactattgtataaaataactataccaaacacttaattattcaaggttataattgtaatttcatcattaaacttttaatagaatggatattttgctaattttttataaaaagggacatttattaacttaattgttagttttagggccattttgcatcttggccccataatatttccttaagggcccgtttggtaagtaggaatggatttgattagaccgactaatttgtccaatccagtgtttgggcatgttagaagtctggataactaatcctactaatctcatctgtctgggattatttatctcatccaccagggtgagataaataatcccatgcagttttttttttatcatttttttaattttgattttattaatatattttaaatttaaaaataatttaaatgaaagaattaccacacatttatttataatttttttttatcaaaacttattcattaaattagtgaaaatgtataattttaaa

SEQ ID NO: 286007 - DNA, 509 bp, Cannabis indica
atgaacacccctaaccgttttcagaaaacaagaggctgtttggctttatagtttaaaaactgttttctgttttttaaaactgaaaacagtttttaaaaactattaggagtcgtttggcaaaaatttttaaaaactgttttttaaaaattaagttttaaaaaactagaaaacagaaaacatcaaaatgttgttttcaattttcaaaaacaattttttttgtctaacatattatattttatattttgctcacatactcggatcctagacccgaaaccatacccgaacctagacccggatgggttaatgtcatggtatggtgctaaaatattaattttttttcgtaagaaaaaatctaaaaacagtttttaaaaatttgtgccaaacaccattaaatttttaaaatgacaaaaaactattttctattctcacttttaaaaacacaattttaaaaactgaaaactgaaaacacaactaaacaagctcaaagttacaaaaaacaagaattttga

SEQ ID NO: 286008 - DNA, 721 bp, Cannabis indica
tcctcgggacaacagtgcttttgtaattagtcgctaggcgacaagtattttgtattagacagtaaacttttgtaaagtattttataaatgggatcccaaagtattttgtatgaaatattatataagtttaattaaaaagcaaaaaaatttaatgaatcacgatttccataaacctcgttgattagcagcgagccgcacggtacgtttaaaaatcacttaatacgcctatgctagttagggtgttacaaattagcaggtctagaaagtttgaattggtttggggttgaattggtcgagttatgaatttttgaaaaattcctgcattgaataggaattccagttcagggaggcctgtaggaaccggtctaccggttggcttccagaaatttttccctgaatcgaaattccggttggggaagcggtctaccggttggggcaaatttgggaaccctagttcttcacatttttttgtgttatttagggtatttccatgttatttattgataaggaaacttctagtttcgagtttaagttcctgggaagtgatttagcgtgtcacttaacagtgttgtgattattatgatttaaaagcctgtaattcgccgagcagattgttccactcaggttgaccgacacacctaaatttggaatcgaggtaagattagtataatgccatgcatatgcttatacatgtttaacgtacatgttagttgccatcaga

SEQ ID NO: 286009 - DNA, 313 bp, Cannabis indica
actctttcttcaagaataagcccttgcttagtaaaaattcataaactttacatagtctaattttagaattataattgattaatcaaaatcaattaactaagtcgattaatttaccgttacacctttcaatgtattttatccgtaaaacacttagccacctataaatgatatttcagtgaacttaacataatcactgaaatcagtactcaaccatttatctctgttcagccaagctcgaaggaaataatcatttcacttctatgttccaaaaatgtacgtatcaccctgagcaaaaagtaggcttaactaacaa

SEQ ID NO: 286010 - DNA, 540 bp, Cannabis indica
atcaaaagatctttctattaaaaaaattcttaataattgtgttagaattaataattattcataaacatagaaaattaattctaagtgtttatgtagtattaactctttgaagagtttaagatactatagaatttgtatcaataataaaaacacatacacatacaatcattaaaacatataaatataattggtactggtatacacaagataaagtaaatgaagctcaattcataaatgcaatttatttccaaaatagaaaaccttataataaaattctccaaaattaaaggaattgtttgcaacaatataaaaaataaggaataaaatcccaaactaataattgaaatccaaattattttgaaactaaaacaattaattcaaaaataagtaaaaaatttcgagcttcatcttcatcttggactaactccacccatttgtccaaccatccgattcaactcgctaagatagcatccgagttgaagcagctggacttacttattacttacactcatcagcaggtgtctggtctaaggcatacaa

SEQ ID NO: 286011 - DNA, 434 bp, Cannabis indica
aaagaaaaaggaagttacgaccggttgattatggaatatttcaaacggtagtgcttcgatcagcttcgaccaactgcgcagagtttttgagagctacacagaagctgatgatgtctacaagttggggatggccttgtttgttatgggcgtcctcactggtaaggaggagaagactgtcgttcctccttttgtgataagaatggttgataaccttccattcttctacgactacccttggggaaagatttcttacaccaagctgatggaaacttgtaacaaggattacttggatgtgaagaataagatgttgaaaaagattgagaagggagtcactcagaaggaggcaaaatactcagcctacggctatactgcagcgttgcagtattaggcattcgaggccatattccagctgggaaacgagtatgcagtgagga

SEQ ID NO: 286012 - DNA, 440 bp, Cannabis indica
agattgtaatgggttttatttagggcataaaatcccaatagatctgccacaaaataaattgatgcttaagagctgaaagacgacactacgccacttttctagcttatttgatagaactctctcatacattttgttaattttaaatgtgtcagaactccttgcttgaacaatctcaacttgtgtaaagttctctcttagtttcaagagtttccttcaataccaatttacatcaagttttaactcatagaaccatacatattcttaattcttcaagtatatacaactgattaagttaacccacaatatgtcttgttttaaagtgagggcctaaggatacttagccttaactgtattgtttcactttgcaccttctctaaaaaccaatccaccatactttctatgtttgcactgttgggttttgtgtcctaaataaaacccat

SEQ ID NO: 286013 - DNA, 811 bp, Cannabis indica
gggacttcagaaaacgtatcgacaaatgcaagaaacagattagaaacaccaaatggggaagagatcagagttcaattcatcaacacaatgaagcgaaagtcaatctttctgaggtgttggctcagcgagaagtcttttggaaacaaagatcgaagcaattttggctaaattctggtgacagaaatacaaaatatttccactctgttgcaagtgctaggaagaggaatagcggaattgggcaacttaaagatgaaagtggtacttgggtgacttggggatcggggttagaggcagttatcacacgttactttagtgatctctttcgttcaacaaatattgacttgggaaatattttaaatggtgttcggccgaccgtttcaagtgaacaaaatgcccaactcttgctgcctattacggaggatgaagtccgaaatgcactattccaaatgcatccggataaatctccggggcctgacggtatgactccggcattcttccaaaaacattggagcatagtaggctcggatgtggttaattttgttcgggatttcttcaatgaaggcagcttcccctctggtattaacgatactcacattgtcttaattcccaagaagaaaaatccgtcccaagtgggtgacatgaggccgatatcgctttgtaatgttctatataaaatagcttctaaggttgtggctaatcgaatgaaaggaatcctagactatgctatctcagacactcagagcgcttttgtttcaggaaggctgatttcagacaatgttatggtggctttcgaggttatgcactacttgaa

SEQ ID NO: 286014 - DNA, 642 bp, Cannabis indica
tttggaaacaaagatcgaagcaattttggctaaattctggtgacagaaatacaaaatatttccactctgctgcaagtgctaggaagaggaatagcggaattgggcaacttaaagatgaaagtggtacttgggtgacttggggatcagggttagaggcagttatcacacgttactttagtgatctctttcgttcaacaaatattgacttgggaaatattttaaatggtgttcggccgaccgtttcaagtgaacaaaatgcccaactcttgctgcctattacggaggatgaagtccgaaatgcactattccaaatgcatctggatgaatctccggggcctgacggtatgactccggcattcttccaaaaacattggagcatagtaggctcggatgtggttaattttgtttcgggagtttcttcaatgaaggcagcttcccctcctggtagttaacgtatactcacattgtcttaattcccaacgaagaaaaattacgtcccaacgtagggtggacatgaggccggactatcgctttgttaatgttctatataaaataagcttctaaggttgtggctaatcgaatgaaaggaaagtcctagactatgctatctcagacactcagagcgcttttgttttcaggaag

SEQ ID NO: 286015 - DNA, 114 bp, Cannabis indica
attagttttggcatttaaatggttagaattggaaaattggcatttttgagaaaatagaaataaaatttgtgaaaactgcaaaaccaagtggggcccattacacaccatggccgg

SEQ ID NO: 286016 - DNA, 467 bp, Cannabis indica
tagataattaagcaaaaaaaatagatatttacctattttcaagttcaaattacactaatatcttaaattaattttaaaaaatccaattaatttaattctgataattacaattgaaataggaatagtaaatatctaaatacaaaactacacaaaaaatcagaagttaattctaagaaaaagtatgaaaaaacgaagaaaaacgaaaaaattgtgggctgtacggatggtatgttgttgcatacccatccgcgcgcgccacaaggtgtcacggtcgagaaaacttggcgttgggatgtcccaacagcatttccacacgcggaatggggtttcagacaccccatgtgcgtgttgctcggacaaaacctgtccgaacacgcatctggccgagggaatgggccatccgtgcgcgcgtgggataggtgatcaccctatctttttttaaatcttcgaaaaatcataactaattc

SEQ ID NO: 286017 - DNA, 508 bp, Cannabis indica
taagcatccatgaagcttaatattttgtgcccggctgttgcatcgacgagctgatcgattcttagaagtgggaaacagtctttagggcatgctttggtgaggtctgtaaagtaaatacagactcgccatttcttgtttggcttaggcacgagtaaggggttcgcaacccaagccaggtagaaggcttcaatgatgaagttgttgttgcgcagcttttcaacttcgtctttcagggctactgctcgttctttatccagcaagcttcgtttttgctgaactggccggatattaggatcaatattcaagacgttcgaaataatagaaggatcgattccgaccatatccgcatgtgaccaggcgaaaatgtctaggtttgctctcagaaattttatcaatttgattttactccgagcaacaaacgctttccgatttttagctttctggccaggatatctggatcgacctcgatctcttctaattcttccacaggtccaacattgctgcttgg

SEQ ID NO: 286018 - DNA, 621 bp, Cannabis indica
cactcttgcatcttttggtttcctttttgggctgcgatttcagcttcatgatcgacaaccttttgccttaagagtaccaactctgagtagctaccttcatcataagcgtactcatcgaagtttccttcgtattcgttatcaggggttccttcttcttcctcagagcccacatctgctcttgaggccacgtcctcatcatttggatcttgagcatcttgaagagggcaaggttgatgtgtggttcgagtctccaccattttcgtcttgttgtaatatagtgtcttctttcagacgctcccttcagctctcaatgaaagcaccaaaatgttgaccgaggttttcggcaaccaatataataataatagtttagagagctataaggaattaagagagagatttttacgtggttggggcgttaatgagccttagtccacgactctgtgtatttatgatagtatttattacagagaatgttcttggtggatttttcttcttctagtttttatgaaacccagaattctcgacccctctttaatgagtttgggggtatttatagtgtttatgtggggtgatccctagaattaaggtacatgtatttctgtaactatcagtaaagccaca

SEQ ID NO: 286019 - DNA, 735 bp, Cannabis indica
tctctgtctgggttttgatctgggttcgggtttgggtttaggtcgcatcctggtcctagtcctagttcggttctagtaccatttgcgaatctgagttcgagtttaggtttgagttcgggtccgagttcgagtcctggtaagtttgggttcgggtccgaatttcagtctaggtccagatcaggctccgggtgtgggttcacgtcctgggtattgggtccgaattgagtctggattaagttctgggcctaggtccttggttctgatcctggtctgggttcgagtttgggtccaggtctgggtctagctttggctctgattctaggtgtgggtgtttgagttcgggtccgagtttgtgtccgcgtttttgtctaggtctggaccccgatctgggtctaggtttgggtcccgagtgcgggtgcaagtttgggtctgggtcaggatctcgatccagatctaggtccaacatttccattccagtctgggtcttggtctgagtccaggttcgtatctgaatccctatctgggtccaagtctgtgtttgggatcggttcccagatttaggtccaagttctggtcttagttttggtctgggtacacgaccgtgttcgggccagagttcaaatctccgtttgggtctgaggataggtctatgttcggttctaggtctcggtctgggtcctggtcacggtccagtcttgttctagggttctgtgtcggcgattcttgttcaggttc

SEQ ID NO: 286020 - DNA, 1060 bp, Cannabis indica
aaaaaaaaaaaaaaacaaggtacaacttctaccgatgcataattataatcgataaaacttttagtgaatattcagccggcacttaatagcagcaagtcactttttgtcggcgaagaaaagcactattttaaagtagttttatcggcgcattttccatttgcaccgacaaaacttgttttaccgactaggaattgcaggtgcaattatgcgccagtaaaagtttgtcggcgtaaatttgcaccaacaaaaaccttatttcctttagtgtctccataggagataatgatgatcctttaagcatattaagagattgtgattgaagaacactattgaggcattgtcataatttttgtttcgcattttacagggaggaaacgctttcattttgagtgtaagtgttccatagatgagcctgaaatttgttacttgagtttgtaacaatattggccattaatggcaaaaagttctgctctaataccatattgaatctatttgacatgtttggatagtgagaaaatgaaaaggaaagacagagaaagagaaagaagaagagaaagaaacaattacaaaaaaaaaaaaatagaaaggttatgtattaatttatcatataagtaatgttagaaattattggggtcacaattgtatatgtaaaatgtgtgtcgggtcatcaaataattaagtcaaatttatgtggtctattctggaataaattttatgacttaagggcatgattttcatgattttaatatgtggataccataaggacaatttctattttaatgaggggccatatagaaatagttaataaatattaccaacagttttgtctgttggtaatataaacggtaatggtccctaatttgtatcgtatcttttcactcttgtatccccattaccaagagaaaaagtttcagagaaaggtattgatgcaaattagaagatcaaaccgtttaaaggtcgattctatgaacaccgtgttgggtttcatgccctaaataaaactcatttcaatatgatcagatttacttattaatatagatcagaaataacatttaatgtt

SEQ ID NO: 286021 - DNA, 386 bp, Cannabis indica
agggttccacctgctgtcaatcctggacacacgggaagtgtggtgaatggtgaaacaaaaccggtatctgaaactgcgcctggtgtgcaagagactgggaataacagttctgcacacagccagggcattcataacacgactgttccgcctggaaccaacacccaaatgaccatcggagacgcaaccgaattgaaaaatctctgcgctgcgctcggactcatgcagagtcatagcaacactctgcatcatgatcaagatgaactgcgtgctgcagtgaatctcgcgtttgacgaacagaggcgtatgttcgctaaatggagagacaaagagatggaggcgttaagggctcaccatgcagagatcaaagatcgtagtcggtaagctac

SEQ ID NO: 286022 - DNA, 540 bp, Cannabis indica
tgttagtattgagttaatggaattttagttttttttaagcttaaactttaagtgatgatgctattttgatttaatggatgaattgttgtgaagtgatggttggattatgttatgttggtgatattgatttgatctggaggtgttgggcaggtgtggtttggatttggctcgagtttggggagaaaaactctaggctgctgccctgccagaaccggtcgaccggttcgctctggtgtatcagaaccggtcgaccggttgccatcaggggagagttttaattttttctccaggctggttttagggctcggggtagttttcggcgtttaatttggaatgtttaggagttataaagcctaacctagaactattgaagataaggattgtttggttttaggaatttcggagatgttgattcaagtatttattgaatgttgttgtcatgacataggacccgggatttgccaagccttgattccatttagaaaggatgcacgctaaactcctggactgaggtaagaaaagtattaaatactgtataag

SEQ ID NO: 286023 - DNA, 1065 bp, Cannabis indica
caaaaatagaagcattagttacattttcaggaaaaagaaaatgatctttatctaagtcgtacaggaaatatggtaaatgactaagtgaaaataattttctaatttcctcaacggctttgtctatcacatcagtatgatagcatttcttttcatccagaattaggggaagaatgatagaatgagaaagagtttcattctgaatagtggtggtatcatccttctctatgaataatgtgggtaccacatcagtatggtaaccctcatatgtactcggcagagtggattcttcaaaattttcaccactagatgtagaggtgacacttacctcatcaaaattgtgaaaggtagtattggagattagtgcttcattcacctgttgtagaggaaaatcgttagcatgcgaacttaccaggtgaccagataacttgctcaattcttgcttaatttctttcagctcagcaagtaagtctttcatcatctcgcaatttatcaccatagatgcttgtaactcaacaatagtgtcatttagggaacgattgtatagatgttgagagttatgggaaaaccaagcatcttcctcttcacaattccactcatataatggattatagtcgtactcaggcttccaactataatcatcagaacttttgtgattaaaccaagcatcttcctcttcacaactccactcatataagggattatagttgtactcaggcttccaactataatcatcaagactattctgataggaagagttgtaagattgttcttccatgtcatcataaagatgtgcaaaagatggcgtatgttcacaaggacgtggtcgatgagactcgtaccaagccttccactttttggaactatcactcttataaaaagaatagtattggaaagcttcctccccgtcactaaattctggttcgataaaattactagtaccttcagtagcactagaattttcatttaatgaagcaagatataatggatacaaatattcaaatcggcgatgatcttcttcattcatattttttttaattagtataaagttcaactatgtaataattt

SEQ ID NO: 286024 - DNA, 623 bp, Cannabis indica
taaaatagagtaagtattattataaatatagtatacaaaaatttaattttttttgtaaaatgtgtagctataatagtatgtgtatttgattttatgagtattaccattccttcagtgcttctgcctcggggagttgaggattgattttgaaggtactcgtgtcgcgtgacgatagagacagccctaaatcaaaatgtatgtgttaattgaatttttgaattttcgcttttaaatatcagtagtttaattaatgcaataacctctcttggtttgaacaattagttttgatcccaatattatgggtctgtcttcgattacttctgctatttgtaagcattcatcgtggactttatgcccccacatcgtcaaacatactggtttgaagctacaactttgtaaagaaataaaaaaatgtattagcataaattttgttaaatagtatttaatatatcgcaataaaaatgaacacaagggtgtatttatagtggtagattaaatgtatagtttacctttcatcaattaaatatatctcttgaattgtatgtagtccatagggagtgttgacttcttttggtgggttcattttgagagcaatagccaaaatatctaataaattgaaatat

SEQ ID NO: 286025 - DNA, 789 bp, Cannabis indica
taatatttttgtattttttttagcttactatatctatccttaacactcaacaatatctatcctatgtattaatattattcgaaaattactctaagtatttaaggattatctaaatatatataaaaaatattcttataaaagtaagttaaagaaaacataccttataccaaaaattatgtacttgacttccgataaagtcacttccgataaaatcctaacaaccaagtttaagagaaactaaaatcaaatattatcctaattctaccaaaatttcggcagcataacggctataattgaacgtttccaaaaaatttaaacctattaataacattttcctaacaccattaataaacaaaatttgagaacctttcaaatatgaactttgacattgataatcatgctactaacacgaacatgttttgagtcaaatataaagacctactaagtataataaatgcatggacacgtcaattagattgtacaagacaagcgtctaaagtaacaaacaaaacaaatgtcacctaatttcatgaacatgttttgagccaaatataaagacctactaacacaaacatgttttgagtcaaatatgaatgtgttatgtcacctaatttcttacaactagcgagtaatagcctagttatttatgttatgtacttttcctttaacatttatgttttttataataaaatttgatccaaattctaccgaaattttgcagcataacggctgtaattggacgttcccaaaaattttaaaagtgcctaaagtaacaaacaaaacaaatat

SEQ ID NO: 286026 - DNA, 952 bp, Cannabis indica
atttaaaatggaaaacttacaaaaaatagactttagctaaatatttacaaaaatattgccacacggtagaaattatttttatactgtcttgaccaatttttttttttctttttataccgtaaacaccaaaaaaaaaatagaggactttcattttccacacacacggacagaaccaccacaggaacatcagaacaatcggaaaacaaccattaattccggtgagattgagaaaaaaaaagtgaaatcgacgtcaaataaatagggaaacagtttactgtgttttcccattttctttcttttatactgttacacgcccaaaataacttttatactgtttttttttttcgaaattaactttatactgttttttttttttcggctgccaacaattttatgttattgttttgttttttttttttgtattgattgggacatgggctcaattatttatttaattttttattttaatggatgtaaaagttattatttattatttttaatatttaataattattattttttgagataatttaataattattattttgatgaaaaggttgatgggatgtgtcataaaagtgacatgttttactttttcttttatttaaataaatttaaaaatcacaccccatgtctcacttttttttttttatttaaatagatttaaaaatcccactcccatttctcactattcatcttcttcatcatctttatcttctagcttttcacataaatctcacccccatgttctaatattcatcttcttcttcaagttttttttttcttcatctttaccgttgttttagtattgttctactgttgtttttcattgattttttatttttttttctatgtttcagtttcttcttcttctatctttcttttctttttctttctttttttttttttttaaaactttttttgtttaagttttctttagttttattgtttt

SEQ ID NO: 286027 - DNA, 938 bp, Cannabis indica
gctcgccgcgtgtttggtactctcctagtatctgatttacgaccagctgagactcactgtagacttccactcttttggcccccacggctttcgctagcctcagccctactattaaggcctcgtattcggcctcgttgcttgaagctgagaagttgaaccgtagggctgcctggagtcgcagtccggtcggggatatcattgccaaccctgctccggatccattttcattggaggctccgtccacaaatactctccatgtggggaccgatggtgttggcgcatttgcggttgcctcggcttcattgcattcggtaatgaagtctgccaaggcttggccttttatgtagattcggggaacgtagtgtaagtcgaacttacttaactccattgcccacttgaggagcctactggatgcttctggtttttgtaggacttgccggagtgggtggttggtcagtaccttgatcggatgtgcctggaaatatggccttaattttcttgaggccatcaggagacagaaacccagtttctcgatgatggggtaccttgtctccgctcctatcatgcgcttgctaacatagtacacgggatgttgagttttcccttcttctcggactagggcagctctgaccgcgtgctcggagacggccaaatataggattaggtcctctccgagaacgggctttgataggataggaggcttggccgtatgttctttcaactttttgaatgcctcctcgcactcgtccgaccactcaaacttttgacatttcttcagtatgttgaagaaggggatgcacttgtctgtagaccgggagatgaaacggttaggctctgcacatctttatgctttttgggggatggcatgctcaggagagcttggatttttttcgggtttgcctcaatccccctctggctgacgatgaagcctaggaact

SEQ ID NO: 286028 - DNA, 554 bp, Cannabis indica
caaccactcgcctctgtctcatatacaaatatttctgagtaaagaaatatgtgaggcgttttatggtcagtataattttcacatctttctctataaagataatgccgccaaatttgcaaagcaaacactaccgcggccaatgctaggtcatgagtcggatatcgctgctcataatcttttaactgacgagaggcataagcaataacccgatcagcttgcatcagcacgcatcccagaccttgtctggatgcatcacaataaaccatgaacttttctttgtcagaaggcaaagctagcactggagctgtaataaacctctatttcagctcctcaaaactagcctcacatttgtctgaccatacaaaatgctgattctttttggttagctcggttaagggtgttgagattttagaaaaatcttctaaaaaccgacgataataaccggctagacccaataagcttctaatttctgtcactgttttcggtcttggccaattcctaacgaactctatctttcctggatccaccttgatcccatccttactaacaatgtg

SEQ ID NO: 286029 - DNA, 414 bp, Cannabis indica
ctttgtactttaacaaatatacataagtatatctactataatcatcaataaaagtaataaaataccttttaccacctctagttagaataccatttaattcacataaatcactatgaattaaatctaacaattttgaatttctcacaacatttggaaaaggtttttaatcatctttacttttacacaagtttcacatttaccataattccctatatcacaatcaatcatgccacattttttaactcttttcatagtagaaaaaccaatatgagctaatctaagatgccacaaaaataaagaatcatgctcaatcatataagtggaactagaagctttattattgctaacattaaaagttacatcattggtgcacaatttcaccattccctcacaagagtaccccttgcccaaaat

SEQ ID NO: 286030 - DNA, 501 bp, Cannabis indica
cattaggagattgttgagtctgctgtaaaggttgttgttgcggccttggacatgttgcactaccctgaggttgggtaggtaaatattgctggaggaatctgtcaaatcacgggtcatacagatcagaagtgtcctgtcccggaggaaagcgttcacgcaatctctgaaacatctcagccataataccaacgtcttgagaaagagtagaccctgcttgagattgagtctgactttggctggaagagctagatgttgttgttgatcttttccccttctttgctatgttgtaaccgactcctcgaatatagtcactcctgtcacccatgaccttgcccatgaccttgaattggatgtcagacggcacctccgaagaaccagaatcactgccagattggctttgaagcctacttctcaccatctcttcctccatttcacgagtgagttgctcctaaacataaataaatattgttaaataatcaattatgtgataattttaagaaa

SEQ ID NO: 286031 - DNA, 520 bp, Cannabis indica
actcgaggagggcgtcgagctcgactctgtccatctacctcggcttgtagtgctcgcagttgatcctgaattgcagcatattgatcggtcgtgagctggaccattccttcggacactaccgccggggtgacggggggaaaatgcatggttgctggtggtgtggacgtgtctccgacttgagggccagtcgtttctgggaataggttgagaggtctgatgttgctcctccctactccgccattgatgacgtctacaggtggcactccagctccaggcaatggtacgctcatcattccaacattgatggatccgttgttagctccgttagcgtgatttccagccatgatgaatggtgttctttgaagtgaatgaaatctttcagtcgaattcccacagacggcgccaaatgttgtcgagtgaatttcgcaacaccaaaaagtactatttaattgatataaaagagaatttttagggaaatgacaagtgcgagtattcaacctagaatggcgagtactcgact

SEQ ID NO: 286032 - DNA, 609 bp, Cannabis indica
caaagggtgcgcgtgaaaacacacgcgatttagacttgaggtgcagtcaaatcggtggtgataacgtgggcccgtgtttgacgtgtttaccttatcttctacacataaacaccagcacgcgcgtgcctttagagaaagagaacgtgcgcgtgtggctgcctaattacacaaaagatctatttgagaggataatcttggtatgactctgctggataaccaattttagttggtgaggtgttccctgtgaggtttttaggtgagcgcgtagtatttgtatttacgtaattgtatttttggtatctaaaatgattaaggaaaattagtttatatatttattttttttttatttttttttaatttatagattcggttgccctattaattttttctgttgtttctatatggattgttatacgtattttcttataacagtttttgtgtagaattttataaaaaaaaaattattttaataatgtaaaaataaaagacccccaataattatactcgtaaaaaaataatatcaatggtagctttttcttttttttttaaaaaaaaaaaaaattaaaccgtaaaagttactcaaaagttacagtatgatgcagatacgtt

SEQ ID NO: 286033 - DNA, 698 bp, Cannabis indica
gagccacctcaggctcctcttcgccttcttcagcctcctccggaagggcccggagctctcccgcaccctcggcgacttcctcagaaaagccccattgctttccttggccttctcccggaagcacctcctcgtcgtccactaaatcaatagtgtcagggggagcgctagaagagaccttcagggaaggggctatgggggaagaggtaaaggccggaggagccacgggagtgtgaactccggcaagctgttccaagatggcatccatggagacacctgtttcacaaaaataagcaagtgttagatatccgtggggaaccacttatacaagatacagcaaataagctactcctacccgaacttcctaattcggccctagcaaagtcctgaactttaatgctggcagcatcatctccgagatagctgtccgaaggccggaaccagctggacgtaatgtaagctgaaggacctaagggaataggttccggagggccagagcccatccgggaccgacctagaaaatctcctaagtttgaaaaataaaattccttcaaacgatccccccaccgggtcgatggcatcctaaacctatgaagacgctcgtcgaaccctacaggcctatgactggcgtattcaccaacggaaggaacataacgaattatcaaaggagacttaccgccggcaccggaggtgctagcacc

SEQ ID NO: 286034 - DNA, 348 bp, Cannabis indica
taccacacttattaaggtacctaaccagtggcacatttaattatttcttttaaataaaaacctcatcagggaagagattattgtaagataatctaacctttattacatatactcatgacatgtttctaatattccattgatcttctcaggttacccacctttcaagaataaaacatcatactatttttactttaatcttcatggttctcaataaccttctttaattctgaatatcatagtgaaagatatcaatcttggaatctcacaagattagattattccttcgtatgaattctatatccttatttattatataaattatctatactgatagacagcatattaact

SEQ ID NO: 286035 - DNA, 454 bp, Cannabis indica
aacaactggcctcagagccatggtaattgatttaccttcaagaaatttggacttaaaacgatatatgtgtgatttggatgtgattcattttgatctatgtgttttttgatgattgtttgatgttttgcaaatttttttctggaattatatttgttggatagttttaaaaaattaagcaattcacatttttttacagaactcaatttcgattttatttgaattagttatgattttttgaagtttgaaaaaaagataggggtggggtcacccatgtgcgcgcgcggatccgagtgttcactcggtcacacgcgcctcggacaaggttctgtccgagttttcttggtctgaagggccattttttctgaaaccagggcattgcgcgcacgggacaggctgcatgcagcctccttggccgaggtttctcggtcgtgcactttcccctgcgcgcgcggat

SEQ ID NO: 286036 - DNA, 560 bp, Cannabis indica
agattagattattccttcgtatgaattctatatccttatttattatataaattatctatactgatagacagcatattaactcggtatctccaaccgttactattcagtcgaaatcataagatcccacaatacctaatttataattatgtatttctattccttctatgggatctcctaaggtgatctattgacttaacttagtaataagttaagtattcgtttctgatagatattcaattagagcattctttatttccacccactaatatatacttatcttaataccttgtaaatttatacttattaacacatcccttcttcttgattatctctagaacgactactgattttgcatcctaatatgaatctttctagcgtactttgtcctcactcatacgctttccaagataactcattggaagatttcccatcttgagattaccccaagttaagtatgcttaactccaaggtaagctcatggtgggttatcataaagtagatgcttctttgtcgttcctaattgtatttcttgctttcattctttcattaataaaatttaa

SEQ ID NO: 286037 - DNA, 537 bp, Cannabis indica
tgttgtgtataatttaattatgcatgattggatcgatatgtaataacatctttcattaacgtgtcatttaccatgaaagaattattcatatcacaacgataatcattagtagatgagtctgaatcctaagtatacatgaattcttatttgtgttcattgagttctttgattcactcgtcaaagtttatcagagaaggtgattcttacaacttctattttggaagcttaataacatgtctggctgggaacatgtcatacaataatggaatccaagctttcctaacaggtcaaatattagtttccttatagtgttaattctgatagtgctaacaattagatctaaatctattaacttatagattaactgttcacattgaatcaatagtacataaggagtcaagagataatataaagggtaaatcgataattttgactaactctaattatgaattaataattagaggacgaactacatatattgattataccaatggactacaaataagaattttgtaaatataattctacattgtcaaa

SEQ ID NO: 286038 - DNA, 705 bp, Cannabis indica
tatccccacaagtcaaaagcctccatccttgcttagctaatagagctaagttgaagtcccttaaatctcgaaatcccataccaccattgctcttatgtttcgtgagcttgtcccagctgagccagtgtatgcctttattcttgttcgacctccaccaaaacttggtaatagctcgctcaatgtcctgacaaatcccggcaggaatgagaaacacattcattgtataggccgggagagattgaacaactgatttaataagaacttcctttcctgcacgagaaagaaatttattgtcccaagactggatccgcttcagaactttgtcccgcaaatagccaaagatgacatttttattcctgccaacaacactcgggagccccaaatacatattgttctcagtcgcttcctgaatgcccagagtagcacagatggccctccgcaaatcagatgaagtattagaactaaagaagacagaagacttcccaaaattaacacgttgtcccgttgcagtagcaaacatcctaagcaactgaagaacccaattcatctcgccattggtcgccttacagtacagaaagctgtcatccgcaaagagcatatgagagacactaggcgctccatgagccactttacaaccatgcagccacttcctctcttcaaacttgcgaataagagcagaaaaagcttcagcacataccaaaaaaa

SEQ ID NO: 286039 - DNA, 791 bp, Cannabis indica
gagagagagagagcacgtatacggcgtatacgataccgaaaattttcgtttcttcaagcggagtgaaacctgggtgaacgtgggggtttgggatcacttatatacgacctaaggaagctttttaacgtggtataaggggcggaagtcgtcgttttgagattcgccatttttgaagcttcaaaggtgcggcttagttacggactcgaattcgaacgtgtttaagcttgttcttgggtcaagggaggttatatttgagtgcatgggaccctaaggattgtttttgacgtaagaaaacgaagctttaacgtccaaaacgaaaatccaaaattttgactccattaaagacggtacaccgccaacgaagaagacaaccccgatctgccttctcggaccacttttcttgatcgttttgaggtcctgagcattgtggagagcttccccaatcgaaaggacgcttcaagagcaatcggagacaaagttacactttaccggcgacgaaaccgacgagaacgccggcgaccgcgttctgaccgtttctgaggtgtttttcttagatatttttgtatattttgattccttattttattctaaggtgcttggtgaagtttcataattttctgaatttatttggaattattgtgaattatttagtataattcatagattaattatgaaaaatacttagattactcagaaaaatctaaatatattttatatgattagttatgagatataaactattataaaattggtagattgaattttcggttaattttgtatttttcatgaat

SEQ ID NO: 286040 - DNA, 559 bp, Cannabis indica
tagacgtattagacgtgtgggagcaacacgtaggtctatgctacatagacatatataggcgtgtgagcgtaacacgcaggtctatagcaaatagacaaatagtgcagtggcaccaataattatatgataaatatatatgttgagactaagggttatgcgctcaaggcataaccaggttggactcggtaacaagaaccgagatgaactgatctaaggccttattgtaaatagacgtgtgagagcaacacgtgggtctacgccacgtagacataaatagacgtgtgagcgcaacacgtaggtctacgccacgtagacataaataggcatgtgagcgtaacatgcaggtctgtgtcacacagacaaatttgaatagcattgttgtttatattgtatgatgagcatattattgatatgttttatactgtcttgctgggcttggctcacgggtgctctactgtgcaggaaagggtaggacttatgctgatcagccatgagtgcaggagctggacgaagaatgtacatgtccgggccatatcagaccaagcgggttaagggtcta

SEQ ID NO: 286041 - DNA, 461 bp, Cannabis indica
gttctgggaattactgaaccctcatccggaataggaatttttcaaaaattcctatctcaaccaaatcaaacacaattcataccaaaccttccagacctgctctaaataccccaaagaacataaccaaagcatcaaactagcccagaaaccacagatacaaaatttgccattaaagctcaagctttgagttctaaactcaaacttgagcaaatccctctatcatgcattcaaactagctagaatctacttaaaccaacataattaagcctctgcaaacaactaaaaacatccagcaaccatacagcaacaaatcacaccatttctttcaaaaatcataactttttcacataaaaatctaaccaactagaacaagaaactcaagcatgcaattcaacttaattaaacataattaattaacattttagtcataaaacaacaacaataaccagcagcagcaacat

SEQ ID NO: 286042 - DNA, 943 bp, Cannabis indica
cctcgcaagatgttgaagaatgggacacacttgtgtattgatttaaagctgctgagcgcggcgatccggccagttaagctttgcacttctttggtttttgttggcgagttcatgtccaggagggcttgaatcttttctggattaacttcaattcctcgagcattgacaatgaagcctagaaactttcccgagctcactccgaaggaacactttaagggatttagtttcatgttgaattttctgaggacattgaagcattcgtgcaggtcgtctatgtgccccccagcctttcaaataaagaggtgtctggctgcctcagcgattgattcgcttggttggcgggtggaatggcaccatttatcttgttggagccattaggtatgacttctcctaataaattactagacaaggtctgcccgcctactgcttggcccatgagtggaactcgtgaccggggatggggcagctgaccatttgcagtctgagaagtattcatcgctggatttttgtccgtctcaccccggggaatgacgttcggcggttgctgacctacagtttggtaggcttttcgtatcagcacggtagcctaccgactacgatttttgatcgctgcatggtgagcccttaatgcctccatctctctatccctccattcggcaaacatacgcctttgttcgtagaatgcgagataaccgcagtgcgaagttcgtcctaatcatgatgtagggtattgttatgaccctccatgagtccgagagcatcacaaagattttgtaactcagtggcatctccgatggtcatttgggtgttggttccaggcacaacagttgtgttatgagtgccttggtcgggtgcagaactgttattcccagtctcttgcacaccaggcgcaatttcatctattggagttgttacaccattccccacgtttgccggctgtcca

SEQ ID NO: 286043 - DNA, 511 bp, Cannabis indica
ccgctaaaaataaacattgggattatgccgcttacaaacttaaaactttgggtacttatgccactatttaccctatttatattgacattcgaattaatactttctttcctcattttttatgaaaattttaaatgaatcctgttttttggggggtatttgattgaagattgcaataccccatttgagagtttgactgaaacatcaaaatggtgagaattaatgttgatgcatgcgtcggggaagaagaggctgatgtggagagtgacaggcaaaggcaaagctgtcaaattatattttgtcgagagaaactcttaatattttgtcatcaaaaatatatattttttacatataggagagtacttcagtggactctctaaattgaacaccacctactctaattcttttttgtacagatgtcatggtgaagagcattagttcttttttttttatttttttttagaataaagtgttctttataagaggagctatcgctcatgagaatggataacaa

SEQ ID NO: 286044 - DNA, 593 bp, Cannabis indica
ttcaaaggcctatgttaagaaatgtgacaaatgccagagattttcaaagataccttgtgctccgcccaacgagttaactcagatgcaaagtccgtggccttttgccatatggggaattgacctgatcggacaattacccaaaggcaaaggatgagtgcagtatgtagtggtagcggttgattacttcactaagtggacggaagtcgaaccactcgcaaccattacagctaagaaatttcaagactttattatgaagaacataatttgtcggttcggattgccgtataaaataattttggacaatggcaaacagtttgacagccagtccttcactgatttttgtgcgaaccacggcatcatcaaaagcttttctgcagtggcgcatccccaagcaaatggtcaagttgaagtagttaacaagacctgaaggatacactaaagaaaagacttgaagatgctaaaggaaactggccggatgaacttcctgatgttctatggtcatatcgaacaactgaaataacggcaaccgaacagactccatttgccatggcatatggatatgaagctatgctgcccgtagaactcgagccacc

SEQ ID NO: 286045 - DNA, 864 bp, Cannabis indica
gtgaaattttcttattatctcatatattttatttcgtctcccataatttcatttttatccctactaacttttacatttttttatttttatattcacatattctatttttatctctaataaaaatgatattcttcattaatagtcttttaaataaaaaaaaaaattatctctactgaaaaataggactagtttcgccactgtattaatgtattggacaatcaagcaaaaaaattagtctaacatttttcataattttttttaagtaggtacgttataattatttaaaatatcataaaaaaatattaaaaaattaaaaataatttataatataaaaattagtatttaacaaactactaaaacattaatttctttttttgaaatttttttaaaatttaaatttttttttattgtgagagtacaaaccatataattttagtattaaaaaaattgaatataatttgtttcgctatgaaaatatgactttttttttcttctttgaaagcccttttatataagagttttgtaacgtgggaaccggacattgtgtaaagaacaagtgtgacagaacagaagaaccaaacccaaaacactctctcactctcagaacaccaatccttcacttcacacttcaaacttcaaaccaataaaataaaattaataaaaagtcttggatccactgcacgtacggatcttgctcgggtcccacaacacatatccaagtcagctaatttgtctttatttataataacattcatttaatactcaaaataaaataaccattaataaaataaccaccctttcgttttctataagataaacattgtcattcattaataatttttcctttttttttttcaaaaaaaa

SEQ ID NO: 286046 - DNA, 594 bp, Cannabis indica
tttttttatgtgagagtacaaaccatataattttagtattaaaaaaattgaatataatttgtttcgctatgaaaatatgactttttttttcttctttgaaagcccttttatataagagttttgtaacgtgggaaccggacattgtgtaaagaacaagtgtgacagaacagaagaaccaaacccaaaacactctctcagaacaccaatccttcacttcacacttcaaacttcaaaccaataaaataaaattaataaaaagtcttggatccactgcacgtacggatcttgctcgggtcccacaacacatatccaagtcagctaatttgtctttatttataataacatttaatactcaaaataaaataataattaataaaataaccaccctttcgttttctataagataaacattgtcagtcattaataattttttttctttttcctcttttttttttaaaaaaaaaaattaaataaatagcagtaaagtttcaagtttacaagtatcataaattcaggagcattgctattggacaccagtggtgcctagcaccttctaaatgtgtcgacttgtaattggctagcgatactctataa

SEQ ID NO: 286047 - DNA, 986 bp, Cannabis indica
ccttatttgtaaacatcttaataattagctaattctaagttaaattgtgctatcttattatttaaaatataattgggtaaccttaaagtttaattttgaaactaatgagtttttatataatataataaattactatttttgtttaccaattattttatatacctttttgttactttgaaacttatgtgtttgtttttaaattatattaaattaatttgctattttaaatacttttacgtcacttattttttattttacttttgtaaaaaatattgttgttactttcaagtctatttaataaactaaaaagttacaataaaattaaaaaaaaaaaaatacacacacaaaacttattagtaaaattgataaacatttaaattgctcattaattattttaaagttatatttttagttaccttaagtttatactaaaaactaattagttttgatatagtataacaaataagcatagatatgaaataatttatttagtatactttatagtaatatttaaattaattataatttagataatatgccaattagttacttatataaaatgatccattttaaataaaaatatctcctgtagataatttttaatttttagtattagttatttaaaactatatgatcatctttgctttatattatgtttatttatgttatattgtagtaacttattatttaaaataagatagagaaagaatttttttttttaaagttggtagagaagagagaagaaacatttattttattttatttctttttcttgtatagttatctgattttttaattttgcaagtaggtctttaaaataaaaaacaaaagaaaaaaataactgttactttagttataaaatgtaaaacagtataataatttaaaaaacgttagaaacgaacgttaaaattaatattgtgatggattaagttattattgataataaaagacaaaaagtgtatgtacgtgtaaattatccttttttt

SEQ ID NO: 286048 - DNA, 551 bp, Cannabis indica
ctgatccccaggcaagccaccctacctgatgccgaacaggatttggcggtcccaatggaggaggaccatgagggggacgctgaagtccaggaagttgaggaactggacgaggcgcgtccgggcagccctcccgctgctgagggagaggaagagattgaaccccctaactatggggagtacaatgaggctgggcaaccaattgatgctgacggggacatcctggttacgggcattgattatgtcaccgaggagcttgctgaggcagttcctcataggaggcagggtgccttgggcgctagatgggtgagtcctccgtccaagatttcggaggcacgcctccacactcttgaccaggacggatacctatgcgagctggactgctacatccccgcccacgaaaattgcgcctcaaaccttgataaggggatgtgtgcctggtcgggggctcacggccagcaaggggcgctgatgcccttacacaagtacttccgggatgtggcggacttcttgggcctctgcccggcccagattactcccaagggcattaagta

SEQ ID NO: 286049 - DNA, 811 bp, Cannabis indica
gtgcagatactcgatagaagagagaaagtcttgagaagcaaggaagttgcactggtcaaagtactgtggagaaacagtaaagtggaagaggcaacctgggaactcgagacggatatgcagcagaaatatccagagttgttcaggtaaatttcgggacgaaatttctataaggaggggtaattgtaataccctaggttaagaaatggattagaaaaaccctaattagataattatgaataactgaggaattatattattatacagttcaatttatgtgaattaatatgatttataatatggtaagaccccgttggtgagcaaggggcattttagtaattgtgatccgagaagggtaaaatgatgaaattaatttaattacgtgcttgatggaactatattattgtatagtatgcatgtgctgtcttttcaggtgtatcctgacaggttggcgcggtatagtcacaaccgggtatttcgggctgaactcggttcgggcccgaaatgcaattggattgagttaattggcattttatttaatatgtgataatttgaatttttatttggtattaaatatgcatggaatgacataaatacccttgtgagggtgaatatgtgtgctttggccctaggggcattttggtcttttgaccttttatttctcatttagtaaagattgatttttgggaaattaaattagaaaattctggtgttattcccctctcaccccacccctctctctctctctctaaaccctctttgatttctcttgatttgtttggtgaaattgcttgagttttgattgaattgaagc

SEQ ID NO: 286050 - DNA, 538 bp, Cannabis indica
taaaataatttccaacatctcgggcatgtaactagtatggttcatatttcacctcaattagtagaagacatggtaagactaagcatcgagtttgttgtaggaaaacttcataacttgacgttacaatctgatctattagaacgaattaaagctgctcagttaactgatccagagttagtaaagatcagtgaagaggtttcagcttgtcaagccagagattttacagtgtcagatagtgggatgttgttgttcaaaaccagggtttgtgttcctaatagtgcggaacttaaaaaatgaaattctcaaagaggctcataccactccatattccctgcatcccggcatcatcaagatgtatcaagatcttaaaccctacttctggtggagcggaatgaagaagaatgtggtagaattcgtatcgagatgcctaacctgttagcagatcaaggttgaacatcagagaccggtaggtttgttatagcctttaaccctacctgagtggaagtgggaagataatcacaatggactttgtggttgg

SEQ ID NO: 286051 - DNA, 682 bp, Cannabis indica
tcaatggagtagattttccttattagaaaattagaatggaaacattaccttcaatctattgactatgatttgtggcatattgtgtctagtggtccttatgttgctaaacatgtcataaatggtgttgaagtaattaagacttatgaagcatatgatgaaaatgataagaaaatgctttctaaaaatgctaaagctaaatatgctcttatatgtggtttggatagagacatttttaaaaatattgaacaagcctctaccgcttatgatatgtggaaaatgcttgaagttactcatcaaggaactagtgatatgaaggaaactaaaattcaaatttattccactcaatatgagaactttaagatgaaagcggatgaaaccattgctaatatgtatactcgcttcactacaattactaatggtttgaactctcttggcaaggtacttactcaaaaggatatggtgaccaagattttgagaagtctcaccaaggcttatcaaggaaaggtggttgccattcaagaagccaaggatctctcaacacttcccttggaagaaataattggctcactcatgaaccatgaaattttcatgagtgctcaagaagaagaggaagttgagaagaaaaagaagactattgcattcaagtcttcctcctcccatgccattagtgaagaagatgagg

SEQ ID NO: 286052 - DNA, 575 bp, Cannabis indica
cccaatgtaaggtttcctaaactttatatgtgtttatttcattgttttagaaattcatattaggatgttaatgaaacatacttgttagtaaatctagatcctggtaaaacatattccaacaactggcctcagagccatggtaatgatttactttcatgaaatatgaattaaaacgatgatttgcattgatttggatggtttcatgtggtttatgtgcttatgtgatgatagtttagaaatcgcaatgtatgttactgaaatattttttatttcgatctggaattatttttactggaaagtagacaaaaaattaataaatttaggcttttacagaacctaatttggattttttatgaattagatatgattttttgaatttgaacgaaaatatcaggatttgaatcactcacgcgcgcgcacaagcctcggattcgctcggacacgcacggcaattcagacagtgctgctgaagtgctgctgtctgaagtgctgctcacgcccgtgtccctcggtcaaatgaggctgcttgcagcctctatcctcggccaaatccttgcttccgcgcgcgtaggggt

SEQ ID NO: 286053 - DNA, 676 bp, Cannabis indica
ttttttttttttattttttcttagaaaatttcatgtaatttttattttaaatttttgtcattacatttaatatatagtttatttttgtgtcatatttttaagaatgtgaattgaaagaaaaaaaattaaaaaaaacttaatggagtgcttttataaatttttaggatgtaaataaaattctcaacaaaaaaatatattgagaacaaaaataatatacatgctaaaagagttattttgatacattctctgtttgttactgtatctaagatttttttagtataattctttttttttttcttttcaaaagtgcatgttttacacttttttaagattatttataaatttttaaatatttacaataattaagtgtcaaaaataaaattcaaataatttttttaaaaagaatttaaatagtttacagttataatatttttttgtgtataattttttcttttcttatatatgtggtaaaaaaatttatagatgattataaataactacaagatacacattataaaaaaaaatacactaaaaaattcttttgaatctcaaaataaataagaaagtatatcaaaacaactcttttaggatgtgtattataaatttttcataaaatatacgttaaattagtaatttttccccctaaactttacatataccaaatcatgcccctgaa

SEQ ID NO: 286054 - DNA, 536 bp, Cannabis indica
taatgttgacaacatcctttacgaaatcaaatagggctttctgaggttcagaaagtatggcttagatatttggaaaatgaaaaacaattttggctaaagatatcataagcacaaaaataacccacaagcttcttctaatttcaaatttcccaaagtgttcccacaactaaccatgattgagaaaattattttctttcttttcccaacatcactgaattttcattatttttccttgaatcatgttttttttcattttttttcagtgatattgatcttaccaaatatctcttttttctcaatcttgcaagtttcttttttttctatcttctctcacaccatgtattttgctcccccaaactaattatatagcttatgatatcattgataaaatagtgaggacaaaattaacagtgtggatacatatttcggttcaacaggtgaagaacaaaacaagtttaggctcaagagggttaactaaggataatcatttcatggtaggcttgaaaggctcaaactatccaacaaatgcctaaatc

SEQ ID NO: 286055 - DNA, 544 bp, Cannabis indica
cattgattttttgtcttaagtcagctggagggtacctccggcttttcctccctctctccccgggttcttggtgcacggatacgctctttcggtcctctcgatcctgagggccaagagtcactcgagggagcttgcccctttgcggacctttccctttcgagaaatttgagcggacttttcgcggattttgtgcctttttctttctccctgggatcgaagttggatttttctcagggttttcctcggaaggataccgtatagggcttggttccctggtcttgggtttttgagtacttggtgaggattcttccggtgtttcctcgggtcccgctaggatggccttgggatgtatatgtatccttgctgtttccatggctttttgcatggcaaccatcacctcttgcatccttttattctcttccttttgagctgcaagttcggcttcatgatcagccgccttttgcctcaagaccattagtttcgtatagctgcctttgtcataggtgtcgtaccctttgaagttttcctcgtattcttcatcgtt

SEQ ID NO: 286056 - DNA, 968 bp, Cannabis indica
aaatttagatcactttttgttatgtgagatatttgtatcacaatttgacacaccattggagtagacttttgacataataagctatatttatatttgcattacttatttgcatctccatttgagatgttcttagtcttcattgttttttgtaaattaacaatggccaaaattatttattaattttgtgactcttaaaaatatttaggatattttacacacattttatttttgtaaaatagaatattttagattttttttaaaagaaaataatcaatacataaaatacctaattaattttataaaataaataatacataaagtttttattaagtttaatttttttaataatgaagtatacatatgtaaatagaactccaaaattattaacaattttattacagttatagattatagataaatattgtctcaatttaattatatacaccaataaattcatttattatatggtatgattattagtatatatattaattatataattatcaaaggtaaaatattcacttaaaaaagaataaagaaaccttattaatttaaaattatatttgtaattgagagactttgataaaataatcacctctacaaatatttcacataagacaaaatgtcaattggatgacaaacttatttagcattaaccttaagaagtagtgtagtgtaatgtgctacttgttttatcaatttttttttttttttgtaatttaatatgtgttgaaggctaattatgtaattcaattagtggatatccaaaaatattttcactttttatgcatgatataaatatttagttttttttttaaaaaaaaaaaatttaaatattttatatacacttatacatgtataagtaaacttctatttttatttatttttatttaataaaataataaataaatccttttcctaattagatgtaagttagagggttataatataattttttatttttgaaa

SEQ ID NO: 286057 - DNA, 646 bp, Cannabis indica
gctaattaatgctctgaaaattaattttgaaaatccaaatttctctctccacaactgacagttgcactcgattattttgatttcccatattcgctttcaaggcgggaagtcgaggcgtctaaggttcctttacgtacagttacccttctgcctataaatacttggagtactggcacattacctcatttcatcaaccgtcgttgttaagcaaactttagagcgaaaagagagaactttctggcttcacagttgctgaagagcttacagacgatttctggcttgcttgaattcggacactcgaatctttgagtaagtttctgattccctttatgcttttcctttgcatgcttatgctttgaatgtaacttcgttgtagaaagaacactgtaggaaaccttagggtttgaaacatctgcgactcttcttttccatgtccttgtgttagctttcagccctaaggcttattttagaactgcattgggtctgttttccattctgctttttccaagcttcatgaacttttttgccctaactcatgaaaaactttctgacttcttgagtctagacttttctttgaacatggtcgttctttaatctgttgggtactcctggtcggcatatttgcttgttttttcatttgatactc

SEQ ID NO: 286058 - DNA, 619 bp, Cannabis indica
tctagcggtgcttttactttctaatcatctcttggtttcgggcagaaagtcatattcatgtgttatgtgtacgttaaatttttgttaataggccagggaagagagtatagtcttacaaaacttgaaatgtgaacctgagttgtcagcatatacataacctcaattttggcttctttaaccagctgccacacacaagttacttactctaaatttataaccatttacaattttttaacactcaaaaagttaccaagtttgttttctatagctctacttattaaggtagaaaaatattttcagattgactcctctattccgtttattaaatgaattgttttcaagttgacacattaacttaaaaatgacacaataatgacctactacaaagtatacacttatattcattctatttattgagaatcaaaacttcaatcttctccactagattagccagacacacacaatattatttggacataaacacaggacacaatattataactcaaactcataaacacttagtcgaaacttgaatgaataatgccactcttttaagttttaattaagactgtatatgactaggcaattttggttattgtattatcattgctgctacata

SEQ ID NO: 286059 - DNA, 556 bp, Cannabis indica
tatcccaaatattttattaattttacacattataattataaaaaaaaataaaaggaaagtcagctataattaaatatactacatgcacgtgaatggaatttcctgccatgtcttcttttttattttcctttttataatttttttattgaaccttttgtaatatcccagaaaataaataatatttaaatagacatattttattaaatatgtaattacttgggaaatgaagtaggattatgatctacttaggtaaattgttgagaaattatttaatgaaatacgttattttcgggcccggtaattgtggaaatttagcgatgtggttagtaatgtcacggcgttaatggaagaattattttgagaatattccggattaggttagaattttattagaatgtcgggttgagggcttagtgaaattaccaaaatgcccttaggttattttagagatttttttagctttgtgggtaatttaattattctttaaataattatacttttattcctttttatttttttatttaggggctgagactttttaaaaaaaaataaaaaa

SEQ ID NO: 286060 - DNA, 687 bp, Cannabis indica
attattatactatcaattattattattattatatttatattattattattatagaaacagtaattagactacaaatttttcaataattaagaaataaagttgaaaaaaaaaaatgactttaaatccccataaaagagagcacatatatacacatcctaaatgttacatggtgtaaataataatataatattattacatacacaactaaaaatatatactatgaactatttttttaaaaaaaatcacagcatcaataaatctcatttatgaacttaaataaaatttaatgtataatataaaattatatatatcaatataaattataaaacacaattaactattagattcaatattaacattattacatgctaactttaaatttctttaaacattctcaacatttgcaaatagagaaacaattaattttaagaatgtttcataatttatgaacaaaattattattgagaagttttataaaacatgaacgtttgtatcattagtattataaattatagtttaattagttagattgattacattaaattgaaataatatgaaaaagtagaaaaaaaaaatataacgtaaaaaaattagaaaaatagttgtagctatttgaaaaaaaattagatatagagaatgtcacaccaccttttaatattttacagttatatgaatataatataaata

SEQ ID NO: 286061 - DNA, 118 bp, Cannabis indica
taaatacctatagaagttatagattccatatctatgtttagcgctcctactcaattgtactaccatgttctcaggattaagatcatttgatctacgatcaactaggtgatattgaatt

SEQ ID NO: 286062 - DNA, 524 bp, Cannabis indica
atatgatctacagtaactaggattatgtttcacgatgtatagcgacatactgcgacatgtttcacgacatacttctaacaaatttgttgacaatttgaagaatggctcctgaacttaaacttccaatttcctcgcatttcacgggacgtcttacctatcggggtacagataggtttagatatatcaaggccaagtttactgagatggatttggttgacacagtaaaggctagtcctttcggacacttttgggaagctggagagttgactttctccggcgcattggtccacagcctcctcttacaaaaaatagaaagtggacacagaaaaggaggatgaggtttggtttcatgtagggagaaatgacatgagattcggacggatagagtttggactcattaccgacttatctatgggtagtgcccctacagaggaggaaatacaagccaagtccaacgaccatctagtttggacttattttgaagggaagagttctgttcagttggattcacttatgctccaact

SEQ ID NO: 286063 - DNA, 563 bp, Cannabis indica
atatttctgtttcctggtgaaatctgtgggcaccagatcaccagcaaacttagatagccgatcaaactctagggtgtattcggccactgacatctttccctgagtaagcttcacaaagtcttccatgtgtgaagttctcacagcgatgttgtaaaacttttcctcaaacaaacttttaaattcttcccaggtcattacaccgacatcccgggtttggcccacgatatcccaccagacgcgggcatggtcttgcaacatgaaggctgcacaattcactctctcagttcccgtcactcccatattatccaggatacgggtaatagtgctcatccactgctcggcctttattatatcaatacctcccagaaaagttggaggttgcagcttcacgaaccgctcaaataccgagtctctatgcggcataacaaacccctggttacccaccactggcacaggtgctggtggtaacacttgaccaacaggggcagccggtggcggttgccttaatcgtcgcaactcttcttcttgacgaagtatgacacttcgcatttcttggaacatct

SEQ ID NO: 286064 - DNA, 535 bp, Cannabis indica
aaatatatgtaaaaatgttttatttaaaatataaatttttaataattggccccgtagagattgagtcctccctccgcccctgtttgtcataattttattttacataatcttcaggtttaggtagcactattatcaagatgttggttttaaataaaaagtatgtcttcatcattatatactaatgacttcaagtttttaaatccaaacaaagataaagtatattggtttgtttggatgagtgggagtgaaaatacatagaaagaaaaaattgtgttttgttttttaaaagaataatcattcgaaataaatattaacaaagttatttcaattattcacaaatgaatgaacgaaatgaaaaggaaaatttcaatttttgcccttaataatataacctatatcaaaatttatacccctttataatttgtacaaatttattcctataattttaaaagtttcctaaaataccccctaaattaaaaattccctctctcagacgttccctctctctttctgacgctccctctctctctctctc

SEQ ID NO: 286065 - DNA, 1004 bp, Cannabis indica
atttcattcctacatgtcatttctgtaataggagaggccacattcgtcccaagtgttacaaattgcagaaccttgaaagccatgatcaatcgtccaaatagtttccctcaaccaataagtcacatggacgcaaacctcgtcgagaatggaaaataaagtccaaaccaaatcctgatgttggtttggttgcaaagctatccctgtctgcctttgttgaagggcagtggtacttcgacagtggatgttctcgtcacatgactggaaataagaaattgctagttaactacaaagatgaaaaagggggatctgtcacttttggggatggtaacaaagggcagattgctgggagaggtgatgtgaatgtgaatggagtagctcagctaactaatgtcctatatgtgagaggactcaaagccaatctcatcagcatcggccaattgtgtgacgacaacctctctgtaagtttcactaaaactcaatgtttagtttcatctgatgggtgtgttgtcttaacaggaaacagaacagtagaccagtgctatgctgtatgcaataccatagtgtgcaacaggaccatcttggacaaacctgacttatggcactacaggctaggacatttgaactacagagatctccaaagattggtgaagcttcaagctgtaaggggaattcctgacatgaaagtgtccaaggagagagtctgtggtccatgtcagcttggaaaacagcataagacacctcatcccccaattaatagacttctcacctctcgtgtgttggaactaatgcatgttgacttaatggggccaatgcagaatgaaagtatcagtgggaaaagatatgtaatggtcttggtggatgactactctcggtttacctgggttgaatttcttagagacaagtctgacacattcggatcattctctgccttgatattgagactgcaaactgagaaagactccaaagttggaaaagtatttagactgagaagtgaccatggaaaa

SEQ ID NO: 286066 - DNA, 639 bp, Cannabis indica
ctaattaagactaaaaataaaaacataaaatatgggattggataataagtttataaaaatatggcatatcaaataccataaaaaatcttaaatgtgaaaaaatgccatagaagagtggcaaacttaaaaatgccatatttttctaactttgttatgaaatcccatatttcatgtaattttcacttacacaattaagtttacactaaaaagtttatgaaaatattttatgcacaacttttttttttagcctaaaggataaaagtctacaactaacctaaaataaaaaaaaatggctaatcctaaaaaaaaagtacacaaaataatagtaaaaaaaaaactaacaccctaatatagtagcaaaataataaatacaactaacaaataaactaaaaaaaaaattaaattatttgcttcttttttttttacttagaagagtaaagtttttagaaaaaaaaactaaattatattatattaactgaaaagttttttttttgttagatgtaaacaaataaagagagacaaataaaaaaaaaaataaaactactatactaacctcttgtagcgcagaaacctccccggcaacggcgccaaaaattgatgtcgcccaattagttacactgcggtcgcggtagtaaacgg

SEQ ID NO: 286067 - DNA, 74 bp, Cannabis indica
atatagaggataattgatcaaattaggattataagataatattacttgtaagactcatttaattggttatgatt

SEQ ID NO: 286068 - DNA, 537 bp, Cannabis indica
gcgcccttcagtgtttttattattttctctttttcctccggatctaggctctttcccagtcagagtactttggtggagtcgaggtcgcacactgataattcctcgacatcctccattggttccacaattctttcggaccccacacgggggtctaactcatcttcttcagccacttctggctcaatggattcccggaccattagtaccggcaggtgggttgcgacattgtaacattgcctcgcttccccctggtttcctctcaccgtcccgaccccagcttcctcggtagggaactttaggcacaggtgccgaatggatgtgactgcgccaaaatctaccaaggccggtcagccgagcatagcgttgtaagcagttagacagtccaccaccacgaaagtgcagtatttaaatgtgctctaggggggtgtccgggcacaaggtgacgggaagccttacttttcccatcgggataagtgtcgtcccattaaaccctgtgagttgggacccactgggcgagaggtctcagtccgtcaagcc

SEQ ID NO: 286069 - DNA, 503 bp, Cannabis indica
cgagaggaagcctcgaagaccaagaaagttgatgacagacaacaacttgcccttctccagccaagcatccgtacaggaactcccttctggaacgaacaacaacaagagggggctgctagccttcaggacttccagaagagagtccaaaaatatatcaaccttgaagaggcccaaatagtggcctatggaggatactatcccaccgggatagcagggtacatgcccggagcaccgccctcgggtactgtcccgaccgcggctccaccgatgagcggcatacagttctctgctactcccggatatagtcagggccaggccttggcacccgcatcatcccattttggaaatccctcagggataaatggacaagctccctcgcactccgctccaaccgctagcctggcaggcccttcccagggctcaaggagtaaacgatcctccaaaggcagcacccggacggaggagaaacgccaaaaaagggggtacactccccagtacaccca

SEQ ID NO: 286070 - DNA, 401 bp, Cannabis indica
ggtaaaataatttccaacagccgaaagagagaggaagagagaaaagcaattttccaaattttctaattttcttactttttgaaactttgaaccaaatgagaataaattcaaaataaactctttatttcagccatcataaatcaaataacatttaatttttcactcaaagtccactaaaggacaagaatacaaatggggcaaaatgaccattttgcccctccacactaacatcacataaagggtactaaaagggtatttttgaaaattttagattcccggccaatcctgacattcctaatgtctaaataatcgtcccacaataataacatactaagttgtgatcttattgagccaaacaccgagttccatgttgccggacaccgaaaatgcaaaattataaa

SEQ ID NO: 286071 - DNA, 622 bp, Cannabis indica
ttttaggttgctcattctaggtttttttttcacataatattttaccacatttgattccaccattgctattattttttcgtggtgttttttgtgttttgatcttgagattgttgccctttttttagtgttaatggacttcaatattttcttaaatgggccaaagggaatttttgtcattgtcttctactgttaataaatatttgaagttaccattgtggttttattttctttttcactttacatttttatttcttcctagttaagtcaaacactcaaccattctgaggtactgttcatcttctttgtgtgtcttcttaggtgtgttcttgaaacttcaattatggggaaaaaggcgtgtcacaaagtcaaaatgtcatctctttttttatgatgcttcatctcattattgaaggatgtgagtccctattcctcactatttgggtctcgttgtaacaccctactagtttaggcgtgttaaacgtaattttaacttaattgtccagcttgttgctaaacaacaagtttattgaaaattatgaataatttaaactttatttaattacttataaatacaaaaataataacatatatataaccgagatctcatttacaaaatatttac

SEQ ID NO: 286072 - DNA, 155 bp, Cannabis indica
attgtgtttatcgacgacatccttatgtattctcgatcataagaggagcatgagttacatctctgcatggttctgccttacaaagaagaatcagcgatttatctggtcagacaagtgtgaagctagttttcaggagctgaagcagaggttgatta

SEQ ID NO: 286073 - DNA, 597 bp, Cannabis indica
gagccaacatcactggcacggaagaaatagaaatgattaatagatccccaaactggatgatgccaatagcagcctacctcaactctggggaactcccagataatcgaaatgaagctcgaaaaatgagaaggaaggcagcacggtatatcatagtagaaggagtcatgtacagaagaggattctcgatgccattgctcagatgtgtcactcaagacgaagctgcacgactcctatctgaagttcacgacggattctgtggaaatcacgccgctggacagagcttatccaagaaaattctaaggcaaggttacttctggccaacgatgattgaagattcgagagcctatgttaagaagtgcgacaaatgccagagattttcaaagataccaagagctccgcccaacgagctgacacagatgcaaagtctgtggccctttgccatttggggaattgacctgatcgggcaattacctaaaggtaaaggcggagtgcagtacgcagtggtagcagttgattacttactaagtggactgaagacgaaccacttccaaccactacatcaaagaaagttcacgactttatagtgaagaacataat

SEQ ID NO: 286074 - DNA, 580 bp, Cannabis indica
ttattcgggttgggcggtttacgaaaatttctgtacagccctagaaatgagcttaaaactgacaattaattaaaatacatttattttaaatatatggcaaaaataaatgaaaaattcatatactaaagtaaaattaatataataatctttgttttttgtaaaacaattatataaaaataaaacaaaaatgcaaattgagttcagctcatggcctttaagagtaggggatgtacatttttctcatgagcatagggctatgtggggacctgcccttaatgagacaaggattctccgtctaaatgaggaatagggccgggataggaattattttttgtccccaaatgttaaactagaacggggatgtgatcacactccccgctccgacatggacccgtttagttattttattttatatttttagtaatattttatattttataatttatgtttgtattttttagtatattagtatactttttttatgaattttaagttgtgttttgaataataattagtttattaaataataattaatgtataatattttaattttatgtagtttaatttttttattataaac

SEQ ID NO: 286075 - DNA, 561 bp, Cannabis indica
tagtttatattttagattttcttccgaaaccatactttataattttttcaaaaagtaccatatcttaaaagagaagtataagttccataagaaataattattagtataatttattattagtctagacattttaattaaataaataatatgaaaaattataaatcacccattattatatattagacacttttaggtgtgtaataggaatgctctattttaaatttttactactatatatactattaaatatcaatatgatagggattctttcacaaatatacaaaacaacaaaaaaaattataaaaatatgtacagaattttaaatatttttacgatttttataattttatttacaaaaaatataacattttgatgtatttttatgtggtctcttgttaatttgttattaattttttgttatttgtatgttattttttgtaattattttgatgttattttcttgtttgtaattttcttattattctagtgttgttttacaaaataccgtaaaaatatttaaaaaaaatcttttaacgtgaaaatgtaaaaaatttacaaaaa

SEQ ID NO: 286076 - DNA, 950 bp, Cannabis indica
gaacctgtttctaaagctccatatagaatggctccagcagaactcaaggagcttaagttacaacttcaggggatgtttgatattggatttattcgacccagtgtatcgccctagggagctccaattctgtttgtgaaaaagaaagatggttctctcagaaagtgtatcgattatgaggagcaaaataagttgacgattaagaacaagtatccattacccagaattgatgatttgttcgatcaacttcaaggaaagacagtgttttcaaagattgatttacgatctggttatcatcaactcagaatccgggaagaggacataccaaagacaacagatatgggcactatgagtttctggtaatgtcatttggattgactaatgctcctgcagcctttatggatctcatgaataggatattcaaggatttcctcgataattgtgttatagtgtttatcgatgatattcttgtatactcccagtcagaagaggagcacgagtatcatcttcgaatggtattacagtgacttagggatcataagttgtatgcaaagttcaaaaagtgcgaattctggttgtctgaggtatcatttttgggacatattgttggaaagaacgcgattatggttgatccaaacaaagttgagtcagtgaagaattggccgagcaaaaaatctgtgacggaggtttcgaaaattttcatcggattagcaggggtattaacgacgtttcgtcgagggattttctaaaaatctctatgcccctaactgagttgaccagaaaaaatcagagatttgggtggtcagataaatgcgaaataagttttcagcagttgaagcaacgtttgataactccagtgttagctttgccatcagatcagagaaaatttgtgtttatgtgatgcatccagacagggtctggggatgtgttctgatgcaagctggcagagtcat

SEQ ID NO: 286077 - DNA, 875 bp, Cannabis indica
caatagagagcagttttgctaggattcgggacagaccagcagttaatgataacacttcaaggcttgtagcatatactccacacttctactctctcctttgcaaaatagcaatacatcatcggcaaaagccaagtgattaatcttcaattccccacacctatcatgaaaagagaaatcctctttttctcctatcttccccatgagcctagacaagtattccatgcctattacaaagagaagaggcgaaatcggatctccttgccttagtcccctcctagtttcaaaaaatccatgcagtgtaccattaaacatcaatgaacacctaggagttgaaatgcattgcataattagcttcacaaacttagaaggaaattgcaagccctttagcatttcttcaagaaatccccattcaattgtatcataggccttttgaatatctagttttatcaagcaacttggtttatttgctttcctcccataatgacgaaccaagtcttgacaaatcataatattgtgaccgatgaatctccctttaataaagccaccttgtgaggaagaaataagtgagggaagaacatccttaagcctggtacacagcatcttggtagctatcttgtagataacattacaacaagctatcgggcgataatctttcaccgtattcggacattttactttggggacaagggtgatcacagttgagtttatctcttttagtatcttgccagattcaagaaaagaaatcacagcttgtgagattagatccccaatggtatcccagttatcttggtaaaaataactagagtagccatcaggacccggagctttcgaaccagcaatactaaaaacagccttcttcacctcttcatgactaa

SEQ ID NO: 286078 - DNA, 526 bp, Cannabis indica
atcgacaggaaaacttttagtttcaagtttaagtccccaaaaagtgatttagcgtgtcactcaccagttttataaataatgtgatttaggggcctgtaatttgtcgagcagttgttccactcaggttggctggcacacctaaattcgaaaacgaggtaagattagtataatggttgcatatgtttatacatgtttagcgtatatgttagttgccgtcagaatagacaaatgtatagccatcagattagcatatcatggcatcggtgaggtgtacataaagttgcaccaagatggcaacagatatatgctaggctattagatagtatgagttatctgctaccacatcagtacgactaaagtaatcagtatagactggatttgtagttagtcatactttgtcaagaacgttcctgactcagttagggttatggttgggtgtatgagagcctaattataatccgggttattgcaaggcttattttgtatagtcgctaggcgacaaacttttgtaacttgcactatgaaa

SEQ ID NO: 286079 - DNA, 622 bp, Cannabis indica
catatgtcaatagcttaatccacccctaagtgtcatagagatcatgtggagttataatccagagttcaaaagatataaaagatcgttgaactacatatattattcttaacttcttccacccctatcagatcaaaagatctttttattaaacaaaatcttaataattgtttcagaattaacaattattcataaacatagaattgaaattctaaaatgtttatatggtattatctttttgcagagataaatataccatagattttgtatcagtaataaaacactaacacatacaaattttataaacatataaatataattggtactggcatacacaagataaagtaaatgaagctcaattcataaatgcaattcatttccaaaagagaaaactttattataaaattctccaaaataaaacaaattgtctgtaataatatgaaaaatagggaataaaaatcccaaaccaataattgaaattaaattgtttaggaattaaaacaatttattcaaaaattataataaagaagattccgagcttcatcttcaatcttggactatctccacccatctgtccaaccatccgactcaactcgctacgatagcaatccaagttcaagcagct

SEQ ID NO: 286080 - DNA, 502 bp, Cannabis indica
gcctgatgtagaccttctgctatcttggcatccagcaaaatcagaatcagaataccctacgacctccaaatgatctgacttcctgtatgtgagcatgtaatcttttgttctctaaagatacctcataaccttcttggctgctatgaaatgatccataccagggttgcttaaatatctacctaacatcctaacaatgtacgcaatgtctggacgcgtacatacctgaagatacattagactccctacaactgatgcatagggaatctttttcatttcctgaatttcaaggctgcttttagggcattgtctaagactgaatttgtctcctttagcaacaggggtatcacctggtctacaatcttgcatgccaaaccttttgagtactttatcgatatagctcttttgtgataatccaagaataccccgagaacgatctcgacgtatttgaattcctaatacaaaagaggcgtcaccaagatctttcatctcaaattgcttagat

SEQ ID NO: 286081 - DNA, 510 bp, Cannabis indica
cccaatcagcatcactgcaaaaggttagtttgtctttagaaaaccaaatcccaaaagtgaataattcttttcacagcagaaagatgagattccatgggatttccctgatatcgtgcacaaacaccaacactatagcaaatgtcaggacgactagcagtgagataaagcaaactacctatcatacttcgatacaaagtttgatctacctttactccttgttcatctttgcttaatttcaaagttgtgctcatgggagtgttggtatgtttggctttctcaagaccaaactttttcaccaagttctttgcatacttgctttgagtgacaaaagttccctcatctgattgcttcacttgaagaccgagaaaataagtgagttcacctaccatgctcatttcaaactccttttgcatttgggaaacaaaacctgcacttcagagttagaagtagaaccaaacacaatatcatcaacatatatttgtgcaacaattacatcagtattaatgtttt

SEQ ID NO: 286082 - DNA, 731 bp, Cannabis indica
atgaaaataattttgaatatctttgcattacatctattgtttcaagaaaaaaatgcatattagaaaaattacctggtttgtcttcaggtttgtacgttacacgtataagtacaatagaaactcatgttattgtgaacgagaagttcacaaaccagaaaaatttatttgttatttggcatgaccggttaggccatcccggttcaattatgatgcgtagaataatagagaactcacatggtcatccattgaagaaccaaaagattcttttatccagtgagttctcatgtgctgcttgttctcaaggaaagttaatcattaagccctcaccggtaaaggttggaattgaatcccctggatttcttgaacgaattcagggcgacatatgtgggcctatttgcccaccatgtggaccattcagatattttatggtattgatagatgcatcaactagatggtcacatgtttgcttattatctactcgtaatgtagcatttgcaagattgcttgctcaaataatccgattacgagcacaattcccagactatgcaatcaagacaatccgccttgataatgctggtgaatttacatcacaggcttttaatgattattgtatgtcaatagggataaatgttgaacatcctgttgctcatgtacatacacaaaatggtctagcagaatcatttattaagcgcctccaattaatcgcaagaccattacttatgagaacaaaa

SEQ ID NO: 286083 - DNA, 651 bp, Cannabis indica
aaatttagtccttctgatttttacagatctaagtgtgtatgcaccagtgtttattctgtgatagataatattaaaaacactttatctgttaatttgctttctttgtttcgtcaaactcagtttgggcattttctggatatgcctgagtttgtttttcatccacaagtcgtacatagtttattactaagggaagttttacagcctaatcctaaggagttttgggctaaggttgctggccgttgcatacggtttagtgccgaagaattttacctgatttctggtttagattgtttcggtgattgcaacaagttgttgttttcacaggaaacaaatcaattggtagaaacatgtttccgtggtgtaaaaactattgacaacaaagccatcgaggatgcttttttgggtagtcggtggggtttggatgagtctattggtttgaaaatggctgttttgtatttcattcagtgttttcttcttagcaatactcctgacaaagaagtgtctaggtttgttctagatgtagttgatagcggtcggtgggatgagtattgttggggtagggaatcatttgaattgacaattgactcattcaaaggtaggattgagcatgggatcattatgaaaaatagaaaggcagagaagggaggccaa

SEQ ID NO: 286084 - DNA, 458 bp, Cannabis indica
tctaggtctgggttcgggtttttttcttcgtatgggttctggtccttatctgagtcccagatctagacaccgactactggtgtgttccaggccccgttactcgaatcccgagtcaagatctggatcactgttacgggtctcggtctggttctggtttaggtcctaggtcccatttctgagtttgggttcgggatcgagactggggtgcggtgtgttggaaattattttaccaggatcttagatctactcacaagtatgttgcttaacaccctaaatatgaactttctagaacgataaaataaacagattgaaagttaagaaaaccttaccttgatgcagtggaattaatgtctccttcgagtcagatctctaacctttgtatcctttctgtcgtagagtgtaatcaagatctgagcccgaacgtccttctctttgtgtatgtgatccttcacagtctt

SEQ ID NO: 286085 - DNA, 612 bp, Cannabis indica
atcaagtattgtagagacgtgattgtattggaggatgttgttgtctcacttaagttaaaggattttgaattacaattggagaaggaatcaaagaaagaagaagtgtatttggcaagagtgagatcaaccaagaaagtaagttcaaagagtaaacaacatcactctcaataaggattgaagttcaaagagaaggaaactcgaaagtgttactcttgtggaaggtttggacacttgcaaagatattgtaagaagtacaagaagcagcaagactttaataaatctcatagtagagataggaaggacaacctacatcatcaccacaggaaggactctactgtaatcgcagaggatagtgatcactcctcaatagatgtagaattattctccatatcagaatcttcaatgaacagggagttgattctagaccccggactgcaattatcgcatgtgtctaagtcaagaataattttcttgattatagatcattttgtgcaggtaaagttctaatgggaaagtgatcaatcatgcagggtcgattggaaccagaaaaagtttaccatcaaatagtattatgatggaatcaagtgttggaatttattttacctaggatct

SEQ ID NO: 286086 - DNA, 553 bp, Cannabis indica
tcaaaattctccatttttctctttgaaaactaaactcttgcatagaaaaaccataattttactcaacctaactatcaagcatcacaaacagctcaaatcaactcaaataaacaagcttaaatctctgaaaatatcaacaacatcccagcaacaataaaccaaacaaaactaagcatgcaacctattaaacttactcaaattcacataaaacttaaaggaaggctaagggaaacataccaacaacttgagatcactagagttttgcaaaatagagcttgaatcaccaaggaaattggctggttcttgatgctccaagagggccgaaaaagagagagaggtttgagagaaaagctttgattttttttaactttgtaattttttgaaactttgaaaaaatgaaggaaatgccacataaccctttacttcagccaatataacatcaaataaaacacatatttctcatttattaagccacaaaaagacaaactaataatggggcaaaatgaccattttgccccttcatactaaaatcacataaataacactaaagggg

SEQ ID NO: 286087 - DNA, 437 bp, Cannabis indica
ccggtcttcccccggcaaccgggcaagtttctgagctctatctctaagagcaagagtgaggggaggatggtgataggtcgaaatctgctgaaactgagtttgggtaatgctcgaatccttcaccatgaagtactcatcagcaaaacgccctattttgctgatggccttgtcatccgtgccggtcaaccacttgaagcctggcggagagaaatagaagtaccttgacctaccttgtttggggtggacttcaaatcaaagaaccaggcaacctcgtggggcgaaggagtaccccatttttgggaagcatagaggacgaagagggcggacaaatacttaatgcccttaggagtgatttgggtcgggcagagaccaaagaagtccgccacatccttgaagtacttgtgcaagggcatcagcgctccttgctgaccatgggc

SEQ ID NO: 286088 - DNA, 627 bp, Cannabis indica
aaagtatttctaactagttatagacaccttaaataatatttgaatttaaaagaaaaacaagtaagtatattattttctatattttgtagatgagaaatgttaaaaagtatcagtggtgcttagtacttttttatgtgtcaatattgctattggtcaaactaagtaacgagtttcttataatcagggccggcccaagcattttgggggccttatgcaaaatttaaaattaggctcttttaaaaaaaaaaaaatcgtgtacattaaaattacaattctattactagcatttttttttcataaattttcaattataaattttttatttatgtatatataataagaaaaaaaaaaagaaaaataggccttttctttaaaaaaaaataggccttaaaaaaaatgggggccttgtgcaatggcccaagttgcccaatgcttgggccgaccctgcttataatttaatataataacttttaaggagtatcattagttaatcgaaagccaacaaagtttagaagtattaagcattaatggtgcccaatagtaatgttctttgtagcattgctaatggtcattagtagtggctaatatgtgagactgatatttaattatattaatagtaatataata

SEQ ID NO: 286089 - DNA, 404 bp, Cannabis indica
tatctctattcagccaagctcgacggaaatcatcatttcaattctaaatacatatagaacctatagattcgatatctatgtttagcgctcccactcaattgtactatcatgttcccaaaatgtacgtaccaccctgaccaaaaagtaggcttaactaacaaatcaaagaacacgactaacactcttgagatcgaacctaatcgtgtacaggattaagatcatttcatctacgatcaactaggtgatattgaattgaatagatattacggtaaatttatcatatgtaatccaagttcaatatcgttcccttacaatgtatgctccatacattggatactggtaaactttgccaatgccctggaaagacataacaatatccaaggtgtaagtatacctatcgctga

SEQ ID NO: 286090 - DNA, 51 bp, Cannabis indica
aactatgactttgcatattgttcctttcagaaaaagccatagccgcccctc

SEQ ID NO: 286091 - DNA, 393 bp, Cannabis indica
ttttttctgatgctgactggggtgcttgccccgatactagacgttctgtcacaggttattgcatctttttgggagactctctcatctcttggaaatccaagaaacaaaacactgtttcccgctcatctgccgaggccgaataccgtgccatggccaatactacttgcgagatactatggttactcgccttattgaaggactttgggatctctcatccacatccagccctcatgtattgcgacaacaaagcggctattcatatttctgagaacccggtcttccatgaacgaaccaaacatgtcgacatcgactgtcatatcgttcgtgagcgagttcaaagtggccagctgaagcttcttcatgtcaacaccaaacgcaaccttgccgaccttc

SEQ ID NO: 286092 - DNA, 513 bp, Cannabis indica
gactccccctgggaaggtggcccagccgacaccaagggtgttgcagtgattactggagacgagtcagctggaggatgcagatccggttgggctggactggtgacaggggcaaatactgacggctccccctgcacatgtgcgttacttgcagacgtatcagaggatgctccaagcgaatctcgatgaaactcaggcagagaaatgttaggcagagaatccccaagaaaatggtgcaaaagagtagacttgatagtgcgaaccatttgatacatggaggcctcaaatgcaagttgacgcttttgatccttcttatagcgtttggcaaatgattgaaactcagaaaacatttgtacctgccagctggaatccgaaagccctttgaacatatgagacttgcctttactaacttttgatgcagaaggagtggttgatgagggctgcctattgaccacagagagaaagctcttactgagaacaggattttgaacttgatagtcatgcgttgtaagaggc

SEQ ID NO: 286093 - DNA, 591 bp, Cannabis indica
tcgcatatatcttggtatatgcgggttaaatccattccttggtcctacataatgttagttatacgaatgcgattagacttggtcatatccacatcatctcgccgagtctagttcaggtgaggtttgaactcgaggagtctctcattgacatctcaactttccttggggaaatagagtacacatgtccttcaaataggagtccggtctcgagtttctaggtgagataaatctcactataacaggttttataaatagcttctacctgccaattcgcttgtggccttgatactgacgagaagctcttaataatcttgttcctctcacagaactcagtgaataactcaccatcaaactgagttccattatcatatattatcttaatgggtattccaaacctataaattatgtttttaacgaaaaggtcgagaactttctagtaggttatggaaaccagaggttcagcctctttccactttgtaaagaagtcaacagccatcactacgtactttgctcctcctcgccctgtagggagtgccccaatcaaatcaatcccccatattaaaatgtataaggcgaggtcatcattcttaa

SEQ ID NO: 286094 - DNA, 380 bp, Cannabis indica
aggaagatgtagcctcaagagcagctgagggttctgaggaagaagaaggaattcctgatgatgactacgagggaaacctcgatgagtatgcctacgatgaaggtagctactcagagttggtgcttctcaggcaaaaagctatcgatcacgaagctgagatcgaagcccaaaaagcacaaaaccaaaaaatgcaagaagtgatgctggccatgcaaaaggccatggaggcggctggcattcacgtgcatcccaaggcaatgactgctggactcggcaaggaaccagaggaatcctcgcctagtacccaacagcagaagtctagggagcctagccccataaggtatcccgctgaagggaaccaaaagaaaaaccctacctct

SEQ ID NO: 286095 - DNA, 710 bp, Cannabis indica
tttattatttgcaatttttgatgttgtttattttcctcccacaataataataaagttaactttaaatatatacaaatataaatatataaatgggattagagatgagaattatgcaagttgcaaatgagagggttttctttttattattaacatctaccttattgtaagaaaaaaaacaacatcacatgtgacctcattactagcaaattagataaaaagagaggacccaaaagttttgcatataatatatatgatggataatatatctcaaaaaagtccctttgatttaaagtatatattactactacttcttgtcatcatcaacccatttggatatgctaagatattaaatcactaccaatcacatattttctttccaccttttaaatacttatatatatatatatataaatatataaatatatctcttacatgcaatatatgaactagtatattttaataaactacaattaattaatcctattatttttattctttatatgaccgcatggataaaacatatatccacttgttttgttttattattattattttttttttatggaattagcggttatatttattactcattaaaatatttacattacatcttaatagcattttcaaaaaaaaaaaacttaaaattacacttcccctatacataaaacaatatactagttgatattgtataaatacaatgaaaacttagg

SEQ ID NO: 286096 - DNA, 689 bp, Cannabis indica
cgtataacagttcatagggagccatccctatcgtactctgataactattgttgtacgaaaaattctatcagcggtagatatttactccaagagccttcaaaatccataacacaggctcgtaacatatcctccaatatctgaatcgtcctttcggactgcccatctgtctgaggatggaatgctgtactgaattttagttttgtacccattgctcgttgcaaactctgccaaaacttggaggtgaacttcggatctctatccgaaactatagactttggtaccccgtgaagccttactatttctttaacatataactctaccaactgatccactcaataggtcattttaactggcagaaaatgagtagacttcgtgaatcgatccaccacaacccaaatagaatcggacaaacctgtggttctaggcaacccaaccacaaagtccatcgtgatgtcctcccacttccattcaggtagggttaaaggctgtaacaaccctgctggtctctgatgttcagccttaatctgctgacaggttaggcatctcgatacgaattctaccaaattcttcttcataccgctccaccagaagtaaggtttaagatcttgatacatcttggtggtgccgggatgtagggaatatggagtagtatgagcctcttcaaagatttcattcctgagttccacact

SEQ ID NO: 286097 - DNA, 513 bp, Cannabis indica
ggtaaaataatttccaacattgaagtccttggcgaaatatggaaggacataaggaaaaacggaccggtcgactcaatgagtgatttccttgatcgagccaaaggcttcatcaagctcgaagaagccattcaacgagcagaaggtgagcaaaagccgggaaaaacgaaggctccttccactggaacatctgcccaactttcccaattattccagcaattcaagtggcaagcgttcaggcaacaaccacaagcaaggaaatgggaagaaaggaaagttcaccgagaaatccggacagactccccgtgatcatgccaaacacactgcattcactattctaactgaagatatagagagtgtgtatatggcaactcagtcgttaattccgtacaagaagcccgggcccatgaagaaagataccaataaaagggacatgacaaaattttgtcggttccatggagactacggccacaacaccaaccaatgctacaacctgaagcgggaaatagaatatct

SEQ ID NO: 286098 - DNA, 477 bp, Cannabis indica
tacattaaaaatcacgttaacatgcctaagttacttatggtgttacaatttggtatcagagctgccaggttgtcttccgaagatcgtcatgacatgtacaatcatcatcagcagttagctcgtttcacggttcagtaagcttttattgctttagtagtttattttaattgtatgacttaagaaaagtctgttacgaagcatgttagtagcctgatagtagaataggcgcatgtttttaatttccaaataagcggcaattagtaagttttacttgatcacgatctgaccagactagctcttggttacgcaggttgttctaatagtatggatgtcaagcgaaacaccaggagccagggtaactcggttggatctagtggtggtcaaggagttcagactcccctaaatatttgcggccgaggtagaggtcctagaggcagggcatgcggccggggtgatatataacccgccacaggctgc

SEQ ID NO: 286099 - DNA, 626 bp, Cannabis indica
atcagttcctaaaacactgaaatataaattaaagacaaaactagtttcataataaaatacttcataacacataatacctcataaaaccggttataattttttttttaaaaaaaagtggggatcaaatgtctcggatataataaaaatagaaccggttctataacataatgaataaaaataaataacacaaaataactcaaaccggttataattaaaatataaccggttctgtaacataatgaataaaaataaataacacaaaataatttaaaccagttataattaaaatagaaccggttctgtaacagtgttataatgaataaaaatcaataacacgaaataactcaaaaccgattataactaaaatagaaccggttatataacataatgaatacaaacaagtaacacacaataatttaaaccgattacaattaaaaaataaaggggaaatcagttcctaaaacactaaaacataaattaaaaacaaaactagttctacatcgtaacacataatacctcataaaaccgattataatttttttaaaaggtgaggatcaatttgaaaaaatactgaagcataaatatgaaaagaaccagctccgtaacaaaataaataacacacaata

SEQ ID NO: 286100 - DNA, 233 bp, Cannabis indica
tactcagtcacgctcatttctctcgctgggtcaggtgagcgaactctttcctcttggcgcttctgaccgcctcgttataatactttgcgttaaagagttctctctgaatctcaagatcttgctcctccattctggcttgcatttcagcaagcccaacttcccaattctgggcttcctgattgacctgggcagcctgtggcgagttgacatcaccccgaccacgagccctgccc

SEQ ID NO: 286101 - DNA, 573 bp, Cannabis indica
atgctgaccattctaacaactgcaattttatagttttaatccggtgagatcacttattatttttgtttttcacacattcatcacgctgaaaagatcttctatctttcagatgagcgacttgtcggatagccaactgctcggctcgggaggccatgcattcgatggcgacgatgaccaggaggaagacagctttctcccaacctcgatttcagaagaggaggccgcaccaatagagctaggcccgatgtcttctgcagacatcgaaagaatggtgcaggaacttgccgaacctgggaccatcgacattcgagacaacgagtcgacggtgtcggcccgcgactaccttattcactcgaggcatgctcctgacgtcgaagtcgaggagatggacgatgactggacggccccagctcgcgaatcaggcgaggatgaagaagaggcggaagggagtgggacagattcggtcgacgacacccagctaaacgagcccttcgcgtgcgaagatctgatttcgagggttaccaaatcagacttcactacctttacgaggttaaatctgctgcgacttgcgtt

SEQ ID NO: 286102 - DNA, 244 bp, Cannabis indica
atgttagaaatactgtaaatctgtatatagccctaattaattcatgagaatcaaacaataagattaaagaatagcggaagcgtaccggagtccatagaatcgattttgtaatgacctttaattggtatgatcttccaatttgcatcaaacctttctctgaaactttttctcttggtgatggggatacaagagtgaaaagatgcgatgcaaatggggaccattacccgttatattaccaacagac

SEQ ID NO: 286103 - DNA, 147 bp, Cannabis indica
aacacttttccaaggtgtaagaatacctatcgctaattataccatgtcagtctatatccagccatacccctgatcataaccctaactgccgtgtccaacacgatactgagtccccctaactgccgtgtccaacacggtactgagttc

SEQ ID NO: 286104 - DNA, 467 bp, Cannabis indica
cacaggaggcagggtgccttgggcgccaggtgggtaagtcctccgtccaagatttcggaggcactcctctgcactctcgaccaggaaggatacctgggcaagctggactgctacattcccgcccacgacaatcgtgccacaaaccctgataaggggatgtgcgcctggtcgggggctcacggccagcaaggggcgctgatgcccttgcataagtacttccgagatgtggtggacttcttcagcctctgcccggccctagattactcccaacgggcattaagtatttgtctgctctcttcgtcctctacgcttctcatggatgggatgctccttctccccacgaggtcgcttggttcttcaacctgaagtctaccaccaaacaaggcaggtcggggtatttttactttctcagccaggcttcaagtggttgagcgggaggacgataaggccattagcaaaatagggtg

SEQ ID NO: 286105 - DNA, 79 bp, Cannabis indica
aaaaattcacaaatatacatagtctaatttgataattatacctttacaccctacaatatatttattccttaaaacactt

SEQ ID NO: 286106 - DNA, 506 bp, Cannabis indica
aacttaagcttttgaaaagaaaaaaccataaccttaaacaacaccactaatcatgcattaccagcagctcaaatctactcaaataatctagaataaacttcagaaattaaccacaacatacagcaacaagaacacatcaaaatccagcatgcaattcactaactttatcttaaaacacaagaaaacaccaagaaaagctacaagggaaaatacctaaagtttaagcacctcaaaaccaagatgattcttgctggaaatgtagaagaaacacaccaattccagctgctcaagaagtggccgaaagagagaggaagagaaaaagcaatttccaatttttctaacttttttctttgaatgaaaatgagagaacaaaccaaccaattctttatttcagccaatattaacataaataaacatataattccacttactaagtccactaaaggacaaactaacaatggggcaaaatgaccattttgcccctctacactaaaatagcataaaaa

SEQ ID NO: 286107 - DNA, 842 bp, Cannabis indica
aacttactaatgtgattaaagacaataatactgtaaaatcggcgaaattcgataaattaaaatatcatattgcaataacataaatattacattactagagaacaaacattacattcatgacaaaaaaattacattaaattaaattaaacttgaaacacacacttaaaattaattaaattatattaattttgtgagttaccatattcgtcccacaagtgttcgattaatgcatttcgaagctcaatgtgagcatctttatctttaatttttctatgtctggcaagaaattcttgaaaccgagcattatcatcttctaccatctcaacttctggacttggcacttcgacacgctcttcaattggtgcatttagatcacgttcatcttctattatcatattatgcataataatacatgaagtcattatatcatgtaaaaccgttttattccaaagacgtgccggtccagcaataattgcaaatctagattgcaatactccaaatgcacgttcaacatcttttctacatgcttcttgtttcattgcaaatagtttcttttttggaccacgtggatcatggatagtttgaacaagagtggaccattttggatatataccatcggctaaataataacccatattgtactcttttcctttaataacataattagcgggtggagcaataccttcagccagattagcaaaaagatgggatgcctctaacacattaatgtcattattagatcctggtaagccaaaatatgcatgccatatccagagatcatagtcagctactgcttcaagaataatagtcggggacccactacgaccggcatattgtcctcc

SEQ ID NO: 286108 - DNA, 618 bp, Cannabis indica
ctctcttctctctctctctctctctctttctctcttcgaagccaaaagaacaaggggaaagggctgtgatttttgagtttcagcaaggaatccaaggggggaaatcaacctaaggtaagttccaatgaaaccctacttagttttcaagattttaagttaggttgaaatggtgattttgaaattgaggggctgttaggtttagttgggtttagggttcgaattttaaggtttctttgagttaattttagtactttgcagctggttttgagtttgattgtaagttttatgcaacttttaacattgagttcaaagctttaagctttagtggcaagttgagattctttggtttattctgtgaaattctggttggaaatggttgtttatgcattgtataggtaccctggagagtttggttaagtttgggattgaattgagttaagggggttggtttttgtgttcccagcacaaaaccggtggaccggttctaggggacctgtaccaaccggtcgaccggttggtgtccagtttttggactttcggttgggaccggtctgccggttgggagaattttccgaaccctagtttttcccaattttgagatatttagggtattgccat

SEQ ID NO: 286109 - DNA, 419 bp, Cannabis indica
tcttctcccggaattttgcaatcatctccgcgggtttggggtagaagttaagtttgatattctggtcatttgcagaccaggccatgtagacgccatcatcgaaacgcttgacgcaccggctgcaggagacgggagaaaggagctcatctctcttagccttcttcaaggcttggtctttgaagtccttgagctccttcagctccatggccaagttggccctagactccaagtctgccttgtgaacttcctctagggacttcaccttggcagccatttcatccaaggcttccctagcctcccgaagctcacgtctggccatggcagtagcctcaccctccgccctcagctcctcctggtgcttggcctccagcctatccctccaaagggcctcatcccggatcatcgcctctgcttgtgcc

SEQ ID NO: 286110 - DNA, 510 bp, Cannabis indica
actactttttatattataaatcattctaatttttttaaaattttacataatattttaaataattttacataataaaaaaaaaaataaactaaaaaatccccctctataaaaacaaataaaaaatgtagtggtataggttttatatatagggatgcagataataagtaataacaacttatttaataaaggcggcttcttttttccacatatacttctttttgggatattgggccgtgcatgcatgcaaattccaattccaactccaattccaatttgcaactgcatattggttgagccggctttgtttttgtctttactatagactatacaaacataatttatattagggtaaatcttattttcaactttgtgtttttttaaaagttattaaatagattttttattttgttaaatgataaaatagactatgtgttttttaaaatagtacaaataagattctaaactgattttttgtcaaaataaaatttaataataattcgatctaaaggt

SEQ ID NO: 286111 - DNA, 637 bp, Cannabis indica
agttttacataaaaatattgcataaaatacaatttaatataatacaatacaatacaatacgacctaatacggcgttccaaacgagctcatactgttcttaatattaccttcttacatctaattcgtacgatttgtccaaatcctcaattaagtctcctctttgaccaaataataattggattcatccactaatatataaattactattttaaggcaagttggtaatgttacctacgttttatttccttatttgttacaccttcctaattattatttttacataaaatattcattgttttttggaattttattccatttgggccatgatgattatatatgaaaactctttcattaggtcaactactgctgcttcttaattatagagctgccttaatatatactgtgtacggtggtacttattattatttaaatagtactaatcaaatagtttaattaattaacatttttggtatgtatgtagtgtaatgtacgtacgaaataaagctactgcatatgccattattttgtcacattatatgatcattataatataatatatatattttaaaatagtgatagtaataattggacattgatctggagataacgccatgttagttggtttttttttacaaat

SEQ ID NO: 286112 - DNA, 869 bp, Cannabis indica
catgatctggcatgtacagaatgaaaacttcattctcgattctacgagaatttttatgaaagcctttcatttgcttctcttcaatggaagttttattttaccagaatgtatcctaatttttggcctaattcttcttctgatgatcgattcaacctctgatcaaaaagatataccttggttatatttcatctcttcaacaagtttagtaatgagcataacggccctattgttccgatggagagaagaacctatgattagcttttcgggaaatttccaaacgaacaatttcaacgaaatctttcaatttcttattttactatgttcaactttatgtattcctctatccgtagagtacattgaatgtacagaaatggctataacggagtttctgttattcgtattaacagctactctaggaggaatgtttttatgcggtgctaacgatttaataactatctttgtagctccagaatgtttcagtttatgctcctacctattatctggatataccaagaaagatgtacggtctaatgaggctactatgaaatatttactcatgggtggggcaagctcttctattctggttcatggtttctcttggctatatggttcatccgggggagagatcgagcttcaagaaatagtgaatggtcttatcaatacacaaatgtataactccccaggaatttcaattgcgcttatattcatcactgtaggaattgggtttcgaagctttcccctagccccttccttctcatcaatggactcctgacgtatacgaaggagtgcggttcgttcgataaattcctacctctctatctatctctgagatgtttggtatttttcaaaactccatggacatgcagaag

SEQ ID NO: 286113 - DNA, 653 bp, Cannabis indica
gaagagcttatgaaacccaaaatgatagagcttgttcccagctttccaaaacatattaaaccatcccatttggagtccgaacgcaaaagttatgcatgatttactgagcaaggtcaaagtagaaaaatttagcgttgtgcgctatagcgcagggggtctgcgctatagcgcccggctggaaaaaaatgatttttcacgaaaagaaaagaagataatttcagcacgggttcaggattttttctcttaggcgttatagcgcagaacttatcatattgaagagaggacgttaagagagataaaaaaacaagcaactttgagattagaaaacacattgaagagcaagagagaagagacttcaagcaattatcatcaactatcatcattagagttcgtttcttcttcttcttcttctttattcttttgcttagttatttaattatgaacatgattattgtggttattatgtttgtaattatgaactaaacactcattctagactgttgatggaactattttagattatgaatttaagtttttagattattcccatatttgttcgtgttatttgtttatgcaattttgtgctaattatcatcttcttaatgcttgatcactattaattaatatagagatttttaagttttacactttga

SEQ ID NO: 286114 - DNA, 702 bp, Cannabis indica
taatatataaatattaaagaggttaacaaatttttaaatcttaccataattggaaatatttcaaaaaaaggaaatatttaaaattggaaatatttcaaattggaaaaatcgaattttgggaaacaatcccatgaaaattcggatttttggggaaaaacccacaaaaatcgatttgggagtgctggctgcctaggaggctgcatgtgcagctcaggaaggctgcacgcagcctcgggcgcgcgcggagcaaggtgggatgtgcggcattcttcggcgctggcaggatgatcatgggcagaacagcagggtgctcgcgcgcgtagcccaggctgtccgagtgcctggtgcgattgatgcacccactcgacagccttgaatcccgattttccaaaattcataactttttcaatttttatcggaatcgagttccgtaaaaaacaaaattgcttaatttttcacaaggaatccaaataaaatattttcaaaaatagaaaaaatatttttcatggaaaaatttcgtacaacacatacattcatcacataagcacataaaccaacatgaaaccatccaaatcaacacaaaacatcgttttaattcatatttcatgaaagtaaatcattaccatggctctgataccagttgttggaaatattttaccaggatctagatttactaccaagtatgtttcattaacatcctaa

SEQ ID NO: 286115 - DNA, 704 bp, Cannabis indica
ctaattctgggtattacaattaccccctccttatagaaatttcgtcccgaaatttacctgaacaactccggatatttctgctgcatatccgtctcgagctcccaggttgcctcttctactttactgttcttccacagtactttcaccagtgccacagtcttgcttctcaagactttctctcttctatcaagtatctgcactggttgttcctcgtatgataagtccggttgaagttccaacgcttcataactcagaacatgggacgagtctgagacatacttccgaagcattgaaacatgaaacacattatgtacagctgccagcgctgggggcatagccaacctgtacgctacttgccctatcctctcaaggatttcaaaaggtccaatgaacctcgggctaagctttcccttcttcccaaagcgttttatgcctttcatcggagatattcggagaaataccatgtccccgacctgaaaatcaatatctcgacgctttggatcggcataactcttctgcctactctgagccgcgagcattcgcgctctaattttgtcaactgcctcacttgttttctgaacagcttcgggacccaagaactttctttcacccacttcatcccagtgaatgggcgatctacatttccttccatacaaaagttcataaggagccatcctgattgttgcctgatagctgttattata

SEQ ID NO: 286116 - DNA, 589 bp, Cannabis indica
tatggcgttggtgaaataaccgactccgtagggaccctacggagtcggttatttcataataactgacgccatagggaccctacgaaggcggtttttttttttcataataatcgactccatagggtccttacaacgtcgattatttttaactcctatagcatcgcttggaacaacgtcggtagtaaattttaccaaaactgacgctgaaaagccttaaaaactgcctctaaagcctaattttgtagtagtgatgaacagggtatactatactagtaattaattatagtatactaaattactaactagtaatcaattatagcatactaaattactaactagtaactaatcctaattctacagaaatttcgatagcataacaactataattgaacgttcccaaaaaatttaaagatattattaacaacaaaacacaatccaaaaaaatattaaaaaaaatcacaacaatatttagtaatacaaaaatttaccacccatccgactacagtacatgtattcgcagaatctacttcactacggataaatatttaagatatctaaattcatctaacatgcatattattccactcat

SEQ ID NO: 286117 - DNA, 466 bp, Cannabis indica
gagtttgggtttatgttcgggtcggagttcgagtcctggtctgagttttggtttgggttcagatttcagtctcggtccacatcaggctccgggtgtgggttcgcgtcttgggtcttgttctaggttgggtccgagtcccaagttccaatcttgatctaagtctggattcagttttgggtataagtccttggttctgatccttgtctgggttcgagtttgggtacaggtcctggtctagcttttggtctaattctaggtgtaggtcttcgggtcggagtctgtatcgtgtttgtgtccaagtttgaaccccgatctgcgactaggttagggtccaggtcaaagttcgcgtcccgagtgcgtgtccaagtttgagtcttggtcaggatctcgatccagatctaggtccaacatttcgatctcagtctgggtcttggtccgagtctaggttcgtatcggaatccctatc

SEQ ID NO: 286118 - DNA, 510 bp, Cannabis indica
gttgtcttggtgcccaagttttgtaactttataaatatgtattttgtgtgtgtgtgtgagagagagagggggtgtgtgtggaggagaaaaatagtgagttgtgaaagagaagtgtgtgagtttgttatgtgctgagagtgaggaagaagcaaagggtgtattgggtttgcggtagaagattgagatagagagtatatgtaattttgaagtgataagtgaaatatatctctctttgtgggtttggtagtttaccaactgagtaattgctttgcttcgtttctttgttatttcgctgcgcttgaagtttatcgtttttcccaacaagtggtatcagagccaaggttcagatcaacacaaaaatgtcaaagatggtgtcttccacaaaatttgagatcgagctttttgatgggaagaataatttcagtttatggcagagtacggtgaaagatgtgttggtacaacaagggctcctaaaggcactgcagggaaagaaacctgagagtatgactg

SEQ ID NO: 286119 - DNA, 896 bp, Cannabis indica
tacgactactgtaccaaatgcactaaagtaccaattctatactcgtgttggtagagccctaactgtactcccgggaattactaagtgttgtaccataaacacgacgtacccttggtactcgtgttggtaacaccgtaaccacaattataaacaacactatactaacactctataaatcacatttaaactagtgccagtagtgcaagtatctaaaacaagcatatattcttacgctatcttacctcgttccgtgctcaagtgtgccggtcagcctgagtggaaacgcagctcgacgctttacagggccctaaaccataatgttcaaaattcgatgagagacacgctaaaacacttatcggggatttaaaatagaaactaagcttaaccctatcgataaataggttgccaataccctaaattacttaaaaacgggaaaaactagggctcgggaaaaagccccaaccggcagaccggttctcaaccggaaccccagttcctgggtaccaaccggtcgaccggttctactggttccccagaaccggtcgaccggttctgtgctgggaaccctaaaaccgatcccctcacctcaaatcaatcccaaactttccacaactttccagaatacctgcacacactataccaaaccaatcccaaccaacagaactcaacaattcacatcaattccaaaaacaccattagaggtcaaggtttgagttctcaaactcaaaccttgccaaaacctcactacaattaacaaaaacagcataaaacaactcaagtaactttagataaacttcagaacttcaattcaaacaataactataaccacagaaccaaaattcctaaaaccaagcttcaaaacctaacttatgcttaataaaatcaaagggaagaag

SEQ ID NO: 286120 - DNA, 547 bp, Cannabis indica
cttatagggcttggttccctagatttctgcttttgggtacttggcgaggattcctcttgttcctttcgaagtccagcagggatggctttaggatgcacgtggatccctgctgcctccatggctttttgcatggccagcattacctcttgcatcttttagttttgctctttttgggctgcaatttcagcttcgtgatcaacagccttttgccttaagagtaccagctctgagtagctaccttcgtcgtaggcgtactcatcgaagtttccttcgtagtcgttatcaggggctccttcttcttcctcagaacccacagttgctcttgaggccacatcctcatcatttggatcttgagcgtcttgaagagggcgaggttgacgtgtgcttcgagtctccaccattgttgttttgttgtaatgtactatctagtttcagacgcttccttcagctctcaatgaaagcaccaaaatgttgaccgaggttttcgacaaccaatataataataataatttagagagctataagaaattaagagagagatttttac

SEQ ID NO: 286121 - DNA, 656 bp, Cannabis indica
tctgtgatctttctgggcaagaaaatccgattttctagtttgatatgagcttgaagatgaaggcccgatgcatggcccgatggtccgatgcatggcccgatgtagggcccgatggtctgatgccattttggattttttaaatttttttctatttataggactggcccgatgggcccgatgtagggcccgatggtcggcccgatggtcagatgcccattttggatttttttaaaatttttctatttataggactggtccgatgggcccgatgtagggcccgatggtcggcccgatggtcagatgcccactttatttttttttatttttttttcattttataggactggcccgatgggcccgatgtagggcccgatggtcagatgactggcccgatgggcccgatgtagggcccgatgcccactttaagtttttttttttttttataacaaagagagaagaagagagtggggaggcggtaatgtaaatgggggtattttagggatattctaaaatgtgtcatatcccacaaatattaaatgttatgtgttttaaaaaaaaaatattaagtatatgtaagtatagaaaatcaaatttcccatagaaaattgtttttaaaaataatttgacttgtttggccttgctttttaaaaacagtt

SEQ ID NO: 286122 - DNA, 596 bp, Cannabis indica
aaacagaaagatcgtgtgatcaatgctgaatgcaaggatcgtgggattgaggctgaatacactgatagtgggatcgtgtgtatgccacatccacgtaagttgatccctgagttgtagggattgagctgatgactcatgatgcgaaagctgaattcgctaagtgttgatcgccctgcacggctcgttgaatatttcattctggatgtgccagcgaggcgtcctgctcggcctatcgttccgagcagatgctccaagtggagtccacgtgtcaccattctcgtgatgccacgtcaaagtgccaaatttgggataacaactagtgtcttccaagtcataatagtgtgagttccttgaaaccctcccactacgacaaggtaccgtgactattgtctaagaaaactaaatggtattgacctcttcggttgtgttaagacaacagaagcagtgggaccatcttataaagaataagatgatagaacacttttggaatcaagaaaaatatctcctttatttgctactttaatttcagacttagtcattttcttagaaaagtagttttgtttaaactaaacactttcttatctaatgactatggg

SEQ ID NO: 286123 - DNA, 539 bp, Cannabis indica
atatcgtggaacatataaagcgttctatataactgacagttccattccaagttatatggtggatccaacgaggaattaataagtcagtgaatttacttggtaaattctgggtctgcttattggaggctcagatatataggcccatggtctccatactagttgaggcaatactacttgtaagactcaattaattgattttgattaatcaattataattctaaaattagactatgtctagtttatgaattttcactaagcaagggattaattatgagaaaaagaagattctagggtttatttgttaattgagagactttgttaagtctaattaataaatattatttaataattaatttttagttattaaataattataattggcatttatgtggttaaattggaaaattggcttctttgagaaaataagatgaaaaatgagaaaatggcaaaattgcaaaattgcaaagtggggcccaatagcaatccatggccggccactttacaagggatttgccactttgtttttcaattattttaat

SEQ ID NO: 286124 - DNA, 765 bp, Cannabis indica
tttttacatctctcatttaagatgaccttaccttacggttttcattttcaattccccaatctccactcctcccaatattaaaataaaataattaaaaaaaatatatttgattttttttttacaatgtattagtagcaataaatatgcaatttgtataaaaataatttaaatgtaagattaataattaaataatataaaggaaattaactcataaactatttttaatttttttttaatttacagtttgagttgctctggtagtttttcatttaattttgatgtagattaatatacggattttaattgtgatttaaattgttctgttagttgctataaaatgtagagaattttgtaaaattaataaaaaaaatttatttaaaaatataaaataaaaacccctaatataaaactagttatataacaacttcatatctacaaaaaaataaataattctagttttaaaaaaattaattgtaataatgcataaatttgaacaatggaaaaaaaatgattattttggcaactttggccttagcaattgtatatgtggtgcaacaggcgctgctagactcggaggcagacgaagctgttcgaaatctgttacctgactacgtcaatggcgatttatcagccctctgtgtatggcccgatcaaattcgccactggtacagataccgctggagtagcccctcttcacttcattgatacgcctgaccaagcttgctcctttgactattccagtaagtgtgaaaaatcctaaacccc

SEQ ID NO: 286125 - DNA, 552 bp, Cannabis indica
cggcaagctactgtgctgatacgaagagcctaccagactgtaggccaacaaacaccgagcgtcattcccatgggagaaacggaggacgacccgacgatgaatgcctcccagacaaccaacggtcagccgtccaatccccggtcacgagttccactcgtgggccaagaggtaggcgggcagaccttgtccgggaattcatcaggaggagccatacccgacggatccattcaaaataatggagccattccacctgtcaaccaagcgaatcaatcgttgagacaacgaggctcttctgtgttcgataggctgggaacggcccatgacctaagggacgatctaaacagaagaagggagacagacgagcagaatactacaacgatcgtgcagcctggagcccaaactcaaatccccgcgcagaaagacgctgacgtaatccaacccgaccagaacgccaatcaagtcagcccagccgtacaggcccagctcgacgaattgaagaatatgttgttggaattattttaccaggatgttagatctactcccaagtatgtt

SEQ ID NO: 286126 - DNA, 406 bp, Cannabis indica
gtggctcgagttcgacgggcagcatagcttcataaccgtacgccattgagaattgtgtctgaccggttgctattttttccattgtacggtatgaccatagaattttggggagttgttccggccaatttcctttggcatcttcaagtttcttctttagtgtatccttcaaggtttttttgactgcctcaacttgaccgtttgcttggggatgtgccactgtagagaagcttttgataatgccatggttcgcacagaaatcagtgaaagattgtctgtcgaattttttgccgttgtccaatactattttgtacggtagtccgaaccggcatataatgttctttactataaagtcttgaaccttctttgatgtgatagttccccagatggcaaagggccacggactttg

SEQ ID NO: 286127 - DNA, 604 bp, Cannabis indica
tttttgggcagtttttgactttttcagaggtagcaaccctaatttctatttaaggggctcgtgttttagaacgaagggagcagaaattggcccaaaaagtgaatgaaggaggagaggaagcaatcttgaagacccggagcgatatcaccatctagtttctttcttttaccctctatttcccttttatgtttatttttgtttcagaattaatcatggatgtttatattatttttatgagctaaatttcccatttagggaagatgatgaatgttgtttaaagttttgcctagttaatgaataattgccattccttcaatcttgatttgtgaaattatctatatttgtgtttaattccatgtgtaagcttgatcaccttctacatgttctacgatctcaattcaaaatctgaaaggtgagaattgagaatgctaaaattggataatcatggatctatgtgaaacgagagtatttgcatgacctatgtggcacttagattattacttaatgctgattacatgtgagtttaattagagaacatgtggtttagaacctaaaagatctgaaaaagagttaggttaatttataatctgtcattcacatcaag

SEQ ID NO: 286128 - DNA, 607 bp, Cannabis indica
ttgtacaaagtgtcatgtgaagtagtaaccttcaagtcccgactgattgtggcattcagtccactcttcatccactgctcggccttaattatgtcaatacctcccagaaaagtcgaaggttacagcttcacgaaccgctcaaacaaagagttccggtgcggcataacatacatttggttacccaccactggtaaaggagctggtcgtaacccttgattaataggggcagtcggttgccttaatcgtcgcaactcttcttcttgacgaagtatgacacttcgcatttcttgaaacatctgctgccattcagcaggaggattaacattgccaacctccacattaattccccggattctgcggaggtgggggcagtgcggtgaattggtttggtctacacaccaggctctactaactcgccctgtggtctagatgattaaagagggtccactactagtacccgtgtaatcaacaaccccagcgaattaagcaccaataccacacttacgcacttattgccttaaaccctaactcatctatttacctcatataaataaacacttaatcatatagcatttgaagcatgacatcacataaaacatacatactc

SEQ ID NO: 286129 - DNA, 995 bp, Cannabis indica
accaaccctagtatcagcctatactcggtacactgttcatactccagttgctagtcatactctagcctaaccgatgtgacacagtcggatggtaccaagccaacatacatatctaatgtaatctaacaggcttcctaacatgcaggctaaacatgtaatacatatgcatactattataataatcttacctcgattccaaattcagctgtgccggtcaacctgagtggaacgaagtgcacggtgatttacacgctcctaaaccataacagtcacaacactaaatacgtgatacgctaaatcacttcccggggacttaaactagaaaccaaacatttccctatcgataaaaagcatggcaataccctaaacaacataaaaatgtgaaaaactagggttcccaaaaatcccccaaccggcagaccggttctgcaaccggaattctggttctgggaatcctggaacaccatccggaattccggttcctcgcaggaaacacacaaaattccataactcattcaaatcaaacccaattcataccaaaccttccagacctgttctaaataccccaaagaatattttcaaagcattaaaacaacccagaaatcacagatacgaaaaatgccattaaagctccaagctttgagttcaaaactcaagcttggctaaacccctctaacatgcattcaaacctgtttaaatctacttaaatatgcataactaagcttctgcaaacaacagaaaacaaccaccacaaacacagcaaccaaattcttcattttaccataaaaaccaagtttttgagctaaaattcaaaactttgaacaacacaactaacatgcatcataaccagctctattctactcaattaaacaagattaaacctctgaaattatatcacaaacacagcagcaacaacacttcaagtaagcatgcaattcatcatcatttttcttcaaaattcaagaaaacaaacaagaacaagttcaagaacctta

SEQ ID NO: 286130 - DNA, 501 bp, Cannabis indica
aaattcgattctgagtttgattgttgttttgttgcttggaaatggtttattggggtataatatgcaggtctcgaaagtttggttgagtttggaaacgatttggttaggcttggttggtttttgggttttctgggtaaaaccggttactcgaattttacagcagggaaacccaaaaatttagcttgtcgtttcgcgtcagttttacaatttttgttgattggttccctgctagtttagggtatttccatattaagttgtagtagatagggttttggttttaaacctaagtcccggttgtgatttagcgagtcacttattcgtgttattatttatgtgatttaggagcctataattcgccgagcagttgttccactaagtttgactggcacacctgaattcaaaattgaggtaagattggtataataacatgcatatgctattacatgtttagcgtacatgttgttattgtctattagattacattgatagtagtaatagtat

SEQ ID NO: 286131 - DNA, 515 bp, Cannabis indica
aatatttgtttgcattttttctaaatccgaaacatgaagtgttcttgagcataattgtttgaaatacacacacagctcaatgattgtgtcccggatttcttttttcaagaacttacggatacctgccggtagtaaacgttgtaacaacacatgacaatcatgtgatttgagcccggaaatcttgcccgtatccaaatttacatttttgtctaagtttgctgcaaaaccgtccggaaatcgtacagacttcatgaagtctgcaaattcaatccgttcttgaacactagtgtgtaactagctggaggcttcttccacttcccattccggtcttcatacaaccacaactctcgtcgtatttgcaagtcttgcaaatccattctcgccttgtcggtatcctttgacttcccgtcgatacttagaagagtacctactaagctgtcacacacatttttctcaatgtgcattacatcaagattatgtcgtaaggactttgacttccagtactcaagctcaaa

SEQ ID NO: 286132 - DNA, 455 bp, Cannabis indica
tccacagctccatagggaaacactttgactactgtaaatggtcgtgaccaccttgacttcaactttccaggaaacaacttcaaccttgagttgaatagtaacacttgctgccatggttgaaactccttccttactaaaccttggtcatgccacttcttagttctctccttgtagatttttgcattctcataggcctcattacgaaactcctctagttcattcaattgtagtagccttttctctcctgcagcttttaattccatgttgagagtcttcatggcccagaaagctttatgttctaactccactggcagatgacaagcctttccaaacaccaaccgatatggagacatgccaatcggtgttttgaaagcagttctgtatgcccacaatgcatcatctaattttcttgaccaatctttccttgatctttgcactgttttctctagaatcat

SEQ ID NO: 286133 - DNA, 762 bp, Cannabis indica
aaatccaaaccaattcaaacaaatttccagacctgctatatagaccctaaggaacatttctaaagcataaaaaccgagcttcatgcaaccaaaccaaaatcaccattaaagcatcaagctttgagttccaaactcaaacttgatcaaacatcactaacatgcattcaaatcagtccaaacctacttaagcatgcataatataacctctgaaaactactacaaacatcaacaaaaccacagcaacagattttaaccatttctctttgaaaaccatagttttgagctaaaaacttccaagcttgaatcaaagcaaataacatgcattaaactagctctaatctacttaaaataacaagattaaacctctgaaatcaacatcaaaacacagcagcaactacacaaccaaatcaagcatgcaaacatttcttttcatcaaaattcaagaaactaaaagaagacaagagtaagaacaatacctaaagcttgagttgcacacaaaattagcttgaaaaaccaaagaaaatcgcaaattcttgctgcttcaaagggccaaaagagagagagagttgagagaaaaagtttgcttttcttttcaattttctaattgttttccaactttgtaaaaaaatgaaaataacaaggttcatttcagccaacaattataattaaaaatcaataatctcatcacataatgtccactaaaagacaaagcataaatggggcaaaatgaccattttgccccttcacactaaaatagcataa

SEQ ID NO: 286134 - DNA, 585 bp, Cannabis indica
cttttgacacctagcattttaatgaattcagcaaaggattagataaatccttttcatttgagaaattaaggaagtgagagaaaagccaaaattgagaaattcattccatttcctctctttctttgttcggccagcctagaccagaaggaaattcagttcttcttctttgttttgctgcaatcaactagggaatcaagcactcttgaagctaaggtaaaatcctagaaccctagaacatgtttatttaaagttttcttcttagtttgagcttgtattttgagtgatagtggctgttttgatttgaaatgtttagggatcaaattctaggtttggtttgggttaattaagggttataacagctgatttggttggttgatttaggtgttgtgttaatttgagcataaaaaccttaacttaggtctttaatggcataatttgaattattggtttgttctgtgatttgttggttggaaatggatgtttatgcattgtataggtatactggagagtttggtaaagtttgggattgaattgaatcaagggggatgatttttggttcccagcagtagaaccggaattccggtt

SEQ ID NO: 286135 - DNA, 629 bp, Cannabis indica
tttcttgcggaagttgaaggaagccattggtgaggttgaaaatcttatgttcatatcggataggcatcaaagcattgaacatgctgttgatgttgttttcccagaagcatgccactgtgcatgcttcaagcatattactatgaatgtcgttcacaagtttaagactgatgtatgcaaccaacaaatatggcttgcagcttacgcatggaacaagacggaatgtgataggcattttgaggtgctgaaacagatggaccctgccattgctacatacgtcgagcaaatagggtttgaaaagtgggctcgtccttattgtccaggcgatcggtacaacataatgacaagcaacgctgccgaaagcttcaacaaggtgacagaagaattcagaaaatatccagtaactattttggttgacttcatcaggttcacacttcaaaattggtttgcttctcgtctcgaaaaggctagtaagtgcgctactcctttggctactacttttgaaaatgatttaaaggatcaacacaaagatggtatgttcaggagtgtcctcgtatgtgccgactgttcaacgttgtacgagtcgtcaacgtgagagaggtggtgagtgtgaacgttagtggtagagaacg

SEQ ID NO: 286136 - DNA, 533 bp, Cannabis indica
ggaattctacataggacctttttaccccattgttgttattttggaccactgttttcccctttttatcacgatcattactgtgatttccctcgtgttttctcttattctcttgatttcctccattgtttcttcgggcttcccacttagcagcattctccttctttatatcattttggagaaacacagcttcaagagctttttctaacacctcagcataaactatgttggtccccaccatgattttcacatctttttttaatcatggggttcatccccttcaagaaccttttgacccgaagggcctcggtcggtacgatctcttgtgcaaactttgccagacggtcaaattgcctagcatactccgtgacagtgagaatgagtcaaagtcaaagtcaaaagggtgagaataaaaatgaaaacaagctcagcaagaacaactttaatccttttcttcttatctcaagaagattaagaagatgattaagtatgtacactcaattacaaaaccagacccatttatagtcacaaccaaa

SEQ ID NO: 286137 - DNA, 475 bp, Cannabis indica
actaactctaacaattaatttagatgctcagtctgtcacatactgcacaaacacaagatgacttcacaatcgaaacaatgttataatagtttttactctttccaaccattccactacccaataactcatatgcttgcatgcttacctctctccactaatgttgacaacatcctttcggaatcaatagggctttttgaggtttagagagtatggcttagatatttggagaataaaaaacaattttggctaaagatatcataagcacaaaaataacccacaagcttcttctaatttcaaatttcccaaagtgttcccacaactaaccaagattgagaatttttttcttttcccaacatcactgaattttattatttttcttgaatcatgtttttttttcaatattttttttcagtgatattgatcttacaacttatattttttttttcttcaatcttgcacgttttttttctatctt

SEQ ID NO: 286138 - DNA, 573 bp, Cannabis indica
taactcactattcttaacaataggacctggagacttcttggttcatcatgctattgctctaggtttacatacaactacattgatcttagtaaaaggggctttagatgcacgtggttccaagttaatgccagataaaaaggattttggttacagttttccttgtgatggtccgggacgaggcggtacttgtgatatttcggcttgggatgctttttatttggcggttttctggatgttaaataccattggatgggttactttttattggcattggaagcacatcacattatggcagggtaacgtttcacagtttaatgagtcttccacttatttgatgggatggttaagagattatctatggttaaactcttcacaacttatcaacggatataaccccttcgggatgaatagtttatcggtctgggcgtggatgttcttatttggacatcttgttttgggtcgtactggagtttatgttcttaatctcctcggcgtggagtattggtcgaggaagttgtattgtaaactttaagtcatgggcgtcatgaacgaacacctttcggtcgtaatttg

SEQ ID NO: 286139 - DNA, 599 bp, Cannabis indica
actgagtctgtcgactcacagtgctatgtttatgtgtaggtaaaggcaaggctagagctgatggaccgtgaacgagcctatgaagattgtacatgtcggggcggttaggcctggagcgtacgatcctcgggacagcaaggctatttttgtaactagtcgctaggcgacaattattttcgtagttagtaacgaacgtaaaacgtttttaaacgtttttaaagttaaagtagttttaatttttaaattaacgggtacgggtagcccgaacccgtaacgtttttcgtttttagttaaaattaaaatttttaacttttaaacgtttaaaagtttttaaaaaaagttaaaaacgaaaaacttttaaaaaaattttttaaaatttaactactagttttacccgttttacctaaaaccttaaacccgtttcggttagttaagttacgaaccgaaacggacgtcgtcgaccaacgtaagactagttttaaaaagttttaaaaactaacgttaaacgttaaacgtaaccgtaacttagtcgtacgttttaaggggtttaggggtttacgttaaactttaaggttttaggttactacgaaggacggccc

SEQ ID NO: 286140 - DNA, 844 bp, Cannabis indica
atatttgcctccgcttgtttcactttgtccaaaaaagagaaacaaacagtttgcaaatcacttgcaaatatgaaagtacccgatggttactcgtctaacatcaaaaacttggtgaatgagactgaattgaaactaatgggtctgaaatcacatgattgtcatgcgttaatgcaacatctacttccaattgccattagatcagtcttgccaaaaaatgttcgagagtgtttgacacatgtttgcattttctttaataggctgtgcgggaaggaattagaattggataagttagatgcattacatgaacatgtagtcaaaacattgtgcaacctggaaaagttttttccgccatcttttttcgacatcatgatccatttaatggttcatctagtgagagaagcaaggctgtgtgggccggtgtgggcgagatggatgtatccatttgaaagaaatatgaaggtacttaaaagttatgtgcgtaaccactatcggccagaagcatgtatggttgagtgctacatatctgaagaggctgtggaattttgttcagagtacatggctggagttgaggcaataggaattagcaaaccaagaactgacccagatgatgttgatagaggattaagggggaaagggacaatggtgacagtgtccaagcttgaactagatcacgttatctgtagaggatttgcattgctacgtgtgactacatcggcaaccagggaatgttgtttggaatgatgtatactcttctttaatctaattaaccttatatatcaaattctagtcaaattattataagacactaacacttttttttggcaggaacatctgggagagcatc

SEQ ID NO: 286141 - DNA, 420 bp, Cannabis indica
ttcgtaccatccgaccatatctcatcggttagtctagagtatgactagcaagtggagtatgaccagtataccgagtataggctgatactagggttggtggtacagtgctatgtgaccgtatcacatcggttagcaactagagtatgaccagtgaaccgagtataggctgacactgtaacacatcggttaggctagagtatgactagcagctggagtatgaccagtgaaccgagtataggctgatacttgtcaatagtactgtcttatgaacgttcggacgtcagtattacgatccttgggacaacagtgctttttgtaattagtcgctaggcgacaagtattttgtattagacagtaacttttgtaaagcgttttttaatgggatcccacagtattttgtatgaaatattttaaaagttt

SEQ ID NO: 286142 - DNA, 949 bp, Cannabis indica
tccaaatttatttttttactcacttgattaattttctttttagatattttgatactcgttttgtttttctttttggatccaaagattcgccatattaattattctataccatccaattggaacacacagtgaggtattgtcaaatgtatattgataattttgacaatatgatgtatatatatttatcacttaatctttcttttggtttatgtatcacatatcgacttattttttgtaaatctagcaaatcaaagtaaaaccataaagattaacaataaattagatagcataacaccataaagatttatatgtttctcttcaattatatattatatattgacttatattctatagtctagtaactcgaagagaaacataaaaattcatgatgaaattggcaacacaagatatcggtattttccttttctctttaattatatatcttatcaatttatttttgaagtctagtgaaatcaaaaagagattagaatgacaattaatcgcaatattggaaataaaagaatcaaaagaggaagacttagatccacattatgaatctttacttacccttgtaaagcttgaaggtagaccttgaatatggagttttttttcagattcttttttacttttcactgtttcactcttacgtattaatttcttgccaaaaatattcaacccacttaactgttcggatcctaatctatttataatctttttattattattattttattgttgacaaaatcccacataacgtaaaagtggtcgaacggaagaaaagatctcctttatttgcttccttttttttttattttaactgacttattccttttttttttcttattattattattataataaaagaatgttttctttaaatttttactgatttctaaagggaatatttatataataaaataataattatgataataataatagcaatact

SEQ ID NO: 286143 - DNA, 636 bp, Cannabis indica
tatttaaatgtgtggggggtgtccgggcacaaggtgactgggagccttacttttcccattgggataagtgtcgtcccgttaaaccctgtgagctgggacccactgggtgagaggtcccggtccgtcaagcctatcgcggtgaaggcttctttgaagagtaggttcacggaactcccattgtcaattaagactctggccaccactttattcgcgatgggggtctctatgaccaatgggtcatgatgagggaagcgcaccgtcttggcgtcttcttccgtgaacgtgatgggttggtccatcaaccggggcctttgagctgggagttgagtaacttcccacacctcattgtgtttcgcggcccctgcgtatcgcttaagctccttgcgagtagttcctccgatatggggacctccggagatcatggctaccctcccattaggccggggcggcagaccggggatatgctgggcgtcgcccgtgggagcagctggagccaatgcccctgctgtaccccccggtgttccctgaggcatacccacagtcgcctgacccggattgaggtggggcaacctattcttgatctcgtccttgagatttttacattcattggtgttatgaccgatgtcgttgtggtac

SEQ ID NO: 286144 - DNA, 558 bp, Cannabis indica
gatttcgctgtccgaggctaacttagccagacagtccgcatgagcgttcttttcttgggggcttctttctattttatagtctgcgaactcgtttagcagttctcggactattgttacgtacgcggccatttgctcgccgcgagtttggtattttccggatacctggtttacgaccagttgagagtcactgtagacttccactcttttggctcctacagctcttgccaacttcagccctcctatcagggccagttgaagctgtgaagtcaaatcggatacctggtttacgaccagttgaagctgtgaagtcaaatcggagggccgcctggagccgcagtccagttggtgatatcatagccactccggctcctgaaccgttctcgttagaagctccgtctacaaataccctccaggtggggatcggtggtaccggcgtatttgctgttgcctcggcttcgttgcattcggtaatgaagtcagccaaggcttggccttttacggtaatccggggaacgtagtgcaagtcgaattgacttagctccattgcccacttgagga

SEQ ID NO: 286145 - DNA, 576 bp, Cannabis indica
tctgtagggtcagtcatcaatctaggaaacagccagagtggcgtactcgtgtataagagtcatcattccgtgggtgtaaggacccaatggaggcttgaagcggggacgttacagaagacatggaacgagctggtatagagtttatcatagggaaacttgcaaatgtcacacttcaatcaactttgttagaaagaattaaggaggggcagacaacagatcaaaagctcattgaactaaagcaagaaattttgaatagtaacgccaaagattatgaaatatcagacacgggattaattcagttcaagggacgaatttatgtgcccgatgatgatgagctcaagaaggggatattggaagaagctcatactacaccttagtcagttcaccccgggaccactaaaatgtaccatgacctaaaagcattgtattggtggcctggtatgaaaaaggatgtagttgaattcgtggccaaatgcttaacatgtcaacaagttaaagcagagcatcaaagaccagcgggattattacaaccattgaagctccctaaatggaagtgggaagagatttccatggatt

SEQ ID NO: 286146 - DNA, 616 bp, Cannabis indica
aataacatacagataacgaaaatcaacagcaaattaacatgaatacaacataaaaagaccgtattttctgtaaataaaatcaaaaattcgaaaaaatatttaaaattctgtgaaactgtatttttgtaatttttttttattatttttgtgtatttgtgaattatcccttaaaataacatgttatttttattaatgataatccttagatatatttatacaaaatactctaaaatatttttatgattgaaatctaattcaattaagttagattttaattttatttttcaacaaataatatacattaatatttttagtcacttaatctctataggaaatatttagtcaattttaattcttatagttccttaacaaaatttctcatactattattttaaagaataattacatgaaatatcaatttttgtaaaaaaaattatattgtacgttttttttttttttttttctttatatatatattcttacaatattcattaaaacacaagaaaataaaagaaaaggaaatttaatttaaatgacttaaaaaaaataaccttctaacaaattagtactaccaaattaatttatacaattaaatactattgttttaatttctacc

SEQ ID NO: 286147 - DNA, 525 bp, Cannabis indica
tgtgtgtgggcactactctataagtaagaggtttcgaaacaatcaaagaagaagaagaaagagaggtggcgactaggtctagaaagatggctcaggtttttctctaaacggaataagatgcatcttattgtcctgaagccatcactttctatttatagaatacaacatagggttagggttgaatatatggcattaaaataatgaaaatattaaatgataaaccctatgcaagtggccggccatggcttgtggatatgggcctcacttttgcaattttgctgttttatcatttctgcgtcctattttctcaaaaacgccaattttcaaatacaaccatttcaatgtcaatttcaactatttaataactataattaattattaaataatattttcatttattatatttattaattagactaaccaaagtctcttaattaacaaatataccctaaaaactctttctttacagtttcgcccttacttagtgataaattcacaaatagacatagtctaactttgagaatt

SEQ ID NO: 286148 - DNA, 525 bp, Cannabis indica
agccttggccactgcaaggttataacattcccgagcagactgctggtttcctcttagacaccctaccccattctttgttgggaacttcaggcacgagtgaaatattaacgtgaaagtctttaagtcatacaaggtcggacggccaagcattacgttaaaagttgaaggaacatctaatattaggaactgtgccattacagttgtgctcgtcagagcttgtccaacagtgaggagtagacgaatttgtcctagaggtgggactccttgaccggagaaaccatagacaggctggaggcaggggtttagatccttgagttggagtcccatcttttcataagtagttttgaacaagatgttggaagaggctccattatcgatcatggttctggccaccattttattagctatctggacttccacgactagcgggtcgttgtgtggaaattttatttgacagtgtcttcatcgttgaaggttatggtcaggtctcctgctcgtggaactttgggcttcctttcttccacg

SEQ ID NO: 286149 - DNA, 525 bp, Cannabis indica
aagatgttgttttttctgaccatgaaaaaaagttgcgtatgtgcttactgttttgaaaccagttgtttctgagactctacctcctgccgagaagaaggatgaagtcgagaagtacgaatcgcaggttaaggaaagggactcctgggtagagaatgattttctgtgtaagaattttattttgaatggtttgtctgatgatttgtatgattattataattctgacaaatctgccaaggagatatgggaggcattacagaaaaaatataacaccgaggaggcgggaacaaagaaatacgctgtcagccgctacttgaagtttcaaatgaccgatgataaatcagtcaaagctcagtctcacgagcttcagaaaatagctcacgaaattctgtctgaaggtatgactattgatgaacaatttcaagttgctgttatgattgataaattacccccttcgtggaaagattttaaaaatactctcaggcataaaacaaaagagttttcattggaaagtctgatcactcgtct

SEQ ID NO: 286150 - DNA, 887 bp, Cannabis indica
ctcagaatcatacagatgaaaatcctgatattgagggtggtgaagttgtgttaagaagatcagagagagctcgcaaacctgctattcatgatgactaccttgtctatttgcaagaacatgattatgatgtgggagacgcttctgaaccagttacttaccaagaagccatgaggagtcctcaatctaagttatggttgaatgcaatgacagatgagtcaagttccatgtcgcgaaacaaagtatggaatttagttgttctaccgaaaggttgcagacccattgggtgcaaatgggtttacaagatcaaatatgattcaagtgggcaaccagtaaagtataaggctagacttgttgctaaaggatatagccagagagaaggtattgattacaaagaaacattctcacctgtctctaccaaagattctttgcgaatcatcatggctatggttgctcattttgatttggaacttgaacaaatggatgtgaaaactgcctttctaaatggagatttgtatgaagatatctacatgactcaacctgttggttttgaggagcctggcaaggagcatatggtttgcaagctcaataagtctatttatggacttaaacaagcatcaagacagtggtatctcaagtttgatgcagttgtcactgcaaatggtttcatggaaaacaaagttgatcaatgtatatatatgaaggtcagtgggagcagcttcatcttcctggtactgtatgttgatgatattttgcttgcttctaatgataaaaatctgttgtctgagacaaagcaattgttatctgaccattttgatatgaaagaccttggtgaggcttcatatgtacttgggatacagatccttcgggatagatctaaaggtattctt

SEQ ID NO: 286151 - DNA, 851 bp, Cannabis indica
acagataatggacttgagttctgtctgatgagttcaatagattctgtcaattagaaggaattgacagacacaaaactgttgtgaagaatccacagcaaaatggacttgctgaaaggatgaatagaactctattggaaagagtaaggtgcatgctaaagggtgctgcacttgacaagaaattttggggagaagcattgaaaactgcttgctatctaattaataggtgtccatccacagccctgaaatttaaaacaccacaagaagtctggactggacatgttccaactgttgaccatctcaaagtgttttgtacagcctttgcacataccagacaagacaaactagagccaagagctctcaagtgtttgttccttggttaccctgaaggggtaaaaggatacaaactgtggtgtttagaagatggccacagaaaatgcattatcagcagggatgtagttttcaaagaacatgaaatggccatgaaaactggtgctgcaaatcacaagcaaactgacagagacacagcaggtttagaaattcaaagcatcagggaaaatgcagaaactacagatcaggtggatacacaagagcattcacattcagaaactgaagagcatgcaactgaggaagagaacttaccagatgactcacaagaatacatgctggttagagacagagaaagaagacaaatcaagccaccagagagatttggctttgctgattgcacagcttttgcttttgcatcagcagaagaaattgacactactactcctagttcataccaggaagctgttgggttttatgccctaaataaaactcatttcaatataatcagatttgtttattaatat

SEQ ID NO: 286152 - DNA, 645 bp, Cannabis indica
gtaaggaaaaatagaattttcaaagctttctctctcttttccctctctctcttttcggctggttgtggctgtgcaaagggctgggttttgcttggttaattctagtggtttagcaagatcaaagtgattttcattgaggtatttcttggttttagtttcttaccttgtttttcttgaaatttatgttgaaaatagttgatgcatgcttgaatctttgattttgttgctgctgaaatattgttgttgtttctgagatttaagtatgttgatttgtgattatttaggttgttagtaatgaatgttaattgctttgctcaaatttggaagttttagctcaaaatatggttttcaaagagaattgattgaatctgttgctgggttgttgttgatgtttttatttgatttcagaagctattttaagcatgtttaagtagaattaagctgcttggtatgcatgttgtttagatttgctcaagtttgagtttagaactcaaagcttgagctccaatggtgatttttgtttctgtggtttctgggttagtttgttgccttagatttgttccttggggtatttagagcaggtctggaaggtttggaaccatttgggtttgatttggttgagttaggaatttttgaaaaattcct

SEQ ID NO: 286153 - DNA, 654 bp, Cannabis indica
gttgttgttgttgtttctatgattaaaatgcttgaattgaatggattagataggttgaaatgcatgctagttgcccttgttctagtttgagaatttttggttcaaaagctttggtttttcaaagagaaaaggtgaaaatagttgttgtaaagtttggttgtgtttgagaatggtttctgcagctttattatgcatgaatatgtagtttgattctagttttgatgcttgtaggtgagctttagccaagtttgagtttgaaactcaaagcttggagctcacatggcatttttagtatttatgtgttctgggctgttttgatgctttggtattgttctttggggtatttagaacaggcctggaaggtttggtttaaattggatttgatttgaaagagttatgaactttttatttttgcctgcgaggaaccggaattccggttgttcatccggaattccggatggggttctgaaattcccagaaccggaattccggttgggcaaccggtctgccggttgggagattttcaggaaccctagattttctcgtttttatgttatttggggtattgccatgctttttatcgatagggaaacttttagtttctagtttaagtccccggaaagtgatttagcgtatcacttattagtgttgtga

SEQ ID NO: 286154 - DNA, 507 bp, Cannabis indica
cttcatcttcactcaaagcttcaagatcttcaagagaacttatcaccctttcatccttccacacttccttgtgaaaactttcagccacaatagaatcaattacactcaaacgtgaacattcttcaatctcatccgggaatctcatagcattgaacacattaaaagtgactttttgatcattcactctcatagtgagttccccattttgtacatcaatcaaggttcttccggtagcaagaaatggccgtcccaaaataatcggaacttctctatcggcctcatagtctagaatgataaaatcagccggaaaaatgaatttatccacttgcaccaacacatcttcaattttcccttccggatgagccatggaacgatccgctaattgcaaagtgatggtggttggcctcgcttctccaattcccaactttctaaaagtagacataggcatgagattaatactagctcccaagtcacaaagagctcttccaacatctctacccccaatag

SEQ ID NO: 286155 - DNA, 642 bp, Cannabis indica
acatgaaacatgaacctgggacaaatgctcatatctagaacggtttttaatgatcttcggacgaccacactaggagcactaatctcagtgattgtctattatgttaataacgaaattacttttaggtagagcccaatacctaatgtctaaagtgaaaatataattttttataattagggagtagccacagcatctttaattatataaaattatatattaattaaaattcaccttaatggacaaaacttgtaattaattatttggatataataattttaccccacagggattttattatatttttataattaattaggataatatattaagttaaattctcttaatttaccccacagggagttatgaggatttgatttaatagtgttatcacaaattttaattaaagatagatttcattcctccattatttctaaattaaatacttcattaaatctatcataaagttcatctaattttattagatttaaaatttagcccacaggcaattttagatttaataaaattttcatcttcatcatgtttctacattggtaaaacatgaattcattaaagcctcaattcttttaacatctaaattgccacagcatctttattatataatgaggaacgttgggtttgaat

SEQ ID NO: 286156 - DNA, 551 bp, Cannabis indica
gaggcttttataattcgcacagctgtgagtatcccgcttttattgggccgagatgaacgcgtaattaaagatatatggtaaaccttatcccatatggatgtctcgctaaggatggagccaagttaactttgatgtcgagcagtcgcttgttatctgacttcccgagactaatattgttttaactctaataactatattttctagtatcgagatgatcttcctcacatgcacaccatcttccagcaagataaacgcctcgctgtctattatcttgactcgccaaactatctacactcagtttgtatatcgtgtaatatacgctaagtgtttttattgttatcatttctctttcacgcagcgaggttgagacctcgtcatgcacacatgcacccacatggtttcttatcaatacataagttagcagttcgtacgtttctatctcccaaaaggctatttagctagtcgagttataaacatactcagcgaattatgtttccaacaagttgttccatgctaaatgtactttcgtttgcgtgtttgagttcttcgtt

SEQ ID NO: 286157 - DNA, 497 bp, Cannabis indica
atgtgctcttcagttttttgaatgcctcctcacactcgtcagaccattcaaacttctggcacttcttcagaatgttgaagaagggaatgcacttatctgtggaccgggagataaaacagctcagggcagcaacctttccggttaggctctacacatctttgtgtttcttgggggcatgctcagaagagcttgaattttttctgggtttgcctcaatccctctctgactgacaatgaagcccaagaacctcccttatttgaccccgaaagtgcatttctttgggttgagcttcattccgtatctccagaccacttcgaaacattctgctaagatgtccgcgtgactattgcacgccttagactggaccaacatgacgtctacgtacacctccatgtttcgtcccaggaagcctttgaacatccgtttaaccattctttgataggttgcaccagcgtttttcaatcggaaaggcatgactaggtagcagtataccccct

SEQ ID NO: 286158 - DNA, 692 bp, Cannabis indica
agtaaacatcataggttaaagtttaaaacaggtattcacaaaactaagcacatattggagtatgttcactctgatctttggggaccagagaaaactccaacacatggtggaaatgtgtattttatgtctattgttgatgaccattctagaaaagtttgggtatttttacttaaacataaaaatgaggctttatctaaattcatacaatggaaaaccctaatggaaaatttaactaatcaaagggttaaaaccctaaggactgacaatggcttagagttttgcagtgatgaatttaacaggtattgtggctctgttggaattcaaaggcacagaactgtgagaattactcctcaacagaatggggtagctgagaggatgaataggaccttgatgaacaaggtcagatgcctattattgcaatctggacttactaaaggattttggggagaagctgtgttaacagcagcctacctggtgaacagaagtccatccagtgccattgaattcaagacaccagaggagatctggtcaggtaagcctcctgatctctcaagttagagcctagagctcttgaatgtgtgttcctaggctaccctgaaggcactaaaggctacagattatgggtaagagagaaacaagattttaaagctataaacagtagggatgttgtttttaaggaagacttatttcct

SEQ ID NO: 286159 - DNA, 534 bp, Cannabis indica
tgcttgaattgaatggattagatgggttgtaatgcatacttgttacccttgtttaagtttgtgaatttctagtacaaaagccatgtttttcaaagcaaagtgttgattttcgttgttgtggttgctgctattgttgagtagtgtatcctggtgttaaattatgttgaaacatgttgatttatgcttgatttagtggctgttgggaggattagtcaagttttgagtttttgaactcaatcttgaacctccaatggtgaattgagtttctgtgattgaagcttggttcttttgctttggatttgttcttaggggtatttagaacaggtctggaaggttttgtttgaattggatttgatttgagcaagttatgaatttttgcatgtttcctgcgaggaaccagaattctgattgtgcatctgaaatttcgaatggggttcaggaatttccagaaccgaaattccagttgtgcaaccgatctgccggttgggaaattttcaggaaccctagattttctcgtttttatgttatttgggg

SEQ ID NO: 286160 - DNA, 491 bp, Cannabis indica
ccgtgacagtgatctagatcttgactcgaaattcgtgtaagggggcctggagcagaccagtactcggtgtctagatttgggactcagattagaaccacaacccagacgaagaaccaaacccgaacccagacctagacaggggacacaaaattagaacttgaccaagaatcgttgaaccaggaccctagaacaagactacgaccgtgacctggacccgaacacagacctagaaccgaacacagacctggcctcaaacccaaactgagactggaactcgggcccggatacggtcgtgtacccataatggaattgagacccggacctggacctaaatttgggaaccgatcccaaacacagacttgcacctagatagggatccggatacgaacctagactcggaccaagacccagactgggatcaaaatgctggaccaatatctggaccgagatcttcacccagacctaaacttggacccgcactcgggacccga

SEQ ID NO: 286161 - DNA, 1347 bp, Cannabis indica
atttagattaattgaatattcgtaaaacaataactaataatgtttttattttcaagtatacttaccaatttttttttgaaatatccctattttatggtatctcataaattagttgtggtttctattataaattattttaaattttttaaaaaattagtaatatgtcttaaataattatattatatataactataaaaaattaaaataataaattttcttaaataccaaaaagaattaaaagtagcattagcggcccttattattagatagtattaaattgagcttttaacatattaactcataaatcaccactcaattttcttttttatttataattacttgatttatatcattttaaagtaacatgtaaaatatttataaaataaattatgatattgttttcaatgggtaggcaccattaaaatgaaattaaggcacttgttttcaatgggtaggcaccattaaaatgaaattaaggcaccaaatatgcaccacttgatattggccctctacaatttaattctagctctgcacccatgctgaatgtagtgatgataataaatatttattgcactagttgacatgttaaatgttaagatgtaccttagcattaatatttggttgctacaaatccctatgggaaataataagtgggtaatatacctcctcctaactctattctcatttcctatttatgccctcttcggatttttcttgctgtgtcccacttaattactaatgagttcagttttcgagaatttctattgggtataaaaacttgttaggtaattattaaaattaaaattaataataataaaaaaatatataatataatgtaattcaaaatgaaaataaaatgaaaatcttaattttaaaataaataaatattctacccattaaataatttttattacaaatctgtaaactaaaaaaaataataatcaattttataagtatagtcaataattttaatatgtaataattagaaaattatatttagaaactatatatttaaatcgaatatgtgagtagtaatattccttctattctaaattcacttcgagtatataaaagagataattttacaaatacacaaaaataataaaaaaaattataaaaatatagtttcacagaattttaaatatttttacaaattttttaattttatttacaaaaaatagggttttttttaatgttgtattcatgttaatttattgttatatatattattttgttttgatgttatttaaatgttatttttatattatttttatgtagttttttttattatctttttgtgttgtttttactaaataaaaatataaaaaaaaattcaattaaacatat

SEQ ID NO: 286162 - DNA, 532 bp, Cannabis indica
gaagaatattttcaattagggggccatttcaacaaattttaacccaaaaccattcttcatattcatttcttagtagtacaaattgattgtgactagtggcaaaaaatattccgagattggtccgggccacatttcacaaaggggtaccactatcagaaatgtgagattttcactatttcgattaaaacgatcgttagtgaagaaacaaattttactttctcaacgtgtccaagagaaaagtgatgcacaacggtcttggctaggcccccccgtagtaagttaaacttactagtagtacttttcggtttagggaagtagttggttagggtttagggttaggaaggaattttttttaaaaccaaggaattaaaaccttaaaaccggaaggttggttaaaaggaaggtaaagggtaaaaaccgtttggggttaaaaagtttacccctaagggaaaacgaaacgaaactaaggggttttactaagttagggggccatttcaacaaattttaacccaaaaccattcttcatattcat

SEQ ID NO: 286163 - DNA, 1062 bp, Cannabis indica
agaaaaatgagtgcttttgttccatcgcactaattatgctgatacgggtgatattagagcccacattgacaagctcatgggttgttaccaaaagctcaagggcatgggattggatcttggtgaggattacatggtgtggtttgtgatggaaaccattccttctcaatttgattcgatcagatcaagctacaatgctcaaaaggagcagtggaccattgaggagatgactgctattcttgccaaagaagaagaggacatgaaaaaggggagagcaagaagtatctccatggtgaccaatccaaacaattctcacaagagaaagttcactcccaacaactctagtgaccaaaggtttcataagaagaaagccaccaatcctaagggaaatggacaagcaagctcttcttcaactggtcataagaatgagtttttcaaagggaagtgcaacttttgtcaatgcttcgggcataagaaagctgattgccgaaagctcaaagctcacttagagaagaaaggtaattgtcttgtgatggtttgtttggaatccaatattattgatgtgccctcaaacacttggtggttagatactggtgctacaattcatgttacgaattctttgcaggcagtgacaagtcgaagaaggccgagtaggttggaggagtatgtgtacatgggagacgatactaaagtcagagttgaattttttgggactgttaatctgcagctgaatactgggcattttttggagttgcatgatgttgcttatttaccctctattaggaggaatttgatctctgtatctattttggatagactaggttatagtcttcattttggaactggaaaactgactttgtatcgtgactctatgttgattggaaatggaactttgtgtggaaacttatataagcttgatttgcttgatgttgttcctgttacttctccctcttgtccttcttcttcttctcttaatgctgttgttggttctaaacgtgcaagatcagatttgaaatcttccatgctttggcacaaacgtttaggccatatttctagagatagaat

SEQ ID NO: 286164 - DNA, 613 bp, Cannabis indica
gtcttttttgtatagccatcattctttggctggagggaaagttaaatcaaaatgtccgtcgcttgaagagggtagactagagcaaagacgaggatgaccctcgtgcaaaagttgaagcaggtcctagtggatttggtgttcgcttcccaaaactcacttgggttcatctacaaaagacaacacgcgagatgattgtttggtcggggatatcgaacattaaacaggaaaatatgccgactaggagtactcaatagattaaagaataaaaatattcgacgaaaagtcaaaactggaaagttcgaaattttcgtgagttagggcaaaaatattcatgaagcttagaataagcaagatgaaagacaggcattatgcaattcaaaaagcaagcattatgaacgatgaagtcgcacggatcgttacaaaggaaaattgcagagtttctaaaacttagggtttcctacatatcttctacagcgaagttaaagttgcatttagaaaataaatgtgcaaagtaaatgaaaaagaaatggagaacttactcaaggatcgaacgtctagatttaggttacgccaagctaaacgagtagtttttgtgaaaacacttcagcaaact

SEQ ID NO: 286165 - DNA, 581 bp, Cannabis indica
tagaaacaaaactaaacatcaaagaaagaataagggtaaaagaaagaaactagaaggtgatatcgctccgggtcttcaagatagcttcctctccactttcatccacttttcaggtctattttcgcttcgtttgaccttctgaatcgtgttccttatataggaatgaaaggtgtgtctccaattgggaaaaaatctgaattaggtcaaaaactacgttttccgtacctggtcgcgaccaacttaaaggctaatcgcgactacaggcaaatctcgaaaaacatagattttgccaaatctccaagtcgcgaccgtggtcgtgaccatagaaaagggtcgcgactagcacgatccatggtcgcgactactgacacccaaagagcagatttttttgatttttcgccagtttgtcccgtgttttcaccaattgactgaatttgaactttgacacccagggaaccttaaacaatgaaaatcaagcgtaaaaccgctccaaaagacaccaatagacgagaaaatgcttacttttcagacccgaaacataggctaaatataacctaacaattaccgttacaccttcaatg

SEQ ID NO: 286166 - DNA, 563 bp, Cannabis indica
tggccaacatcaaacaagaacctggtgagtctttacaagactattttaaacgctttaatgcagaagtaacaaaggtcgagaaggctcccgagtcttcgcttgtttgcatgctgataacaggtatcttgccgaggaccgacttttggaaggagttacaagctcgaaggcccgaatccttagttgaattcttcgccatggccgaacctcacaagagaatcgagaattctctagcggagttagaaaagggaaaggacaagcgccggtcacctataccgcgttcacgatctcgcagtccccgagggaagaactccaggggccgaagcccaagaagacgcagcccgcggagacagcgaagtccgaagttggccaagtctcctccaaagaaggaatcctcgccgaaaaggaaaggtggacctcgcttcgtcaactatactgaactcgcagtcccccgagaccatatctacgcaatcgaaaaagaaacggagtcttcaagagccgccccccatcaggggaaagtcgcgacaggagagaccctaaaaaacttactgtaagtaccacaagga

SEQ ID NO: 286167 - DNA, 570 bp, Cannabis indica
gtcttgacgacggcggggtctcccccatggaagaacatcctgctcctcccaacattgtgctgactccagttcctggggatgaggtgaggcaagagctccggatagccaagcataactatgccatggacgaatactcccgggggtatgccgaggtggaagcccttaggagggttttgcgggttgaggtacaggaaagtatcaacaacccggagtaccaggatccgtgggaccttaacttggaccccctgtcggactggttccgtcgcttccttgggcccaccttggctcccttcgccgcggagatgactggcgagttcgcttctcagcttacccggtgcgcgcctaagcggttcgcaacttgcgcctccctgaactctatcttccaggtccaggacctcagccattccctcaccgtggtaagtgctttacagttttgcttttcccttcatttttcttcttgggaattctttcttacacttgtgttattgttcagcttgctgctgaggctggccgcctctccaagaacatcattaatcatggcttcgttctgtctgattttggggacatgaa

SEQ ID NO: 286168 - DNA, 532 bp, Cannabis indica
ttttcaaaaaggaactaacatattttcacgtgaagcaagacaatcaatgactataataataataataataataataataataataataataataataataataataataataataacatattttattatatatgtgaaaataatttaaaaatccatagccaaactagaatcagaatgggatctgataagtagtaaatagctagtttgattttatataaagtaaataaatagtagttttcaaagagagaggtagtggtgcttatatcctcaaataataataataataaaaaaaaagtctgtaaagtcatgtgaacttaactgaaaaactgtgagatttaattggttccaagtaccatgtgctgtgcttcattattcatggcatctctgacttttgctttagttttaaataattaatattacttaattaataaatataaataatatttatggtacaatattatacattataaattaggtgtttttaattgatattactagtcttataattatatatttgagtttttattttatt

SEQ ID NO: 286169 - DNA, 493 bp, Cannabis indica
ctttccttcatttcggttactttccattccttgccatttctgctcgaatttcctagagagaaaatttctcgaagtagcacgaactgtcttaatactcagacacttcattcaattttccagtgtttgattttgccagtgcttctcaactctcactcaaccaccttcagtacctccagttcaacgatcgactgtaagtttcttgcatccttagataataacatgcttatatttacttcgttcgttttctgggttcgcacttagaggcttctgggtgtgtgagtgtttaagttcttcgagttctgttttatgtttactgcattagttgtagaatcgccatttatcatgcccctgttgtagttatacagttctgtttgaagagggccatgtgttcttcgtttaacagttgcttagggcataggatggcttttctcttttttttttctttttgcgaaaccactttctgcgatttcactgcacccgacacttgttgagg

SEQ ID NO: 286170 - DNA, 568 bp, Cannabis indica
agcctctgaagtcgcacctgcgtttattaaaccaaaaggcatcactttgtaacagtatagtcctcgatcagtaatgaacgaggtgtgttcctggtctggttcatacatcgggatttgattatatcccgagtatgcgtccatgaaactcaagagttcgtgacctgcagtggcatcaacaagctggtcaatgctaggaaggggaaagctgtctttgggacaggctttgtttaggtctgtaaagtcaacacatgtgcgccatgagccattaggcttaggcacgagtacggggttcgctaaccagttggggtaaaacgactcccgtataaagccgcaggcaaggaggcggtcgacttcttcttttagcgcttggtacctcgcggggtccattttgcggcgcttttgtcggacacctcgcacctcggggtcaatgttcaagcgatgacacatgacttgcggagatatcccgaccatatctgagtgtttccaagcaaaaacatcaagattttgctttaaaaaggtcgttaattgttctcgcagctgaaaatttaatttagaaccaattttcaaa

SEQ ID NO: 286171 - DNA, 524 bp, Cannabis indica
ctttcggtttctcctacaagttttctcaatttcagggtcaacgagtaatacaactacttgcccttggcggcgcatgcactcaaaatacctgaaatagataagaagagttttgcaagagaaaggttgaaattcagcaagagaaaatataccaaagtagaagttagtataattttgtgtaatatgaatctttaaacaattccccggcgacggggccaaaaacttgttacgaaaattatgatcactacgcaagtatacgcagtcaagtagtagctcacgcaagtgaggtcgaaccacaaagaattggactaagtactactaaattatacttatgattctatctggtaaaacaatacttcttgcaaattaaataaaacaattcagaaaattaaaagaataaatgaagattaatcaagatgagagattagggaggtgaatcctgttgttaagttaccaatgttaatgcctaattgatatcctttgctcaatgtgaatgatagattatgaattaacctaactcttttcag

SEQ ID NO: 286172 - DNA, 473 bp, Cannabis indica
tgttggaatagttacagaccaacttctggagacagtttgtcgccgcaagaaaggttaatctggaggtcagcgccttgactaacatcaagcagttgcctacggagaccttaaagaattatataaagaggttctgtgaggaagcctcgaagaccaagaaagttgatgacggacaacagcttgcccttctccaagcaggcatccgtacaggaactccattctggaacgaactacaacaggaaggagctgcaaaccttcaggacttccaaaagagagtccaaaaatatatcaatcctgaataggcccaaatagtggcctatggaggatattatcccatcgggatagcagggtatgtgcccggagcccagctgtcgggtactgtcccgacagcaactccactaatgagcgacatacaattcaccgctactcccggatatggccagggccaggccttggcccccgcgtcgtcccatttt

SEQ ID NO: 286173 - DNA, 611 bp, Cannabis indica
aggcgtgtaagtaaaataaaaaaaaaaaagaagagagtgaaatcctggttgtaatgggttgaactcagagcggcctagtcaatgcgaggaggaaggcgaggaccaatgcgcgcctccagcatggcatcgagcttcttcttcttctcccggaattttgcaatcatctccgcgggtttggggtagaagttaagcttgatattctggtcatttgtagaccaggccatgtagacgccatcgtcgaaacgcttgacgcaccgactgcaggagacgggagaaaggagctcatctttcttagccttcttcaaggcttggtctttgaagtccttgagctccttcagctccacggccaggttggccctagactccaagtctgcctggtgaacttcctctaaggacttcaccttggcagccatttcatccaaggcttccctagcctcccgaagctcacgcttggccttggcagtagcctcgccctccgccctcagctcctcctggtgcttggcctccagcctatccctccgaagggcctcctcccggatcatcgcctccgcttgtgcctccctccgcctggcctcttcctctctggccttggcaagggcctcctggcgctc

SEQ ID NO: 286174 - DNA, 403 bp, Cannabis indica
gagtggaaggagacattattctactgcaactaatgtaaggttttcttaactttatatgtgtttaatcatcgttttagaaagttcatatttagggtgttaaacaacatacttgtgagtagatctaagatcctggtaaaataaaatccaacagaatctccttcaagcatttttttgttttagagagccattagtattttcgggtgcacttatccatcatctcttcatgcataagatcaaatcagataaggatgatgaggtgtatttttacattgcaaagaagatataacgattcgcccgagctgagtttgccctggtgactgggcttaacatgttactgttggaaatattttaccaggatctagatttacttacaagtatgttggttaacatcctaaatatgaat

SEQ ID NO: 286175 - DNA, 536 bp, Cannabis indica
ctttgtacgagccatcatccatggctgggtacaggtcaagtaatgtccttcgctagaggaggactagaacgaagacgaggatgatcctcgtgcagaagttgaagcgaatcctggtcgatctgatgcccgagttcccaagactcacctgagttcatgtacaaagaaaacacacaagatgagtgttggacggaatatcaaacgataaacaagcaaatatgtcgaccaggagtactcaacagattaaagaacggctatgtctaaagaaaagtcagaactcaagaagtcagaaggttttcttgagttagggcaaaacagttcatgaagcttagaataagcaagatgaaaggcagatgcaatgcggttcagagacaagctctatggctgtaagcccacatgaagacatgataaagaagagtcgcagaagtttctaaccctagggtttcctaagcatttttctacaccatagtgaaagttgcattcaaagtgtaaacatgcaaagaaaagcataaaggaaatcaaaaacttactcaaagatt

SEQ ID NO: 286176 - DNA, 955 bp, Cannabis indica
ttcctcataggacatatctggttgaaagctcaagattctcataactaagtacatgagctgggtctgaaacgtattttctcaacatcgagacatgaaatacgttgtgaactgctgaaagagctggaggcaaagctaaacgatatgccacttgtccaaccttctcgagaatctcaaaaggtccggtaaacctagggcataacttgcctcttttcccgaaacgcttgattcccttcataggagacacccgtaagaacacatgatcccctacttgaaattctacatctctacgtttcggatctgcataacttttctgcctgctttgagaagcaagcattctggctttaatcttctcaattgcttcattggtccgttgcactgaatccggacctaagtatttcctctcccctgtctcatcccaatggatgggagatctacactttcggccatacaacagttcatagggagccatccctatcgtactttggtaactgttattgtatgaaaattctatcaacggtaggtacttactccaagtgccttcaaaatccataacacaggctcgtaacatatcttccagtatctggattgtcctttcggattgtccatctgtctgaggatggaaagctgtactgaacttcagtttggtacccatagcccgttgtaaactttgccaaaactttgaagtgaacttcggatctctatctgaaactatggattttggcacaccgtgcaaccttactatttccttgacatacaaatctgcgtactgatccactgaaaaggttgttctaactggtagaaagtgagcagatttcgtaaatcggtccaccactacccaaattgagtcaaataaacccgtggttctaggtaatccaaccacaaagtccattgcgatatcttcccacttccactcaggtagggttaaaggctgcaacaaccctgctggtctctgatg

SEQ ID NO: 286177 - DNA, 566 bp, Cannabis indica
gacctccaagaaaacctcaccaataggaggtaaaggttttcgaccaattattctccccttcacctcatcaaactctacattgagtccagccaagaacttagaaatttgagtcttctcaatagttcttttgtggtgttttccatcttcagttaattgccattcatatgtgtcaaagagatcaaggtcctgccaaatcctttttacagaattaaaatattttgtaatagagtcttccccttgtcgtatctcacgaagtgtgagattcaactcaaataattaagattggctctccaaatcagaatacatccgaacaacaatctccaaagatccttctgtaaggtagcacatatatttagactgatctcctcctccatggaattcacaaaccacgccatcaccaattaactctcaacttccctggtcccgtatgtctgatcatcctctactggcttcttcttctcacctgttaagtaccctatttttccatgacccactacagaaaaccctgcaaaagtacactaactgcgccggcaaagcttatctgagaatcttggtcggtaaaagac

SEQ ID NO: 286178 - DNA, 527 bp, Cannabis indica
gcaatcgaattcagcaacaaaaagagaagggatgaggaaatggagataatcacagattacatggtgcttgaaatcgaagaaggacaaatatacagtgacaagaacgtactgaaaacggcaatcggattctatgcaatgataaagaactttcaaatcagaacgaagaggtccgaaccgagggaatacatggttacatgtgttgacgaaaattgtaactggtttctgcgcgcttcaaagttgaaacaaacacaaaccttcaagattagaaaatatgtcaacaaccacacatgctcgttggatgtcataatggaagatcacaggcaagcaacttacaatactattgctcaaatagtaaagaagaagtacgactcaataaacaggaagcatgcaccgaatgacatcatgaaggacatgctacatgagtttggggtctcgatgggatatcaaaaggcttggagaacaagagagaaggctctagaattgtcaagaggaaagcctgaagactcataccaacaactcccaatgta

SEQ ID NO: 286179 - DNA, 317 bp, Cannabis indica
tataggctgatactgtaacacatcggtaaggctagagtatgactagcggctggagtatgaccagtgtaccgagtataggttgttactttgtcaaaagtaccgtcgtacgaacgttcgagactcagtaccgtgtgggacacggggattagggttgtggtcaggggtatgggcgtctgatcataacccgggatttatgtatgttttatgatttatgcttttcttactaagtctgtcgactcacagtgctatgtttatgtgtaggtaagggcaagggcaaagctgaggaaccgtcagtacgagccgatgaagattgtaca

SEQ ID NO: 286180 - DNA, 1016 bp, Cannabis indica
cccgccgctaatgctccgccgctaatacccatcagaataaaaaaaaataataaatatttataaaaatttatttatatattaatcctatatataaataaataattatttatttaaatatttaataatatctaattaatataattataacaatttaataaaatttattgataatttaaaaatgtctccaaggtaattaactttaacatattaatcctaatacaatattgtctcaaaattaaactaaattattaaaaaatataaataaattattcattaacatcttcattaaggtctccaattataaagtcttgatccggattattttcgttacgagtccccgaagcccatggcggagaaggcacatatgcttggtctgataaaattggttctcctgcgatgaactcccaaataatccaaaatcagcaaagtttgagccgagcggaggagactctgatggtgttcggtataagaactgatttcccaatggcggaccaaactgttgttgctgctgaggaaaagattggggttgctgctgaggaaaagattggggttgctgctgcaaaaaattttcaaattgctgctgtgacaaactttggaattgttgttgcgaagacggctgttgtggttgaggaggttgttgttgctgttccggaggagcggcataactctgagaagacgaaccaccaggcgactgcgactgactatacgtttgaataaaattgtcaaagcgtgggttaaatatatgagcacgttgttcaggcgtcaaattacccccccaagtggcacgcatagctgagaatatttctgccacagtgctcatcatttcagtagttggttggggaggcaccgtcgattgagtttgagggattggtttctttcctttgcccttgagccttttacccacgcctctttgatagtcagatctttggcctagaactgtttccaaaacgtcaaactgataaccagtatcagattcagattcagtaccagtatcgctctgggattgtcgttcaagt

SEQ ID NO: 286181 - DNA, 1038 bp, Cannabis indica
caggggcatgaaacacaaaagatgaagaaaattttgctcaagtcaattacctctcttttgaagaaagtttaatcgtagaagatgaagactcgagctcaaaccctttagaagatttgatagacatctttcaaccaacacctcaggaattcaaagatggaggacaagcaactgtggatgatttaatagagatcaacctcaggaccgaggatgatccaaagcctgtgtttgtcagtgctttattaactgaagaagagttaccacagtacaaacaagtcttttgtgagaacaaagatgtatttgctttgttgtatcgagacatgccagggttgaatccaaaggttgctgtgcaaaggttggcagtatcaaaagatgctacccctgttaaataatctcaaagaaggattcgaccagaattacttcccaaagtcgaggcaaaaattgacaagttaagagactgctagtttattcggaaggttcagtatcctatttggcttgcaaacatcgtcattgtgatgaagaaaaatgggcaactccgcatatgcgtggattaccgagatcttaatcgggctttcccaaaagatgaattcccactccccatcactgagttattgatagatgctaccattggttttgatgccttatcattcatggattgattttctgggtacaaccaaatcaaaatggcacccgaggacgaagagctcactgctttttagacaccaaaaggcatattttgttatacagttatgccatttggcctcaagaatgcaggggcaacctaccaaaaagcaatgaccacaatttttgaagacatgatgcataatattgtcgaatgttatgtcgacgatttagtggtcaaacaaaagaaaggacaaatcatcttcatgatttaaaatgagtctttgacaggctcagacaacacaatctcaagatgaagcattagttatcggcctcgaagttgcacttgaaatgaaaatacagtcattagatgtatatggcgattctcttttggttattaaacaaatgagttgtgaattt

SEQ ID NO: 286182 - DNA, 518 bp, Cannabis indica
aatttttttaaacatttttttatcaatattttggactccgaccctaatctagaccttggaaaccggaccggacccagatctcgactccaaaccccgaccctaactcggaccccgagccccgacctagaccccagaccacagacctcagacctagactggacctcggacctcagacccgacctattcccggacgccgacccaaaccccgacctgtactcggaccccgaccttgacctcagccccagaccccaaacatcagacccggtcccgactttgtaccccgacaccaaacccaaacccctacctagatctggacccttgacttggaccttggacctcgagctcgaccctgtccctaatctagacctcagactccgacctcgatcccgaccccgacttggcccctagacccagacttggcccaagaccttgtacccagactcggccccgaccccagtctcggaccttggccccagaccgaacttaaataaaatcaacaaataaaaatgaaatttaca

SEQ ID NO: 286183 - DNA, 344 bp, Cannabis indica
gaaaaaatattgaattttatgggagtggtcggaaatgataaatggcatgtgccacgtttcaatttcaggaagatgctttgatctggtgggaaatgatatcccttacgaaggatgttgccagaatgacctgggaggaatttcgggaattgttcaatgataaatactataatgaggcaatccgcagtgcaaagcggaaagaatttgttgagttggtacaaggagagggtatgtctgtgactgagtatacaaccaagtttgatcgcttggctaagttatcttctggaattgtaccaacagactttagcaagaaggagaagtacttggctggactgaatgccaagatt

SEQ ID NO: 286184 - DNA, 510 bp, Cannabis indica
cactccgacagtgaagtcagttcagagagctttcaaacatcctcaatcaaccaacctacccacccagttgatggttgtgacgctgcttgatattagatgagtgtccaccatccttctgacaatgaagtcggtcaagatagttttcaaacatcctcaatcacccaacgtgaacgcccgccgaaatcccatcggagggtggtgacactggatgatttcaaatgagtgtcagcaatacatcactccgacagtgaagtcggttcggacagctttcaaacatcctcaatcaaccaacgtaaccacccagttgatggttgtgacgccgcatgattttagacgagtgtcccccatccttctgacaatgaagtcggtcaagatggctttcaaacatcctcaatcacccaacgtgaacgccagccgaactcccatcggagtgatgtgacgcaggatgatttcaaatgagtgtcagcaatacatcactccgacagtgaagtcagttcggacagctttcaa

SEQ ID NO: 286185 - DNA, 772 bp, Cannabis indica
attcctacagtgatgaatataagacgcaattgaaaatttcctggggagttatacatttgtgtattgataagaccattcactatttcttgaagctcgatctctcccccggatgaaccatatagccaagagaaaccatgaaccagaatagaagagcttgccccacccatgagtaaatatttcatagtagcctcattagaccgtacatctttcttggtatatccagataataggtaggagcataaactgaaacattctggagctacaaagatagttattaaatcgttagcaccgcataaaaacattcctcctagagtagctgttaatacgaataacagaaactccgttatagccatttctgtacattcaatgtactctacggatagaggaatacataaagttgaacatagtaaaataagaaattgaaagatttcgttgaaattgttcgtttggaaatttcccgaaaagctaatcataggttcttctctccatcggaacaatagggccgttatgctcattactaaacttgttgaagagatgaaatataaccaaggtatatctttttgatcagaggttgaatcgatcatcagaagaagaattaggccaaaaattaggatacattctggtaaaataaaacttccattgaagagaagcaaatgaaaggctttcataaaaattctcgtagaatcgagaatgaagttttcattctgtacatgccagatcatgaattagtaactgcatccaatctccaaaaaatcccaattgtttcgaactt

SEQ ID NO: 286186 - DNA, 500 bp, Cannabis indica
tcctacagtcttacacactatgattgagataccacttgatatgtgtgggcactcactcattcactaatggctcgaaaaaattgaagaggaaaagagaagaagaagtggcggctagggtaaatagaaagaggctcagttttcatctaacaaagttaacaaaaagttaagtgtgaatgtgagccatcactatctatttataggtaaccacctagatttaggttagaattatttggcattaaaataatagaaaaataaatagtaaaatcacactaagtgtgccgcccatggatagtggattgggcccactttgcaattttgtcattttgtcatttttctatcccatattctcaaaaacgccaattttcaaatttaaccatttaaatgccaattctaattatttaataactaaaaattaagtactaaataatattgtaatttaatatattttttaattagacatataacctttaaaacacttaacccccgtataaatgatattt

SEQ ID NO: 286187 - DNA, 576 bp, Cannabis indica
aacatgcaatcaaacctggttaattctacttaatcaagcttatctaagcctctgaaaacaactaaatacatccagcaacaatacagcaacaaattacaccatttctttcaaaaatcataactttttcacataaaaatctaaccaactagaacaagaactcaagcatgcaattcaatctcattaaacctactgaattcaacactttaatcacagaaacaacaacaacaataaccagcagcaacaacaccaaaaacaacatgcattaatcatcataatttcaccattttttctaaaattacaacaagaaaaggttagaaactttaccaaagatttgaagaacacttagattggatgaaactagcttgaaaattgaagaaaaatccagcccttgaaccccaagctttcagccgaaaaagagagagagaaaagagagaaaaagcttttccaattttctaattttttaaacttagagatttttttgataaaatgaattaaacccccataacatataacctcatttcagccaacattaataaaataaacaacatttatttttcaaataataaggtcacaaaa

SEQ ID NO: 286188 - DNA, 615 bp, Cannabis indica
caaactgagtcgtatactcagtatcactcatgttttctttctgagtcaaatgggtgaattcttttctcttggcgcttctgaccgcctcattatagtacttggcattaaacagttcctggaacttctcccaggtcattgtggtaacatcatgaatcatggacaccatgtaccaccaaactaaagcgtcttcttgaaatttgaaagtggcacagaccactctatcattacccgtgatgcccataaaattcaagatcctggtgatcactgttagccattgctcggctttcataaagtcagggcctcctaggaaaactagaggtgcctgcttacgaaacctttcatacaggggttccatctagttcattgcaaccactggttcggcctgcacagtagggacatgagctactggtatctctggtgcaggaactgcaggagcactctgctgtcttaattgccgaatcacttcctcttgttcattgattttagtttgcatttctgcaaacttgttttcccaattctgggcatcctgaacagcttgggcagcttgggcaacctatggcgggttagcatcaccccgcacgtggcttgcccctaggacctctacctcggccccga

SEQ ID NO: 286189 - DNA, 744 bp, Cannabis indica
cttttcagcgtgatgaatgtgtgaaaacaaaaataagtgatctcacccgcattaaaactataaaatcgcagttgctaaaatggtcagcatccttacgaatgctgaccaccccatttgtatgcgagtagagatgcgagtaagtcgcgcatcctgggccaagtgatatatctccagaaacggctgggagaaactcagttactcaaggggcatgcgttctcaagcatgaccctgaaattactgagttactcccaccgttccgagactacctatcagccaaggagtacgctcatttgaatattaacgcatgtcgcaaatggctgggtgtatcacagtatctcaaggggcatataaccgcgtatatgaccattagaatactgtgacacacccaccatttggaaaagcgattaatactctcgcaattcgactcacagcatataaaatcctaaaagatctagccaataatcagaagtaaataagttctgtcagtgtgcgagtattcaaactgttcatccgaatacccgcgagtattcaaagtatgaaacagcgcctatttaaatatttcttatacagtatgcggttattccaatttacaggtcatttttcataggattacccagtttttacccaaaaaacgtaacctcatacatatcccttacaaacatacattcctaaaaagcctcaaaataccaaaacccagaaaaaacattctttctcgaacacagaaagcaaaaaatacaatggaac

SEQ ID NO: 286190 - DNA, 581 bp, Cannabis indica
ttcagcaagcaagctacttcctagtttttttcgttggacggtccggatgtcatagaaagccgagcaatggctaacagtgatttactagtaattttgtaatttttagtgggcgtcaccggtaatgatagggtggtctgtgccactttttttaatttcaagaagacgctctggtctggtgggacatggtgtccttgattcacgatgttacgacaatgacctgggaaaagttccaggaacttttcaatgctaagtattacaatgaagcagttagaagtgctaagagaaaagaattcactcaactaactcacaaagaaaatatgagtgttattgagtatacaacgcaatttgaccgtttggcgaggttggccttgggaattgtgccaactgacttcagtaagaaagagaaaaacctagatgggttaaacgagaagattagatacgatctaatgattactatcgacgacagtaccacctatgaagaaatggtggataaggcactgcgagctgagggcgcagtatgatgtatggtagagtctggtggtactccggttgttggcggggctcctacccctcctgcatca

SEQ ID NO: 286191 - DNA, 512 bp, Cannabis indica
ctaggactaggaccaggaccaggacctaaatccaaccccgaacccagatcaaaacccaatcagagacctaaacccaaactgataatagcactcgaacccgaacctagattaggaccccaaccgacacaataaccgggaccaagacccagaatcaggatagggacctaggaaaaagaactaggactgggacctaggacccgacccagacccgaagttgaacctaggacccagcttgtgacccggcaccagaaatggaaacagacaggaacccgagattgggatccggatctggaccaagggcttggacaaaacctgtaatcggtgtctggatttgggacccagccttggacccgaaccctaacaaggacccgaacccacacacggacctgatcccagtcccaaacccaaaattagaccgggacacggacccaaactcgaacccagacaaagatcagaaccaagaactgaacccagaactaaatccagactcagatcgagattggaacttggga

SEQ ID NO: 286192 - DNA, 428 bp, Cannabis indica
ccaaatgagagcatcctcttgaaattgaaacgtggcacatgccactctgtcatttccgaccactcccataaaattcaatattcttttgataacggtcaaccactgttcagcttttaagacatcagggcctccgaaaaacactggaagggcctgcttcctgaatctctcatataatggctccatacggttaccagcaacatgttgctcagctggcaccgcaggggctgcaggaaccgcaacaggcggttgcgggggaaactcaacaggagcatcccgttgcctgagtcgtcggatctcttcttcttgttgctcaattctagtttgcatctcagcaaacctttgttcccaatcaaccggggcctgaggtggattctcctgtccacctctcgggactcgaccgcggcctctaccgcgtccacgggggtttt

SEQ ID NO: 286193 - DNA, 568 bp, Cannabis indica
tcatggtgcagtaagtattgagagtaaatacttgactgtatgtgtgatcatctgtttaccgctttccattttaggcagtatgcaagcatctagagtatgtatgtgttatgtgatgccatgctataaatgttatttgtttatgtaaatatgtatgaggtaaatagatgagttagggtttaaggcaataagtgcgtaagtgtggtattggtgcttaactcgctggggttgttgattacaggggtactagtaatggaccctccgcaatcatctagaccacagggcgagcaagtagagcccggggttacccgaaccgatccaccagcactgcctccacctccgcaaaatccggggataatgcgggggccgttaatgctaatcctcctgctgactggcagcagatgtttcatgaaatgcgaagtgtcatacttcgtcaagaggaagagttgcaacgtttaaggcaacaagctgccccagttaatcaagggttaccaccagctcctgtgccagtggtgggtaaccaagggtatattatgccgcaccgggactctgtgttcgagcggtttgtgaa

SEQ ID NO: 286194 - DNA, 865 bp, Cannabis indica
tcttcataccgctccaccagaagtaaggtttaagatcttgatacatcttggtggtgccgagatgtagggaatatggggtagtatgagcctcttcaaaggtttcattcttgagttccgcactatttggaacacaaaccctggctttaaataatagcatcccgtcgtctgacactgaaaaatccttggcttgaccagctgaaaccttttctctgatttttactaactccggatcagtcatctgagcgactttaattctttctaacagatcagattgtagcgtcaagttgtgaagcttgcctaccacaaactcaatgttagatctgaccatgtcctctgttaacaggggtgagatctgaatcatgcgagctacctgcctgggacctttcctgctcagggcatcggcctctacattggccttcccggggtgataaagaatctcacaatcgtaatcccttactaactccaaccaatgcctctgtcacatattcaaatctttctgagtaaagaagtatttgagacttttctggtcggtataaatttcacacctttctccataaaggtaatgctgccagatcttcaaagcagatactactgcggccaattctaagtcatgagttgggtatcgttgttcataatctttcaactgacgggaggcataagcgataacccagtcagcttgcatcagaacacaccccagaccctgtctagatgcatcacaataaaccacgaacttttctttgtcagaaggtgaagctagcactggagcggtaatcaatctctgtttcagctcttgaaaactagcctcacatttgtctgaccatacaaaccgctgattctttttggtcagctcagttaagggtgttga

SEQ ID NO: 286195 - DNA, 525 bp, Cannabis indica
ctgcttaactgtttttggattattcttattgttggttcaatttgttgtgaaagataatctgaggaagtggaatcactttctctattcttctcaactgagcctaaagtagtaggattgttggaggaattattctcaatatcttcagcattccttttacccttatctgcattactagagaaggatctccatgcaagtgacaatgtctgttcataagcacgcaattcattgtccaacttgtctatgtcggacgagttccaattgtttaaaataaattggttaaactcaagtgataagctgttgaaaataaaatgaactctttgctctccagataaaataattcccagcatagctgctttttggaatttcatgttcatcatgagcaagtgtgaagtgatactctgaccaggagtcatcttcacactttgaagttcattcctaaaggcatattctagatgagattgtggtgtgggttatacattttgacactacaaatatcaataaacagaaataaattattggttaaat

SEQ ID NO: 286196 - DNA, 334 bp, Cannabis indica
gggcacaaaacccaacactttacccatgatccttcaaagtcaagcacacatgcccgtagcatgccttctaatatttgtatagtcctcttggattgcccatccgtctgaggatgaaatgttgtgctgaactttaactgagtacccatagctcgatggagactttcccagaatctcaatgtaaacttcggatctctatccgaaacaatggactttgggacaccatgaagacgtacaatttctctgacatataactcagcatactggtcaatggagaaattcgtccgaacacttaaaaagtgcgctgaatttgtaaacctgtccactatgacccaca

SEQ ID NO: 286197 - DNA, 953 bp, Cannabis indica
tcacgggtctcggtcttattctagttcagatcccaggtccctattctgagtttgggttcgggatcgagactagggtgcaattctaggtcccaaccctagttttgtggccctagtctggttccatgtttgggtctgagtttaggttcgggttcgggtcctgagtccaggttttggttgggatccgggtccggctcctaatgcatgtgtaggtctgatttggagtccggtcctcggtccggttacggttctagatgtaggtccaattttagttatgattcaaagtccaagtcctagttccagtcaaggtcaacttctttttttggttccaatttagggtcacagggtacgggttcgggtgaacatttgggtttgggactgggttcaggtccgggtgtgggttcgggtcctcgttagggtcccagtcttgggtcaaaatctggatcccaatttcgggtccgagtctggttccatttctggtgccgggtcacgagctaggtcctaggttcaagtttgggtctttgtcgggtaataggtccatgtcatagttctggttcccaggtccctatccttattctaggtccaggtcccagttattgtgtgggtttgggtcccggtctaggttcgggttcaagtcctagtctcggttcgggtttaggtctctgtcttggttttgatttgggctcgggtttggatttagatcttggtcctggtcctggtcctagtcctagttcggttctagttctatttgcaattctgtgttcgagtttaggtttgagttcgggtcagagttctgttctgagtttgggttcgggttcggatttcagtctaggtccagatcaagctccaggtgtgggttcgcgtcttgggtgttggtctaggttgggtgtgagtcccaagttctaatcctaatctgagtgcggattcagttctgggtctaagtccttggttctgat

SEQ ID NO: 286198 - DNA, 719 bp, Cannabis indica
acttcaaaaacaggaagaacttatctaaacctaaacgtctttcagattacatttgcaataccactgccactatgtccactgcttatcctattaacaaatatttgtcttataataggttaacacaacactttcgtactgccatccttgctgcccactccattgctgaaccaaccagctacaaaatggcagctaaagacccaaaatggcaaaaagctatggacactgaaactgatgctcttgaagccaacgatacatggatcgttgttacccttcctgatggacatcatgccattggttgcaaatgggtatacagaatcaaatacaatgctgatggcactgttgaaagactcaaagctcgcttagtagccaaaggctacaaccaacaagaaggtattgattactttcacacatttgctcccgttgcaaagttcaatacattaaaattactgcttgctattgcagccattaacaattggtctttgtaccaacttgatatcaataacgcctttttacatggcgatttacatgaaactgtctacatgacactcccaaagggatataaaccaaaaggagacatccctccaaatgctgtttgtaagctaaacaaaagtctttatggcttgaaacaagcctctagacaatggtttaccaacttagcaattatctttatctactggatttactcaatccctttcagatcccacattattcattaaaaa

SEQ ID NO: 286199 - DNA, 541 bp, Cannabis indica
gattaaactcacttaacctctcaagtcagtatgtccatctatttgctcatcagatgaatatgaagaaagctgctgcaatttataacagttggctttaataccaacttaaaggggacccaccagcaactatatatagggattatttcaaaggtctgagcgagagttctgatctctaatctttaaagttcatactttagattcagtttagagagagagagtccaagatcatagtgagtttgtgtggagggatgtaaaaagggagtatcactcttgaattgatttccctcaatgtgaggcatttctttgtaattacttactgtgttgagttgtaatctttggctcattctattgtgtactactgactattcctattcaataaagatctattatccatccattactgagttaagttttctttgtcttatttcaattatgttcaagttttggttttgtgattggttttagttttgattgtgtttcttgaacattgttactgttgtaacaactttttttgagggtgaggattcaccacaaatggtat

SEQ ID NO: 286200 - DNA, 646 bp, Cannabis indica
agattgcagcatcaagttgtgaagtttggctaccacaaaactgatgcttgatctgaccatgtcttctgctaattgaggtgaaatttgaatcatagtagttacctgcccgggacccttcctgctcagggcatcagccactgcattggccttcccatgatggtaaaggatctcacaattgtaatccttaaccaactctgaccaacgcctctgtctcatattcaagtctttctgagtaaagaaatatttgaggcttttatggtcaatataaatttcacatctctctccctagagataatgccgccaaatctttaaagcaaatactaccgcggcaagttctagatcatgagtcgggtactgcttctcatattctttcaactgacgagaggcatagccaataccctgatcggcctgcatcagtacacaccccagaccctgtctggatgcattacaataaaccacgaacttctctttatcataaggtagggctaacactggagctgtgattaatctctgtttcaactctagaaaacttgcttcacacttgtctgtccatataaagcgctgattctttttagtaagctcggttaagggtgttgaaattttagagaaccctcctacgaaccgacgataataaccagccaaaccc

SEQ ID NO: 286201 - DNA, 543 bp, Cannabis indica
atcttgaaccgtatcacgagtggacatggtcaccatctgtataggtgcggatcagatatgatcacttgcccgcaagggatatggctctaataccatgttgagaatcatggggttccatctcaaaaccaattggcaatgagtgtagtagcccatgttcttatatatggctctcttctctaccacttattctatgttggacaatgtcctcaatagacctagatccaaaaacgtaaccggaccaggacttggactcccaataaaacctagacccgaattgggagccgaacctggatcccaacccaaacctagactcgggacccgaacccgaacatgaacttagacccaaacatggaaccagactagggacatagaaccagggtcgagacctagaaccacaccccagtctcgatccctaacccaaactccgaaatgggacctagcacctgaaccagaaccagaccgagaccggtgacagtgatacagatcttgactcgagattcaggtaacgtggcctataatagaccagtagtcggtgtctagatc

SEQ ID NO: 286202 - DNA, 598 bp, Cannabis indica
gaacaggattttcatcacatttttgcagataagactgacagaacctacgagtatgatccagcctaccacagtaaaagcaaaaatctggcaatctttcatatttaaagtccaaccatttagtaaattcccgccccatcttaaggaaacgaatgttaatacccctccgaagtggtttattaacatccaaaaggaatctgccccttaagtaaggcccagtgccttccttaatggtatcctcatcaacttgaatgaggtcacccaagcctgaagctataagcttggcaagatcataggacttacaacgaaaggggataccatacacttgcacccagaaaggaatataatgcaagaggtcagcagtaagaggaaaagagtgatcaggagaggcaaaaacagttaagctttgagcaaagtgccaaggctgcccatcaaggattctcttcttatcaccttcgcacccaaacgtgacaagaaataatccttcagaatgttcagagacaacaacaggaaatcggcattgggaggtccacatttgcgagagagttttcatgagggagggacgattgaaaggacggatggtaaacaaacgcagaagaag

SEQ ID NO: 286203 - DNA, 746 bp, Cannabis indica
attaaaaataaaaaaaataataaagagagggaggtgttggtgacttgattcatgggctaaggaaatttgtgcttaattggtaagtatcaatatttattctttcttgatttattttgatatgtttccatttaaagattgatctcttatatggtaatgtgttttaatcttgaaagattgtcttaaataggatatttttggaaataatgttggtatttctagtttccctttatttttttttttaaaaaaaaaaaaggaaaagaaaaaagaaaaattttcttgcaagatagtggggcggtttccttttgtgttcttgggctggtagtttctctttttaagttggtttcctcttttgatcctctctcacatgattatataaaccaacttcctttgtcttttattttcataacctagctacccgatccctatttctttgtgttcttgcttctttgtttctcattcttactttcagaaattcatggctacaactaagaacctagggcatccaaggaaaatggtggaatccgaacaagccccctcaaatgctcttcttgctgctccaatcgtcttgctgccatggaggaggttcagcaagagatgtccaagcagctgtcctcattgatcaagctttatggggcataagttttctttctttttgtttttgttggacatatttctatattttcatttctttttgtctttggcccttatagataaacaaaaagggggagtaattgggtttttaattg

SEQ ID NO: 286204 - DNA, 644 bp, Cannabis indica
ctcagttccggtctgggtacacgaccatgtccgggctagagttccagtctctgtttgggtttaggctaggtctgtgtttggttctaggtccgggtcctagtcacggtcctagtcttgttctaaggtcctggttcgacgattcttgttcaggtccctattttgggtcccaggtctaggtttgggttcgggtttggttcttcgtctaggttcttgtcctcatctgagtccgagatctaggcactgactactggtctgtcccaggccccgttacccaaatcccgagtcaagatctggatcactgtcacgggtatcggtctggttctccttcaggtcccaggtcccatttctgaatttgggttcgggatccagactggggtgcggttgtaggtcccgaacatggttctgtgtcccaagtcttgttccatgtttgggtctgagttcaggttcgggttcggatccggagtctaggtttgggtggggatccgggttcggctcccaatttgggtctagatctgatttggagtccagttcctggtccggttacggttatggatctagatccaattaaagatattattcaaagtccaagtcctaaccccagtcccggtcaacttcaacttttggttcaaattttcggtcacagg

SEQ ID NO: 286205 - DNA, 525 bp, Cannabis indica
agtgtagtccatgctgaatgaatgacttgagttggagcggaagtcttcttctcccaaacaagcttgtttcgagacttccaaagtgcccagcagatcatgatggcacggcaagctatatcatcaccatacaatgcgaatgtagagtcaagccaataaccaatagttgatgaagtatcggattggatggtgaacccacaacgctcccagcaactgaaagcaaatgagcaattcaatagcacatgagaagcagtctcacccgcattatggcagacagggcacaaggaggatagatcgacattccttgaagccagttcaagacatgtggggagggtattggtgatagcgcgccacatgaagttcttcacttttggtggtattttaagatgccagaacctgtgccaaaatccagagtttggttgattctgctgaccatatttactaatctgcagcaaatcataggcactacggacagagaaggaaccagatctttcacccctccaggaccaacagtcttcaattggtgta

SEQ ID NO: 286206 - DNA, 723 bp, Cannabis indica
ggggggatcatgcaaaggagtattacttctccaacttaggtgattatttaggccggtcccggatgggttcgggacctccggtgcctgttcccttggatccttcggcctatctttcttctagctggttccgtccctcggacagctatctcggggacgatgcagccagtgctaagattcgggactttgctagggccgaattagagagtcagggtaggactagcttgattacttttttaagtgttcactgctttcacagatattctaacacttaactcttttctcttgttgcagcagctaatcccatggaggcgatcttggccacacttgctggagcccacagtcctgatgctgcttcccttcctcccacttcttcccagatggtcacccccgtgaaggcttcttccagtgcccctccaaacactattgacttagtggatgaggaggaggtacttcttgaggaagctaaagaaggtcaagaagagcaatgggctcttcctggggaagttgaagaaagtgaagaagagcaagaggttgctctcgtgcgcaagcgcaaaggcaagatggttgcagaggaatcctccaaacggccgcggagggtggacactccggccccgagtcatgattctgggatccctcccgaggcggaggagtttacagtgcctcatggcattgtactgactccggtcctcggagatgaggcgaggcaagagcttcggatagcca

SEQ ID NO: 286207 - DNA, 743 bp, Cannabis indica
gtcgacgttcaatctctaaggcgggtttccgctgagaacggaatagtgttcgtgtccaaaggtgaacaacgccctagcttctagagttcgctgcttttcccaggccgaagaagggcttatactgctcgcctttgtttgatatgttcattcagtaccaatacaaactacaactacaccaaagtggaagggccactatagaagctagaagtagtagtatagtagtcggcctaacataacaaaagcgtcacgacaacaaaaaagtacccttatgaatggaatcttaagtagggggcttagcccgcccgcctaccaatcaaagaggctgagagtaagcgtaagctcacccgaaagctcgaagagcttcccttcattcgcttcgcgggagccgcacagcacatagctggaagtcagagggcccatattacctgcctaacccctcgctccgagggaccgtacgatcggaaagcaccttctaaaccaccccacttcatccaaaacgaagaagggaaagggggccgtactgtatttgtcatgacccctcgcacgattttacccttactctacaccccggacggccaactcccctactcggtcccgtcgccggcccacgccgccagaacgggaggctcgtgtgaacctttatttctggcgtacagcggtggacgtaacaaatatacgtcgcgtacataggaccggcggtaagtgtaaacgtacggccgactaatatgacgacccaaacggga

SEQ ID NO: 286208 - DNA, 724 bp, Cannabis indica
gctattctgccttgatcttttggaggaaaagcgtgaccaagcgcacttaaaaaatgcggcttaccagcagcgaactgcaagatactttaactccaaagtgaaagtaaaagccctgcgagcaggagacttggtccttagaagagtaatgccaaatactaaaaacccgtcgcatggggtctttggggataattgggaaggaccatacctcatcgcagaaaaaattggtgatgccacataccgactcgcaacactcgatggaactgcgattccacgagcatggaatggcgagagtttaaaattatattatcaatagtactcgcattattcgactatgttcactcttgtacttatacttagatatttttcatgaaaaatcctaagtataggggggtatatatgcccgaatgtactattgattatataaatgaaattgattcatgattgttaaattttcaaaattttatcagacttgtaaatatttctacttattacaccaagctgtaattaaagtcgcgaatatatatatagaaaacgcgagtacccgtgtactgcgaaaatgttaaaggataattatccccgcgaggatataaatttgtccaaaataaaaggaaatttgtctaagtacaaagcgcgagtacccctgtaccgcatataaagaaaaagagagaagtaaaattaaaaagcataacatagaaaaaatcagacatctggagcaacaggagca

SEQ ID NO: 286209 - DNA, 564 bp, Cannabis indica
tattcaaggatttcctcgatatctgtgtaattgtgtttattgacgacatccttgtgtactctcgatcagaagaggagcatgagttacatcttcgaatggttctgcaacggcttcgggaacacaagctttatgccaaattcaagaaatgtgaattttggctatctcaggtgtctttcttagggcacattgttagcaaagacgggatcaagttggatccagggaaaatagaatccgtcagggatttgccgagaccgaaaacagtgacagaaattagaagcttcttgggtttagccggttattatcgtcggttcgtagaagggttctctaaaatctcaacacccttaaccgagcttactaaaaagaatcagcggtttatatggttagacaaatgtgaggctagctttcaggagctgaaacaaaggttgattacagccttagtgctggcttttccttcttacaaggaaaagttcgtggtttattgtgatgcatccagacagggtttggggtgtgtactgatgcaagacgacagggttattgcttatgcctcccgtcagttaaaggatt

SEQ ID NO: 286210 - DNA, 630 bp, Cannabis indica
caaatggataagttttaagtacgagagtcttcccaaattctgctacttttgtggccttatggatcacacttacaatcgatgttcccattatcttcttcgttgtgaaaacttcccctctcctcccattttagaatactgtgacactcttcgagcttcggcacaatcgcacataaaaaagaatcccttcgaaatatccaacgctactccttttgaggaactttttcctcgtccttcttcgcctgaccacagcctccagcacgctgtgaaccagtttctgcgtgtacactccccaccccgtactaccaccatcaccactaccactactgctatccctatttccccccttcccacgaatttaccctccaccattccacccccaactcatgactacctccacctgtcacccaccactgccaaacggaaaagaatattgctttgtcacacttccaggtcccctccgcactaggcctattgggctggtcattaatgaaccttccccccacgtcttctcctacttcctctgttggcaccaggaagcatttcactcgacagtccactcaggtgggggagttctattaggagcatgctcaagcgcgctcgtgcagccccacgtgaagatgctgttgtccc

SEQ ID NO: 286211 - DNA, 517 bp, Cannabis indica
aaaaaatgatgaaaaataatgagttatgcatggattttgatgatgttgctgctgttaattgttgttgttgtttccatgattaaaatgttgagttaagtaggtttaattaggttgaattgcatgttagttgttcttgctctagttggatagattttctatgtaaaaagcttgagttttcaaagaaaaattgaggttttagtggctgtagtgtttgcatgagttaggttttagtttctgcagtgtttttatgcttgaatatgagttagaatcatgatttggatgcatgttagttgtttttaaccaagtttgagtttagaactcaaagcttgggctttaatggtgattttcgtttctgtactttctgggtggatttgatgctttagaaatgttctaggggaggtatagaacaggtctggaggttttggtatgatttggagttgatttgagcaaagtgtgaaattttgaaaatctgcctgcgaggaaccggaattccggttgtgcatccggaattccggat

SEQ ID NO: 286212 - DNA, 520 bp, Cannabis indica
acatcgaaactgatagaatgcataaaccgaagttcttgaacataaagaccaaggcaacagcgatggacataaaaggggagttgaaatacagatttggcatcaaaatgaactatatgaaagcttggagaagtaaggaacatgcagtaaacgacttgagaggtaatgctagtgactcgtacagcctaataccgagtttcttacacatggtggaaaaaacaaaccctggatcatttgtcgatctgaaaacggcagaagacaacagcttgctctttgttttcatggcgttggatgcatccataaaagggtggggagcatgcagaccgatagttgttgtggacggaacgttcctcaaagcagcttatgggggaactttgttgtgcgcatgcacacaagatgcagcaggtcatatttttccactagcgttttgtgttgcagattctgagaatgaccaatcttggaaatggttcttcaaaaaatttaaagaagcgtatggggtacgggaacaccaatgcctaatttc

SEQ ID NO: 286213 - DNA, 609 bp, Cannabis indica
cagtcgcctcagacgtctcatgtgtcagagcctcggatgccacaaatgtcacagatgccccaaaatgttcagatgtcgacacaagggcagcaatatcagaacacatcgcagacgatgccgacacaaccatgggagcagacatctcaaaatgatgccgacacatctaggacaacagacttctcagatgatgccgacacaacaagggcagcagacatctcaaatgatgccgacactacatgggcagcagacatctcagatgatgacaagttcgcaaatgccgccatactacccacagatgtcagatgttcctggagatgctagtgatgaggacgatgctactacaaacttcttttagaatatctattttaatttgacgaactatcagtctaatatgtttgttaatattttatgaacactaatttatatttaggtatgcagtactataatgtttatgactcactttttattgtaatattagtgactctaaatattttcttttaattaaatgatttcatatcttaattaattcaataattttatatattaattaattaaataattaaaattttaaattaattattaatttaataattttaatataatattata

SEQ ID NO: 286214 - DNA, 385 bp, Cannabis indica
ttttgcctcctgatggcctcaagaaaattaaggccatacttctaagcacatccgatcaaggtactgaccaaccacccgctccggcaagtcctccaaaaaccagaagcatccggaaggctcctcaagtgggcaatggagttgagccagttcgatttacactaagttccccgaatctccataaaaggccaagccttgatagactttattaccgaatgcaatgaagccgaggcaaccgcaaatgtgccaacaccatcggtccccacatggagagtgtttgtggacggagcctctaatgaaaatggatccggagcaagagtgaaaatgatatccctgttggaatttattttaccaggatcttagatctactcacaagtatgttgattaa

SEQ ID NO: 286215 - DNA, 674 bp, Cannabis indica
cgcttgctgacgtagtacacaggatgctagtttctcttcttcccggactaaggccgcactgaccgcgtgctcggagacggccaagtacagaaacaagtcctctccgagaacgggctttgacaggattggaggcttggccatgtgctctttagttttttgaatgcctcctcgcactcgtcagaccattcaaacttctgacactttttcaagatgttgaagaagggaatgcacttatctgtggaccgggagataaaacggctcagggcagcaacctttccggttaggctctgcacgtctttgtgtttctttggggatggcatgctcaggagagcttgaattttttctggatttgcctcaatccctctctgactgacaatgaagcccaaaaacttccctgacttaaccccgaaagtgcatttctttgggttgagcttcattccgtatctccggaccacttcaaaacattcttctaagtcgtccgcgtggctattgcacgcctttgacttgaccagcatgtcgtccacgtatacctccatatttcgccccaggaggcctttgaacatccggttaaccattctttgataagttgcgccagcgtttttcagtccgaaaggcatgactaggtagcagtatacccccttatcggtcctaaagctagtgcactcttgatctgc

SEQ ID NO: 286216 - DNA, 506 bp, Cannabis indica
ctgctaggattcaccactttttcaagaattctcttgatttctctattggaaatttcagcttgcccgttggtctgtgggtgataagcggtggctattttgtgcttcacactatacttggctaaaagggcagccaagactttgttcacaaagtgtgtcccttcatcactaatcaatgctctcggtgtcccgaatcttgtgaagacattcctatgcaaaaatttcatcaccaccttagcatcatttgttggactagctattgcttccacccatttagaaacataatctacgaccaccaatatgtaaagattcccaaaaaatggagggaatggccccatgaagtcgattccccaaacatcaaaaagttccacttcaaggatgcaattcaatggcatttcatttcttgctgaaatattgccaactctttggcaacgatcacaacttcttgcaaaatcatgagcatccttgaaaatggaaggccaataataccccgattggaagacttttgc

SEQ ID NO: 286217 - DNA, 795 bp, Cannabis indica
caggtctggaaagtttggttgagttcggaaacgttttggttaggggtttgatttttgtaggttttcagggtaaaaccggctaaccggttttacactgcttgtaaaaccggttacccggattttgcagcagggggtgaaaaccagttttttcagctggtcgtttcgtgttagtttcaggttttcaggcagtttattccctgctagtttgggatatttttgtattaagttacagtaggttaagttttggttttaaacctttgtcccggttgtgatttagcggatcacttatatgtttttgaatcgatgtgatttaggagcctataattcgccgaacagttgttccactcaggttgaccggcacacctgaattcggaattgaggtaagattagtataatatcatgcatatgttattacatgtttagcgtacatgtgttattgcctgttagatacattgatagcaataatagtatacatagagttgtactgattattgataaatgtatgttggctagaatactgatcgatgttgtcacatcaatatggctagagtatgactagcatattgagtataggctgacattatggtcgatagtattgtcttatgaacgttctagactcagtaccgtgtgggacacggggattagggttatgatcgggtgtatgggcgccaggttataacccgggttatttgtatgtttatgttatgcttttcttactgagtctgtcgactcacagtgctatgtttatgtgtgtaggtaagggcaaggccaaagctgaggaatcgtgaggacgag

SEQ ID NO: 286218 - DNA, 812 bp, Cannabis indica
caaaacttctctctttccctctcgctgaccacgcacgaccacggcttcagcgcccgaccacgcccggccaccgacgaccacccaccaccaccgacagcagcccccgaccacgcacgaccaccgtccgaccatgcacgaccaccacccgcagtcgcgaatatgtcgaaggttagtttttcatcggtcagttttgggttttttaagatctgaggttgaagacatcggacctcctattggtctgatgccgtccgatagtctgatggagtacatggggtagggtccgatggtcattctcgtggggttggggtccgatgggctatgtggaggttcgatggtccgatggatgggggttcgatgggtgggggtccgatgggttatgtgggttgggtccgatggtgttgtgggttgaagtttgagattaaaggttatgtgggtcggggcggtctgagtcgtctcggtcggattgggactgtgggtctccgtcgtagtcgtctcggtcggaggagggggtcgtctcgtggtcgtagtgcgggtgagggggctgggtcggctcgtactatgtggtgagggggttgagggttcggttgggttgagggttattcttgggtttttttttataaaagtattatatatgttttattttgaaatgtattagtttaagaataaaatattaagatttttaaagtatagtttttcaaatctccctattagtatctcttttgtttaatagtttttagttaaaactacttaatagtaatatatttattatacgaataatgtaatatttttttttttataatttacttttaata

SEQ ID NO: 286219 - DNA, 126 bp, Cannabis indica
actaaaggggtattttggtacattctaaattcccggccaaacccgacattcccaatgtctaaatgcaaaattatgaaaatctctaaatgacataaaatacatttcagaattcaataataatagcat

SEQ ID NO: 286220 - DNA, 604 bp, Cannabis indica
aaacttgaagaagaggacattcaggctcagatcttgattatactctgctacagaaaggatacaagggttagagatctgagcggaaggagacattaattccgctgcatcaatgttaaggttttcttaactttatatgtgtttaatttatcgttttagaaagttcatatttacggtgtttaaacaacatacttgtgagtagatctaagatcctggtaaaataaattccaacaacatcatcgtctgaaaaagtcttcctcatgctccaccagaatggccttcccttttccctccacaggagtggatggtcgagcaagcatatatggttctctaagcgtgatagcatgttccactggtgcttagtcggttggggagccttctttttttcttgctcgacctctcttgctctgaatagtcttgagcatactacttggctctgttgtctcccttcaacttagcctcaagcttgagttgaatgagctctttctcctgtctcagttccacctagcccggtttggcttgtcctttgacttcttctccttcatgggcctcgacacaaagtcctttgggcagagcttatacttaacaaagttggcctcagtggcca

SEQ ID NO: 286221 - DNA, 511 bp, Cannabis indica
aaacaaaatatcaccaaagtgatatctttgtgtagattaatttaattaaaatattataataattgtgtgtatgtgattcataaatttattaactaacccaaaggtgagttaatatttggatgaatttcatgcatgtttgtggtgataaatgtgtgacaattataaggtatttttgtgtgaacaatgtgttagtctaaagattgcatattgtttgacataatttattgtcaatatttgatcactacaacaagagtaccgcttacaattaatattactgtccaaagacttaatattaatgttgtgtttagtatcttgagatgggattaaccattatttgaatttattgttttatttggattcttatatgagcatgttatttatgtaattgtattgttcttttcagttgttgctagtgtatctgctaatcttaattcggtactggtccttaattgtaataactttaaggactggaatgtaacaccctaactaccttaggcgtattacgtgattt

SEQ ID NO: 286222 - DNA, 488 bp, Cannabis indica
gtttgagtttgggttttagttcgggtcggagttcgagtcctggtctgagtttcggttccgttccggatttcagtctaggtccagatcacgctccgggtgtgggtttgcgtcctagatcatggtctaggttgggtccgagtcctaagttccaatacaattatgagtctggattaagttcttggtctaagtccttagttctgatccttgtctgggttcaagtttaggtccaggtccgggtctagctttgggtctgattctaggtgtgggtttgagttcgggtacgactctttgtccgtgtttgtgtcgaggtctggacaccgatttgggtctaggtttgggtccaggtcaaagttggggtcacaagtgcgtgtccaagtttgggtctgggtcaggatctcggtccaaatctaggtccagcatttcgatcccagtctgtgtcttggtctgagtccaggtttatatctggatccctatctaggtccgaacgt

SEQ ID NO: 286223 - DNA, 489 bp, Cannabis indica
cataccaccagaagtagggtttcaaatcctgatacattttggtggttcccggatgcaatgaataaggtgtggtatgagcttcatcaagtatctctttcttaagctcatcaacattaggaacacaaactcgagctttgtataacaacattccactgttcgagactgaaaagtttctaggccgaccagccattacttcgtctcgaaccttaactagctcggaatcttccaattgcgcctttctgattctttctaataaatcagattgaagtgtcaaattatgcaatttcccaactacgaactcaatccctgcactaaccatttcagaggctagttgaggggctatcatcatcgtggtgcaaacctgcccgggaccttttctacttaaagcatcggccacaacattggccttcccggggtgatacagaatttcacaatcgtagtctttaaccaattccaaccaccttctctgcctcatattcaaatccttct

SEQ ID NO: 286224 - DNA, 1062 bp, Cannabis indica
cttatttaataaacagatgtccttcaagttgaattcaaaacacctgaagaaaggtggtctggtaaaccacctgatctctcaaacctaagagtttttggttgtagtgcttttgtgcaccagagtattggtaagcttgaacctagagctattaaaggggtttttctaggttatcctgaaggagttaaaggttacagaatttggctaagagacaaaggtggattcaaaactattattagcagagatgttatttttaaagaaaatgaatttccttgtttgcttaaaactaaccctgcaggtacagtagaaactaaccatgcaggtacaatacaatttgatcttactctatggaaactagatgatcaagaagaacctgatataaatcaggtggaacctgatctggatcaggtggaacaaacagaaagctctaacagagaagggacacaagatgaagagcaacaaggagatgaaactgaggttgttcaacccactgaagctctagatgactaccaattaaccagagacagagagaaaatgacacctaaacctaatcctaagtacagtttcaacatttggaatgaagacatagcctatgccttcatgacagccatgaaatctctaagtacagaacctcaaacctatgaagaagctatgacagagcctaatgctaagaaatggtttaaagctatggattcagagatggtctctctaaagaaaaacaagacctggataatggttctaagacctaaagggaaaaggataatagcctgcaaatgggtttacaagcataaagaaggggtaattgaaggtgaacctataaggtttaaggctaggttagtagccaagggttttacacagaaagagggagtagactacaatgagatattctcaccagtagccaagtacaagaccataaggataatgctatctatagcaaatcaatttgacatggaaattgatcaaatggatgttactacagcttttctacatggagacctagaagaagagatctatatggaacaacctaagggatttgagattaagggaaaggaaaatatggtctgc

SEQ ID NO: 286225 - DNA, 608 bp, Cannabis indica
cccatcaagccggcccaaaattgtcggcttaattaaagcggttgggttactattggcttactatggttcaagatgagattaattttgctaaatgttgtaagtcatgccaattacatggagatttcatccaccaaccccctcaaccactccatccttctaaacgtcatgacctttcgaaacatgagaaatggacgtcattggtccttttacgccaccctcttccaaagcccataaatatattttggccatcacagattacttcttcaaatgggtcgaaggtgtaccactaaaagaagtacgggcagaagatgtccctgattttataaggacccacgtaatttatcgatacggggttccttcaaaaattatctttgactgccctttatttcaaatgtaaggaaatggtcaagttgatgaacaaaaacaaattaaagcacaatttctcggctagttacaaccatcttcaaatggttaaacagaagcatttaacaaagtgttatggaaaatcataaagaagacagcgacaaagaataaaagggattggcatcaatgttggatataattttaccagcatctagatttactaacaagtatgtttcattaacatc

SEQ ID NO: 286226 - DNA, 227 bp, Cannabis indica
ttttcatctaacaaagttaagtgtgaatgagagccatcactatctatttataggtaaccacctaggtttaggttagaattatttggcattaaaataatagaaaaataaatagtaaaatcacactaagtgaccggccctagaatggataatgggctcactttgcaattttgccatttgtcatttttccatcccattttctcaaaaacgtcaattttccaatttaacca

SEQ ID NO: 286227 - DNA, 684 bp, Cannabis indica
gaattactagacaaggtctgcccgcctaccgctaggcccacgagtggaactcgtgatcggggattgggcggctgaccatttgcagtctggaaagtattcatcgctggatcttcgtccgtctcacccaggggaatgacattcggaggttgctgacctacagtttggtaggctttttgtatcagcacggtagcttgccgactacaattttcaatctttgtatggtgagcccttaacgcctccatctctctatctctcaactcggtaaacatacgcctttgttcttcgaacgcgagatttactgcagtgcagagttcgtcctgatcatgatgtagggcattgttgtgaccctgcatgagtgcaagagcgtcgcgaagattttgtaactcagtagcatctccgatggtcgtctgggtgttggttccaggcagaacagttgtgttatgaatgtcctggttgggtgcggaactattattcccagtctcttgcacaccaggagcgatttcatctatacgagttgttacatcattccccacgtttcccggctgtccaggattcacagctggcggaacccttgtgtttcctgggttttgcaatgcaggatccaccgtctgtgaatttgctggatcagtcaggcctctgcgagtctgcaccatcattagattttggataaagagcaattcttga

SEQ ID NO: 286228 - DNA, 644 bp, Cannabis indica
gctgaaataagaagaaaaacaagcatggttagtaggtcaagaattaataacccaaggggataataattctctaaaacacatgagtttatagcatacaaagaaataccttgtttctttgctagaaacatagggcattggggtttccagtggcccttttcattgcaatagaagcattttccttttggcttatcactgggagtagcaacctttttctttttaactgttttaacatcttgaacaggctttttgctattcttccacttattcttgttgttagattttgaagtagaggcaatgtttgcctcagctttagccgccccattagcattcccagaattaggagctttagatcctcctttctatggtcctccaatcaaattttcaaatgtctgaaggttgtttaccaactcgtcaaagtcaagttccaacttgttcatgacataatttgaagtaaaaggtagaaaggctggagtcaaactgttcaagatcagactcacttgagttgtctaatccttaacagctccatgattctgagcttcttggaagtaactcgtcatttggaaaaggtgatgatgcacattctgatgaggtctcatccatgcattgatgaaattctttgtcacctcaaagcaagcttgaattga

SEQ ID NO: 286229 - DNA, 534 bp, Cannabis indica
ttattttaatcgaaattattttttattttcctcttagttttttcatttagaaatcgcttagatagtatatcattggatgaatggtttataaattatctacttatgatgtcattctaatttttcatatgaaatttaatggcgcagatgactatattcctgacattctatcacaaaatgatatatatccttgatctaagaaatctcctacttctatttccttacttagggcatcctaagcctagagttagattagtagtggtggtccaagctagaatcattactcattttatatttggtataaatttaagtctttgacttaaattttagatttcaaatagaaatctaaatttcagtttccagaatacattggacaatacagtataactttcacaagttgttagtatccattttctgtcaatggatcgttaaccaaatttgagcatcacgatgataattcaacacagaaaaaaaaaagctatagaaaaataaaaaatgaacaccgtggtttttacgtagttttgtagttaaaattct

SEQ ID NO: 286230 - DNA, 879 bp, Cannabis indica
tgcatgtatacaaaataaaaaccaataaatcacactgcataacctatcttttacttcacatatctctaaagtatacataccaaagtattctataagaagttccaaacattatgccaagttaaaaagtttaacatttttaaagcactagttatattataatatagcatatataaacataaatacctgcaaatatgcttcccacactggtttttccgcagttacagtttttctaatactgtcccatccaaacccgctacaaaaaggtccagtcaacatttcatgtactatttgaaaatgagtcttcaaagttttcattctagactcaatgtgtggcttagcttgtatgtcacatccaggcattcgctcttttagtttcatctcaatagctctaagatgacctggcttgaagtttccttcagctttaaacttcccttcattatttagctccataagtgattcaatcaagtgtttgtcttcatcttcactccagaatcttttattttgtcctggacctcttccttttgaagtctccatgctgaaataaggaatcaaaataatgtaaaactaaaaactagaattgaaatgttgaacttgagtgaaaaataaagacattcaacagtaaataaacaaaactgaattgatatacacaccaataacaaaacataaattcaaagataaatttcaatgttgtcaattacacaaccagtcaaataacttggcatagccaagtgaaaacaaatataaaaacctagataatcattgtgcatttaatctaagaaaaaaaactagcttgctctcctacgttccctccattcactatacatctcatgtgctaaattgtttctaaacgttgtccactcttcagaagcttcaatactt

SEQ ID NO: 286231 - DNA, 696 bp, Cannabis indica
cagtatcaggctcaccgttctgtgatgatggacaaaattctctaccgaagaggactcatcatgccttatctaaggtgtgtataggaccctgaagctaggcaaattatgctagaggtccatgaagggttctgtggagatcatacaggaggacctagtctctcaaagaaaatattgagacaagggtacttctggccaacaatgaaaaaagattgcatagactacgtccaaaaatgtgattcgtgccaaagattcgcgaacataccgagagctcctcccaatgagtttaccctgatgactagtccctggtcgttcgcggtctgggggatagatcttattgggtccctgccaacagaaaagggaggagtaaagtatgcaatagtagcagtagactacttcaccaaatggacggaggctgagccaatgaaaactataattgctaaaaaagcactaggctttgtcattaaaaacaaagtgtgttgatatggcttgcctcacaaaatagtctttgacaatggaaagcaatttgattgcgaagagttcactgacttctgcaaccaacacggagtcgttaaaagcttctctgcggtggcaaggccgcaaacaaacagacaagcagaagcagtcaacaaaatcttgaaggtcaccctaaagaaaaagctgttggcctgcaaaaacaactggcctgaagaattgcca

SEQ ID NO: 286232 - DNA, 636 bp, Cannabis indica
tatttatgttcttcaatttgcttaaagtcgaccaattagatctttttgtgacatacagattaaagacatggtagtttaattgagtgggagcgctaatcatagatacagaatctatagcttctataaatgcataaaagtgaaatgatgatttcctttgagcttgaattaatagagataaatggtggagttctcatttcaataattatattagtttactgaaatataatttatatgtagctaaatgttttaaggataaaatacattgacaggtggaacgctaaatttgtccctactcgatgtagatcatctatagaggatcattgattattaagattataacaatagataattcatagtgtatttatttcgtggaacatatagagcgctctatataattaatagtgcaattttgaatctatagtggcgtaaggaggaattaataagttagaaaatttacttgataaattctagagttacttattagaaccttaattatataggcccatgctccccacactagttgagataatactacttatagactcagttaattggttttaattaatcaattataattctaaaattagactatgtaatatttgtgaattttcactaagtaatgacttaattatgaag

SEQ ID NO: 286233 - DNA, 894 bp, Cannabis indica
attaaatatcaaaactaatacatatatacattattaatgggtattacttatgaatgggtgaaattagaaaattttgagtttttctgcttaatttttctatctaattaaaaaaatctctcatttttatattatatagttgagattgtttcatcggtaaaaaaaaattaaaaaaagttttttagcaaaaaaaaaagaaaaaagaaaaagttaagtttgagttaaaaaaatttgtatgaacatatttttgatagtgtaaaaagaaatattctttgattatttttttaattaagtagttaaattaagcatataaattcaaatttgtgattctattattcgttattaaatcaaaattcaataatttgaaaatttttaaaattaatttttataattaaatttattccattaaaaattgttccgtatatataaattttatttatactcttttagaaaagacaaaaactaaaagttaattttctcgaagaaaagtcttcagtattgactcaggataatgctcaaatatagtcttgaaaatagactatacataggctctccaattttcgtacacgtgtccaattaatattattcctcgtattaaatttatgagttttattcccatcaaaaatctattcgaattaatcttaattaaggaaaaatgctaaagggtaggtgctgtcaatattgttattgaatttaattaagtatcgggttctatataatttaatagtaatagtttagggagtctacatcgagtcatcatcactatattgtatatttactttcttaattttttgggctatttacaaaatatgggaaatggaagataagttttgatatatatgacataaaacttaattatactaacatgacattttttaaaaagacttaaaatatggg

SEQ ID NO: 286234 - DNA, 478 bp, Cannabis indica
aggccttgaagagggtcctacggaggagcagcaaaacgtcctcaatgcggaggacttccggaatccgtgggacctgaatatggatccgctaacggactggtttaatcgcttcctggggcccaccttggctccttttgccgcggagatgaccagcgagtatgtctcccacatgactcaattcccgcccaaacggtacgctgcttgtgcatccttgaactccgtctaccaagttcaagacatcagcaacgccatggccgcggtaagcacttgattcatttctttcctcaatattttgtctaaggcatttgatctcactcttttctcctttttcagatttctgcggagaccagccgcctctccaggaccatcgtcaatcatggcttcgtcctgtccgaattcgggggcatagacgaggtcgtgaggattctgcgggacctgttcgctgagaggcaggcaatccaagaggaggctgagcgaa

SEQ ID NO: 286235 - DNA, 477 bp, Cannabis indica
tcatacctcatcttggagcaatgtcaagagcaacaaaaagataacaaaaatcaaaacaaaaagttaatctaaaacataaagaaaaacacatattaccaagaattgatgagagcaattaaggatcatggtaaattggaccctcaaggaggatttcatccacttccacatttttcaattctaaaaatggtttcaatttttgtccattaactttgaatacattaccattattaggattttcaatttcaatggctccatgtggaaaaacagtgcgaacaatgtatggacctacccacctagagcgtaattttcccggaaagagatgcaaacgagaattgtataaaaggactttttgaccggaagaaaaatcttttctcaaaatgtttttgtcatggtaaaatttcattcggtccttatactttttcgaatagtcatatgcatcatgcctaagctcttctaactcattcaattgaagctttc

SEQ ID NO: 286236 - DNA, 538 bp, Cannabis indica
aattatggtatctacgatacccacatatttcaatacaatctccgtaattaataaattacgctttattattcatttactcatattttcctaatcaactcgtaattagtttaagtaggattataatcctactctaatacccacttaatcacatatttaataaaatatgtctgtttaaaatatcaataaatttttcgggatattacaaatatggtgatgtcttggctagtaaattcggtctcatctgaaatagctcaaagtataatgtacttttatcttactgtcgatatttggcaagaccttgctgagtgatttaacgagggcgatggccctcggatcttccaactccaaactcaactcacaagattacaacaaggtgacagatccgtcacttcttacttcactaaactaaaatccctatgggatgagttgaaagaattccaaccaaatactacttgcacatgtggtgcaatgaaaatttttcttgactactacaatcaaaaccaagtccttgacttgtttgaatgagtcctatgcatct

SEQ ID NO: 286237 - DNA, 558 bp, Cannabis indica
aagagaacaatataaaaatagtatagagtgtaatttcctctttgttcaacattgctaacccgacccattacgatgtgcacagagtcatctcattcaaatacatccaattctaatcaatttaataaaattggataatcaattataattagatcgaatgtaaattttaaaaaggcataaattgaggaataactctttttttcatccattaatcaaaaatatcctcatattgtatttcattaaaatttacccccttgccctctacttaaatgtagcacatgatttatattaatctaaagggtataatgaggacattattaataaaagtaggtatattttaaaaaatatagaaatgaaggtaaaaataaaaataaataaagtaaaatgggtatgcaatgcaatttttacttttaaaaatcctaatcacatcggatcgattattggatgtgacatccccatctaatggataactgaatcgaatcgataaccaaaccaatccaattattatctaattatatttatatatttttaaatacatttataattttatatattgatgta

SEQ ID NO: 286238 - DNA, 544 bp, Cannabis indica
agatcctggtaaattaattccaacacaaaggcactacacctagctcgtggtacacctgaagattcatactcgaaattacctagttacttgcacatgctaaagttgagaaatccaggtaccatcacgaatttcgtggtagaggatggtcgcttcaagtattgtttcttctctctgggtccttgtatccgtgggtttaggttttgccgacctgttgtatgcattgatgggtctttcttgaagactaggtatggtggacaaatattgtgtgcagtgacactggatgcagggagctatatctttccaatagctttcactatagttgacagtgaaaaccacaattcttggacctattttatgagaaaattgaaagaaacgattggtgatgtttagaacttagcctttgtgttggataggcatcaaagcattgttcatgctttggagatcgtgttccctgatacacaccacagtgcatgctaccaccacattattatgaacgtcaaccacaagttcaagactacgtcttcacgaatcacatttacacgtg

SEQ ID NO: 286239 - DNA, 610 bp, Cannabis indica
ctagctgaaaactaatccaggcccaacttacattaaatttattctgggcctaaggaacaccagaaacaaaatgaaatctacaataatacagaaaattttagatatttgcccatataaaaaataattacataaagtattattttttacaaaatttttacatttttatgtttaaagaataattttttttttacaattttatgtaaataaaatcttaaattaaaagtatttaaaattctatataactgtatttttgtaatttttttgttgtttttgtatttttttttttaaacaatccctagatctagccatatcttttccaaataggcaaatttgggcctatagtatgttagtttactcataaaatgattgaaccaaccaactatgaatattatgtgttatgtctcccttttatattgggattttatatgggaaatttgattttctatacttaaaaaactaaaatgttttattcttaaaccaatacctttaaaactaacaaaaatatgacatttttttcaaaaccccaaaaatacccctcaaactctcactgcatctctctttctctctctatctcggcatccccaggacccccatggtccgacccatcgga

SEQ ID NO: 286240 - DNA, 503 bp, Cannabis indica
cttgatcagaaattctatttcccgcttcaaattgtaacattcgttggtgtcgtagccgtagtctccgtggaatcgacaaaatttcgtcatgtcccttttgttggtatctttcttcatgggcccgggctttttgtacggaattaacgactgagtttccatatacacactctgtatatctttttttaatacagtcaatgcagtgtatttggcatgatcacagggagcctgtccggatttatctgtgaacttccctttcttcccgtttccttgcttgtggttgttgcttgaacgcttgccacttgaattgttggaatagttgggaagttgggcggatgttcgagttgaaggggcctttgttttgcccgaattttgctcaccttctgctcgttgaatggcttcttcgagcttgatgaagccttcggctcagttgaggaaatcactcattgagtcaaccagcccgttcttccttatatccttccatagttcaccaaggacttcaatgc

SEQ ID NO: 286241 - DNA, 401 bp, Cannabis indica
tgaagatgggtcaagatcaactgtgatgtcagagtcgggttggaatccatgtgtgtggtggcaattgccagagatcatacggaatcaattttgtgggtggcgactaacaagcttcaattcactgactctcttatcggggaagcagcgacttgtttgttagctttggagacggcgaccacaatgcatcgcccttttgttatggtggagagtgattctaagatggtgatcaagaatctaaagggtatcgaatcatattggcagcttgagaactatgcaaaacaaatgcaagcatctctctacttttttcacttgctgtaatttttcttatatttctagaaactgtaattttacggcccataatgtagtcaagtgggcgtttgccaacaatgtttatggtatgg

SEQ ID NO: 286242 - DNA, 796 bp, Cannabis indica
tgttgtgctctatcttcctcccttaccaagactgcactaactgcatgttctgttactgctaggtataagcttaacccttcaccatctaggggttttgaaagaaccggaggctgggataattgttgctttaaagctcgaaaggcattttcgcattcctcagtccattcaaattttttgttaccccttaggatgttgaagaaagggacacatttgtcggttgatttggagacgaatctactcaaggcggcgattcggcctgttaagctttggacgtctttaactttagttggggacttcatgtcgatcaatgcctttatcttttctggattagcctcgatgcccctagagttcactatgaatccaaggaactttcccgagcttactccgaaagaacacttaagaggattgagcttcattcggtattgtcttaggatctcaaagcattcttttaaatcttcgatgtgcccttgggctttcttagacttgaccagcatgtcatcaacgtagacctccatgtttctgcctatttgctctttaaacatccggttgaccaacctttgataggtggctccagcgtttttcaagccaaacggcatcactttgtagcaatacaagccgacgtccgttcgaaagcttgtatgttcttggtcaggtgggtgcatgcttatctgattataccctgagtacgcatccatgaaagttagaatttcatggccggctgttgcgtctaccaattgatcgattctcggtaaaggaaaacaatcttttgggcatgccttgtttaagtctgtaaagt

SEQ ID NO: 286243 - DNA, 320 bp, Cannabis indica
agttttcgttcgtagtaaccttaccgtcgtcctaccgaacgttaccttaaccctaaacctaactaagtacgacgaagtagttcgtacggtacggttacgttaggtcgactaaactaaacttagttcgactaactaacttaagttaacgtacccttaaccctaacgtcgacgaagaacgctaatacgaaactttttccccatgtcctctatctcttgaggatcagtagggcgctgttccttagatagacacataccatatctagaaggcatagtcgcccctttggtgttggtcatggagaatctctctaaaactttatcaa

SEQ ID NO: 286244 - DNA, 624 bp, Cannabis indica
attccggttctggaaattcctgaaccccatccggaattccggatgcacaaccggaattccggttcctcgcaggcagaactcaaaaattcataactctttcaaaacaaatccaaatcacacaaaaccttccagacctgttctaaacatcccatagaaaatttctaaagcaactacacagtccagaacacacatatatcaaaaatgccattaaagctccaagctttgagttcaaaactcaaacttggttaaatctaactaacatgcatccaaatcagttcaaacctacttaaacatgcatataataacctctgaaaacacaagaaatcgacctcaacaaacacagcaacaaaactcacaatttcactttgaaaaaccatagcttttgaactaaaatttcttaaacttgaacaaggataactagcatgcatttcaacctcactaactcaccaaaatcagcattataaatcacaaaacaacaacaacaacaacaagcagcagcagcaacaccaaaaatagcatgcaatactcaattttctttctaaaattcaagaaatttaaagagagaaaaagtaagggctaacctagcttggattgaacacacacaaatcttgaatccacaaagaa

SEQ ID NO: 286245 - DNA, 1401 bp, Cannabis indica
gcatggtctaactcaagatcattgttacgctgtccggccatgccatgaaacatattcttcagttcgtcgagctgagcctgtatggctaggctgacttgattggcattcttgtctagttggactacgtcagcgtctttctgagcggggatttgtgtatgggctctgggctgcacgttcgttgtagtattttgctcgtctgttccccttcttctttttaggtcgtcccttaggtcatgggttgttcccaacctatcgaacgcagaaaaacctggctgccttagtgattggttcgcttggttggcaggtggaatggctccattattttgcatggatccgtcgagcatgactcctcttgataaattcccggacaaggtctgtccgcctacctcttcgcccacgagtggaactcgtgaccggggattgaatggctgaccgttggttgtctgggaagcattcatcgttgggtcatcctcggtttctcctaggggaatgacgctcgacgtttgctggcctacagtctgataggctcttcgtatcagcacagtggcttgccgagtacgatcttcgatttctacatggtgagcccttaatgcctccatctctttgtccctccactcggcgaacatacgcctctgttcgtcgaacgcgaggtttactgtggcacgtaattcctcctgatcgtgatgcagggtattgttgtgaccctgcatgagtccgagcgcagcgcggaggttttgcaattcggttgcgtctccgatggtcgtttgggcgttgatgcctcgtggaacagtcatgttatgaacgtcctggctgtgtgcggaaccgttgtttccggtctcttgcacaccaggcgcagtttcagtaacaggagttgtcccaccattcaccacgcttcccgtctgtccaggattgacagcgggtggaacccttgaactccctgggtcctgcaacgtcggatccagcgtctgtgagtttgctgggtcagacaggcctctacgagtttgtaccatcgtgtcgagtattgaaaagagcgatctgtgattcttctctcaatgaaagcaccaaaatgttgacttcgcttttagccaacgacaatgagtctttttgataagcgataaacgatatgtcgtaataagaatttgtagtaaagcaataataagacacagaaattttatagaggttcagccccgagcagttcggtaatagcctaatcctcgttagttgtattgacttaagaataaggaagaagtttccttttcttatagctcttacaataatatctctgaatatataattcttagatagccttagcttatagcgtttcggcgtataatttctcggtcttttgcccagtgaacattcctcactatttatagggctggaaacttgaggaggaagagt

SEQ ID NO: 286246 - DNA, 613 bp, Cannabis indica
gttaagaatgaatcatagttgtaatactttagtaagatatttcatatagtccgtgcttcagatactatcatagaatgacaatatccgacgaagtaaaaccatctctagcaagatgacagacccgctctctgtactattcataggatcaattctaacaagtcacacactcatattccggaaatacagaaacaaagaaatttcacgatcgaactaccaaaatagaatgggataaaaatcagagaactaaaagcttcactttgtagtgaaaagtgagttaatagtttttgtgaatctaattcattgaaattccgtctagtaaaatagaagaattataaatctccaaaataatagataggaataccgcaaataaagccattgcgatacccatcaaaggagtagttccccacccacggagctactttacctatattctgaattcaataggtttcgtaataaactaccctcgcacctgttcgtcttgaaccacgatctagaactaccctcaacagtttgtgtagccataaagccctaatttcttattcattgagatctgttgactttgtataccattccggtcgtaaataaatgatcttagcatagatctattgtggtc

SEQ ID NO: 286247 - DNA, 563 bp, Cannabis indica
gggggggatcatgcaaaggagtattatttctccaacttaagagattatttaggtcggtcacggatgggttctggacctccggtgcccgttcccttggatccttcggcctatctttcttctagctggttccgtcccttagacagctatctcggggatgatgcagccagtgttaagattcggaacgttgatagggccgaattagagagtcagggtaggactagcttgattgctttttaagtgtttactgctttcacagatattctaacacttaactcttttctcttgttgcagcagctaatcccatggaggcgatcttggccactcttgctggagcccacagtcctgatgctgcttcccttcctcccacttcttcccagatggtcacaccccgtgaaggcttcttccagtgcccctccaaacactattgacttagtggatgaggaggaggtacttcttgaggaagctaaagaaggtcaagaagagcaatgggatcatcctggggaagttgaagaaagtgaagaagagcaagaggttgctctcgtgcgcaagcgcaaaggcaagat

SEQ ID NO: 286248 - DNA, 546 bp, Cannabis indica
aatagagattagaaacaaaaggaaagagggaaatggttatgggattgctttagtcgaagttgaaaaattttggaagaacaaaaatgagagggaaaaaaatgttgaggaatcgtgggaagttatgcttcaacaatggaggttacttgatctttcaaaaaaaaaaaactgaaaagaaataaaaaatcaaatgaaaacaaaaggaaaaaagagagggaagtgattgagagttgattgatggttgatagggaagccacacgtgtctgtgcatggaattgatgtgcaagtggtatatctgtaataaaagaaagagggaaggtaaaaatgatgatgtaaccgtgtgtgggtttttttgtaataaattgtgtaaattgtattttttggtgtaaaaatttctagtaaaaatttattaaataaatacttaaataataagaaaaattgagatatcaagaaataaaaaaaaaaactacataaagtctatcatgttacttttatttgtgattttctttatataattatataatatataatgaatataaaaatttaaat

SEQ ID NO: 286249 - DNA, 566 bp, Cannabis indica
aatcagtacattcttttggcgaatgtgtctaaatgggtcgaagcttcagctacacctcaaaatgatggaaagacagttctccgcttcttacaaaagaacatttttactcggtttggtactcctcgagcaatagtaagcgatgaagggagccacttctgtaacaagcagtttgaagcactcctctcaagatatggtgttcgacatcgaactgctttaccataccatccccaaagtaatggccaagctgaaatctctaaccgagagattaagatgattctggagaaaacagtgcaaagatcaaggaaagattggtcaaggaagttggatgacgcactgtgggcatacagaacagctttcaaaacaccgattggcatgtccccatatcggttggtgtttggaaaggcttgtcatttaccggtggagttagagcatagagctttttgggccatgaagactcttaacatggaactaaaagctgcaggggagaaaagactgttacagctgaatgagctagatgagtttcggaacgaagcctatgaaaacgcaaagatatacaaggagagaac

SEQ ID NO: 286250 - DNA, 576 bp, Cannabis indica
taattttgctagaatatatttccttttaacttacatattcaaccgaattttttattcgctcttattatcgttattatattttttttaagaaacccacactcagtgatgatttcgacggcattattttgaatctcttattcttccctttggttatataccacatattacttattttctgaagtctagtgaaccaaaggaaactcataaagatttatcatgaattaggcaacataacaccatgaagatttatattattctcttcgattatatatcacatattgacttattttctgaagtctagtgaatcgaagagaattatagaaatcaatgatgaaattggcagcataaaaatattagtctcttcctttccctttgattatatatcacatcaacttattttctgaagtttagtgaatcaaaggagattggaatgactctttgcagtaaacaaaaaacaaaagaaagaagaagagaggtagatccatttatggatctttgcttacccttgtaaagcttgaaaaatcacctggaataatgtagtttttttctcttctctcttctctcagatttcttttc

SEQ ID NO: 286251 - DNA, 655 bp, Cannabis indica
aaatttttgtttctactaggatcataaccaataccattttttgaaaaaccacatgattggtttcccaccatgagatcatagccttccttacctctagtgaaggtatatatgtcattttttaggcttctcacatgggctttcaaatcaataatttctttcttatgtgaagcacatgtagcacattgagatttagctataagttctttttcatttattttcaaaatctcaatttcttttaaaagcatgttggtcttctctctaagggtttggtttttaacaagcaatttaccaaaatcatcaaatagttccttaaatgaattagacaactcatcatatgacatatctaagttatcatcatcattttcgctatcacaatcattttggttagaaatgcttaccccatcatcaagtgccatcatgcacatgtttgccacttcattctttccttcttcttcggagtcctcttcgtcactattgagccaatccgccaacattgcccttcctttgtatttgttcttctttctcattggacaatccatcttcatatgtccgggcttcttgcactcaaagcaaattggtggatcatctttgctttttctttcttttgagtcactccctctttgtggcttcttcccaaagttctttttgaatttca

SEQ ID NO: 286252 - DNA, 590 bp, Cannabis indica
gaaccctcatccggaattccggatgcacaaccggaattccggttcctcgcagacaaaactcaaaaattcataactctttcaaatccaatccaaatcacataagaccttccagacctgttctaaataacccctagaacatttctaaagcaacaaaaccgagcttcacacacagaaactcatttcaccattaaaggtcaaagattgagttctaaaactcaaaacttgactaaacaacatatcatgcattaaaccttgattaaaatcacatattcaagcatttaaaaactgcagaaatcaaaccctaactcatgcaacaactacagccactaaaattccaatttctctttgaaaacctaagcttttacactaaaaactccacaactctaacaacctaaccatcaagcattacaagcagcttaataacatcaattagtcatgcttaaacctctgcaaacaactataaaatcacagcaacaataacaacttaaactatgcatgcaaacatcatcatttcatcaaaattcttcaagaaactaaaagggagagctacaaggatcttaccaacaacttgaggtcaaaatctatgctaa

SEQ ID NO: 286253 - DNA, 642 bp, Cannabis indica
ttttctgagtatcttcgagaatgccgcatacgccatcaattcacatgtgcaaatacgccacaacagaatggagtagccgagaggaagaatcgccatcttgcagaaacatgtcgaagcatgctacatgcaaagaatgttccagggagattttgggctgaaggtatgaagacagccgctcatgtaatcaataggcttccccaggctaagttagggttcgtttcaccctttgaaaaactgtggggttgtaaacctgcagtaagtcactttcgagtatttggttgtgtgtgctacgtattcgtgccaagccacctacgtagcaaatttgacaagaaggcgatacgatgtatctttgtgggatacgacagccaacggaaagggtggagatgttgcgaccctacaactggaaagtgttatacatcaaggaatgtggtcttcgatgaggcatcatcatggtggtcatcgcaaaaggaagcattaccagattctaaagaaatggaagatgaattgcagaagaaaatgggggagcaaattgttgagttacctacaacacaagatacagatgaagaagaaaacaccgaggatgaggcacctcagaatccatggcaaacaggggtgcatcaaagagaaggacatgatgatagt

SEQ ID NO: 286254 - DNA, 673 bp, Cannabis indica
tcctctcggattgtccatccgtctgaggatgaaatgctgtgctaaactttaactgagttcccatagctcgatgtagactctcccaaaatcttgatgtgaatttcggatctctatccgaaacaatggactttgggacaccatgaagacgaacaatttctctaacatataactcagcatactgatcaatggagaagttcgttcgaacaggcaaaaagtgcgctgactttgtaaacctgtccactatgacccatacagagtcgaactgtcccgtggttctcggcaagcctaccacaaagtccatagcaatgtcttcccatttccactctgggatattcaatggctgcagcaaccctgcaggcctctgatgttcagccttcacttgctgacaggtaagacacttagcaacaaactcagcgatgtcattcttcatgcttggccaccaaaacatggccttgaggtcttgatacatcttcgttgaccccggatgaactgagtaaggagtcgtatgagactcagtcataatctctcttttaataccgtcatccataggcacacaaacacgattcataaatcgtaacattcctgtttcatccactgtaaagtcactagtcttcccagccaaaaccctatctcgggatttcattaactctggatcttgcaattgtgcttcttt

SEQ ID NO: 286255 - DNA, 502 bp, Cannabis indica
aaagctttaaacaacaccactagcatgcattaaaacctatataatccatccatataaaacctaattaagctactggaaacaacaattaaacacagcaacatacagctttacaaactaacatgcaacctaccattttcacctcaaaaacatcaagaacaaaaagaatagttgagaaccacttacaagtaactatggatcataaaatcaacacaaaaagggcttgaatcaccaaggaaaactcctcctccttgctgctcaaagagggccgaaagagagagagtgtttgaaagttttttgtaaattttctctaagtgtaatgttttgtaaaaataaataagtgaataaagccatttacatatactcatttcagccaacaattaatcaaataaacacttattttccatttcacaaaatcacaaaagacaaaaatactaatggggcaaaaagaccattttgcccctccaccataaaaccacataaatcatactaaaaggggtatttt

SEQ ID NO: 286256 - DNA, 604 bp, Cannabis indica
gctcttcctttagcttggaccgatactaactcgccatttccaactttgagcttcaactcctctggatttagataatcccaagtttcaagcagctgcaatgaagaacaaacatggttagtagatccagaatcaacaatccagaaggatttgtcattttctaaaacacatgattcaaaaacaaaagcattaccttcattcgaattgtttagaagtctgggacatcgttcttcttgatgtcccttctcattacaatttgaacattgaagtgtattaccatcaattgcacttgaagaagcagcattgttagaagcttcatacttaattcttttcctcttactcaagtttgcgaatctggggggtggcccctttgcaggtaagttctgttcataagctcgcaattctgcttctagcttatccatgtcggatgagttaaaattgttgatcatataagatacaacaaatccattatactcaggaggaagactattaagtatgaaatgaacccattgttctctagataattcaattccaagcaagtttgctttctggaatttcagattcatcattaacaagtgtgagttaatcacataatcttgattacttt

SEQ ID NO: 286257 - DNA, 536 bp, Cannabis indica
tttgcagatgatgtgatgttattctgtaatggggatttcaaaagcatcctctatatgctccagggtttaaaattgttttctgtatcatctggtttgcaccctaaccctcagaagtcagcgatatattgcagtaacatggcccaggaggaggtaaatagaatcttattagcctcaggctttaagcataaaagcatgccatttacttatttaggggttcccatttgctctaaaagaatctcagggaaagaatgcactgccttggctgaaaagatgactgccagaattagaacctggagttccaggaatctgtcctttgcagcccgagttgtactaatcaattcagttttgatggctattcatgcgtactggtgtcaaatattcatattgcctaagaaagtgattaggcaattggaagctatttgtagggcttttctatggaaaggccaagcttgtgttacaggtccgggactgattgcttgggactctctttgtcaatccaaagctgaaggtggtcttggttttaggagaatccatga

SEQ ID NO: 286258 - DNA, 568 bp, Cannabis indica
ccagtcccggtcaacttccggttttgctacaaatttcgggtcatagggtatgggttcgggtccacttttgtgtttgggactgaattaaggttcgggtgtgggttcgggtccttgtcagggttcggttccagggctgggtccaaaatccagacaccgactacatgttttgtccaagccctggctccagatcaagatcccaatctcggttcccattctggttccattttggtgccgggtcacaagctgggtcctacgttcaagttcgggtctgggtcgggtactaggtcccggtcctggctttgtttcccaggtccctatcctgattcagggtctaggtcctggttattgtgtgggtttgggtcacggtcttggttcgagttcgagtcctaatctcgattctggtttaggtctctgtctgggttttgatctgggttcgggttttggtttatgtccttgtcctggtcctagtcctagttcggttgtagttccatttgcgattttgagttcgagtttgggtttgggttcaggtccagatttctgtctaggtccagatcaggctccgggtgtg

SEQ ID NO: 286259 - DNA, 997 bp, Cannabis indica
ttttcttcaaacatggtcgttctttaatctgttgggtactcctagtcggcatatttgcttgtttttcgtttgatactccgtccaacactcatcttgcgtgttgtcttttgtagttgaagccaggtgagtcttgggagcccgagcatcaaatcgaccaggagctgcttcaacttctgcacgaagtccaccctcgtcttcgtgctaactctccttctagagaaggaaattgttctgattccgtacccagccataggatgatggcttgtacgaagaaaactacgtgtctggctgacgcttctcaccctcaagtagctgggcttgccactctgcccaacgccgaacaggatttggcagtcccaaaggaggaggaccatgagggggacgctgaggtccaagaggttgaggagctggacgaggcgcgtccgggcagtcctcccgcttctgagggagaggaagagattgaaccccctaactttggggagtataatgaggctgggcaaccagtcgatgctgacggggatgtcctggttgagggcgttgactacgtcagtgaggagcttgctgaggcagttcctcacaggaggcagggtgccgtgggcgccaggtgggtgagtcctccgtccacgatttcggaggcacgcctccgtactctcgaccaggatgaatacctgggcgagctggactgctacattcccgcccacgacaatcatgccagaaaccctgataaggggatgtgcgcctagtcgggggctcacggccagcaaggggcgctgatgcccttgcataagtacttccgagatgtggcggacttcttcggcctctacccggcccagattactcccaagggcattaagtatttgtctgctctcttcgtcctctacgcttcctagggatgggatgctccttctccccacgaggtcgcttggttcttcgacctgaagtctacccccaagcaaggcagctcgggctatttttacttctctcaaccaggcttcaa

SEQ ID NO: 286260 - DNA, 717 bp, Cannabis indica
gtgggtttgggtctcggtccaagttggggctacgaatgagggtcaaagattgggtctgggtcaggatctcagtcaagatataggtccagcatttcgatccgagtccaggtaagtatctggatccctatctacgttcaagtctgtgcttcggatcgggtcccagattgaggtccaggtccgggtcttaattccggtctgggtacacgattgggtccgggcctgagttccagtctcagtttgggtctgaggctagtctgtgttcggttctaggtttgggtccgggtcctggtcacggtcttagtcttgttctagggtcctggttcggcgatacttctttatgttctaattttgggtcccaggtctaggtctgggttcgggttggttcttcgtctgggttctggtcctagtctgagtcccagatctagacatcgactactggtctgttccagctcccgttacccgaatcctgagtcaagatctagatcactgtcacgggtctcggtctggttctggttgaggtccgaggtcccattttagagtttgggttcgggatcgagactggggtgcggttctaggtcccgaccctagttctgtgaccctagtctggttccttctttgggtctgagttaaggttcgggttcgggtcctgagtccatgtttcggttgggatacaggtccagctcccaatttgggtctaggtttgattaggagtccggg

SEQ ID NO: 286261 - DNA, 604 bp, Cannabis indica
agccccattgcttttcttgaccttctcccgggagcacctcctcgtcatccactaagtcaatagtgtctggaggagcactggaagaaatctttaagggggggccatctgggaagaagtaaagggaggaggagcctcaggagtgtcaaccccggcaagttcggccaaaatggcgtccatggaagcaccttctacaacaaaagaaagaaagcaagtgttagaacatccgtgggaaaccaccaacactcagatatgacaagcaagctagtcctaccctgactctctaatttggtcctagcaaagtcccgaattttgatgctggcagcatcatctccgagatagctgtccggaggaccagaacccatccgggaccgacctaggaaatctcctaagttggaaaaataaaactccttcaaatggtctccccactgggtcgagggcatcctaaacctataaagacgctcatcgaaccctacaggcctaagactggcatactcgccaacagaagggcataatgaactactaacagagacttaccaccggagccggaagtgctggcaccaggagccccagtgtccggctcctgagccgaaggctgtggcctggg

SEQ ID NO: 286262 - DNA, 567 bp, Cannabis indica
gatttgtcgtaagtaactcccattgatgtaaaagcaaatttattgttgtaagttcgaatgtatgttcgaaaatgtgtagattcttcgctactggaagtaaacaattcataaagttcattcggcacatcgtttgttgcgagataaatttttccatcggcacaacaaaagcctgttgtttcatgaatgaaacgctttgctttgcaatgtttgcatcgagggacggatggtagagaaaatgcttcagatggcacctcttttagcaattgacgaaatcgaggtgaggaatgaagatggagaccttttttattgtaaaaaaataattaggtatcaaattccaactcacataacatattgattttaattataaattgaaagtgtcccttaccgctacgaggtcttgttactcttttattgtaggttggtcccccagcaaattcatttgggttctgattatatatattaatatttatcaaaaacaacatccaaaataatcatatggagtttcatcacgtgaatgaagtagctgagttttgaaaaaaaaaatatgggacaaatgcaaacctgatt

SEQ ID NO: 286263 - DNA, 515 bp, Cannabis indica
gacgcttggaaaagctccatcaaaatactctgagggttggaatatggtgccagtaaggggaggctcaagtgtttcatgagagtaggccacatctttctgagaggacaaaattatatagattaaattaggaaacacaagcttatgagtacgctttttacccctccgaaatgaaacaatctggtccaagattaaagaagccagatcaatggatgccctcgaggtgatacgaaatagaaaggatgccaaatcttgagacaccacggttttgttggaattgggaagccaattgctaagtgcaaaccacatgagagatgcatgagcataagtgagatgtgtaattcaaagactctgcccaaatttccattcaacccgtgcaccagtgagttcagtgagcatcaaatggcaatccatagacatgatagcatgggacacaccttcgggtaattacaaagccactgcaatgtccttgacagtaaaagaaaaccaatgcccccgaacgtatactttaccaaaaa

SEQ ID NO: 286264 - DNA, 571 bp, Cannabis indica
aatgaaattagacaaaaatctttaaatccaacaatctcaatagtggcatttttaacgaccttaaaagttcaggggcataatttggtacatttcaggggcaaaaattctaattagtgttattaaaattatcttgtaaaattttaagaaattataaaattaagagtaatttgcatcgtaaatacctaagtttatctcttagttgcagataaatacctaatttatttttttggcggtaaaaataccttctgttagggtcttggaacttccgttggtacctgaacgttaagtgtcagatcagtacctacatggcatgttgtgattggtccagctagatttatttttattttttattttaaataatcatttaaaaatttaaaaattaattttaaattataagaaataaaaaaaaaaaaaacatttttttttaccttttattctctctctatctttccgttttcttgcttcttcaccttcaacctatcgcctcctccttcttctagcccgatgaaccttttccgaccatctatggcctatggtgactcgaagcccccaaagccttgaaatcgaaacc

SEQ ID NO: 286265 - DNA, 789 bp, Cannabis indica
tttataaagcaaaggattatgcccccccagaaaaggcatacattgcttcatatgctcccggagagcatatagcatcgaagcatctccatgtggtgtcaggcttcctctgaatagtcatctcgcatttaatggcgcatgggaggaggcgtattggaactgccacacgcaataaagtctgacgacacaaccctcgatctgtacctacaggctatgaccaataaagtctagtgacggctactctatgaagaatcacatcagtcaaaagggattaaggactgccctcataaaatccctacggcacctagggatttgaccatgcattacccatgatatattcattgggaatatacaactttactaataattacagaagtgcatgtaccttaattctggggatcaccccaaaaaaatactacaaataccccccaaagctcattaaagaggggtcgagaattctgggttgcacaagtgctagaagagtaaaaactcaccaagaatattctctctattaaatactatcataaatacacagactcgtggactaaggctcattaatgccccaaccacgtaaaaatctctctcctaatttcttacaactccttaaactattattattttattggttgccgaaaacctcggtcaacatttttgtgctttcattgagagctgaagaaagcgtctataagcaaacacacaatacattacaacaatggtggagactcgaagcacacgtcaacctcgccctcttcaggatgctcaagacccgaatgaggaggacgtggcctcaag

SEQ ID NO: 286266 - DNA, 620 bp, Cannabis indica
gtactcctcgagcaatagtaagcgatgaagggagtcacttctgcaataaacagtttgaagcactcctttcaagatatggtgtccgacatcgaactgctttaccatatcatccccaaagtaatggccaagctaaaatttctaatcgggagatcaagatgattatagagaaaatagtgcaaagatcaaggaaagattggtcaagaaaattagatgatgcaatgtgggcatacagaactgctttcaaaacaccaattcgcatgtctccatatcgattagtgtttggaaaggcttgtcatctgccggtggaataagagcataaagctttctgggccatgaagactcttaacatggaactaaaagccgcaggggagaaaagactgctacagttgaatgagctagaggagtttcgaaatgaagcctatgagaacgcaaaaatctacaaggagagaactaagaagtggcatgaccaaggtctagtaaggaaggagtttcaacctgggcagcaagtgttactattcaattcaaggttgaagctgtttcctggaaagttgaagtcaaggtggtcaggaccattcacagtagtcaaggtgtttcctatggagcggtggagttaaaaggtg

SEQ ID NO: 286267 - DNA, 507 bp, Cannabis indica
tttttaaaatcatttctatataatttttcacttttttattttttaatcaagaatctaaattgtaaaaacaaaaaaaattacttttaaaatttttttaaacaatgttttttaatcaatattttagactgcgaccccaacttataccttagaaacggaaccccggatctggtcccagacttggacccaccctgatcccgacctcggagccgctttggactcgacttaaataaaatcaacaaataaaaatgaaaataaaatttacagaagacatttttattttttgtttttaaaattgaaaaacaaaagtagttatagagcacatttcataaaaattttacttttattttaaaatttttaccccacttaacttttcagttttcatctccggcatcatttcatatagttaatcaaacctcgattaatttacaatctatgaaaacaaaaaacaagggaaattttatttacaccctaaaattttctaaaagcactccattttaataattttaa

SEQ ID NO: 286268 - DNA, 694 bp, Cannabis indica
aagtacaaagcgcgagtacccctgtacccccctgtaccgcaaaaactaaaaaagtaaaattaaaaagcataacagtttaaacatagaggaaagtcaagcatctggaacaacaggagcagtctcatccgcgactttgctgacgacctcgttctcggcttcctcagcatccgcaccctcgacctcttcaggaagattccctccaccaccttgagtttgagtgggcgacatagcacgaaaagcctcggccatctcagcggcttctgctccgagaatcgagaagtcgaagtctgggactttggaaagagtggtgtaaatataatcagaaactgcctgatcatattgtttcttcccattctctttctcgacctccaagtcgcgagtcatctcctcgatcttcgcccgagagttcttggcctcgagctcagcctgctccttagccttgccaatttcttcaagctctttgtcctttctagccgcctcttgcttcagcctctttatgttctcctgaagctgggcagtgtgcctcttcagcgagtcagcttccttagagccagcagcaacagctttcaggaacaaggtcattgactgcgaagccaactccacagaacgcggaacaagctcctcagaagggatcttctccgccttggatatgaactcctcgcctacgaacttctcctgcatagccaggaagtcg

SEQ ID NO: 286269 - DNA, 636 bp, Cannabis indica
ggttacaacatagcaaagaagggaaaaagatcaacaacatcatctagctcttcgagccaaagtccaactcaatctcaggcagggtctactatttctcaagacgttggtattatggttgagatgtttcatagattgcgtgaacgctttccgccgggacaggacacttctgatctgtatgacccgcgatttgacagattcctccagaaaaattaaccaacccaacctcagggtagtgcaacatgtccaaggccgcaacaacaacctttacagcagaatcagcaatctcctaatgtgcagggaagggcctcccaatctcctcttattccaaacatgtttggacgctcctcccagtctcctccatttttctactctgatttttttggaggatcacagtcccaacagccgatgtttggccaatttgggagtttatctcagcagccgatgtttttcgggggtccaatgcagcaaacttctctgggtcaatttttcggttcccaaaatccatatttttttcctggtcagtttcagcaacaatccccgaatttcttgccacaacaatctccaatgttcgcaacaacaacaatctccgaattaccacaacaacgacagactcgacaatttgtggagattttatct

SEQ ID NO: 286270 - DNA, 464 bp, Cannabis indica
agctcgttgctaatcaacgtaggttatggaaaatcgtgatttattaaaaatttttgcttttttaataaacttataaaatatttcatacaaaaatactcgggatcccatttacaaacactttccaaaaattcactgtctaatacaaagtacttgtcgcctagcgactaattacaaaaaacactgatgtctcgagtatcgtacgctccaggcctaaccgccccgacatgtacaatcttcaccagctcgctctcacggttccgcagccttggccttgcccatacctacacataaacatagcactgtgagtcgacaaactcagtctgaaaagcataaatcataatcatacataaatctcgggttatggtcacgggtatgcttgtcgtgtcccacacgatactgagtcccgaacgttcataagacggtactattgacaagtaacaacctatactcggttcactggtcat

SEQ ID NO: 286271 - DNA, 557 bp, Cannabis indica
taaattttaaagaaattagaaaaaaaaaaatagaaaactctctctcttttcctcttgcatttcggctgagacttggggttcaaagctgggatttttggtggtgattcaagccctaatttgctactctagagatctcttgttgtggtatgtgttccctagttccttctctttaaatttcttgagaaaaatggaaaaaaatgagatgcatgcatgatttctagttgagtttgctgctgtgtttttatggttaaattgtgtgattcaaagtatgttatgtgatgttaattgagtggtttgaagcatgctagatagggtgttcaaagctttgttgtttttatgtaaaatatgtgattttttggatgaaatgctatgatatgtttctgtgttattgctggatgtttctgttagtttgcagaggttatattatgctagtttaaggggttttaagctagtttgattgcttgtttaggtggtttgctcaagcttgagtttggaactcaaagcttgagctccaatggcaaattttgtatttgtggtttctgggtaggtttgttgcc

SEQ ID NO: 286272 - DNA, 765 bp, Cannabis indica
ctactattgtcacaaaaagggacatgttaggcggaattgtgaagagttgactaagcatcttgaagcaatgaggaatcaagaatgcaaagacacatcagattccacaaatgttgctggtgaaggctttgaaagtgactctgatgttctctctgtcatagctgatgaaaacttttctgactcttggattttggattctggttgttcgttccacatgtgcccgtataaggagtgctttgacacttataaggcatatgatggatgtactgttttgatgggtaatgattctagctctaaagttgttggaataggaactgttaaggtgaagatgtttgatggtgttgtgagaacactgactgatgtgagacatgttccaacattaaggaggagcttaatctctttgggagctttggatactcgaggttgtgtctattccgcaaaagatggtgaaataactatcaagaaaggtggcttggtagttgtgaagggtaagaaagagcgaaatttgtataaattagtcggaaagactattttaggtggagctgtgaaggtggagtcaagtcacaaaaggaatttagttagtgcgaaggaatgtgacaaggtgaagaagactccaatttcagttaaaagttgtttgaagaaagaagacatcagtgaaagattgaagaatgtgaagacaagtgctcaagtgaagttcaatgagagtatgaattcggtgcatatatactcttattgatggtttgagttgtgagtttagagaatttgagt

SEQ ID NO: 286273 - DNA, 567 bp, Cannabis indica
tctctctctctctctcggctggagtggtgtgctagggctgagattcttttgattttttttcaagctcttttcattcaatcttagtgttcttcaagtgcttggtaagacctttgtatcttgttcttttaatttcttgaattttgatgaaaagaaatggtttgcatgcttagtttgggttggtgttgctgctgtgtttttgatgttgtttctgaagtttaaagcatgattatttgagtagattatagctagtttgatgcatgttagtagctttgtttcaagcttggaagtttttactcaaaaatatagttttcaaagaaagatgatgaagtttgttgctgtagttgttgctgctgtttaattttgtgttctggagttttattatgttgaaataggttgagttatgcatgatttagtcgatgtttggagggattagtcaagttttgagttttgaactcaatcttgaacctccaatggtgaattgagtttctgtgattgaagcttggttcttttgctttggatttgttcttaaaggtaattagaacaggtctgcaaggtttgatatgcttt

SEQ ID NO: 286274 - DNA, 468 bp, Cannabis indica
ctgtggtaagtatttcatagtttacttttttcctcattatttttcttaaggattttactcactcttgcatccttttccagcttgctgccgaggccggccgcctttccaagaacataatcaaccatggcttcgtcttgtccgaatttgggggcatggacgaagtcatgaagattcttcaggatctgactgctgaaaggcggacgtaccaggaggatgctgagcgacgagaggcccttgccaaggccaagttcgaggaagaggccaagcggagggaagcacaagcggaggcgatgatccgggatgaggcccttcggagggataggctggaggccaagcactaggaggagctgagggcggagggtgaggctgctgccaaggccaaacgtgagctccgggaggctagggaggccttagatgaaatggctgccaaggtgaagtccctaaaggaagttcaccaggcggacttgg

SEQ ID NO: 286275 - DNA, 479 bp, Cannabis indica
gcttttgttgttttgtcgctaggcaactagtactttgtaaatgagtagtaaacttttgtaactgtattttgtaaacgggatcccaaaaatttataaaagttatatgttatgctttaattaaataagaaattttttaattattcacgttttccaataacctcgttgattagcaacgagctgcacagtacgttaaaaattacattaacatgcctatgctagttagggtgttacatagacagaaaatttcaaaatcctctgcagctacaatatgaagaagctcaaacccagacaagatccaatctcttttgaacatgaagtcacccacaacaatcaaggaagtacaaagccaaacaggatgcactgctgcacttactagatttgtgctgaagtctatagacaaattcgtacccatcttttgttggaaattattttatatgagaaaccttatatgggtgcaacgaaatataattgactccttc

SEQ ID NO: 286276 - DNA, 846 bp, Cannabis indica
tgagttcttatgtaggattactgttgtatctaattcctgaatatttaaaaaagataatttcaagtttattgtatagatgattgggttgaacagtgaaaataccagccgggaatttcttcggttcctattttattaaattgtattgaattcatttcaaggaatatttttttatgttttttggtgctttactttacatacatatgagtattgtttcgacatgaaggttggtttttaattgacttgatcaactagggagcagctggtggagcagaagcgagaccatttgttacgtaccataattcgctaggaagagacctttatttgaggatagcaacagagctccacttgaagaggatgctggtgaggatttaaaccatactaatatgcataataccctttaaccgtaatctggtgtcataattttctcgtaaatctttgtcgatgacaggttggagggtttgaaagagtttacgagattggtcgaatatttagaaatgaaggaatttcaaatcgtcataatccagaatttaccaccattgaggtaaactcgttcttaatttttttttttcgtttatttgtatatgctaaatagatgtttactaaagactctgatctgaattgtctattagtttgtatcttagtatgtacgaagcatattctagactatgaaagtatgatcaacatggccgaacgaaattagttctagatgtgcacttgcagttcgaaggaaggcttactagtgtagttaccaggtaagttatgtggtcgtaaacgtttacttacatctgagattctttctgttaattaacatatctatatgcagggagaggagatatgtctcgaacg

SEQ ID NO: 286277 - DNA, 514 bp, Cannabis indica
ttccattggatctgagcccccttcaaaatttggtgggtgttgcttgcggaacctttcatatattggttcccatcgaccctccggcacaggcatgtattgcaccggcaaaaattgatgttgtccttgattgggttgttcctgacggttgtgagcctcttcatctcgcttcctaatttcttccctgagacgagcaacttcttgcgccaaatcttcttgttgtggtggcaccactacaggggcgttttggtgttcttgaccaactaccccagcagggacttcgtggttgcccccaccttgacctggttgttgtccatttacaggggcattttgattctcctggatcaccgcctcggcagggacatgctggtttcccctgcctcgaccgcgacctcgaccgtgagcacctcctcgcccccgacctctagctcggtctcttacagccgctctttcattcaaccgggttgatcttctgggttcaccgttttccatcaaatcccttaacttgttcttcaaa

SEQ ID NO: 286278 - DNA, 351 bp, Cannabis indica
actaccatgtccttaatctatatgtcacgagaagatccattggtcgactttaacgaatggattgaagaacaaaaataatacaattaaactagaacctagccatctcaggattgagatcatttgatctaagatcaacaaggtgatattttattgaatagatattatggtaagtttattatatctaatcaaagttcaacatcggtctactccatacatccaacgcaagattactttaaccaatgcactggaaagaacatagcacttatctaaggtctaagtaaactacattgtagattatcctatcagttaaaccctgtgtactgataaatcataggaatgcatttaatcaca

SEQ ID NO: 286279 - DNA, 620 bp, Cannabis indica
acccagaactttctttcacccacttcatcccagtgaatgggcgatctacactttctcccatataaaagctcatacggggccatcccgcttgtttcctgatagctgttgttataagataattcaatcaagggaaggtactttacccatgatccttcaaagttaagcacacatgcccgtagcatgtcttctagaatctgtatcgtcctctctgattgcccatccgtctaaggatgaaaagctgtgctgaactttaactgagtacccatagctcgatgtagactctcccagaatcttgatgtaaacttcggatctctatccgacacaatggactttgggacaccatgaagacatacaattctctaacatacaactcagcatattgatcgatggagaaattcgtccgaacaggtaaaaagtgagcagactttgtgaacctgtccactatgacccatacagagtcaaattgtcctgtggttctaagcacacctaccacgaagtccataactatatcttcccatttccactctggtatattcagtggttgcaacaaccctgcaggttgctgatgttcagccttcacttgctgacacgtaaggcactttgtaacatattcagcaatg

SEQ ID NO: 286280 - DNA, 806 bp, Cannabis indica
gtgccgcacgggtgttccgctgcctgaaaaggtgagcccgtgacagttgggatcagagccaagttcatctcagtgggaggtgaacctggttggcctatcctagagaggatgtaggcgggtggacggatcgagatggtccgaatgttggaacaagacgtcgttgagccagttagtcttttaaagaggatcagtaggctgagatggagttaagactgggttgcttttcttcatgggaatactggacatcctagagaggagacgttgatggttgcttcgagtcaagttcagagatgctagaaagacaactaccacgtgagactgtagagaggcgcaacagaatgtttgaaactcgttggcataggacaaggttgaggggatagtccatgctgtatgcttggtacactaggccaagtttgcctgagtgacattgtaagccgcaggaggcgcttttgttgaaaaggaagcttgctggcaggagtgtggaagtagtgcagggaccgtcaaatccttgttagtcacgacagaggtcgagagttgataactgagatgggtctaattgggatagacatggaatgcttcagttgctacatgtgtgtgtcaagagggacgcacatggagaccaaggcaggcagaggccgcaatcgtcagaggatggttgtacttggaggtgttcgcatgcgagttttatttgatccatatggaagcgccgaggcagttgagtggaatgtgttggcttgttaaatcaccagagggcgtaagtcacacaaagacatcgatagagacgcggagttgtggaataaaggcat

SEQ ID NO: 286281 - DNA, 443 bp, Cannabis indica
atctcataagccatttcatggctttccaatgctcctttccaggactagacatgaacctgcttagcacactgattgcataagcaaggtcaggtctagtactaaccatcaagtacattatggaccccactgcattagagtagggaacattcgccatctcttcttgctctaacttggtcttagggcacatagatttagacataaggtattggttggtaatcggctgtgaaacagcctttgaatctttcatagaaaacttttctatgatcttgttgatatagtcttcctgatgtagcatgagtttccctttgcctctatccctttgaatgttgatccccaaaatcttagtagccacacctatgtcctcatttctaaattaccgtaccttgtagcaaataccttgtaccttcgttgtacatttgtacctctccttctaattattagtc

SEQ ID NO: 286282 - DNA, 147 bp, Cannabis indica
gcatcttttgctcggatccctccgggagctatctttgtacaaaggatgtggtctccggtagtgcgtattttgcctagtagcaaagtacacacgctcttgggagtccgtcagctccgtgtactgggtgtactggggagtgtaccccct

SEQ ID NO: 286283 - DNA, 753 bp, Cannabis indica
aaatttaatacaaaatatagcatcgtacaaatttagcccacaataaatttaaggggctttttatttttacacttcaaaatagtttttttttttttgtatttttacgaaattctacataaaaacctttattacaactagcgatgcaacctaaatcgcaacaaaaaatcgtatagcaacctacatagaaaccaccggagaaaccactttaaaaactcaaaccgtaaatttgaaaaaaaaaattataaaaacaatatataagataatttcccttaatttaatacttacattttttatgtataaatatttctattaaatgtttttaaatatttaatttattggtagggatcaataatattttactttttagacatttgtgttttaaattattatatattggagtacaattattattaatatttattttttttctatactaattttacaccatatttacatcttgcatcaaaaatagtgttttgagtatctcacacctaagtgaaactccaatgcacttgctattgagaagtagctgtcaaaaaaatgaaattaaatgtcaaaaaaaatagaaatttttacatgaaaaatcctttttacacactttattacaaaattaccctcacacgcctattactcaatttctacttacaaagttattttattacacatttaccacttactcatcataccatgcatcaacgtgtgctctccccatgcatcatcaatcaaatcatactctcttccctctcttttttc

SEQ ID NO: 286284 - DNA, 644 bp, Cannabis indica
agacttttatggtcggtatagatttcgcacctttctgcataaaggtaatgccgccagattttcaatgcaaagaccaccgcggccaactctagatcatgagtcgggtatcgctgttcataatcctttaactgactggaagcataagcgataactcgatcagcttgcattagcacacaccccagaccctgtctggatgcatcacaatagactacaaatttctctttgtctgaaggcaaagctagcactggagtggtaatcaatctctgtttcagctcctgaaaactagcttcgcacttatctgaccagacaaaccgctgattcttctttgtaagttcggttaagggtgttaaaatcttagaaaacccttccacgaacctacgattatacccggctaaacccaagaagcttctaatttcagtcactgtcttcagtctcggccgatccctaacgaattctattttcgcgggatccaccttgatcccatctgtgctaacaatgtgccctaagaaggacaccttagatagccaaaattcacatttcttgaatttggcgtaaagcttgtgttcccgaagccgctgcaaaaccatttgaagatgtaactcatgctcctcttctgactgagagtacacaaggatgtcgtcgat

SEQ ID NO: 286285 - DNA, 579 bp, Cannabis indica
aacatgtgtatatatatatgtgtgttatgtgtggtaagaggtaattagagtttgtatggtaaaggcaaaggggttagctccacaagtgttctctctagtttttgctcaaggattggtggtgagtctcattaaagacattgaaggataatggctcacatgatgatatgggaggtatgtgttttattgtatttgatgctctaaataaatactagatcttggctttaatgattatgagtaatcgttattttaacaatgcatttctcattaaagacattgaaggataatggctcacatgatgatatgggaggtatgtgttttattgtatttgatgctctaaataaatactagatcttggctttaatgattatgagtaatcgttattttaacaattggtatcagagccaaagttattgattttagggctcaattttttttccataaacccattttctcaaatctgaaatttgtggtgatttttcggattaatgtgtttaaggttgtgtgaatatgagtattatcctctaaatgtgttcatatatgtcttgaaaacaatcttttatattttttttttattgagat

SEQ ID NO: 286286 - DNA, 706 bp, Cannabis indica
cacattgagataattagaataacgtagtaaaaaaatattttggttattacaatctaccctccttaaaggaatttcgtcctcgaaatttacctaccagagaataactcagggtactgattctgcatgtccgtctccaactcccatgtcgcttctctatcagaactatcactccacaggattttgactaagggtatagtcttatttcgtaagacttttattccttttctatcacgcgcacagggcgtgccatataactcatgtcctgctgcaagttcaagttctcgtatttaagcacatgtgtcggatcaggtacatacttccgtaacatggaaatgtggaaaacattatgtgtttctgctaatgttggcggtagggccaaacggtaagctacctgaccaactctgtccagtatctcaaaaggacctataaatcttgggcttaactttcccctttttccgaaacgcataatccccttcataggtgataccttcaagaacactaagtcccctacagaaaactcaacctcccgtcttttcaaatctgcataacttttctgtctactttgggcggtgagcatcctttgtcgtatcttttcaactgcttctgaagcttctctaactgcttctggacctaagtagcgtctttctccaacttcatcccaatgaagcggtgatctacattttcgtccatacaacatctcatatgg

SEQ ID NO: 286287 - DNA, 530 bp, Cannabis indica
cccttaatttctctatcccaaaaataaaaattcactcaaacaatattcccaaacactcaataccacaatacaataataacaaacccaatatcatcaatatttttgcaccacacacatttatatcactcaaaatctaaaaataattaatcaaattcttgaaagaatgaagaaagtgatacttacaaacccgaaaaagctttactccacctccattgttgaatgttcttgaaagcttgaggttgagggtgacaacaatggtgatttttggatttgggtaatttttttggtgtgggttttgatgatatgtgtagattgttgagtgaaattgggtttttgattagattgggtttaaggaatttgagaaaagatgaaaagattgaagattggagatgaaaaattgaatttttgagatgaaaatagggtagggtcggctgagaggatttgaaatttgaatttggtttgtgtagggttgaatgagggggaaagtgtgaatttatagaaattttggtcagcaagtcgcgacttggcct

SEQ ID NO: 286288 - DNA, 758 bp, Cannabis indica
agtagaataggcgcatgtttttaattttcaaattaagcggcattagtaagctcttgttgatcatgacctaatgtgccaactcttggttttgcaggctgttcagactagatggtcgccaggcggaacaccaggagtcagggcaactcggtagggtcaaattagggtcggggagctcagtttcccccgcatgctaggggccgtggtagaggtcccaggggcagggcccgtggtgtgggtgacgataacccgccacaggctgcccaggctactcaagccgatcaggaagcccaaaattgggaaactaggtttggtaaaatgcaagccagaatagaggagcaagatcttgagattcagagattgaggcagcagggggctcctgcagtgccagtgccgtggcactcgcccctgttgctcaggctgagatagtggtagcggcaaacagaatggaacccttgtatgaaaggttccggaagcaagcacctccggtttttctaggaggtgcagacgtcatgaaagccgagcagtggctaacggtgattactaagatactgaatttgatgggtgtcaccgggaatgatagggtggtgtgtgccaccttccagttctaagaagacgctctagtctggtgggacatggtgtctcagattcatgatgtcaccactatgacctgggaaaggttccaggaactcttcaacgcaaaatattacaatgaggccattagaagtgccaagaggaaagagttaacccacatgacccag

SEQ ID NO: 286289 - DNA, 778 bp, Cannabis indica
tccaatggggtgaacccctatttatacaaatacaagagtgagatattaagaaactaagaaaaagggaaactaagaaaagagtaatgttaattacaattaatggtaataattttccatcgttgtaataacaaattaagataaataaatgaactcggtttcaaaaaaactaacaaattaagatataaattgatataatgatattaataaattaaatatgtatttttaaaaataataacattattataactaaaaatgtgtataaaatccgttggcatatgtgacaatttggcaagaatatttgttgggggtttgtaatgaaaacgtttgaagattagagaagaatgcttgttggggaattcatatttatttatttcaccaaaaattaatcatttttttttcaattgcattttgtatgattaaaattttgagtaggtaagtgtattctaacatatttaataaaaactaaaacattaattgtgaggggaacccattttgtaagaaaataaatgaacctaaacgtttaattttcagaaaagttttctttatttgtttatatttttacgaatcaaatgaaaataataagaaaacattaaaataataaaataacacaaaaataatatacaaataataaaaataaaatataaaaaaaaataaaaaaaagactatgtaaataaaattttaacaatcgtaaaaatatttgaaattctgtaatttttgaaatttttttatatgttttttgaaatttatccccccaaaataggaggaaattacactctat

SEQ ID NO: 286290 - DNA, 115 bp, Cannabis indica
gatttgtcagttcactgaatttagactggcatgataatcagcgatatgtattcttacaccatcggaagggatcgatgttgaactttgattagatatgttaaatttaccgtaatat

SEQ ID NO: 286291 - DNA, 614 bp, Cannabis indica
agatttagttcaccattagagccaccatttctttctgacttcatctccaagtccttagattttaaggcagagataacctcatcaagagtgatagaggttcttccatacttaattgcagttttaacttctctgtaagtttctggcaatgagttaagtatgatgatggcttgattctcatcattgagagcctcattctcccctgagtttgcaagctcaatgtgcattctcaagaattcatcaagattttgatctaaggatttggattgattcatcttgaaaccaaaaatcctttccttgagataaatcttgtttgtcaaagatttctgctgaaattgctcttctagctttttccaaatctttgatgaagtctcttctttatctaccaatctgataattgcatctgataggttgaagattagaattccagtagcagtttctaggtattcttcctgttcaatctttgaagttccctctggccattcaataggttcatctagcactcttagtaatttctgttgagctaggagagacctaattttccttctccaaattctgtaatcccctgtaccatcaaatttatcaatatcaacttttatgttactcatattaataaa

SEQ ID NO: 286292 - DNA, 500 bp, Cannabis indica
gtgtgtcatgtttattttagtaattttaaacattgatttatatttatatatattaatatttataattttaatattgtatttatttaaaaaaaaaagcttaattcatactaaaatataaatatttattctttaataaataaaaattcaacttgtttatttataaaactgtttattatttatttaattaattttacgaaattatttattttgagttttagtaaacatattttattattaataatttttaaaacattaatataataaatataaggataagatattaaaaaataatattacaaacattaattagattaatctatttatggtaattaaatatcccaccatagctagctataacaaattatttttgaaatgatatgaaaacttaaaattctaatttatatttactattgtataccttcactatacaaactcaatcatgaataaacatctagatatcgcacttggaaaagactactaaacatagcattttaaaaaaa

SEQ ID NO: 286293 - DNA, 585 bp, Cannabis indica
ttactgtaattattttcttcattcattatagttgtttttcttgattcacatatattagccagtagattttttttatataattttagtgcattctgataattttcgaaaaattagaataaaaacaactcaagtgaatttttgggtactataatgaatataatgtattagaattttaatataaaaaatatgttgtttttacgttgttgtcatgtttgttttacgttgttgtccatgagtttgaaagaaaaattatacaaagaaatgcaaaaataacacaaatataacgaaaaatgtgattcaaaaccataaaacacctaaataaacattttgtaacaaccaaaaatcaaatgtaaaatgacactagtatatagataagaacaactgaaaataactacatagcatctaaaaaattactactaaaatccttaatcaaacattaacaccttttctaatacacaaatgttacaggaaaaaacccctataaatcaaacataatgaaattggccatcataatgttgaaaaaccttacagaaactctaaaacccaaccaaagaaactcaagatatcatacttagaacagaacat

SEQ ID NO: 286294 - DNA, 508 bp, Cannabis indica
gaaacattgttataaaagttttactctttccaactgttccacagcccgataactcataagcttgcatgcttacctctctccactaatgttgacaatatcctttggaatcatcaggtcttttcgaggtttaggaattatggctcagatattcagaaatcaacaaaagacggttttggctcaagatatcataagcacacaaatagaacctacaagcttcttactctttttttttttctgaaatcccatagtgtccccgcatttaccaagattgagaaaagatatatttatttttctcgaacatcactgaaaattttctctttcttgaataaacttttttccaaacacatcttactttttattgtgtttctttttcttttttctttttcagtgacatcgagttacacatttttttctttttctcaatcttgcaagttcttctccctctaactgttttctcaaactaaatattttttcttcccccaaactaattatgtagcttatgatatca

SEQ ID NO: 286295 - DNA, 601 bp, Cannabis indica
agaatagccttgactctcgtctaaacgggacaacgctggattctgatcttgatcgaataaaaggttgctagaatgcttatcattttagatgagctgacaactctattcaatagatggtatctttgactgtcgcttaaacgggacactgatatacgtttgttgaagacctaggaaattatttaggattgtatattttagtattttcgcttgtcattcctacttgctatatgctaattgttgacttcacttttagccaacgacaatgagtctttttgataagcgacaaacgatatgtcgtaatgagaatatatataagaaagcaataataagacacaggaattttatagaagtttagccccgagcagttcggcaatagcctaatcctcgttatttgtattgagttaagaacaaggaagaagtttccttttcttatagctcttacaaaagtatctctgaaaatataattcttagataataatatcgccttagctaaactgcgtatcgacttataattttccgtcccttgcccagtgaacattcctcactatttataaggctgggaaactcgaggaggaagagtttcctctctcgttacaatgcg

SEQ ID NO: 286296 - DNA, 523 bp, Cannabis indica
agtgcccacacacagcaagtggtacctcaatcatagtgtggaagatcgtgaagaatccagattcaacaaagaaggatattcgggctcagatcttgataatactctgcgacagaaaggatacaagggttagagatctgagtggaaggagacatattattccgctgcacccaatgtaaggtttctcatactttatatgtgtttacttataatcgttttagaagttcatatttaggatgttaatcaacatacttgtgagtagatctaagatcctggtaaaataattccaacagttaactccccagaaatggacatgcaatgccacatgagtcccagaacatttctgtaaagcccgcttagttaatttggaaattatcagttaattatgattatttatgaaattatttatagctatttaaataatttattatactattatttatggaattcagaaatgcatggttatgttattcagtacttttcatattttgcatttccggtgtccggtattttggaactcggcgtt

SEQ ID NO: 286297 - DNA, 503 bp, Cannabis indica
cggttgtacggtttcgaggatcattatgaatcgtctcttcatattctgcccatcttccaaccgtcagatttcccaatctttagctttcttgtcactggactttgtgtataaaagggcggctcaagcttgtcatttttcacaaacctctggctttttgatgagatccattttcagaatggatcatctctttcctactagaatgtcccttcccattttacccagatgaatctgggaagggagtcggtgaggtttttatcagaaaatccagccaacccaagaccgaaacctgtgccagaagatctttacgtcaacctctctccggtatcgaggaatttcctgaggctgggaaagagatctcggcttcaggaaatgtgtaaagaccgcttagtttaatttggaaattagcagttaatcatgtttaattatgaaattatttatagttatttaaataattatttatattgttattgtttaattctgagatgcatttttatgtcatgtag

SEQ ID NO: 286298 - DNA, 401 bp, Cannabis indica
atgagcagcgttatccaactcatgacctagaacttgcagcagtggtgttcgccttgaaaatttggcaacattacttatatggtgaaaggtgtgagatctatactgaccacaagagtctcaagtatttcttcactcaaaaggatctgaacatgagacaaaaaaggtggctagagttggtgaaagactatgattgtgaaatcctgtatcaccctggaaaggcaaatgttgtagctgatgccttaagccgaaagggacccgatcagatatccaacatggtcatgatctctcctcagttagcctcagagatgactagggcaaacattgaattggtgactgagagattatttaatctgacacttcaatcagacttgttagaaagaatcaaagtggcccaattagaa

SEQ ID NO: 286299 - DNA, 586 bp, Cannabis indica
tcgatggcgcccttcagtgtttttattattttgtctttttcctcctggtcaaggtttttccctaaccggagtactttggtggagtcgacgtcgcacactgatatttcttcgacgtcctccattggttccacgattctttcggaccctacacgagggtccaactcatcctcttcagccatttctggctcagcggactcccggaccataagtacgggcaggtgggttgcaacattataacattgccttgcttccccctgatttcccctcacagtcccgactccggcctcctgggtagggaactttaggcacagatgtcggattgaagtgactgcgccaaagtctactagggccggtcggccgaggatcgcgttgtaggctgtcggacagtccaccaccacgaaggtgcagtatttaaatgtgctctggggagtgtccgggcacagggtgaccgggagcctcacttttcccattgggataagtgtcgtcccgttaaaccctgtgagctgggatccactaggcgagaggtcacgatctgtcaagcctatcgcggtgaaggcttctttgaagagcaagttcacggaactcc

SEQ ID NO: 286300 - DNA, 475 bp, Cannabis indica
cccctgaatttacccacaaacactgctggttagcactatcgggctcaaacaccaccatcttccgtttgtagtcgatcattgccccatacttggatggaaaatccattcccaggattacatcaaaagtaaagacagttgcaattctattagattggcggttaattctacaactgtcaatccagaaagacaaggatcgaatccaccttcgtggacactataaggtctcccgaaggtagcaaggtaccgaaccccgaagcatatgcatcacaaggtttatgaaaactttcaattactctactcgatacgtaggaatgagtagctcctgagtcaaacaatatagaataagaactgccatttatagataactgacctgtcacactgacggactagcatctacgtcagcctgagtcatggtgaaaagtcatcctgggttctgagtagtattcttcttaggctcctccttcttggcttgagg

SEQ ID NO: 286301 - DNA, 557 bp, Cannabis indica
ctcgtgcccccatgactgtctgaaagagtcctaaacagtcctttatttagtgtcatataaaatgaacaccctgaatctagaatccaatctccacttgaatctgatctagacatcccaagtgcattatatgacactacaagtgcatcaaatgactcatagccatcagcaatatcaacaactccatgccttctggacttgtgatgattttctctcttcagtttagccgtcaaagccaaacaatcatctctaaagtggccctccttcttacagtaataacattacttacctgcagctccattagagcttggccctcttgtggagtttttagaattggatcttgaatggttacctttgtagccatttgagttttgattttccttgtattccctattgagaaattttcccttaacaatgattaatccttccccattagtaggggtgaaaatcggtcggttatggtcggattttacaattttataaccgaccggtcggttacagttcttattttacgaaaactgtaacagaccgtttagaaattataaccgtataaaaccgac

SEQ ID NO: 286302 - DNA, 762 bp, Cannabis indica
tcccaacccaaacctggactcgggacccgaacccgaacctaaactcatacccaaacatgaaatatcgagctaacttttgttgatgggccatcaacttcaagtttgcaatggctcgtctttcttcgatttcatcaagtgattctgccaggagtacgttattggtatcttgattgtacatcaatcttctgtgggaaggtggctcgagttctacaggtagcatagcttcatatccgtacgccatagcgaatggtgtctgtccggttgctgttttctcagttgactgcttcaggaagctcttttggccaatttcctttggcatctttgagttttttcttttagtgtatccttcaagctcttgttgactgcttcaacttgaccattggcttgaggatgcgacactgcaaggaaacttttgatgatacgatggttcgcacaaaagtcagtgaaggattggctgtcgaactgcttgccattatctgaaactattttgtacggcattccgaaccggtagattatgttcttcacaataaagtcttgaactttctttgatgtaatggttgcgagtgttttggcttccatccacttagtagagtaatcaactgctaccactgcatattgcactcctcctttacctatgggtaattgtccgatcaagtcaattccccaaatggcaaaggtccacggactctacatctgagttaactcagtaggtggagctcgaggtatctttgaaaaatccctggcatttgtcacacttcttaa

SEQ ID NO: 286303 - DNA, 539 bp, Cannabis indica
gaagttgaacgaaaatatcaggttttgaatccacacacgcgcgcgcggacgctcggacagctccttgtctgaagggcagctcgcgcccacgtcccacgtcccacggtcaaatgaggctgcttgcagcctctttgctcggccagacaccccattccgcgcgcgcaggggtatgcattgcttgaggcacaacttttgattcaaaaatcgtttttcattgaaaaaaaagccaatttttggtagaattttggtagaatctgaattttcaattaaaaatctaattttcagaataaaattaatttttataaattttttaattaattcaaattagtttctgttattagtaggctttgaattttgaaaatttgatttctcacataggagccttatggttaattttgaaactttagattattttatttatttttattataagatcagatgttattttttattaaattttaaatgatcttactttgatattaaaatattatctttagtttagtttgaatagattttttagggtttcaaaccataaattt

SEQ ID NO: 286304 - DNA, 565 bp, Cannabis indica
caaggacatggaaaagaagagtcgcagaagtttcaaaccctagggtttcctaaagtgttctttctacaacaaagttacattcaaagcgtaagcatgcaaaggaaaagcatacagggaatcagaaacttactcaaagattcgaatgtcccggttcaagcaagccagcaatcgtctgtaggcactttggcaactctgaagccagaaaattttctcttttcgctctgaaagtttacttaacaacgaagggtgatgaaatgaggtaatgtgccagtactccaagtatttataggcaaaagggtaactgtacgtaaaggaaccttagacgcctcggcttcctgcctcaaaagcgaatatgggaaatcaaaagtaatcgagtgcaaccgtcagccgtggagagagaaattcagattttcaaaatattaattgtcagagcattaattagccgaaaaccgaagggacgcccagtcagcttcacatcgagtctcgaacggtcatgctcgacacgtgtccccatacaaaggcagagccagctcggaatagtctacacgcaacctcggaggtcccg

SEQ ID NO: 286305 - DNA, 673 bp, Cannabis indica
aggatttgatgtgatatgtatgatcgggttgcacaacaagaataggctaaacggctcaaacttgggtgactagggaaaaattcattttatagggaaggttagaaaggctcaaacgtccaaggatggcctaaatcatttctaagggacaagtctaactaggatttcgcctcaaggagatgcactaaccaattctagatgctaaaattacatgtgaagtactcgtatgagaaatgcaaagcatggcggaaaaaataaaagtataaactagtgaagagagactaaagagaaacatccataatatccaataattcagcatgaaaaggcaactaataaaattaggcagcaacaataatggaatgagcggaaaaatatcatcatcgagcagaacactaggccacacaaaaactcataaatctctcaatatcaaactaacaatcacataaacgacataactaaaagtttcaaacacaaaggacaacacacaattatcacaatacaaactaaaaaaacgacacacaacagaaaaatataaaatagcttaggtattagaaaactccctctactcggagtcctcgtggggctcctctgtgttcgaagctgatggtccaccccacgggtctagaacgtgctgagggaagtgcaggaacttaggatcaaatcggggcgtcacctc

SEQ ID NO: 286306 - DNA, 576 bp, Cannabis indica
attaaaatttatatttagagttatctaaattagtaattttaattaaataaatatatatatgtttaaaataaatagattaaaataagtatcaaatgaaaatactaattttttaaaataatgagctttagttataaagatattcgatcttcattgttggttctacacagttcttattttagtgattaatcatccctaatggatgaacattcattagaaatttaatgccgtagaatctcgaaagataagtattattgtaagtgttttatttttagtaatgtccaccctaaagtggatgctaggagtaagacttacaaggtatgaaataatggtggaagctgataagatagaatgaccttcactcttgcctaaacggtacaacatcggattctagtcttgatcgaataaaatgttgctagaatggtatccattttagatgagttgactactctattcaatgaatgatatctttgactctcgcctaaatgggacactgtatcagtttgttgtaaaccttggaaattatttaagatgtgtttgttttgtattttcacatgtctttcttacttgctaaatgta

SEQ ID NO: 286307 - DNA, 608 bp, Cannabis indica
ttgttttctccatcattggtcctaagattgaaagaagaattggttatcaaaaatcaatgatattgagaaagaattggtggatgttttgtgataggttgtaacatatgtggaaactgactaattttagcgttggttttcaaccgttattaattgcataaaattttgcatcttttaatgacacaatgtcatgcaggagagtttatggaataaaaattggagccaaatcccctgtgaaattattattatatagaaattttaattacaattaatttgttattattgaaaaaatatagagaaaattacccttgaaaatgaaattttgaaaaaaacatcacaattaacactcttatttttaattgtgaaatatacccttagttttataatatttttgaatagatatatacgtagtgcttattactttattattttatatttttttttttctctctttttgtatatacgctggtttttttttaacatgtatttatctactctctattctttttctatactcatatattttcaagctacaatttttgttccatttaataataacaatttgatttttttaaaaaaaagatgggatacttatcaaatattctctctct

SEQ ID NO: 286308 - DNA, 555 bp, Cannabis indica
taaacttgtttatctgagttgaatgaagttggttgtgatgcatgcttgtggtgtttattcaaagttttggattttagctcaaaaactatgatttttgatagaatgtggaaatagttggtgtgattgttaatggtacttgagtttgttttctgaggttattacatggttttttatggtgaattaaggcaggtttgatgcatgctagttagatttaaccaagcttgagttttgaactcaaagcttggagctttaatggcatttttcatatctgtggtttcttgatggttttgatgctttagaattattctttgggtatttagaacagatctggaaggtttaatatgatttggggttgattggaatgagttatgaatttttgtttgattcctgtgaggaaccggaattccggatgtgtaaccgtaattccggatggggtttaggcattctgagaaccgaaattcttgttgcagaaccgatctatcggttggtggattttaaggaaccctagtttgcttgtttttatgtggtttagggtattgccatactttttatcga

SEQ ID NO: 286309 - DNA, 556 bp, Cannabis indica
atcgcttatgcctcccgtcagttaaaggattatgaacagcgatacccgactcatgatctagagttggccgcggtggtttttgcattgaagatctggcggcattacctttacggagaaaggtgtgaaatctataccgaccataaaagtctcaaatatttctttactcagaaagatttgaatatgagacagaggcgttggttggaattagtgaaagattacgactgtgagattctctatcaccctgggaaggccaatgtagtggccgatgccctgagcaggaagggtcccgggcaggtagctagcatgattcagatctcacctcagttagcagaggacatggttagatccagcattgagtttgtggtaggtcagcttcacaacttgacgctgcaatctgatctgttggaaagaattaaagccgctcagatgactgatccagagttagtgaaaatcagagatgaggttttggctggtcaagccagggatttttcagtgtcagacaacgggatgcttctgtataaagctagggtttgtgttccgagtagtgtggaactca

SEQ ID NO: 286310 - DNA, 634 bp, Cannabis indica
catcaaaacgcttggcgcaccggctgcaggagacaggagaaagaagctcatctctttttgccttctttgaggcttggtctttgaagtctctgagctccttcagctccgcggccagggtggccctggattccaagtttgcctggtgagtttcctctaaggacctcaccttggcagccatttcctccaaggcttccctggcctcccgaagctcccgcctggccttcgcagtggcttcgccctccgtcctcagctcctcctggtgcctggcctccagcctatctctccgcagggcctcctcccggatcattgcctccgcctgcgcttccctcgcttggcctcttcctcattggccttggcaatggcctcccggcgctcagcagcctcctgataaagccgcctctcagcagtaagatcctgaagaatcttcctaacttcatccatgtccccaaaatcggacaggacgaagccatggttgattatgttcttggaaaggcggccggcctcagcagcaagctgggaaaagatacaagtataagtaagaatctccaaaaaaaataataataaggagaaaagtaaactacaaaatacttaccacagtgagggagtggctgagatcctggacttggaagatgga

SEQ ID NO: 286311 - DNA, 966 bp, Cannabis indica
ttagtgactaaaacatattatttttgatacaagtaattgtcattaatttaattaatttaagtacacaaaaaataattacaactagaaatacatttagtcacaataaattataatttttagtaactaataattttagtcataaatcttttagtaataacataaaataattttataattaattacaattttttacttttaattcacaagatttgttaatatgactaaaattaagatttttttattagtaaatcacaaatttcttaatcatatgtaatattttaacaagtaattaaactcaaaggttaggtatattttacgtacaatttaccctatatatataaataaataaaggatattaaagatcaaattgatcacatatatatatataatattatatataaataaagtatattaaagatcaaattgatcatatatatatatatatatatatatatacccaattaccgtgatatttcttcccccccaaaaaaaaggagagagtcttcgtcaatggcgccttttcttttttgctgtctgcctcaccaaaaagaatatatagttctcaaaagaatcgtataataatgcagtactggtttaatggtaaccatgcattttttgactaaattttatttgtgtcactctgtgtggaaagatatatataaaggcctatttgcatttgctacttaatttatagtaatactttctatgtttagtattagaaattgatacacatttctacaatactaaattaagtctagaattttctacacatttgtagaaaaatatactctaaacttttagataattgtagaataatttagaattttctagacatgtaaaaatccaatagaacataggcatttctagaaaactttagtctagaagattctagttatgcatgcttaagaaatatgtagaaatgtatagataaaatccttgaactagaaagatctagaagaaataatt

SEQ ID NO: 286312 - DNA, 827 bp, Cannabis indica
ggcacgctacagtgctttttcaattacagtgcaatcttcgctaatcgaagagttttcttgaaaaacgtgtcaaattaaaacttttatattaattaataaactttataatatattaaaatatttacaagtgtcgggatcccgttttcaaactttttaaaagtaatatttcaaaatacacatttttcaggtcgcacagcgactatcaaaatacaattcccagatgtcccgagaccgaacactccaggtcgcgctgctttgacatgtacaatcccatccgagctcaggttcactccagttcagttatcgcctttcctttacctacacatgaaagtagaactgtgagtcaacagactcagtaagaaaagcatataacatatcatacaactttcgacttgtaactaggcgcccatacacctatttacaaggcttatcaactgattaagaacgttcttaatggttggtgctattgaccatgatatcacccactaccagcactatgatcgcactgcgggaccggcactatgttcgtgccgccatgatagcatcaatagcacccaagagtacaattggccataatatcactcttaaccagtactgtgcctgtactgccgaaccgacacaattgttgtgccgctatgatagcgccaattaatactctctggggtaaatatcactcttaaccagtacgatgcttgtactgccgaaccgacacaattgttgtgccgctatgatatcacccaaaacatacacaatcatacatacatcatgcatatatctcatataacacgctatatacagttcttacctgttttccgaattcaagtgtg

SEQ ID NO: 286313 - DNA, 667 bp, Cannabis indica
ggcaccaccccctcgccaggaggcctcagaatcgaggaggtaccacacgtggacgaaccagatttggatccaagaatccttgatcataccgccgcagcccaagccacggaagacaccattgaggtacctatagatcctgtagataatagcaaagttttaaaaattggtcctaagttgaattttcagcagcgagaacaactaacgacctttttgaaacaaaatcttgatgtttttgcttggaaacattcagatatggtcggaatatctccgcaggtcatgtgtcatcgcttgaacattgaccccgaggtgcgaggtgtccgacaaaagcaccgcaaaatggaccccgcgaggtaccaagcgctaaaagaagaagtcgaccgcctcctagcctgcggctttatacgggagtcgttttaccccaactggttagcgaatcccgtactcgtgcccaagcctaacggctcatggcgcacatgcgttgactttacagatttaaataaagcctgtcccaaagacagctttccccttcctagcattgaccaacttgttgatgccactgcaggtcatgaacttctgagcttcatggacgcatactcgggatataatcaaatcccgatgtatgagcccgaccaggagcatacctcgttcattactgatcgaggattat

SEQ ID NO: 286314 - DNA, 545 bp, Cannabis indica
tgctcgtcaaatccagaaaggctggggggcacatacacgacctggacgaatgtttcaaagtcctcacgaaatacaacatgaaactaaatcccttaaaatgctcctttggagttagttcgggaaagtttctaggcttcatcgtcaatgctcttggaattgaagccaatatagaaaaaatccaagcactcctggatatgaactcgccaacaaaaaccaaagaggtgcaaagcctaactggttgaatcgccgcacttagtagattcgtgtcaaaatcaacggataaatgtgttccattcttcaacatcctgcgaggaaacaaaaagttcgagtggacagaagaatgtgaaaaacctcttcaagatttaaaggcacaactcgcaaaacctcccgtcctttctaaacctctagactgtgaggaattgggaatatacctagcagttacggagcaagccctgagtgccgtgctgatcagagaagaggacagcgtgcaacatccagtctattacattagtaaaagacttttcgaagctgaaggccgatatccg

SEQ ID NO: 286315 - DNA, 519 bp, Cannabis indica
agttttaggatcgattctattaacaattttggtattatgtgagcagttaaaagaatcgattactaatttatataagttttaaaaatgtaattttaactttttttgtattatgtatttactattatatagaattattctaaaatttgataatgcatgtggggaaaattgcttgaaaatttacaattttcccttacctacatttgtgcttcattttataagtgacgcaataggtaaaaaaaaaagtattttgacaattgatatgatatttttgaaccgacgtaataagttttttgtgacagttttaaaatgccatgaaacatttagcgtcattttttaaccgacgcataaaatacaatagaaaggtaagtatttagcgtcggtttataaatgtcgaaaattgttttttatgtcgttttgaaaatgacactaataaaaaactatttgcgactacggtatatacgtcggtttataaaaccgacgtaaattctttaagtgacacttaaaaaccgacgtgaatta

SEQ ID NO: 286316 - DNA, 519 bp, Cannabis indica
attaaaatcaattatctgagtcttacaagaagtatggtctcaactagtatggggaccatgggcctatacaaccgagcttccaataagcagaactagaatctaccaagtaaattccctaacttattaattccttattgcatccaccatagaacatttaaccatcgttctaatgtcaataatcaaagatcctctatatgttccatgatttacacttagcttcctataaatgatatttcagtgagctaatataatcattgaaacaagagctcttccatttatctctattaagccaagctcgaaagaaatcatcgtttcacttctatgtcttgatagaagctacagattccatatctatgtttagtgctcccactcaatcgcactatcatgttcccaaaaaaatcaaagaacatgaataacactcctgagattgaacctaagcatgtaaggattaagatctttgatctaagatcaactagtgatattgacttaagaaagatacaacagtaagattataatatc

SEQ ID NO: 286317 - DNA, 416 bp, Cannabis indica
agatgatttccctaattcccccacttgatatctcctgaacttgttctctagctcgtttatccgcaattggattggatcctcttgctttggaccaagctattggcgaaggtcaagttacttccgattcaagtgctcatgcagatctagttaggagtaattgatggcagatctcgtcttactcatagactgcgtcctactcatagactttgtctttaagtggctcgcggatttactggttcccatactttcccgatcattagctcgctgagtactttctcctctttgagttgatcggctatgggttctagatcacctcgaagtcacacttgcttcttcacgctttgttctttcctcctgagagcggtttgtcgtatttcccccattagggtacgtacgagtcctcgctctataggttt

SEQ ID NO: 286318 - DNA, 682 bp, Cannabis indica
atgttgattttttctgtttatttctttgtatttttctttgggacagattcaattgtatttgtgcctgtgctgtatgatggcgtttggactgtggagggtttcaactgggtatttgattcctcaaaaagtaagacattaatgtttgacattgactctacactggaaaaggtgcgtgaagttttgtatgaggagttggatgtggacccattggtgtatgaattgaagttagaagtgctttacatgtacatgaaaggcactaagtttccccctgaggttttagtgaaagatagtcaactacgagtattcttgagcatgaaggcaaaaatgagtgtcgacaacttgttgccactatttgtgactaaggtgaagaagaatgtgaattcggagcctactcccagaaatgtaacccctagaagtgttgttgggacgtttgtcgcagaaactgatcttgtggttggtttgaatgagcaagttgacactaatatagatgatgagagagtgggtatcgcatttgatcattcagatgagttcgatgctcgcttttacaacaatgatcctgtggttgatttgggtgtggatgatgatgtggctacagatgtacctcccatgaggatggaactaactccaagcaacaaagtagagcgacaaagaagaccccccccccccccggtacgtgagaatc

SEQ ID NO: 286319 - DNA, 710 bp, Cannabis indica
gatatcgaataatcgatccaatccatttggaatctaactttttaatatctaattcaattcaaatgtaattagatatttaatattttgtaattaaattaaattaaatcggttcaattcaatcggattagattagatgttgccaagctttatcacccttaattcctgcataacttatctttagtaatattagtttttttaatcaatattttattaatcatcttggttcaagattccttgctactgacgaggtttacttactttttttattttattttacttatcacgtgggttccatattaaaaacaaatatgcatgtgattaacatagttaaatatgcttgctcaaaaaaacatagctttttatgtttttttttttataatttgcttaaccaaaaacatagttaaatagctatatataatatgattattgttaaaaaaatagttaaatatatttgctcaaaagaagaagaagatatatagttacggtactacagcatacttttgtgttgtaccactcactgtgggtacatcactctctcccaaaaacataccatagatatgtttttctattttttttttctatgacaatatttattgtagtaaaaattgacttctcagttttaaaaaaactactgagtaggttaaattgtgaaaaacagagttcaatttattgcttgtgtgcttttgttgttttatttattattatttatt

SEQ ID NO: 286320 - DNA, 706 bp, Cannabis indica
gtatttagaagtaaaataatgatttccttcgagcttggttgaatagagataaatgattgaggcctcatttcaataattatattagttttctaaagtatcatttataggtagctaagtgtttcaaggataaaatacattgaaggatagaacggtaaatttgttcctattcagtgtagatcatctatagaggatctttgactattaggattgtaacaatgattaatcatagcgtatctatatcgtggtacatatagagcgttctatataattgagagtgctattcaattataaatttatagtggcgcaaggcagaattaataagttagggagtttacttggtaaattcaatatctacttattgaaagctcgattatataggctcatggtcccctcactagttgaggtaatacttcttgcagactcagttaattaattttcgttaatcaattacaattgtaaaattagactatgtcttatttacgaattttcactaagcaagggcttaattgtgaagaaaagaggttttggggtgaatttgttaattgagagactttgtatggtctaattaataaattacataaatgaaaattttatttgataattaatcatacttattaggaatgaattggaaaatatgttattattgaaagaagaataagtggttgaaaaaaagtggcaaaattgtaactagagtttggttccttta

SEQ ID NO: 286321 - DNA, 707 bp, Cannabis indica
ccaaaacatacacaaatgaatgaaaaatacttctgtttctttattgatgttgaataaaatggattacattgaaatggagttttatttagggcataaaacccaacaaactcccacttgcactaatataaaacaaaaagtgcatttcaaataatctcaacaccttgatatacaaatcaagtgtagtagtagtaaactcctcgtaataggatctgaaaggttgaattgattaatattgagatatagttaatattgttatatattgaaaagattgattggttgagtattgataatgtgataatattatgcatgtgatatgttggctcacctgattaggtgatgcaattttcctggtaacgtactgggcgtaagtacgggcgttagtgatatatgatgagtaccgagtgtaggtacgggctcacctgattaggtgatgcgattttcctggcgacgtactgggcgtaagtacaggcgtcagtgacatgataagtaccgggcgtaggtacgagctcgtctaattagacgatgcgatatattggtgccagattgtggcacgggctcacctgattaggtgatgcaattgtatgatatatgggtgcaggtttttgggcataggctcacctgattaggtgatgcagttatgcgacatatgggtgccaggctatggcatgggcttgcctgattaggcgatacaatacaagatcatcaga

SEQ ID NO: 286322 - DNA, 1146 bp, Cannabis indica
  modified_base (142)..(142): a, c, t, g, unknown or other
gcgcttaatccaactcaacgctttcctttgataccaatttacctcaacaagttttaggaagaacacagccccacctactccccgagacagcttcaatagattcccaaaattgcacgagccacccagccaaacctgaacttangctgagcttcaaagatggctctgtcgacatttacttgacagtaaaatgatttggtttacgccaaaaattgctgccacacttagtgcgaatctaatacactataaataaaataatataaattggattggtattctaatgtacataaaagtcattagacaacaagtatgaacgcaattaattgttatttatttatatatgaaatcaaggagaccaaatttggatcaacattaatgttaaataaagacttacactaaaagtaatgactccacgtcttgcgccccctctcattttaattatgtatgtttattttatatgtaataaaaatagagaaaagggtatcagtggtgtctagcacttttctatgtgttaatattgctattggtccaattaagtatcgggttccatataatttaatataatagcttttagagagtattgctagccaattgcaacgcgacatatcgagaaaatgctagacatcactagtacccttaatagcaatgctcatacaaataatacgtgtcattctcacatgtattattttctctctctctctctttttaataaattaaaaaaaaatattaacgtaattcttaaattatttgacaaaaaaattaaaatcaaatcaaataaaaattgcagcatcacaattaactttaaaaatacttatagttagtttcatccaccgcttaaaagatacaacaataaaaattgttgcatcaagttcattccagctcgtaatttgagtactcaaattattgtgagaggtacatataacttaactgtactactaacaatcaattcaatcccaaaaaacttattattctcaactaataatagcaatttaataacaatattatacagataaaattaaataagtaataacataaaaagtcttctattccttaatacatgtccaactacgtcaataatattacaagtgacatacaattttgtctctctataaatacacattgtcttactacttatatatgttggattaa

SEQ ID NO: 286323 - DNA, 927 bp, Cannabis indica
aaaaagcataacagttttaacatagaggaaaatcaagcatctggaacaacaggagcagtctcatccgcgactttgctgatgacctcgttctcggcttcctcagcatccgcaccctcgacctcttcaggaaggttccctccaccaccttgggtttgagtaggcgacatagcacgaaaagcctcggccatctcagcggcttctgctccgaggatcgagaagtcgaagtctgggactttggaaagagtggtgtaaatataatcagaaactgcctgatcatattgtttcttcccattctctttctcggcctccaagtcgcgagtcatctcctcgatcttcgcccgcgagttcttggcctcgagctcagcctgctccttagccttgcaaagttcttcaagctctttatcctttctagccgcctcttgcttcagcctcttcatgttctcctgaagctgggcattgtgcctcttcagcgagtcagcttccttcgaaccagcggcagcagcttttaggaacagggtcatcgactgcgaagccaactccacagagcgcggaacaagctcctcagaagggatcttctccgccttggacatgaactcctcgcccacgaacttctcctgcatggccaggaagtcgcgagctcggacagttggctcgatcaggactttcttccccttgtcctgcgtggtcttggccagcttcttggaagaatctgcggcaagagtagccaccacatcgctcttcctcttctgggcgacaacgggcgaggtcgtcgttgctccacccttcggcttgatcttaaggacgggcgcggacttcaaaaaagtcatctctgcgaggataaatgaaagataagtgtaaataaaactcaagacatcagtttataacaagagataaattacctgagattggtcgagaagtttgcttgga

SEQ ID NO: 286324 - DNA, 565 bp, Cannabis indica
gataactaatcagattgtaaagagttttatttagggcataaaacccaacacccacatcatcaccgacgtcctcaacgtcaacccggacatgcccccggtccaacaaaagcgacgacccctcgattcagtaaaggccgaggccttagagaaagtggtggataagcttttagcaaacggcatgatccgcgacatttactacccggaatggctagccaatctggtcctggtgccgaagcctaacagaacttggcgagtttgtataaacttcactgatctaaacaaggcttctccaaaggactatttccctctgcccaggatcgaccagatggtagacgccacttccgaatttaagctactgtccttcatggacgcgtacgccggttacaaccaaataaagatgcacacggcaaaccaagagtgcactagcttcaagaccgataagggggtataccgctacctagtcatgcctttcggattgaagaacgctggtacaacctatcaaagaatggtcaaccggatgttcaaagacctcttggggcgaaacatggaggcatacgtcgatgac

SEQ ID NO: 286325 - DNA, 401 bp, Cannabis indica
gcccatgtttttaatttccaaataagcggcattagtaagttttctttgatcatggtctgaccaaactagatcttggttatgtaggctgttctaaattagtatggacgccaggcgaaataccaggagcctgggtaattcggttggatcaagtggtggtcagggagcacagattccccttaatatccgtggccgaggtagaggtctcaggggcagggcacgtggccggggtgatgttaacctgccacaggttgcccaagctgcccaagccaggatcaatgaacaagatgatgagattcgacggttgagacagtagggtgcttctgcagtgctgtaaagcccgcttagttaatttggaaattatcagttaattgtgattaattatggaattatttatagccatt

SEQ ID NO: 286326 - DNA, 513 bp, Cannabis indica
ggaaaattcagaaccccatccggaattccggatgcacaaccggaattccggttcctcttcctcgcaggcagcaacatcaaaaattcatatcttgcacaaatcaactccaaatcaattcaaaccttccagacctactccatatgacccaaataacatttctaaggcatcaaaaccacccagaatgcacagaaatgaaaaacaccattaaagctcaagctttgagttctaaactcaaacttgagcaaaccttgctaacatgcaaccaaactagctcaattctacttaatcaagcttagaataaccccagaaaacaataacaaacatcaacaacatcacagcaacagattcaaatcatttctctcaaaaatcatagcttttgaacaaaatctcataaacttgaaccaagtaactagcatgcatgaaacctacttaattccattcaattcaaacatagaaaatcattgaaaacaacgtaaaactacagcagcaacaaactccaaatcatcatgcatt

SEQ ID NO: 286327 - DNA, 579 bp, Cannabis indica
tatttttaagtttttattaaataaagccacattttcattttattaacttatgtttagagatttctaatattttttaaagcaaatcattaatatatatatacatttatattatttttatattataattattttatttattttaactctacataatcattctttcttaacttaaatttctattttattttttctttaaaaaatctatttattaatatatgtagaaggtttattttatttttaacttaattattacaaagtatttttttttatttatttgaatataaattaacattttgatattatattttataaaggaatgcaatgatattttatttaaattctcaagtaccaagttactttagaaagcaggataaaagacaaaaagacaaaaacaaaaaaacatgttacttttgcattaaaaccagtcaaaatataacacactaaacctaatttaatatttcaggttccaggttactttagcaaacatcaggttacttttgatttgtcaataggttacatgtgtaagaaatataacacatcaaccaaatttaatatttcaggtatcgaattattttaaaa

SEQ ID NO: 286328 - DNA, 656 bp, Cannabis indica
aaagcaaagcgtttcattcatgaaacaggcttttgttgtgccgatggaaaaatttatctcgcaacaaacgatgtgccgaatgaactttatgaattgtttacttccagtagcgaagaatctacacattttcgaacatacattcgaacttacaacaataaatttgcttttacatcaatgggagttacttacgacaaatcgatgtgtcgaaggaataaaggaatatatactttccgaagccaagggcaaatctatcacacaatcaataatttactaccatctgatggacgtccctctaatctgcaactatatttttacgacaccgagaatgaattggagcaccgacttaatgattcaaaatgcagactggatccatctgttacaactcaacttatgaatatccttcgaatcaatccgtattctatattctttcgttcacttggagatttgccagatttggaaacacaaataattcaagtaagagaagatgctgggctagatcagcgtgtattcaatgctcctacatcctcacaagttgatttgggtggaagatgatgaagggtatcaacaaggagggcgtgacatttttgtgtataatcatgatggtggaaaacataaagttcaatattactacggctgttacgatccattacaatatc

SEQ ID NO: 286329 - DNA, 631 bp, Cannabis indica
tgttattgaaactgtgcctggtgtgcaagagaccggaaataacggttccgcacacagccagaatgttcataacatgactgttccaccaggcatcagcgcctagacaaccatcggagatgcaaccgaattccaaaatctccgtgctgcgcttggactcatgcaaggccacaacaataccctgcatcacgatcaagaggagttacgtgccgcagtaaacctcgcgtttgacgaacagaggcatatgttcgccgagtggagagataaagagatggaggcattaagggctcaccatgcagaaatcgaagattgtagtcggcaagctactgtgctgatacggagagcctatcagactgtaggccagcagacgccgagcgtcattccccttggagaagccgaggatgacccaacggtgaatgcctccaagacaaacaacggtcagccgtccaatccccggtcacgagttccactcgtgggccaagaagtaggcggacagaccttgtatgggaattcatcaggaggagtcatgctcgatggatccactcaaaacaatggagccattcctcctgccaaccaagcgaaccaatcactaaggcagccaggttcttctgtgttcaaaaggttgggaacaccc

SEQ ID NO: 286330 - DNA, 675 bp, Cannabis indica
ccccaaataacataaaaacgagaaaatctagggttcctgaaaatcacccaaccggcagaccggttgtccaaccggaattccggttctgaaaattttcaaaaccccattcggaattccggatgcacaaccggaattccggttcctcgcaggaacttttcaaaaattcacacattgctcaaatcaaatccaaactataccaaaacttccagacctgctatttagaccctaaggaacaattctaaagcaacaaaaccgagctttaaccacagaaactcaattcaccattaaaggttcaagattgagttctaaaactcaaaacttgtctaagcaacatatcatgcattcaaatcagccaaaaactacttaaacatgctcactaaagctgcagaaaacaaacacaagctcatgcaacaatcacagcaacaaatttcgaaaattctctttgaaaaccaaacttttgaactaaaaattccataactctaatcaacctaactatcatgcatcacaagcagcttaattatcctcaaataatcatgcttaaacctcagcaacaacatcaaaaatccagcagcaagaacaacttaaacaaagcatgcatacatcgtctttttcatcaaaattcaaggaattaaaagaacaaggtacaaaggtcttaccaagcacttgaagcacact

SEQ ID NO: 286331 - DNA, 648 bp, Cannabis indica
gagtttttaaactaggaaatgggtcaacacggtcactaacttgtctgcacctcatcccatattagttcgagaattctatgccaatcttgatagaactgttattgctgagggtcatccagggtgtgtgagtgcctttgttaggggtcatagagttccttttggtccatctactattgcgtctttattgcaagttgagtccatcaggaaaccaacatatgggaaacacttcaatccagatcaatctttgatgggtcgagtgctaactggcagggatgactatatttgggacaaacaggaaattctggtcactcatctgactccattctatagggttcttcatcgggtagccttgtacaattggtttcctaattctcatttgtctgctgttacacttgagattggcaagttcttgtatgctgtaggcactaatgtgtccattgatctgccctcgctcatttttgaacgggtactggaagcctcagaaactactggcactcgtaacaagctaccatttccaagtttagttcaacgagttcttatggatgctcaccctcctctcacaacacatgattatcaagttcagaatccggttctcagtaagagctttctctcggtggtcaataggaagccttcttcaaccactccctc

SEQ ID NO: 286332 - DNA, 454 bp, Cannabis indica
tttgtggttggtgacccaaagaatatggtttgcaaattaaagaaatccatctatggactcaagcaagcttctcgtcaatggtatcacaagtttcatcaagtaattatctcatttggttttgagatgaatattattgatgattgtgtatatcacaagttcagtgggagtaaatacatatttctggttctatatgtcgatgacatattgcttgccactaatgatataggcttattgcacgaaaccaagagatttttatctaagcaatttgagatgaaagatcttggtgacgcctcttttgtattaggaattcaaatacgtcgagatcgttctcggggtattcttggattatcacaaaagagctatatcgataaagtactcaaaaggtttggcatgcaagattgtagaccaggtgatacccctgttgctaaaggagacaaattcagtcttagacaat

SEQ ID NO: 286333 - DNA, 1167 bp, Cannabis indica
tcttcctgagttaagctaagtgtccctccttctgctgctctggtttctcttaatagagattccaaaaatcttagtagcttcccctaggtctttcatttcaaactcagtcttgagtaggcccttcattgtgtttactcttgctctttccttactgattataagcatatcatctacatacagaagtagatatatgactttattaatatcagttcctttgtagtacaaacaatgatcatagtaactcctagaaaaccctagttttagcataaatccatcaaaccttttattccattgcctaggagactgttttaacccatacagtgacttaactagcttgcatacatagttttccttccctttttcaatatatcctttaggttgtctcatgtagatctcctcctctagttcaccatgtaagaaagcagtagtaacatccatttggtcaatttctaggttgaattgagtagctagacttagcattatccttatagtcttgtattttgcaactggtgcaaatacttcattaaaatctataccctctttctgtgtaaaccctttggccactaacctggccttatatcttataggttcatccttagttctgccttctttctccttgaatagccatttgcagtccactatgctcttatctttaggtttaggcaccacaatccaggttctgtttttcttaagagattccatctcttcatccattgcacctttccatttcctggaatttggtcctttaatggcctcttcatatgattgaggttcattattgaccatttccaactcactcataaaggcatatgcaatgtcttcatcccatatattaaagctgtacttaggattaggtcttggtacccttctgcccctgtccctgaccaattgataatcccccaagtcctcttgagtgccttcatcaataatgtcagtgttgtcctcatcaggttccacctgaacctggttcccaggttccacctgaacctgatctccctggttctgttcaggtgtgttcactgtttgttccacctgaatagatccagttccttcatttgcagtgttacctgcattttcagtgtcttttgtacctgcactagggttagaagaaataggcaaacatggaaatatatcttctttaaatattacatccctgctattaatagt

SEQ ID NO: 286334 - DNA, 528 bp, Cannabis indica
aaatccttgaatactctattcatcaggtccatgaatgctgcaggagcattggttagtccgaatgacataaccagaaattcgtaatgtccatacctagtacggaaagccgtctttggaatgtcctcctctcggattctcaactgatgatagcacgatcggagattaatctttgaaaagaccgtcttcccctaaagttgatcaaaaagatcattgatcctaggtgaaggatatttattcttgactgttagcttattcaactctcaatagtcgatgcacattcttagagacccatatttcatgttgacaaacaatatggagctccctagggtgatacactaggccgaataaatcctatgtcaagtaacccgtggagctgaatttttaattccttaagttcagctgaagccattctataaggagccttggaaactggttccactccaggtgctaaatcaataacaaaatcaatttcccgctgaggtggtaaacccggaagttcttcaggaaaaacatctaaaaattcccgaa

SEQ ID NO: 286335 - DNA, 688 bp, Cannabis indica
tttcaaaatttcgacagcacttccccttaaaaattgacttcccgggatttaaatccctttcaatttaacccaattctattcacacaatcaatttcaacaatgtatatagcaaaaatcccaaatatccaccaaataatccaaaactatccaacaaattcacaaattcttcaataaaaattggagtggaagtcttagaatcaatacctcaatgacaattcttcctttaatcatcctccattgttgacatcttgaagcttttgagaaagaaaaggatgaataaggttttttatattttgggtgaggttttagggatttggggttgattttgagtgggaattagtgtttaatgagagaaataagggtttaggatgattattgatgaaagtttatggttagaattggtggaaaggagttttgaatgggattagatgaagaaaaaatggtgaaaagtggtgttttcggcgtggagaagagagggtttgaatggggtgtgagttttgaaatgttagggattttggggtttttaaacaaaatctgaccattctcgccgcggccacatgtagcctcgccgcggcgagatttcgtgaaattagccccctctctgtaaggcttatctggccgcggcggtgtataccctcgccgcggctagaaatcgtgaaaaatagcccctttctgtaaggccaatctg

SEQ ID NO: 286336 - DNA, 603 bp, Cannabis indica
ctcttctaacgaactcaccaaatcaagttcgacctagggttgtacatagtgacaccgatgcagtatggcagaagtcgcactatgaatttaggttgtttgggctgagtgtgtactcagttcatcatgaagcgtaccggattcactattctcctgattttattactagagtcacttcttgtcttaaactactattgtattcataacattatacagttttgttattaaatatctatatttatatagtattcaaaaaattattgtaatcaatggcggaactatgttgctggggccatggcccctcctcacattttgatttttaaatgtatatacatatattcataggctctctatattaattgcttttttttaaatatatatttcttgatagaaaattgactatttcaaaactcaaaagctcataaatgggccaatgattatttatgcttttatactaaaacaattttgtttagaattgtatcaatatcatttgcatcctatacattgtatcaaaagctcataaatgggccaattttgtttacaattttgtttaaaatttatttctcaaaaaaaaaaaataatcaaagtatgctatagaaaatttac

SEQ ID NO: 286337 - DNA, 605 bp, Cannabis indica
catattaagaataaacaaaaaaataggcttagccctgttagagatactttagattgatgttttcttctctgctcagttagttatgtccgatactattttcttgttatttcagttggaatgccaactgtattttcttgtatttgttcattctgttgtgttgagaatcatggggttccatctcaaaatcaattggcaatgagtggagtagcccatgttcttatatatggctcaatattcttacatttgatctatgtgggacaatattctccaatatcccccccccaagatggtggctattttgggtcaccaatcttgaatcaccttatcataagtagtgtcatttgctcgctttattttttttattttgcggctgggagttccatttactcgcttattcttgctcacggctgggagtaccattttgctcgcttgcggctggctaactctttgataggtgtggatcgaaagcccgctagggatatggctctgataccatgttgaaaatcatggggttccatctcaaaaccaattggcaatgagtggagtagcccatgttcttatatatggctcaatattcttacatttgatctatgtgggacaatatt

SEQ ID NO: 286338 - DNA, 692 bp, Cannabis indica
ctgggttgagatgaggaaaccggttcttgatccactcgtaaagatgtcccaatcggattaagttttcaatctcgtccttaagatttttgcattcattggtgctgtgcccaatgtcattggggtactcgcatctcttattgggatccctccgggagctgtctttttacaaaggaggcggtctccgatagtgcgtattttgcctagtagcaaaatatacacgttcttgtgagtccgttaactccgtgtattgggtatattggggagtatacccccttttctgtcgcttatcctccgtccgggtgctgcccttggaggaccttttactccttgagccctgggaaggaccggctaaactggcagtcggagcggagtgcgagggggcttgcccatttatccctgagggatttccaaaatgggaagatgcgggcgccaaggccttgccttggctatatccgggagtagcagaaaactgtatgccgctcatcggtggagctgctgctggcacagtgcctgagagctgggctccgagcacatatcctgctaccctggtgggatagtatcctccataggccactatttgggcctcttcaaggttaatgtatttctggactctcttctagaagtcttgaaggtttgaagctccttcttgttgtagctcgttcaagaatggagtccccgtatggatgcctgct

SEQ ID NO: 286339 - DNA, 441 bp, Cannabis indica
ttcgtttcagatttttgttttcatttattaatttactactattagtttaattccaattaatgtttttatgaggtaagaattataaggagttcattccttaattaattttaatgctgtgatcgtgtttatgtgttgaaactaatttagttttttcattagtcttgtcttttgacatggttctttagtcttgtcttttgacatggttttttagtctttttcttttagtttaatctggttcgagtcttgtcttttagcatgggttgtgtagctcagaatcatcatggtgctatagtagaagcattcaacaagagaaagattggatgtgttcaactcgaaattgctgagataatatgcattaaaaaagcattgagttagattgaaactcattcgtgggatagagtcatgttggaaacagataacttggtgtgtgtccaagcgatt

SEQ ID NO: 286340 - DNA, 737 bp, Cannabis indica
tctaaccagctcgcgtggttcaccggttcctgcccatttaagtaatcgtccagaagcatcaggtgtttgcaatacttggtgtaatggttggtcggtgtatacccaaacaggatgagcctggaagtaaggtattaacttccttttgctaagattaggcagtaaataagctttgctattaaaggatatcgcccttcagcttcaacgagtcttttgctgatatagtagactggatgttggacgttgttctcttctctaatcaacacgacactcacagcgtattctgtaacagctaagtatattcctaattcttctacgtctaggggtttggagagtacgggaggttttgaaagttatctttttagttcttgaaaggagttctcgcattcctccgtccattcaaatttcttattacctcgtaggatgttgaagaaaggaacacacttgtctattttttttttttttttttgctgaaaaaacacacttgtctattgactttaaaacaaatctgctgagtgcggctatccgaccagttaagctttggacttccttagtttttattggcgatttcatatctagaggggcttgtattttttctcgattggcttcgatactccaagcattaacaataaaactaagaaacttacccaagctgactccaaaggagcactttaagggattgagtttcatgttgtattttttgagcattttgaagcattcatccaagtcctttatatgcc

SEQ ID NO: 286341 - DNA, 1094 bp, Cannabis indica
ttgtttcacaccctttaaagtacattgaacaaaaggttactgcctcatcagcaacataaccttctgcaattgacccttcaggacgtgccttatttcccacataattcttcaatttttcatgtacctttcaaaaggatacatccatctcataaagaccgggccacccaatatcgcttcttcaggcaaatgcaataccaagtgtatcattatgtcaaaaaaagctggaggaaaaatcaattccatcttgcacaataacagaattaaattattttgagcatcctccatatcttttacatttagagttctagagcataactgtcgaaaaaaattacacagctgagtaatagttgttgcagtgtcacgaggtagaaatttacggacaccaaccgctagtactcgctgcataatgacatgacaatcgtgggattttaacccaataatgttagactcatctggagaaactttgctctttaaatttgaacagaagccatcgggaaactttattcctttaacaaactgacaaaaaagttgtcttttctcacgagtcaaaacataaggagcatgcggtttcattagcctcccattcccatcttcataaatccacaacgattccctaatacccatcttctttaaatcatgtcgcgcattggttgtgtcctttgatttatcattatccaagatggttcctaggagactatcacacacattcttctcaacatgcatgacatcaatgttgtgttttaaaatattcgtgctccaatactccaactcgtagaaaatactttttttcctccaattacaagtttctgcaactcttctacgtttcacgcccccaaaattttcatgatgtccgggaatttggggttcgagagtattaacttgtgataatatctcttcacaagtaaatcgtcttggaggaggtcttctttcaactttaccatcaaatcgagtatcccttctcattgcatggttacttggcaagaaccttctatgaccaacatatgatgtcttcccgatcactcgaatggacgtcgtgtcttcattacaagtagggcaagctttataaccttgaccactccacccagacaagctac

SEQ ID NO: 286342 - DNA, 531 bp, Cannabis indica
ctctaaaatttaacttataacaccccactaatattctagaaatacaaaatataactctctaaaggcccaacatcgctttccacagcttccgaacacaaatacagaaattgggtaatttacattaaataacataaataatattaaatacattttcaaaatatacctttcataattattaattaatctcatacataaaccttaattatttgataattcaaggtattaatcatatgcggtctttacaattgtccccccgttaaaaggatttcgcccccgaaatctacctgaacaactcaggatgctgagccctcatatcagattccaattcccaagtggcttcttccactttattattcctccagagtaccttaaccaaggatatagttttagttcccagaacattttccttcctatccagaatttgcactggttgttcgtcataagatagatcatgttgcaactctaacatttcataactcagaacgtgaattggatcagacacatacttcctcagcatggaaacatgaaata

SEQ ID NO: 286343 - DNA, 909 bp, Cannabis indica
aacccttatgtgtttattccattattttagaattcatattaggatgttaatgaaagatacatggtagtaaatctagatcctggtaaaatatttccaatactatcggtggaggtagcagatcctggttgttttgaccttggttggttttgacatacttttgcaggtgcgggttgtttttcttgatcagaaattctatttcccgcttcaaattataacattcgttggtgtcgtggccgtagtctccgtggaatcgacaaaattttgtcatgtcccttttgttggtatctttcttcatgggcccgggctttctgtacggaattaacgactgagttgccatatacacactctctatatcttcagttagaatagtgaatgcagtatgtttggcatgatcacgggaagtctgtccagatttatccgtgaactttccattcttcctgtttccctgcttgtggttgttgctcgagcgcttgccacttgaattgttagaatagttaggaagttgggcggatgttccagtggaaggagccttcgttttgcccagcttttgcttaccttctgctcgttgaatggcttcttcgagcttgatgaagccttcagctcagtcaaggaaatcactcattgagtctaccggcccgttcttccttatgtccttccatagttcaccaaggacttcaatgccccccagtattgcggataactttccaatcctcggttacctgcgagactttggttgcttccgtcatgaatctgttgatgtatgcccggaagtggctcgcctggtcgttgccttacttcaacaaaatctcccagatgcaatgggagttaacgtgaggaagagaattgtgtatgctattccgaagaaaaggttttccatgaactaaactttccaggagccaacttgaaata

SEQ ID NO: 286344 - DNA, 715 bp, Cannabis indica
taaatcagtatgtttaattaatagaaaataaaataaacacatatataagatattttatattattggtatgtttattataattgtaaacataaaaataaacataaccaatattaccatatatatataataatcaataattattatcatatatatattaataaaaaaattaaaaaaaagtttttaattatatataaaaatgtatgagaaaatgataatatatttttttgcacatattttgtaattaattaatataatgtatataaaattgtaaaatgccctaaaaaaaactgtggaatgtgagaaaccagttagtaaaacaaccaaaataaaaacaaacaaataaaaactagtttcttgaaataatcaaataaaaaattgaaacttaaaactcaattatgaacaaaaaagaaaaaaaaacaagttatgaatctagttacttaaaaaaaaccagttatgaaataataaaataatatgtgtgtcagaaactgattatttaaaataaaataaaaattgttgttcgaatatcatacaataagaaaactaatttgatacaaactaaaaaaatatacaataatatcataaaaatggagcaaccccattacagaatagttaaaacctgtaaaaccagttttgacgctataaaaaatcataacaaaatataaatgttaataataaagttaactgaaaccagttttatcagacaatcaaataaaaa

SEQ ID NO: 286345 - DNA, 487 bp, Cannabis indica
tttgttctttccttgtaaatctttgcattcttgtaagcctcatttctgaactcctccaactcattcaattgcagcagtcttttctctcctgcagctttcaagtccatgttgagggtcttcatagcccaaaaggccttatgctctaattccaccggcagatggcaagcttttccaaacaccaaccgatacggtgacatcccaatcggtgttttaaacactgttctatacgcccatagtgcatcatctaattttcgtgaccagtcttttcttgatctatgcactgttttcttcaatatcatcttttatctcccggttagaaatttctgcttggccattactttgtggatggtacggtagagcagttctatggcagacgccatatctcgagaggagtgcttcaaactatttaatgcagaagtgactcccttcatcgcttatgattgctcggggagtaccgaaccgagtaaatatattcttttgaaggaag

SEQ ID NO: 286346 - DNA, 818 bp, Cannabis indica
tttggtttatcaggaaataacactagtagttaagataagttggaacggtgccacaaatgtatagaactttccttagactgaataagtacctttcctgcaactttaacattcagtctctctctggtagacctagagacttcagataggttttacatagttattgttttattattcttaggaaattcgatctccattgttggttttacatagttattgttttagtgagtaatcctccctaatggaggaacgttcattagcgaataacgccgtagaatctcaaaagataagtattttttttataagcgtttattttagtatggatcaccctaatggtggcgactttaataggacttacaaaagatatgaaacaatggtggaagctcataagatagaatggccttgactctcgcctaaatgggacaacgctggattccgatcttgatcgtaaaaggttgctagaatgtttatcattttagatgagctgacaactctattcaatggatggcatctttgaatcttgcctaaacgggacactgatatcagtttgttgaagacattggagattatttaggattgtatgttttagtgttttcgcttgtcattcctacttgctatgtactaataatttctgaattgtgtgtgaatttatattgaaccatgttattttctgttattatttgtagtttaatttcgaattttcattgttggtctaactaagcttgttgttttaatgggaccaatccctaatggattgtcatccattaaacaagcatactagtgttagatctcgatagataaatattgtaaatgcaacatct

SEQ ID NO: 286347 - DNA, 531 bp, Cannabis indica
ggtgcgtctacatattcccagactttgttctttttcatggagtccatttctgaatccatgttgcgtgaccattgtttctgttctggacttgccattgcctatttataggttaatggatggtcatcaataccgtcaccaacgaccatattgacttcaccatccaagccataacaagatagttttgtggaaaccctcccactacgacaaggagccgtgatcttctgaacaggaacattagtggtaaatttctcggttgtatcaacttaccgaggaagtgggtttatcctctacttgagtagaagaggatggaacattagaaggagttatatctgaaagcatttcctccaatactactttgctttgtgccttgaaactcttaatatagtcatcttcaaggaaagtggcatttgtggaaacgaacaccttatcatccttgcgactataaaatagtccacccctagtctcctcagaatttccaacaaacatgcaaacctcagttctcttttcaagtttgccatatttctttcttaa

SEQ ID NO: 286348 - DNA, 209 bp, Cannabis indica
gatgctgaagcatttttttctaatggcaatctatagaagtttctcgacttctaaactattccagaaagataaaggccaagaaagaattccttatgatcaacaatgagaggtctcagatatgctttgcaatgcattagacaaggcaccaccaaattagatttctagacttgccttagtgctagacggtctgctgatgagatggtgattac

SEQ ID NO: 286349 - DNA, 766 bp, Cannabis indica
tttttcaactcccggtaatcaataaacattcgcagggttccttctttcttcttcacaaacaaaatcggagcaccccaaggtgagtagctcggtctgatgaatcccagattcagtaactcttgcaattgtatcttcaattccttcaactcagctggagccatttaatacggtgccttagatactggatccactcctaaaacaaattcaatttctcgggtaggtggcaatcccggcaagtcttctagaaagacatcaaggaactcgcataccaatctcgtatttttaggccctgatgtcacaggttggctggtatccactgcagtgactatgaacccaagaaaacctctatccatcaagtccttagcttttaacaatgttattcttggtatgagtgccccctgaaccttacccacgaacaccactgggttagcactatcgggctcaaacactaccatcttccgtttgcagtcaatcatcgctccatacttagacagaaaatccatactagggattatgtcaaaatcagataattgtaactcaattagattggcggtcaactcacaaccgtcaatccaaaaaagacaaggacagaatccaccttgtggatactattaggtctcccgaaggtaacagggttccaaaccctgaagcataaatatcacatggcttatcactctactcgatacataggaatgagtagctcccaaatcaatcaacacagtataagaacaacctttgatagaaaactgacctgtcacaactgacg

SEQ ID NO: 286350 - DNA, 490 bp, Cannabis indica
tttccccgtcaccccggcggtagtgtccgaaggaatggtccagctcaccaccgatcaatatgctgcaattcaggatcaactgcgagcactacaagccgaggtagatggacagagtcgagctcgacgccctcctcgagttcctgccattcgcaacgaaaaccctcaggtaacagtttccagacgtcaaactaaccgtgtacgcagggaacgaagaactgaccctgaagctctggacttgaatcacccgatgtcaagagatcaatctgcaaggtttcctaaccagagcgcacaaatcgacgaggatcctgagcgccgcaatcctcgcagtcgtccatctcgagacaacgacgcagaatcagcctcttcgtcatcgcatggccgcactccgagcaggtatacaaggtccggctctgtacagacacaacagggaggacgttatcaagtacaccgaggtgatctgcgtgatcatctcaacgcagtttcagggcac

SEQ ID NO: 286351 - DNA, 542 bp, Cannabis indica
ctcagcaagaaaagtaaataaaacaataaccaataatattcagcaattcaatctcatatcaacatgcttacacatttacacaatatcataaaacacacaatcctggtactttataaagtacccctttaccactcattaaccacgagctcaatatgtcactatcgttacccgatgaagcaaacgataagtaagaaacctatctacgatttcaggagtaattactcgtaacggtaataaccgtttccaaccctaggtcataactgaggctcaacaaacatttaatcagaatcttgataataatcaaggctataaccattaaaccgctaacacttagccacatacggcacttaccacatttcttacctcaattcaaaactcaagagtgcgggccgacctgagtggaaaataagctgggcgatcccggtcctatgtcacgacaattgagacttaatagataccttaatctagaatttcaaaacaaaccctaatctaaaccaacacacctaactccaacaactccaaaaaactgtcaaacaactcat

SEQ ID NO: 286352 - DNA, 462 bp, Cannabis indica
ctgcattagactctggtgctggcatgtcagatgctagaattagaagaattattattcatggattaaggccagaatttagaacttttattgctgcaatacaaggttggccaagccaaccttctcttgttgagttagaaaacttgctagctgaccaagaagcgttagctaagcaaacgtctggagtctcattaaagagtgacgaagaagcactctttagtagagataagaaaggacgaccccgaccaaatactagtagaaatactagaaaacatgatgacaaggatagtcatcatgggagctcccacagggggagctcagaataaagacaaacggggtggtcaatcaaagaataacaataaatttgatggaaaatgctacaactgtggcaagtatggccacatggctaaaagcagccacatcaaatgcagaaaggacaagcgatgaagaatgggacgcaaaagc

SEQ ID NO: 286353 - DNA, 811 bp, Cannabis indica
cggcaatccgaatcggcagattatgttcttcacaattaaagcctttaactttctttgatgtaatggttgcgagtggttcggcttccgtccacttagtgaaataatcaaccgctaccactgcatattgcactcctcctttgcctttggataactgtccgatcaagtcaattccccaaatggcaaagggccacggactttgcatctgagttaactcgttgggtggagctcgaggtatctttgaaaatctctggcatttgtcacatttcttaacatagacctttgaatcttcaatcattgttggccagaaataaccttgccttagaattttcttagataaactctgcctggcagcgtgatttccacagaatccgtcgtgcacctcagataggagtcgtgcagcttcttcttgagtaacacatctgagcaacggcgtggagaatcccctcctgtacatgattccctctactatgatataccgtccagccttccttctcatcttttgagcttcattccggttatctgggagttccccagtgttgaggtaggcggctatcggtgtcatccagtttggggaagtatcaatcatttcgatctcttccgtgccagtgatgctaggctcttcgaggaacatgataggaccaagttcgccttatcacttacattactgcttgccaatcgagccaacgcgtctgcagttgtgttttcttccattggaatttttctgagaccgtagcttttgaattgtgcgagcaagtcatgtattttgctaaaatatgctatcatcttttctccccgagcctcgtattctccg

SEQ ID NO: 286354 - DNA, 717 bp, Cannabis indica
gaacataatcaaccatggtttcgtcctgtccgattttggggacatggacgaagtcaggaagattcttcaagatcttactgctgagaggcggctttatcaggaggctgctgagcgccgggaggctgctgccaaagctaatgaggaagaggccaagcggagggaagcccaggcggaggcaatgatccgggaggaggccttgcggagagataggctggaggccaggcaccaggaggagctgaggacggaaggtgaagccactacaaaggccaggcgggagcttcggaaggccagggaagccttggaggagatggctgtaaaggtgaggtccttagaggaaactcaccaggcaaacttagaatccagggccaccctggccgcggagctgaaggagctcagggacttcaaggaacaagcctcaaagaaggcaaaaagagctgagcttctttctcccgtctcctgcagccggtgcgccaagcgttttgatgatggcgtcttcatggcttggtctacaaacgaccagaacatcaagcttaccatctaccccaaagccgaggaaatgatcgccaaattccgggagaagaagaaaaagcttgatgccatggtggaggcacgcatcggacctcgtctccctcctcgcatcgattaggccgctccgagtttgacccagtacaaccaagatttcactcttttttttttatatatatatttgtttattta

SEQ ID NO: 286355 - DNA, 774 bp, Cannabis indica
atagatagatatatagattatggagtgcaaacacttggactaatttgatgactctctattgccaaaaatttattcacattagaatagaaaagaaattaataaagcaattaaaaagaataacatcacattatgcatcggaatcaaaaaaataaagatttttttaaaaaataaataaaaaaattattaatattctccctatataggtttgttagagagatatgtggctaagatgatttttttaatttaaaaagagattattaatatttaaaagattgtttaattttttggtttaattattgggtttatttgttaacgggagatcaaacctaatcgttaaatttaacagaatattcttttatttttaagtatattctgttaaaccaagaaatgccgttagataggcacttttaatatataaagatatatatacatttcatatatatttgaacctcatattaacaactgttaattaatacaaaaaaaaaaaaattaaaaccaaaaaagctcaaatcatacattttttatattttttaaaggagaaatcaagcaaaaatacaagcaaacaaaggattagaattacgcccattaaaccaaaagtgttaatctaacctctagtgacatttgggctaaattatgggttgctgtactccttagtctagcttgtgagaatgggataaggacacagttgagaaggtaggtcatctacctcttgcaggggagtctataagcgcgccatacttagaaaaaatattgtcgtgtgcttgtaagtctctg

SEQ ID NO: 286356 - DNA, 1219 bp, Cannabis indica
atcagcataccatggtaccattagactttccctcacactaaagagttgttcatcaggaaattgctcatttatctgtacctctttcgtattctgactttcttccagctctagtcttgacaagtgatctgctaccagattttcagtgcccttcttatcttttatctctaagtcaaattcttgaagtagaagtacccaccgaatcagtctcggctttgcatccttcttggtcataaggtacttgatcgctgaatgatctgtgtagacaataaccttattcccaatcaggtagggtcggaacttatcacaagcaaacacaattgccagcatctctttctccgttgtggcataattcagttgagcatcattcagggttctactagcatagtagattgtgtgaaacaccctgtcaaccctttgacccaagaccgctccaattgcatagtcacttgcatcacacatcaattcaaaaggtaactcccaattcggtgaagtaactattggtgctgaaatcagtttctctttaagaactttgaacgcttttaaacagtcatctccaaactcgaagggtacaccattaacaagtaagctggacaatggcttagagatctttgagaagtctttaatgaatcgtcgatagaaaccagcatgtcctagaaaactcctcactccttttacagaaactggaggtggtaaattttctattgttgaaactttagccttatccacctcaattcctgctttcgaaattttgtgcccaagaacaattccttctgtcaccataaagtggcacttctcccagtttaacaccaagttagacttctcgcacctggttagcaccttttctaaattttctaaacaatgatcaaaggaggaaccaaagaccgaaaaatcatccataaaaatttcaatacaggattcaatcaaatctgaaaagatagccatcatacaccgttgaaaagtagcaggggcgttacacaaaccgaatggcattcttctgaaagcaaaggtaccgtaaggacatgtgaaagtcgtcttctcctgatcttcaggtgctatagctatctggtggtatccagagtagccatcaagaaagcagtaatattcttgccccgccaatctgtctagcatttgatcaatgaagggcaaaggaaagtgatcttttcgtgttgctttgttgagtttcctgtagtcgatgcaaatcctccaaccggtgactgtt

SEQ ID NO: 286357 - DNA, 641 bp, Cannabis indica
caaagcatggatgattgaccataatatgagagagtactagatttatcggctacgagatcaccataaccattgatgcaacaaaaaagacaaaaaagggaatggcaaaatttagctattgctgaaggaagaagtgcatggttgaaagctaaaagcaaagttagcatagagggtgatgctaactcgagatttttttcataacatgttgagcagaacataaggtgtatttgctcaccttaacaaagcatggaagattgatcataatatgcgaaagtactagattgatcggctacgagatcaccataaccattgatgcaacaacttggttatatggaacaatggaatggacaaggatgtatggaggattgatgagaatatggaaaagtgtgcactgtaggggctttcattgtcctaatggacatggaaggttctctaggaattcggtggccctactagctagtggaagatagctatccttaacacccactggttttggatataaaaatcgtttaggtgttgatagttgttaagcgcaacataagatgttcatgctcaccttaagaaagcatggatgattgatcacaatatgcgaaagtacttgattgatcggctatggatcaccataaccattgatgcaacaactt

SEQ ID NO: 286358 - DNA, 757 bp, Cannabis indica
ttttattcttgtgttctcaattctattacctgagagcggagcgtaccttgatatagggtctagttgagacctctttaagcagttattaaggaggattctcccgtacccttaataatctgtttcgattagggtattagctacttggtgttcatttctttcaaattaccatcatgtcatacggtctgcctgtggatgaagacgaaagcatcattaaggacagactgatcctcgatagaatgttaacatcctccccttggttagggacaaccctcgggagcaaggcactagatgggagatagaagacattgtcaacaagttccaaaattatcaaatggtgcagtagctggaagacaagtggagcttcctaaacacgtcgtgtcttttttggaatagactgtcatgcaagactgagaagggtagctacaatatcgacggtttcagcgcatggagcgcctcccacatcgctggagcacaccttcctctccaggactacttcaccaactttctaacatttgttgggatagcccctttccagttaatcctatagagttacaagcttctcgcgggagggtatatcttttacaaggagttgggcatggatgagcctcgttccacaaaggttctttacttctatgaattaaatatgctcttttgcaagatggctcatattagggatggcttctactgcctcaaggtgtagagtaaaaaaggtgttggaaagtttatttacctaagatcttagatctactcacaagta

SEQ ID NO: 286359 - DNA, 415 bp, Cannabis indica
agcccatgacagttggtatcagagccaagttcatcttagtgggaggggaacctggttggcctatcctagagaggatgtaggcgggtggacggatcgagatggtccgaatgttggacagaggtcgttgagcaagttagcctttaaagaggatacagtaggctgagatggagttgagactgggttgcttttcttcatgggaatactggacattctagagaggagacattgttggttgcttcgagtcaagttcaaagatgctagaaagacaactaccacgtgtaattgtggagaggcgcaagagaatggttgaaactcgttggcatagtacaagattgaggggattgtccacgctgtatgcttggtacactaggccaggtttgcttgagtgacatcgtaaaccgcaggaggcgctttt

SEQ ID NO: 286360 - DNA, 703 bp, Cannabis indica
ggcatctcagtcgggtcagatcaaggtcaaggagctcagtttccctcaagtgttatgggccgaggtagaggtcccaggggcagagctagtggtcggggtgatgttaactcgccacaggctgcccaagtcaatcaggaagcccagaatcgggaagtagatttgctgaaatgcaagccagaatagaggagcaagaaaatgagattcagagattgaggcagcagcgtgctcctgcagtgccggtgccagaagttccagtggcacctgcccctgctgctcaggccaaattggtagttgcgacaaatagaatggaacctttgtatgaaaggtttcagaagcaagcacctccggtttttctgggaggtccagatgtgatgaaggccgaacagtggctaacggtgatcaccaaaattctgaattttatgggtgtcaccgggaatgacagagtggtgtgtgccaccttccagttccaggaagacgctcttgtctggtgggacatggtgtctcagatccatgacgtcactaccatgacctgggaaaggttccaggaactcttcaacgccaagtatataacgaggcggtcagaagcgccaagaggaaagagttcgctcacctgacccagcgagagaatatgagcgtgacagagtatactactcagttcgaccggttggcgaggttagcctcggggtatagtgccaaccgactt

SEQ ID NO: 286361 - DNA, 539 bp, Cannabis indica
atcagaaaaatatcactacaaaaaatcttatttttaatcacaacaaaatttgtgactaaaagtaaaaaagttgtaactaattataaatcatcattcttatgttgtgactaaaataggtccatcactaaaagtattagttacaaaaattacaatttgttgtgactcagtataaaaaatcttacttttattattaacatatttatttttttgtaggagccgtacacagtaaatcttgaagactagaagaacagcatataaaaagtttatagttaatttcatgtatttttttagaggagatttatttcatgtaatcatcatactacattattattgatgattatattagtggaatttctaaaatttggtaaattaatttttcaatagtaaaattacatttttatgtgataagaatttgatatattttttttttattgattttgacaaataaaataaaaatatataaaaaaaatgatgcattattagttcttaaacaaataaattttggaaaaaaaatataaatttagatataaaatatatat

SEQ ID NO: 286362 - DNA, 642 bp, Cannabis indica
atcatttttaaacttataatttataaataattaaatatttaacaaaataacaaattttgaatttgaaaatattatggtaagtgtatctataaaaatatctatgttaatttcaaatttattaattatttaatttgtcatataagataattttaatataatattttaaataaaaagacaaagttatcttttaatttaaaatatgttaaatatcaaaatatctaatcttataattaaataatatataaatattaaagaagttaacaaatttttaaatcttaccataattggaaatatttaaaattggaaatatttcaaattggaaatatttaaaattggaaatatttcaaattggaaaaatctaaaattggaaaaatcgaattttgggaaacaatcccataaaaaattggatttttgggaaaaaaaaaaccccaaaaattcgcaatttgtgtgttggctgccaggacaggctgcacgtgcagcccaggaaggctgcacgcagccttgggcgcgcgcggagctggagggaacgccgagtaaatcaacaaaaaacataagcatataaaccaacatgaaaccatccaaatcaacaaaaaacatcgttttaattcatatttcatgaagtaaatcattacaatggctctg

SEQ ID NO: 286363 - DNA, 520 bp, Cannabis indica
attatcattggttgctaaagcagtcaagtctttccagagcatctctctcccatttttatcattgaaagcataaatgatagtagcaaaactactaaaggtatgatccattgtagaaatttttaaatgcattaattgacttgtacatttaataatatctacaatgtatcttaccggattccaagcaatgacaattcttcctccacgatgccacgcaatatttgttgaaaaacaccatccatcaaacacattaagatacaaggtccccaatttgtgaaccttgatccttgtctcaaggagccccacaaaaccaacaccctgattttgaatgaattgcttgatagttctttgcttttgagtgttgttggcccctcggacattccagcaaagaaacttatccatttccaagagagggatctcccccctctcttgtattattctgttttgccccaatctccacttcttgcaaatcctgtttctcaccacctgctgctattagtacactaaaagtgttctgcaattc

SEQ ID NO: 286364 - DNA, 822 bp, Cannabis indica
ataccacatcatcagggaatatgaggaagaggggacgtactggtggagaaagtggatactaaagacaactttgttgatccattcaccaaagttttgactttaactaaattcgaaaagcacagactaaatttaggattaattgaaatatactgattattttatgttagtgcaagtgggagtttactgtgtttgtgccctaaataaaactctatttcaatgtaatcttttctatttaattatcaataaagaaatagatttaatttcattatttgtttaatgtattatttggttcatgtgatcatttatttacttatttgatttataaattcatccaaattattatcacactgatattcttgttcattgtgttgtcaacatagtggaaagtaattatgattgtgtgattaaatgtattcctatgatttatgagtacacaaggtctaacggataggatattctacaatgtagtttacttgcaccttggataagtgctatgtcctttccatggcattgattaaagtaagcttgggttggatgtatggagtatgcatcagaagggactaatattgaacttggattagatataataaacttaccgtaatatctattcaattcaatatcacctagttgatcttagatcaaatgatctcaatcctgagatggttaggttctcgttcaattgtattatttgtgttcttcaatctattcgttaaagtcgaccaatggatcttgtcgtgacatatagattacggacatggtagttcaattgagtgggagcactaatcatagatacagaatctatagcttctatccagacataga

SEQ ID NO: 286365 - DNA, 809 bp, Cannabis indica
aagcttcgccaagtgttagttgaagagctgaaaataccatttgaaaagctgcacattacttcttcttctagtaaaaataattatccatgttctgattgttttgaatgtagaagaagacaaagaaaaaaatagactgaagatatatatattaattaatatatgatgcaaatgcaatgaagtgtccttaccattatcatgttttaccaagtagtctagagaagattaccatactgacatatgaagagaaattctgccagaaaaatacaaagcaattttatgattcttgtttgtacttcttcatgtttatacaatgttctactttttaaatgggaaaatccaaatcagagtgaagtttctttttgctagttttctctactgtcctttttttaaacttggtgatttcactcatgtgtttcctttacttgatggcttgattaacccccaagtctcggagcagatgaatagaggattggttcaaatcccaacagcagtggaaattaaaggggtggtgtggtctatgccatctatcaatgctctaggtcttggtaaattttataagatcattaggaaacagtttgtgatgatgtggtggcaacagtgatacaatttttttgaaacagtagaatttgtcaaggctctgattggctgttcatccgatctaatccgcattttttttggtcaaacaacatccaatctgcactaagtgcggatttcattttttgggtccaatccaatccgcacaatagttcaagtccaatccgcaaaagtgcatattggataggttactttggattggttacttttttaat

SEQ ID NO: 286366 - DNA, 594 bp, Cannabis indica
agcagcaagaaaatttttcctgaaccgacttaactttgatctcccaagccacctggtgagagacagcattgaatcagctttgacatgccatccaagccatcttttaaccatctgcaaaccagcagcagcaaaattgcagtgaaaaaataagtgctctgcactctcatgctgtgtaacacaaaattcacactgctcagttacattcatgcccattttcctcaatctatctttggtgcgaagccttccctgaatagctaaccaggaaataaaagagtgttttggggtgttcaacctcccccatacctgctgagaccacaaaactttcccttgaactggacagagaagggcatacccatgagacacatgatattgttgctgctgagaacaaatctgggaccctgcaatgtctcgaaattgatccttgagagttacaagactcctccaataccaactactctgagaggaagccttataactccaccaatcattttctttgagataaacactattgatccaccgcaaccataggctatcctgcttttgagctattgcccaaatatacttccccattgcagcttggttccattcatggat

SEQ ID NO: 286367 - DNA, 624 bp, Cannabis indica
gtatctagttaatgtggttgatgacaccaagaaaattgaaagaaagccggaggaaacacgggtagttgctgagtttcttgatgtatttccagaggagttacccgggttaccaccacacagagaaatcgaatttgtgatagaattagtgcccggaacagcaccagtttcccgcgcaccatatagaatggcaccatctgaattgaaagaactcaaaatacagttggaagaattgcttaagttagggtttatcagacctagctactctccgtggggcgcaccagttctatttgttaaaaagaaagacggtactatgagaatgtgcatagattaccgagaattgaacaaggtgactataaagaatcggtacccattaccgaggattgacgacttgtttgaccagcttcaagggaaaaaggtgttttctaagattgatcttcgttcaggatatcatcagctaagaatcaaaaatgaagacataccgaagacagccttcagaacgagatacgggcattatgagttcatggtgatgtcatttggacttacaaatgccccagcagcttttatggacctcatgaaccgagtcttcaaggaatatctggatcagtttgtcattgtattcataga

SEQ ID NO: 286368 - DNA, 248 bp, Cannabis indica
gttggtagactcatcaacaaaaagtagctcggtatttaaacatacaagtgaaagctggaaaggactttatcaagtggtcgaagttctcgactccggagcatacaaacttggtaagtatgacgaaaaaatgcaactcattttagtaccacgatactggaatggagaacatttaaggaaatactaccaatgagtactcaggtcgggtagaccacttcaaagtactcaggtcaaatagaccatttcaaagt

SEQ ID NO: 286369 - DNA, 721 bp, Cannabis indica
gtttgggttcgggatcgagactggggtgcggttctaggtccagaccctggttttgtgtccctagtctggctccatgtttggatctaagttcaggttcgggtttgggtctcgagtctaggtttgggttgggatccgggtccggctcccaattcgggtctaggtctgatttggagtccgggtccaagtcgggttacggttctggatctaggttgtaataccctggaattaaggaaatagattagcaaagccctaactagttaatttagtattattgtagaattatattattatataatttattatatgcgaactaattttagaaatgacatgttaagaccccgttggtgagccaggggcattttagtaattttgacccgagaagggtaaaaatgtgaatttaatttatttatgtgcttatgaactatattattatatagtatatctggtgtgtcctttttcaggtatgttctgacaagttggcgcggtatagtcacaaccgggtatttcgggccgaaccgggtttcgggccgaaatacaattttggaatgtttaattggcattttatttttatacaagaaatctgaaatttattatttgagtgtgtgaaatgtgataattatattttttttacccttatatgcttgaaaatgggaatttggccctaagggcaatgtggtaattgtgtattttgggttatgattcattaaaagggaaatattaa

SEQ ID NO: 286370 - DNA, 393 bp, Cannabis indica
gtgaagtcttacagatcacgaaagcctcaaatacttttcttttggaagaatttagatgggagacaatggtgacggttaaagttgattgaaatttttaacggtgagattctctatcaatctaggaaagaaaatttgtaatggatgctttaatttggagaggtctaggacaagattttaccaaagttggatgaagatttaaatagagtggggatcgagttcgtgattggagaacttgttactatcacactatagtctaatgtatcagcgcagggtgactctgagctacaagggtacaaagaaagacttgaaactaggtcaacaaaggactttttcttttaatttcgtctgaagggatttttttttttgatacaaagacacggtttgtgtaccggt

SEQ ID NO: 286371 - DNA, 761 bp, Cannabis indica
caagcgctaaaagaagaagtcaaccgcctcctagcctgcggcttcatacgggagtcattctaccccgattggttagcaaatcccgtactcgtgcccaagcctaacggctcatggcgcacatgcgttgactttacagatttaaataaagcctgtcccaaagacagcttcccacttcctagcattgaccaacttgttgatgccactgcaggtcatgaacttctcaccttcatggacgcttactcgggatataatcaaatcccgatgtacgaaccagatcaggaacatacctcgttcattacagattgaggcatgtattgttataaagtaatgccttttggttggataaacgcaggtgcgacgtatcaaaggcttgtaaatatgatcttcgcagatcttattggggacaccatggaagtatatgttgatgatatgctcgtaaaatctcaacatgcaaaagaccatgtcacccattaacaagcaatgtttgatatattgtgacgatataatatgcggctaaactgtctaaaatgcatctttggagtcggttcagggaaattcctcggattcatggttaatcaacaaggaatagaggcaaaccccacgaagatcaaagcattggtggaaatgccatcaccgactaagccaaaagaagtccaaagcctcataggtaaagtcgccgctctaaaccgctttatatcatgatcctctgataaatgcaaggagttttttcagagtttaaaaggcaataagaagttccaatg

SEQ ID NO: 286372 - DNA, 469 bp, Cannabis indica
tcgcctggcttcttctctccaccgggctccccacacgaagtcccctcccggaggccgcctgggccttagagtatgccttctcctgggccttccggtagagataatcctggtatttcttctctgccgtggcaatgatctcgtcccggaaggtcttctccgcgaccggcgccctcacattgggacagatgacccgggagaggttagagtcctccacggattgatgcggaaggataagtttggccttcctgcagttctccgtagtgaccaaacccccgacgtcaagatcggctcggtcataggaagcaaaggcctgggccctccggaggaaggtctgggtaggggcggtccgctgatatggagggatcctcacccactcagtgaggagctccgggtggtccattgccctaaatccggaggaaaagaaaaagcgatggcgatactccttgacgtgagtctgcctattatacgg

SEQ ID NO: 286373 - DNA, 562 bp, Cannabis indica
aaataaatttgtatttaataaaataaaataccaaaaaaagtttagagttaaataatgaaaaataacttaataaatttataatttgagaatttataaaaatagagaactttagattttatatatttttcattagagaataattttataaattagttgtatttaaaagattattgtgaagggtgtacaaaaactaattattgtgaaagagaaaaattatttgaggactaaaatactattggacaattacttgaggtcctaaaatattattggagaattattttgaatttagttaaaaaaattagtatttaacaaaataaatttatatatatttttgcttaataaaagaatttttgtatttagttaaagaaaataacaaaaaaaaaataatttcatgaaaaaaaagaaagggtataaatacctctaaaataattgattgggagtaaaattaaatagggtataactattaaataatcagattttcttttttttaaaaaaaaaaaaactaaaataaatagagatattttttttgaattggataaataatcagattttaatttaaata

SEQ ID NO: 286374 - DNA, 653 bp, Cannabis indica
taacaaaacagagggtctaattggtaacttttgcaaaatacagagtccaaaatagtatttactcttatttactataatttctcttagaaaaatttaagtctcatcttaatagcatgcccaaaattatttacttgacatataaaatatacttggatgataaagaagtaccttcttaaacctgtatcttatacccaaatactctccaaagcacaatacattcttgatgtcgcccaattagttacactgcggtcgcggtagtaaacgggctatatgtcgtatccacagggaggaaaaatacactcaaaaggacagttagtaattttacgagaataaaataagaaccttgaatgtgatgtgagaatattgagaaaatgattttcaaaaattaaacaagtaattaaaatgagaagtgatcagaaaatgattatggaagacacaagctttgtacatgcaattatattttcctaataaaattgattctttaacctcaactataattctacaccattaattatagttggaaaatgtgtataattaagcccactagaaaaatatgttctctaattaaattaatactacttctaaaaatactatcatatcatataatttaaatcgacaaaataccaccggcagaatgcagtaaaaatcatata

SEQ ID NO: 286375 - DNA, 572 bp, Cannabis indica
gcttggtgtaagaaatctttccctaggggtactcgtagaagaatggaaggttatcaaccattcttatcacaaaaggaggaacgacagtcttctcctccttaccagtgaggacgcccataacaaacaaggccatccccaacttgtagacatcatcagcttctgtgcagctctcaaaaactctgcgcagttggccgaagctgatcgaagcactaccgttgaaatattcctgaatcaaccggtcagagcttccattttgtttgatgtcttcctcagtagggccgggcaacaagtttaacccggtgaccaagccgaactccaccctcccaaatctacatctcttccttcccacatagaaatgcacctcgtccggcttgtcagattttattttgtgaagcatcaactgatgaaaaaatgctccagaaaattgtatgggcgctctctcgaaattttttttgaaaggggattccctcaccctgtccaataggttgaattcttcaaatttagccttaatcttcgggtagtagtaactacccccgcgccatgtgacacggccagtgtaatggtccgacact

SEQ ID NO: 286376 - DNA, 543 bp, Cannabis indica
aaataaatacaaaataattaatgtatgatgatcattaattaaatgcaaattccttaatatgaaattaatggcagatttttcaaaattaatttagacaataaattgcagaaatttggtaatatataattaaatgcacaaattagcacaatttttacatgcctaaataaatcatgtaataaattaccaaatttaaacaaatttccattttcaatttatactatatatatgtattaaacaaaaatggaaaattaactaaatgcaatttattgactaaattaacactaaaatgggaaaataattaatattccaaataaataaaaaaaattataaaaaaattccggaattttttcctttttttttttttaaaaaaaaactcatactgccaaacgacatgtcgtttttgcaaaaggcaaaaacgacacgtcgtttttttacattcttgaagtgtgctgagaaaacataaaaacgacacgtcgtttccctaaggtaaaacgacacgtcgtttaataaatgtaaaggctgcctcagaagacgaaaaacgac

SEQ ID NO: 286377 - DNA, 507 bp, Cannabis indica
cccctcgtgggaacaaaaggtccagtcttctagcatggaaagtgttactagcttgcggacatgtaatgaccgcattttagaatatggattagtaaagacaattagcgttaattattagtattttataattattcataaatttatttaattgtgggtcccattattaaaagtgggcactaaagttataatttcttaatttcaaagattttattaaacttcagaggtattatttgtgttatatatgaattatgctatttttataatttttgatcggcgacgacggaaaatgcgatggatggccatttgagtcacatgggtaagtttagaacattttcttagtggaactaatattggaaatagattgaatactgggtttgagcgaggttatggtttttgaccattttacgcctaaacattaaattgcttaagttaagtagcaagggtattttggtaatttgccatgtgggacatgtggctgggtatttaggtgacacctagcctcttttt

SEQ ID NO: 286378 - DNA, 473 bp, Cannabis indica
tccactaaaataccatctttactcaccacatgccccaagaaactcacctgaggtaaccaaaattcacatttcttaaacttggcatacaacttatgctccctgagacgttgtaataccattcgaagatgtctttcgtgagtctcttctgagtctgaataaattagaatatcatcaataaagacaataacaaaatcatccagaaagtctttgaacactcggttcatcaagtccataaatgctgctggggcatttgttaatccgaaggacattaccaggaattcataatgaccataccgggtccgaaaagctgtcttgggaatatcctcctcccgaatcctcagttggtgataaccagaccgaagatcaatcttggaaaagacagtctttccctgcagctgatcaaataaatcatctattcttggcaaagggtacttattcttcactgtcaacttgtttaactcccggtaatcaat

SEQ ID NO: 286379 - DNA, 327 bp, Cannabis indica
gtagggatgaatgagcaggcccctactaatatagatgaggataatagggttgacaatggatttgaccagtttaatgagtttgatggtacattttacaacaatgatcctatagtagatttgaacgaggatggtgatgcggagttggaagttgatgaagctatagaggtaccttctttaaggttagaactacctccaccatctccaccacgtccaagggagcagaggaaagaccaagaaagaagaacccatcgtagtgaaaatcaccaaacaacaggcaccagtagcagccgaccaggtcctcctcgtaatactgtaccatctaatttt

SEQ ID NO: 286380 - DNA, 576 bp, Cannabis indica
agactcccaagagcgtgtgtactttgctactaggcaaaatacgcactaccggagaccacatcccttgtacaaagatagctcccggagggatccgagcaaaagatgcgagtaccacaacgacattggtcatagcaccaacgaatgcaagaatctcaaggacgagattgaaaacctgatccgattgggccacctctatgagtggatcaagaataggctgcctcacctcaatccgggccaggcgacaggggttgtgccccagggaacaccggggggtgcagcaggagtattggctccagctgctcccgcgggcgatgcccagcacatccccggtctgccgcccagacccaacgggagggtagccatgatctccggaggtcctcatattggaggaactacccgcaaagagctaaagcggtatgctggggccgtaaaacacaatgaggtttgggaggtcactcaactcccagctcaaaggccccggctgatggatcaacccatcacgttcacggaagaagatgccaagacggtgcgcttccctcaccatgacccgttggtcatagagacccccatcgctaa

SEQ ID NO: 286381 - DNA, 562 bp, Cannabis indica
aataaaacttatattttggctctaaaatatacaccatattgtagagctcgtcgcaagcttcgaaacggtatatagaacgtccaaaatagacacccgagtgaaaagttatgataaaaatacgatttctgatctcctatgaatttctaaaaactatgaaacacgaaaatctcaattttcgcactcaccgaaacactaccaaaacttatccaaatcactccaaacttcacagggcacatatataccatgaatactatcattcttatgtaacagaagttaaaatcgagcccttaaatggaaaacgccattaacgctcggactaagctttaaaaagttccaaactcgatttctaacccaaaactacttcaatttcaacaagaaaacatcggaactagtcccatgactacccgagaacaatcctataaggtcagaaccttcataactattctaattcacaaaacccctatacgaaaccaattgttattaaacttaaaacgaaattaaaccttaccttaagcttctccgctctgagaattcgctatcctgctactaccggagcttagat

SEQ ID NO: 286382 - DNA, 816 bp, Cannabis indica
tactacaagtttgctaacttataagaactgtggggaggtgctgccgaaatttttacaaaaatgaaataatcttaagagcgtagattgcactatatgtatattacaaacctgaatgggataggttctttacccttttagtaatggagtgagaaggtggattaggacacttgcacatttttttgtttgtttttaaattgtttttgttaaatacttcgtagtggaagatgcctgccaaccgaagttggatgaaggcgcaccggcgctctgcagagtttcgaagtggcgttgacgagttcgttgcggtagcaacgaaccacgtgaacgctgacggattagctcgatgcccatgcatgcggtgtttgaatgtgaattttcacacacctgcaactataagggttcatttatttctcagcgggatccaaccttcgtacaacccctggtatttccacggggagactttctctcagcccgcagttgaacttcctgaaaatgacgaagaggaaatggcagatgtgttggcggacatgttaagaggggacccgtcggggtttgacgaatctgctaacactactgattctttcaatgaaccccctatcaacgacaacaacaagtttgatgacttgtttaaggagatggaggctgagttatatccaggttgcaaaaaatcagccctcaatgcactggtaaagcttatgcactgcaaggttttgaataggtggagcaaccactctttcgatatgttgctgtccatcttgattgatctatttgtaagtgggtttgacactaacgggagtagaatggatagtgacggtgtta

SEQ ID NO: 286383 - DNA, 1037 bp, Cannabis indica
ttccctctctctcttccctttctcttttccctgtcgaatgtttatttctcggtgggcggtggtgaaaaaccggagcacaccccaatcactcaagaatcttacaccattataatggataagttgtgttttaagcattttgttagactttatgtagtttgctttcgttatatgtgtcgtatttgttgaaactggtgtttttttggtttgaaatggtagagatcttgtagatctagttttatgtcgaaatctgagttttccagatgttatcgacagtttattgatagaatattgatgctatgtcgatattctgttaagaaaggtcagggatgaccattatcgacatgttatcgacaatttgtcgatatcatgtcgattaaaatgcaaattaacatacataagttatttgagaatttgtcgacacaatatcgacatgatgtcgacattcaatcgatatcacacttagcaatcacagaaagcaattacatcacattgtcgccaacatatcgacatactgtcgacatgctgtcgatattccaagtatgatcacgcctatttagcaaacaaaattgtcgacacaatgtcgacatcatgtcgacatgaggtcgatattatcacacagaaagcaattaaatcacattgtcgacaaaatatcgacataccgtcgacaaattatcgacattttaggtcaaattttttttattctcattgtgtcgacatcctatcgatacacctacgacatcctatcgatatacattaacaacacagacaattttattggtcaaactactttcaattttgaccgaatgtcaacaaattctcaaataacttatgtatgttaatttgatttttaatcgtacatgatatcgacaaactatcgacaacatgtcgataatggtcatccctgacctttccttagtcaggatatcgacatagcatcgatattctatcgataaactgtcaatacatctagaaaacccagactttctaaacagaaaaaccagatactgcaagatctctaccattctaagccaaaaaat

SEQ ID NO: 286384 - DNA, 210 bp, Cannabis indica
catgccagtctaaattcagtgaactgagaagtcatgggaatcaaacttttgaatatataatcatgattatattccactttgctgacgacactataatcatgaacaaatacatatgttttggtcttaatagaatttatacatgaagtataatcatgaaataaatcatgtgaaccgtgcaacataaaatgcaatttctgatctttattaatt

SEQ ID NO: 286385 - DNA, 610 bp, Cannabis indica
acgctctatatgtaccacgatatagataagttataattatccattattacaatcctaatagtcaaggatcctctatagatgatctatactgaatagggacaaattcaccgttctacccttcaatgtattttatccttaaaacacttagctacctataaatgatatttcggtaaactaatatatttactgaaatgagatctcaatcatttatatctattcatcaaagctcgaagataatcatcatttcacttcttaaaacttatagaagctatagattccatttatgtttagcgctcccactcaattgtactatcatgttcctaaaatgtatgtatcacccagaccaaaaggtaggcttaactaaccaatcaaagaacacaaataacactcttgagatcgaacctaaccatgtcaggattaagatccatagacctaagatcaactattgatattgacttagaaagatatcacggtaagtttaggatatcttatctaagatcaatatcggtcccttgcaatgtatactccatacatccgatactggtaaactttaccaatatcctggaaaggacataacacttgtccaaggtgtaagtatacctatcgctga

SEQ ID NO: 286386 - DNA, 511 bp, Cannabis indica
ggtctgggatgtattctgatgcaagccaacagagttatagcttaagcttttcgtcaactgaaagattatgggcagcgctattcaactcatgagttaggttatgctgtggtggttttacttttaagatatggcgacatcatctttacggtaaaagtgtgagattttatatcaccccgggaaggccaatgttgtgactgctactttgagtagaaaagaattgcaggcaagttcgtactgctgttctgttagcccttaacgagcctttgaaatggttaacgcagggattgaattcgtagttggaaagttacacagtttaacacttcaatctgatcgattagaaagaatcagaaaagcgcaattggaatatcctgagctagttgaggttcgagacgatgtaatggccggtcggcctaaagactttttagtctcgaatagtggaatgttgttatttaaagctcgagtttgtgttcctaatgttgatgagcttaagaaagagatacttgctgaagct

SEQ ID NO: 286387 - DNA, 738 bp, Cannabis indica
aatttggttgacaaagcattgaaccaacttttctttataataaaacggtaatgacacacacacctttgctaggttcacccaagacctcatgtctcgctttgcactgttaatggccttgtgcacattccattcattgaccttgttgagaaaatatactccctatttctcatttagggcggcaccaccctcaggtcaatataggtagaattcttacagtatttgttaccaaaatacttgttttccaaactgatctattaaagacttttaaaagtctagccctcacatttgttcacacattgatttgttcttacctattgaacctaacactagtaaagttactagtattaagataggttaccctcaattgtgaaccggtttagggagttttagtcccatccctttagaagtcttttccactaaatctctagttagtggcttcgtaaacggatccgccaagttttcacttgatctcacataggatattgagatgactcctctttgaatcaactcacttacatatccatgtcttagactaatatgtctagacttcccattatatactccactatatgctctagccaatgttgcttggctatcacaatgtatcgatattgtaggtacatcctctttaataattggaatctcaattaagagatctcttaaccattcggcctctttcccagtggcagctagagctataaactccgcttccattgtggaatgagaaatgcaagtttg

SEQ ID NO: 286388 - DNA, 727 bp, Cannabis indica
tgttcacttcaacatgcagcatttcttctgagccaaatgctagcgagaaaggagtgtgtcccgtcgctgtcttttcagtagttctatgggcccaaagtacttgaggttgctcgtcaacccatctgcctttggcggcgtctatcttctctttgatagtatcctttaaggttttatttatagcttccacttgtccatttgcctgtggcctggatactgacgagaagcttttgataattttgttcctctcgcagaattcagtgaacaagtcgccatcaaatttggttccattatcagatactatcttcatgggaattccaaacccacagataatgttcttaacaacaaagttaaggactttcttacaggttatgaaaacaaggggctcggccttcgtccatttagtgaagaagtcgacggctactactgcatacttagctcctcctcgcccagtgggtaatgccccaattaagtcaattccccatatagaaaatgggtagaagaggtcatcattcttatttttgttggcggcacgtgaggtatatgtgaaaacctctgacacttatcacatttcttgacaaactcatgggtatccttattgatcgttggccagtaatattcttgtctaatgatatttttagacagaatttgccaacccgcatgatccccacaaaagccttcatgaatctctttgatgatttcattcacttctatagggagaacacaccga

SEQ ID NO: 286389 - DNA, 635 bp, Cannabis indica
tgtccttattgcctatgagtgccttcaatataaaagcaaaaagcggaaggcgaagttacgtagcaatgaagttggatatgagtaaagcctatgacagagtagaatggaagtttatcgagaaaatgatgttaaaaatgggtttcaagaccgaatgggtgaatattgtcttgaaatgtgtttcatctgttcgttattcattccaaatcaatgactctattcatggtgaagtggtgccaacgaggggtttaagacaaggtgatccactttctccctatcttttcttaatatgtgcggagggactctcctcgctaataaagcaggcagaatcaaagaaagaaatttttgggctgaaagttgcaagagaggctccgagcataagccatctattctttgccgatgatagtctactcttcttagatgcaaacgagggttctttgcatacaattcaacaaatttttgcattatattcgcgttgctcaggacaggtaatgattttgatttaacacgttatatgatttttgtaccaaagtaggcgataatttattttgtagtaacctaagtgttgttaatctattcaggttataaattttaacaaatctattctgtatttttcatcaaatactcctgaggaaaca

SEQ ID NO: 286390 - DNA, 739 bp, Cannabis indica
tgtaaaaaaattagagaaaaatattttgctgatgagggcatttacttttaattataatataagataaccaaagaagcttggtgggttgttgtgctgttggaatgttaatgatttaaagcttgttatctgcaacccgtgtctgcaaataatgaacatctagctcaataatgtacaagaataattagtaattttccactaattttgatctttaaaatgtatagtttattaaaaaatttccttcaactattacactaatacacttacatatttttataaattagcattttttactctttaaacttcaacaactattaaatcgtaactcttaaaataaaaataagaaagatttaatattttgttttaataaattttaaaaaattagtttagatttaaaaaaaaattatttttaataattaagaaaattaaaaaaattataattttaatggtaattaagcgatttaaaaaatatatttagttttttattaaaaaaatccatttagatataaaaaatatataaaaaattaatttttttaaatttaaatttcaccagaactagtttgagtctattttttttctccaaaaatctaaatttattcaagtaaacataacatatttttagtttaattctaactttttttttcaaaatatttttatatttttattgaatttttaattatttttctttatttttaagatatgagtttataaatataaataaatttaattttttcttcaaaaa

SEQ ID NO: 286391 - DNA, 561 bp, Cannabis indica
gtgagagcaacacgtaggtctacgtcacgtagacataaatagacgtgtgagagcaacacataggtctacgccacgtagacataaataggcatgtgagcacaacatgcaggtctgtgtcacacagacagatttgaatggcattgtggtttaagagcatgctgagcatattattgttatgatttatactatcttgctgggcttggctcacgggtgctctacagtgcaggaaagggtaagactttagctgatcagccatgagttcaggagctgggcgaagaatgtacatgtcctggccatactagaccaagcgggttgggtctactagtgatgtattttgatactctattttgccgcttaggtcggctgaaagaaagagacttgtaataatattttgtaaatgtttttgggatcccaatttctgtaacttttagattataaaatttaaattattaaaagttttattttccttccgtttattacaaaagtttaaattctacactatttttattagtaatcccgtttaggggattagggtttcataagtattttgggtagcgtgcc

SEQ ID NO: 286392 - DNA, 825 bp, Cannabis indica
gtcgagggtgtgtatatctggacagatatgctaaagttggtagaaaatgaagagaagttcttcgagtatccttggggtcttctttcttatcagaagttgttgtcttccacaactaagaatatgcaacaacttaggcaaaactacatggataagaacgataagaccaagaagaaacacaagaaggagaaaaaggttactcaacctgaagcgaagtacaacgtgtacggatatgctcctgcgctgcaatattgggcatttgaggccatgcaagttttggggaagaagtatggccagtgcaaagggactcgattccctcgaatgttgaactggagcacccccgacacagtcacgaaacatgatgtgaagcaagctgatgtggctgcactctttgagaaaagggtatgtgaatctttctctattttagcgcaattattttttgctttaagtgtaatctgtgttatatgcgatatttgatgcgacattgtgcgatatttgtgcgatttactttacagtgcattataaatgttcagtgattaataagttttttggcgactttatgcgatcattgagcgattttgtgcgattttacttgcactccttataaatttttacttgtatttgttttatttgtttagcgactttatgcgattcttgtgcgattgttgtgcgatttgttggaagtctcatgttttccacttgtatttttttgtatatttttttgttgcgactgtatgcgattactgtgcgattttgtgcgattttcgatgacagtagcaaatatactttttctatgtatatgtaatagaatttttggcgatatagtgc

SEQ ID NO: 286393 - DNA, 874 bp, Cannabis indica
gtaaaatttattaacattaaatgtgtaaccgtaaaacatgaaacgcatgcactgtgtgtttgtcgattgaatgtcgatactatgtcgattgtttgtcgacataggaatggatttattaccattgtacacgcgtctgtcatgcaaattcctttgggagaatatgtcgattgaatgtcgatggtatgtcgatattatgtcgatgacgagcatggttggtgttgttgtcgactgtatgtcgatattatgtcgacacaatgtcgacaatcagtgccctaatttctggtgttgtgcttatcgacattatgtctattgatatcgatgggatgtcgattttttttttggtgttttttcctttactcaccttgtttttttggtttgcaattgcaggagacaaagtgttccttgttgtatcgtacgatggtgtttggttatgtgagaattataattggatctacaaagcaaatagcagcttgacgttgacagttacaaccgagacaaccctacaagaactgcgacaaattttatatgaagagttggaagttgatccggtagcgtatgatttaaagttggagatttgttccttgtacatgaagggaaaaatggttgcgccagaggttattaagagagaacgccaactgagaacgtttttagagatgagggcaacaatgtcaaatacagagtttatgccattattcgtgaccaaggtgagaaaagttgggaattcggagcctacgccgcctactaatcctctccctcggagtgtggtagggtcttgcgttcccgaaacagatgttgggattggtgtgaatgaggaggttccggccaatttagaggttccgaccaattttgatgttccgaccaatgtagggcaaga

SEQ ID NO: 286394 - DNA, 589 bp, Cannabis indica
tatccggatccctatctaggtccaagtctgtgtttgggatcagtcccaaatttatgtccaagtccgggtctctgttccggtctgggtacacgaccgtgtctgggcccgagttctagtctcagtttgggtctgaggctaggtctgtgttcgggtcttggtctgggtctgggtcctggtcacggtcctagtcttgttctaggatcctcgttcggcgattcttgttcaagttctaatttttggtcccaagtcaaggtctaggttcgggttgtgttctttgtctgggttctggtcctagtctgagtcctagatctagacaccgattactggtccaggtcccatcactatcacgggtctcggtctggttctggttcaggtcctaggtcccatttctgagtttgggttcgggatcgagactgcggtgcgattctaggtcccgaccatggttctttgtccctagcaaggttccatgttttggaactgggttcaagtccgggtgtgggttcaagtccacttttgggtttgggattgggttcaggtccgggtgtgggttcgggtccttgtcagggttcgggtccagggctgggtccca

SEQ ID NO: 286395 - DNA, 660 bp, Cannabis indica
atcaaggaaagatgctttacatgatgttaccaactcgaggttctattcataattaatgtacattcatatataaatacaaaatttatataaaagctagtatatgttaaccaaaccaaacatacaattttgatttatatgctcagatagttaaaaaaatcatacattatacttatatatttatatactaagttaatattatttttttagtttttattttaattatatatatttgtataattaattttttatatatatattattcaataaacattatttctattagaaaatatttaatatatttgtataaaaaaaatataatataatatttaaaatttatggtaaattataattttagtttaaccacaattctttttatttttattttttatttttttagtaaatgcaacattgtgacaacaatgattttttaaaattataaacgcttttttgttcgattttattgtttgaaaagacaataaataaaaggatatatttttttaagttatatgaattgaataaaaaaaatgataatagaaagatatatattagatagtggaaattacactcattatgggttttatgttttttttttccccataaatatgacatatttaagttgtgtcctttttttttcttttttttttttatttttaatttagt

SEQ ID NO: 286396 - DNA, 586 bp, Cannabis indica
ttttaggatctttacatgtcgcgggctgagtggtgagagtattaattgccattccaaatggtgggtgtgtcacagtattctaatggctatatatgcgattatatgtcccttgagatactgagatacacccagccatttgttgacgtgcgttaatactcgaatgatcgtactctttggttgataggtagtctcgaaacggtgggagtctcccagtaacttcagggttatgctcgaaaatgcatacctcttgagtcactgggatacgcccagccgtttctggaggtataccgcacaaccgaggatgcgtgaattactcgcccaaagatagttatatttcttctcgcatgttgataggagggtcagttttcgcatagagcctgacctttctgtcgaatgcgacttttataatctactgcgggtgagatcacttacctttattttttcacacatccatcacgctgaaaagatcttctatctttcagatgagcgatctatcggatagccagcagctcggctcaggaggtcgcgcctttgacggggagtcggaccaagagagagacagttttctccctacggacatctccga

SEQ ID NO: 286397 - DNA, 881 bp, Cannabis indica
cctctatttatagtagttttttactcccatatgaacatcaatgaccatcataaggcccttggatgttaccaattataaattgggcatttttagtattaaaagagtgattttgaggagttttggaatggtataagactcacaaacgttcaaaaacgtgtgcaagtatatgctagaaaaaaaaagtaactagttactagttactattttttaagctttggcccattcttctaccaataaatgaataaatcaagtctccaacaactatatttttaatagctatcattcattcacattcataaataattagtaacatcttttactaatttaagagtgaaaaagagatgagagttacatattcaagtgatcatcaatttaaaggatttgcaactcctattttgtgatcattctacatacattttgtaactccataatgtatgttacaatttgacaaaattaatactttgtcacacttaattatttacaacttaattatttaatctaaatattatattatataaaataatataacattcccccactagattaaataatatctcatttgtagcaaataattttgtaacacaacattttatttaatcaatcaaacattatattatggagtaatataatattcccccacttgattaaataacttcactctaatagaaaccattgcatttgtgcatagtgtaaaatgtctttcgacttgaattttaccttagtgtaattaccacaaagtttatcgaaattttggttgccgtagcattgaaccactatttcttgataacaaaccggtgataacacacacacatttgctatgttcactcaagaaccttatggattgcttttgcaccgttaatggccatgtgcacaaatccaat

SEQ ID NO: 286398 - DNA, 565 bp, Cannabis indica
ggaacagatacattttgggaacatgatagtataattgagtgggagagctaatcatagatatggaatctatagcttctttctggacatagaagtgaaatgatgatttccttcaagcttggcttaatatagataaattgacaagctttatttttcactcattatattattttactaaaatatcatttctgggaagctaagtgttttaaagatattgaggggtgaaacggtaaatttgtccgtactcgatgtaaataatctatagaggatctttgattattgggatgagaacaatggataatttcatagcgtgtctatatcgtggaacatatagagctctctatataatttagagtgcaattctaaatatatagttatgcaaggaggaattaataagttaaaggatttacttggtaaattctagatctactttttagaagttcgattatataggcccatggtccccacactagttgaaacaatactgcttgtaagactcagttaattaattttaatcaatcaattataattctaaaattagactatgtcttatttatgaattttcact

SEQ ID NO: 286399 - DNA, 676 bp, Cannabis indica
actcaatatatacatatacaatatataaaatactctcctacatatcacatttctcattcacaatatatatacacacacaatacatattcaatacaacacaaaatacatacatatatactctcctatatcacatttttcattcacaatatatatacacacaatacatttctcattcacaatatatacacacaatacatattcaatacaacacaatacatatttaataatatagaaaaaccctaaaaaaatttataaaataaaaaataaagcaatgtacattactaaaattagtagaaattagatttataccttaatagacgttgagatacaatgttttctccactaaaaacggtggccggaggtataaccaccacaaccactacctctaccttcggtttaccctaaaaaatgaggaaaaatgtgatcttttcaggtatatagttttaggtatgaaaaatagaagatttagaaacaaaaatgagctaaaatggtgaaaaaaatggtgaaatgggggtgatttttcgtggtggttggcggagagggtttggggtttctctggtttggggatttctgggttggctggtcgaatgaggaagacgatgggctgggctagggttataaacccttttggcgtcggttttttggggtggaccctatggcgtcagttatttccaaa

SEQ ID NO: 286400 - DNA, 511 bp, Cannabis indica
actagaaccgaactaggactaggaccaggacagggacctaaaccgaaacccgaacccagatcaaaacccagacaaagacctaaacccgaacaagaactcagacccaaacatggaactatactagtgacacagaacaagggtcgggacctagaacaacacctcagcctcgatcccaaacccaaactcagaaatgggacctgggaactgaactagaactagaccgagacccttgacagtgatctagatcttaacttgggattcaggtaacagggtctggaacagaccagtagtcggtgtctagatctaggactcagactaggaccagaacctagacgaagaaccaaacccgaacacagacctcgacctgggaccaaaaattagaacatgaagaagaatcgccaaaccaagaccctagaaaaagactaggaacgtgaccaggacccggacccggaccaagacctaaaccgaacacagacctagcctcagcccaaactgagactggaactcgagc

SEQ ID NO: 286401 - DNA, 695 bp, Cannabis indica
tcatgtccttgaatttttaaggttatttaaaataactcttgaactattgagattgttggatttaaggaattttgtctaatttcattcaattttactatttcaatgattgtttatgtactaaaccatattccccaaactttaatatctaccaaatcatgcccctcgaactttaatatgtactaaattatgacccttgaactttcatccatgttaaatttttttattaaaattaaaaaaatgttcttaaatctaacaatctcaataatttatgaggtatttttaacgaccttaaaagtataagggtaataataataaaaataataataaattatgaggtgtagagcttagctttgtggtcccaaagggtgcctatctattctttttcttctcaccctacttatttgtttggcccacttgtaattataaaagttacatattttgggttttgtgccggcccaattatataaattttcatcacatgtgcacaatcagtcatactcatatacttttggtaaaaaacaaaattagggtggatatttttagaagataaaaatatgtagatatatttaaaaaaaaaaaaaaacaaaaaaattactatagcacacctaaattataaaaattattgtaaatattttattctatttatactatgtttatttttaaataatttattgatatactattacttacttggc

SEQ ID NO: 286402 - DNA, 558 bp, Cannabis indica
tagcgacataatagcgacaagtttagcgatatgattagcagtaacctaggattatgtttcacgataaatagcgacatactgcgacatctttaacgacatacttctaacaaatttgttgacaattttgcagatggcacctgaacttaaacttccaatttcctcgcatttcacgggacgtcttacctatcggggtacagataggttcagatatatcaaggccaagtttactgagatggatttggttgacacagtgaaggctagtcctttcggacacttttgggaagctggagagttgactttctccggcgcgttggtccacaacctcctcttaaaaaaaatgaaagtggacacagaaaaggaggatgaggtttggtttcatgtagggagaaatgacatgagattcggacggatagagtttggactcattactggcttacctatgggtagtgcccctacagacgaggaaatacacgccaagtccaacgaccatctagttcggacttattttgaagggaagagttctgttcagttggactcccttatgctccaacttgagag

SEQ ID NO: 286403 - DNA, 829 bp, Cannabis indica
gattctttctattttgtagtccgtgaactcgtggagtagttcccggactattgttacgtacgcggccattcgctcgccgcgtgtttggtattctccggatatctggtttacgaccagttgggaatcactatagacttccactcttttggctcctacggcttttgctaatttcagtcctgctattagggcttcatattcggcctcattgtttgaagctgcgaagtcgaaccgtagggccgcctggagtcgcagtccggttggtgatatcattgccactccggctccggaaccattttcattggaggctccgtctacaaatactctccatgtggggattggcggtaccggcatattcgcggtagcctcggcttcgttgcattcagtaatgaagtccgccaaggcttggccttttatagaaattcggggtattagtgcaagtcgaattgacttagctccattgcccacttgaggagccttccggatgcttcaggtttttggaggacttgccggagcgggtggttggtcagtaccttgatcggatgtgcttggaagtatggcctcaatttccttgacgccatcaggaggcaaaaaaccagcttttcaatgactgggtatcttgcttcggctcctatcatgcgcttactgacgtagtacacaggatgctgagttttctcttcttcccggactagggcagcgctgaccgcgtgttcggagacagccaaataaagaaataggtcttctccgagaatgggttttgataagataggaggcttggccatgtgctcttttagttttttgaatgcctcctcgcactcgtccgaccattcaa

SEQ ID NO: 286404 - DNA, 568 bp, Cannabis indica
atgttcattgaagcacaattacacatattaacttaaagaaaagagatgaaaatagagaagagaagaaaagaagaatgctgaaaaccctgagcagtatgtctccaatattgcagttgatctctccactctttatctgaattctctctttttttctctctcaaattgcttgactgaaatcaactcctcttcactctttatataggcattcagggcctaaaaagatggaaaaacgcacatgttaaatgcctattcgaactaggaaacccccaacagccacgtgagagaaaaatacgatttttgtgctgttaggggggggggcgggccgcggcatgctaaagccatgccgcggcccgtgttggaggtgatttttctgtttcattgactgatagtattttatccataactctctcgatattgctcagaattagacgattcaagatgttcctgaaagataaaagagagatctagaacttttatgttttgactttttccaaaatataatcagaagatagtcgaattcaggcttgaagttgcatctttattttcttgcacaattttctctatttca

SEQ ID NO: 286405 - DNA, 968 bp, Cannabis indica
gttaataccaaaattaaaaaaaaataaaaaataaaaagacacaaataataatgtgtatggaagagaggtcaacatcaaattttaattatacattttaaaataaaataaccaaaaaaataaagaaaataaaatactgaatgataaaataggcataaaataataatatacataattgtatactgtacagagtatactatatataaaaaatagaagtaaaaaaataaattttttacgtaaataaaataaataaatttaacaaaaacaatatgtggtgcaaaaattttgttttttttttttaaatttttcaattatatacattaatgtgataataattacataaaaaactaacatcaaattaatcatatgtatatatgttaagcctaaagtttcagcttcattttttttttgtcacaattttctctattttaaatatcatctttttgtgagatatttatatcttttttctctcatattttttctctgatattttctaatcttcttcaattttaaatttgaacaaataaaagataacaagcgtaaaaatgctccaaacacgattaaaactcaattaaaaatatactaaatttactctaaaattaatactaaaaataacctaacacataacaaaacatgacactctcttctggcatctcaccatccatgaaaattacacaactaaattaggtaagcacttggcccaaacaattgcaaactcctcttaaccaacgtcctctaatacaagcaccctcactaactggtggaaatctctctagggatttcatgtcccttcaaagataaaacactttacatacaaactttattttgatactctccccattgttgttaacctccaccaccataaaattactccttcccatatctgctctcgttgcggtactagtcttgaaaccatacagcatgctatgtttgaatgtaagggtgttaagaaggtctggtcaggtatgctc

SEQ ID NO: 286406 - DNA, 205 bp, Cannabis indica
aaattgtgagttgtacggacactatgctgtgcatacatgtccgcgcgctcactagtagcactgccgagaaaccttggcgcaagggggaatctgcatgatttccgcgcgcacagggcgtgattcatacagcaagctcggtcgatgcctgtctgaatgcgtgctgtccgcgcgcgtgggtgagtgcagcatccctgattttttttcg

SEQ ID NO: 286407 - DNA, 583 bp, Cannabis indica
aataacttgggaagataaaataggtatttgtgtgtaaaatgtgggagagaaaataagaattttggcttttttaatggggaatttggctgagagaaaagccaattaacaactcagttttttcttcttttttttcttctgcaggtgccacatggcgtgttgctgttggtggggcgctgacgggctggggaccagagagacgcgtggcaggccgcggttcgttgggcgctgacgagctggacccgcgtggaatgaaggctggcaggaggaactctgacgcccacttgctgctgtcttcgggtggagcacacgcacacatgggggccattggatcagatgacggacggcccagatgggctgttgactttgaccgagagtgggatttgcataaaggctcatcagattttctttttgaaattgtaatttagccccatttcttcaatatttctccaatttaatcccaatcttttccttctaaacacacctaaaaatacataaaattaattagaaaactaaaataaaattaaaattaaataccacataacatattataataaaataattataaaaacacacaaaaacatat

SEQ ID NO: 286408 - DNA, 631 bp, Cannabis indica
gatgtattttctgaaaaggatttcaagccttcttattaggttctagctatagaaattattggatccagcgtcagcgtgtgatatgagttcaaataacaaagatatctaggatttaattaatctttgttttacggtttgaagagctagaataattaatattaattcaatcaacacgtgctatatattattagtgtatgtcagtacgtacgtggccacagaaaaatattcataggtacttctcaaaatataacttaatttataataacccacgaaacttagtgcttgtcttatgtgggatgccatgcatgaataatgttgcaatttactataagataatagtaattataacaattacaatgggtataaaaaaatgtactcgatctaattattcccatgtccactgtaataattataatatagattttcttttaagtttttaagaaattcgatttaaatctaaatgtaaacaatttgctttcacacgtacggaaacaaaatcagtactgcaaaacaggaattttcgttagtcaaataagtttttctcgaaaatcaacaggaaaagtttagaattaattgccatgagtttttttttttttttttatttttttttttttttattttttttagtaac

SEQ ID NO: 286409 - DNA, 748 bp, Cannabis indica
actcagtttcttccccaaactctaaaattcataaatccaaacaaatacatttcaagtttttcgcagattgtgaatttaaagttaaaaaaataaagaacaaacatgggtattgggttcgacgtatgtgtaggtttttccagtcgtgggttcgcgggtctcctcggtcgccgtgcattcgactggtcgtctgggtcgtctgggtcgtgcgggtggctgtgggttcgaggggtcgtctaggttagactgcgtatggccgtgggttcaacgtctgggttcgtgggtggcgccgattggttggggtgttcgtttgggtggccgtgggttcgaagggtggtctgggttcgtgggttttggtggagctttgctcctgcgtccgtccgttcgtgggtttgggtgtgggttgtcgtgtgggttcgtgagtttgggagagggaaagaagagagagaatgtagttagagggaatgtgggaagtttgaaatgagaagggtatttttggaagaaaagtgaaagattggtatattttttctatgtgttataattaggtataattaaacaccatgttcccttttttagcatggaatgtcaaatttctcatttatttttaccctatcttttcactacttttccattcaaacaaacatttattttatccaatactcttacacatactctatttatcccttctcttcccaacactaattaaattaatcaatttgtttaggggttttttcattaatgtacaacaaaa

SEQ ID NO: 286410 - DNA, 660 bp, Cannabis indica
tcacgcctctgttgttattattttttgtagaaggccatacgttcttcgtataatggttgcttagggcataggacagacttttttctttctgttttctttaacgcgtaaggccgtcttctgtgaatttattgcacccgactcttgtccagggaatccttccagggtttcctgtatgacacgtgtccggagggggcctctttccagcggttaggggacccccattccctttttcttaatttagggtttggtatggggcctaactgctggaatcttactctttttacagaatcgaaaaatgtctgcttctggctcaaagtcatcgaagaaaagtggtaagcgcctggctacccttgaggaggtctccctgggacccgttgcccaggaggggtacaagtctcgggcgaccggatgggaagcggccgagcttcactccactctgacctgtccccatcagttggagaacattgtggaggtagctggaatcaagccttccacatcagggacctaccatcggccacctcgcgacgcggagacgcccaaccacaactacggcggcttcggggcctggagccagacgcatctgatggctggggccatgcttcctcttcaagattattttgttaattttttagtttttgtcggccttgcgccataccagct

SEQ ID NO: 286411 - DNA, 572 bp, Cannabis indica
ttagtcacaaatagtggcaacaagttgtccacactcatttttgccttcatgctcaagaacactcgtagttgactatctttcactaaaacctcaggtggaaacttagtgcctttcatgtacatgtaaagaacttctaacttcaattcatacaccaaggggtccacctccaactcctcatgcaaaacttcacgcaactttttcagtgtacagtcaatgtccaatatcaatgtcttactttttgaggaatcaaatacccagttgaaaccctccaaagtccaaacgccatcatacagtacaggcacaaatacagatgaatctgtcccaaagaaatacaaacaaacttacatttaaaaatcaccatactatatcgcacacaatatcgcacaatatcgcacaatatcgccttaagctaacataatataaaccagttatgatgtcgcacaataatcgcacaacaaaggaaagaaatcgcataaagtcgcacaatatcacatagtcaacaaaatcgcataacgatgcacaaatatcgcacacaaatcgccaaacattattatcgcacataaaatcgcatt

SEQ ID NO: 286412 - DNA, 529 bp, Cannabis indica
aacaaaaatcataggcatatattgtactgagaatcaaaataaaaataaacacttaattaaatacactaggtttcatcgtcctccttaataataagggaacttagaaacccataagaaaattaactaacaaaagcgataaactaacactgaccgcctcgagcgttttctctggatttttctgtctgaaactctgaaactgtaactgaattctaaaaacctaagcttctatttatagaagggtaaaaggactaatacgcaattaaactttttacaaattgcatgtgggtaaaaatgtaaatacaaaaaattataaccggagtgccacgtgtcaagctcggattggtggctttggtgtgcaacttgacacgtggcgagaggagagaaagccacgtggaaagtggcttttggctgatggggctcggaccaaacgaaggccagccgcgtggctggcgagtggacgaaacgcatggcccataggggccggtgcatgccacacgcgcgtggaggaggcagaggggacaaggcacct

SEQ ID NO: 286413 - DNA, 517 bp, Cannabis indica
gttcctcgcaggcagcaaactcaaattttcatatcttgcacaaatcaaccccaaatcacatgaaaccttccagacctgttctataccacccctagaacatttctaaagcaacaaaaccacccagattgcacaccaatcaaaaacaccatgagagctcaagctttgagttctaaactcaaacttgagcaaacctagctagcatgcaatcaaatccatctaaacttacataaacaagcttagaataacctctggaaacaataacaaacttccacaacatcacagcaacaaaacataaccatttctttcaaaaatcacatattttacatagaaaaaccaaagctttaaacaaggtagcaagcatgcattaaaacctagataatccattcattttaaacctaattaagcttctgaaaacaacataaaaacacagcaacaaacagccatccaaaactaacatgcaacctaccattttcatcttaaaaacttcaagaacattaagaaaggatgaagaagactt

SEQ ID NO: 286414 - DNA, 545 bp, Cannabis indica
aaaaaaaaagaagaaaggggcaattggccattgcaaagccatgagctggctcaattaccaaaaagacaaaattaattaaatttcatatagataaatagcacaattatttcaaaattagtaatttagcatttactaaaacgccaaagcaaatttaaatcttagtggccgccgcataacaatgagcgaaaattatggccttaggtttgcgtaaggatcttttgaatatcggtttataatttttatgttgtacttacattctagtcatttacaactaagttttgtcaaaaacatttatttaaaaattttaagttttgatactttgctcacgctcacggatcatgttaatatgaattgttttttctccaaaattgtattacgtgttacctttatcctttcaattgtccctacttttaacttgctctattttattaaaatcatacacttcccccatatcattttaagatttcacaccattttaaaaatcaataaatgtatttcttaaataaaaattattattgagttagttttacatttactaatgtgtg

SEQ ID NO: 286415 - DNA, 373 bp, Cannabis indica
gatctatattgctgagcttccaataagttgaaccgaatttaccaagtaaatccctaacttattaattccttgttgaatccactcttagaacatggaattgcactctaagacttattttgccccatttatgttttgtcctttagtggacttagaaattggaaatttaaatgttatttgatggttatgttggctgaaataaaaggtttatgttgcatttattttcattttccaaacttagaaaaaattagaaaattctcaagctctttctctctctctttttcggccaagcttggggggctgctagggctgtgattccttgctaaattcaagtgtttttctcaagttcatagtaattctagtagaggtaatcctt

SEQ ID NO: 286416 - DNA, 597 bp, Cannabis indica
tctgggtacacgaccgtgtccgtgcccgagttccagtctcagtttgggtctgaggctacgtctctgttcggttctaggtttgggtccgggtccaagtcacgatcctagatctttttctaggatcctggtttggcgattcttgttcaggttctaattttgagtcccaggtctaggtttgggttcagatttggctcttcgtttgggttctcgtcctagtctaagtcccagatctagacactgactattggtctgttccaagcctcgttacccaaatcccgagtgaagatctaaatcactgtcacgggtttcggtctggttctggttcaggtcccaggtcccatttcggagtttgggtttgggatcgagattggggtgcggttctaggtcccaacccaggttctgtgtccctagtctagttccatgcaggtttgagtttaggttcgggttcgggtcccgagtccaggtttggttggggatccgggtccggctcccaattcggttctaggtctgatttgaagcccgggtcctagtccggttacggttctggatctaggtccaattttagttatgattccaagtccaagtcctagttccagt

SEQ ID NO: 286417 - DNA, 631 bp, Cannabis indica
cacttagtaattcccgggagtacagttagggctctaccaacacgagtacagattttggtactttagtgcatttggtatagtagttgtacttcccttaagaacgttcttaaccatttggtgagcttaattattgagctcagggcggcttaatcataaagccgacatcgcattatttttatatatttcttgcatatcttactgagtttgtttttgcaagaaacccgagaacctcctggtgtcggtgggaccactactatccctgtttcgggtccaggaaaggaaagtggagattccacttttgagcaaaagaaaagaacttttccatcttcgggaagttcagggcaaagtaaaaggtttcgaggaaaccagaacaaaggaggacgtcagacttattcctatcctgagtgcccgcgttgcaagaagcatcaccccgggacttgtaaccggagagcctgttttcagtgtggttcagtgagacatcttaagaaagactgtcctcagctgaagaaagaggaaccaaagcctgaggtcaaacctgtgcctgcacctgctcgtgtatttgctataactcaggctgatgctgctgccagcccttcagtagttacaggtcagcttctaatcaatggttttg

SEQ ID NO: 286418 - DNA, 541 bp, Cannabis indica
attttaaggtgtttaatactatagtgatcatacgtagtgtcttataattagttaaagattttttatattatttattaaattaaaatatatgggacttgatattaaaatgcactaataacaatatatcaggtcttacttaccaccacctcaagatgccgtttgcatttttcaaaattgaattaccccctcccccaatatcaaaactatttattttttatttttttgtctgagaaaaagatatacttgggtacaaacttttgactcttttgttccctaaatgcgttaacaagtcacattcttaactattaaataaaggaataataataataataataattaaaatagagtgaatacgtggtttactttaccatgatgataaatagatcatatatattgataattaaggcgtaaataaaggcaacaaacatgcatgttactcaaaaatcaaatcaaatagtctcacattcacattgtattatatatttatttatttctttataataatcccaaacacaagtccattgtctgtgactgtatattc

SEQ ID NO: 286419 - DNA, 768 bp, Cannabis indica
gtgttaattggccttaagggcaaaaaggaccttttgatccttatcttacatttaataaaagatacatttttgagtaagtaaaagagaattttctaggttttgaaaccctcatacccgacctctctctctctctcaaacccttttcttttcaattttgattttgagagaattgcttgattgttggcttggttggagcttggaatttgaggatttttgagtttttctttgattggaatttaggtagtttcctttactgagtttgattgaagtttttgttgaattttaattgtggtaaaagcatgtttgagttagtatattcttgagttgcatgctatgggaattgatgcttggctttgttaattttgggtgttaattcctttattttgtggtgattttattattgagttatggataaaattctaggttgattcttatgcttgaaacctagtatttcttggtatttttgctgctgaactatttgggtttgttggaatgtaaagctcaagttttgagcttgagttcttgttgaagaagcttggtttttgagttgattatgcaatctgaaattgggggtaatatgttggaatttagtgtatgatttgtacattttaactctctaatgtttgctagcaactttatttggtaatttgagagtttgatcaagttttgggatgaatttaaagtgttttggttgctgaaattcgtgttgttcatggctgatttctgggtttggaacccaggtgctgcggcatggtctgagcatgccac

SEQ ID NO: 286420 - DNA, 573 bp, Cannabis indica
aaaaaaaataataagagaatgaaagggtgttagcacaataaaaggatatgagatcatataaatatgagcgtgcacatgagaagatagactattatcaatacattttgataaatagtccatcacgtactcgaaggatgtcttggactcctctagtgacagtatcaccttcgtagttggacatgtcacgcaccacctcaacagttgcagtttgtcgaacaaggaggtcaatattgtcgtgcacagattttagcatttgaattgtggcatcatcgggacgaattctgggaaccacgatggaaggcctcctcatgcggccaccgatatttgggacaaaaggagaggcttgagcattctcctcgccttctaccgctgcaggacaaggcttcctcggttgggagcaggctcgagggactagaggaaagttttgagcactttcctctcctccagacccattcacatcctcagtctcaccataactcacaatcagttggtggaacatatctgaatctgtaaaaaaaaaaaaaaattaatatcacaacacacacaacatcataatgttatcatatgggtatg

SEQ ID NO: 286421 - DNA, 469 bp, Cannabis indica
ttttgtaactgcagaaatgactttcttgaagtccgctcctattcttaaccgcaagctgaagcctgggacagcagcgacttcccctatcacttctcagaagaggaaaagcgatgtggtggttactcctgtcgtagattcttccaagaggcctgctaagggcattcaagagaaagggaagaaagtcgtgatcgacctagctgttcgagctcgccatgtgttgtaccttcaggagagatgcacaagcgaagatcgaagagatgtctcgcgacttagaagctgagaaggagaacgggaagaagcaatatgaccaggcggtctcggactacatctacaccactctctccaagattccggacttcgacttttcaatccttggagcagaagccgctgaaatggccgaggcttttcgtgtgatgtcgcccacaccaactcaaggtggtggggggaatcttctcaaggagactgaggt

SEQ ID NO: 286422 - DNA, 514 bp, Cannabis indica
ttagcagataattagggcttaattatgagtttagactaatatttatgatttatgaatttatggagatttatttgaattcagggtgtattaattatgctataaatatatatatatgaaattttacgtttttcatgtttcttgcccaacaacaattgaacgtggcgtttgaccaatagaatcacatttagtatttttgtagtaatgaggcaacttagatagacatcaggaatatcaggaatacactactacaaaaaggggtatttttcgtcggttttcaagtgactaataaagattttgcgtcggtttaaaaaaccgacgtataagccgtagacgcaaaatgtaaattatttgcgtcatttataaaatgacacaaaaactattttcgtcattttataaccgacgcaaaacataaaaaataattaaagcaatttgcgtcagttttgaagagacacaacaagctatgcgtcattctttaaccgacgcaacaagtgttttttgcgacagttctaaaatg

SEQ ID NO: 286423 - DNA, 220 bp, Cannabis indica
gtagtcccatacctacacgtacaatcttagaattatcccacttgaccttccccaagcggtgtaggattgcacagcttatccggtatttccccttacgaatcacaagactactaacaatcacaatcagccccattacgaggtcgaacgtcctcgtcgaccacacttcaaaacaagatgcaccttgttgacgtaggtagtatcaatcaatccatttaagccc

SEQ ID NO: 286424 - DNA, 576 bp, Cannabis indica
gtagagcattgacaagcgtagatggagcagatgactcgagcaatagggtgagtttttacagtaaatagcaaaataaaataggagttcaataaattttactatcaaaaattgtgtttatgtgttaaaaaatataaaattcatgtagttttgttgcccatgtcccgtaacggaaccacactaatttaggatagtttttgggtaaaatactttcaactaagacaataataattgttaagcaaaaaataaataaaactaaaacaataataatgcatatgaaaaaactatactatatcttcttaatttttctttaagaaacacagtttttaaaaaatatttgcagcagaaatattgaatgtttaaataatgtgacacttcaatatcaaaaaaataaaaaaaattaataagaaaaaaaacttcaaacataacattcaaatatccaaaaagaaaaagaaaattgcaacaaaaatatccaaggtgctaaaacattacatagggcgtgcataaatcgatccaatccaatgagaaccgaccgatccaattacaacgacctccaaacattgaatatccaattgtgat

SEQ ID NO: 286425 - DNA, 810 bp, Cannabis indica
ttcagggtcttgttgactgcttcaacttgaccatttgcttgtggatgtgccactgcggagaagcttttgatgatgccatggttcgcacagaaatcagtgaaagattgactgtcgaactgcttgccgttgtccgagactattttgtacggtagtccgaaccggcatatgatgttcttcactataaagtcttgaaccttctttgatgtgatagttgcaagtggttcggcttcagtccactttgtaaagtagtcgactgctaccactgcgtactgcactccgcctttacctttaggtaattgcccgattaggtcaattccccagatggcaaagggccacggactttgcatctgcgtcagctcgttgggcggagctcttggtatctttgaaaatctctggcattcgtcgcacttctttacgtaggctttcgaatcttcaatcattgtcggccagaagtagccttgccttagaattttctttgataagctctgtccggctgcatgatttctgcagaatccatcgtgaacttcatatagaagtcgtgcagcttcatttggtgtgacgcacctgagtaatggcattgagaatcctcttctgtacatgatcccgtctacgatgatgtaccgtgctgcctttcttctcattttccgagcttcatttcggttatctgggagttccccagagttgagataggctgctattggcgtcatccagttcggagatgtatcgatcatttcgatttcttccgtgcctgtgatgctaggctcttcaagaaactggatcgggaccaggttcgtgttggaaattatttta

SEQ ID NO: 286426 - DNA, 810 bp, Cannabis indica
cccacttgagtagtcgtccagaatcatctggtttttacagtatttggcagagtggttggtcagtgtatacccgaataggatgagctttaaaataaggcctcaatttccttgttgctagaataaggcaacaagcgagtttttctatcaacggatatcggccctcgtcctcaatgagtcttttactgatgtaatagactgggtgctgtacgctgttctcttctctgattagtacggcagtcacgacatgttctgtgacagctaagtatattcctagttcttctctgtctagaggttttgagagtacgggaggttttgcaagttgtgcttttagctcttggaaagcttttttgcactcctatgtccaattaaactgcttgtttccttgcaggatgttgaagaatgggacacacttgtctgttgattttgaaacgaatctgctgagtgcggcgatccgaacagttaagctttgcacttctttggtttttgttggcgagttcatatccaggagggcttgaatcttctctggattagcttcaattcctcgagcattgacgatgaagcctagaaactttcccgagttaactccaaaggaacactttaagggatttagtttcatattgtacattctgaggactttgaagcaatcgttcagattgtctatgtgccccccagcctttctggatttgacgagcatatcatccacgtacacttccatattttgcttgatctggtctttaaacattttgtttaccaatctttgatacgtagctccagcattttttagaccaaacaacattactttgtagcaat

SEQ ID NO: 286427 - DNA, 1050 bp, Cannabis indica
tttggtctttttgcccattttgtgttttgtctttatgtgagtcaagtaaatagatgcattcatatttttagttatatttggctgaaaataatttaataaaaccaaaaaccatttctttatttttttaaaaaaaaaaaagaaggtagaaaatcacatttattctccttctctcttttccctctcgtgagccctagaaaccaacaagggtcttgggttttcttcagcaattttgggtttagatagcatcgtttttgaggtttcaagctttggtaagttttctagttcctcttttgttgtttcttaagtttaaagttaagctttttgcatgaaatgagggttattgtttttgttcttgctttgtttgcttgtggtgttttctgaagttagattatggttagaattgttaattagagctggtttggtggtagtttttgaggtttgttcaaggtttaagcttatgagctcaaactttgcactctcatggtggtttttgtatttgtgcatgtagtagtgttttgttgccttgaatatgctctctaggttgcataaaacaggtctggaaggtttcatatggattggggttgttttggttgagataggggaattttttgtctttcttgcactgaaccggaattccggttcagaggggcctgtaggaaccggaattctggttggctcccaggaatccccacaaaaccagaatttcggttggggaaccggtctaccggttggggcaattttgggaaccctagtttttcccatttttgtgttgtttagggtattgtcatgttatttgtcgatagggaaagttttagtttcaagtttaagaccccggaaagtgatttagcgtgtcactcacctatgttatgattgattgtgtttaggagcctgtaattcgccgagcagttgttctactcaggttgaccggcacacctgaattcagaatcaaggtaagattagtataatgtcatgcatatgtttatacatgtttagcgtacatgttagttgccgtcagaaatggcaaatctatagtcgtcagattagcatatc

SEQ ID NO: 286428 - DNA, 1362 bp, Cannabis indica
aaatttctagtaggtttttttaaaagattacacatcaacattccttttgctgaagctttagagcagatgccgagttatgtgaagttcatgaaggagattctgtctaagaagagaaaaatggaggactatgaaacagtggctctaactgaagagtgcagcgccattctgcaaaagaaactccctcccaaactcagagatccagggagtttcactattccttgtaccattgggagaattgaaggaataaatgcactttgtgacttgggagccagcattaatttgatgcctctgtctgtttttagaagattgcagttgggagaagcaaagccaaccacggtaactctacaattggcggatcgatcactagctcatcctagaggagtcattgaggatgtgttagtcaaagttgacaagttcatctttccagctgactttattgttctggatatggaagaagatagcaatgtcccaatcatacttgggagaccattcttggcaactggccaagctttgatcgatgttcagaagggtgaattaaagctgagagtccaaggagaagaagtggtttttaatgtgttaaaggcgatgacttacccgaaggcaagtgataactgttactttgttgatttgattgatacaattgtgagtgagaaaaagttgatagatgaccctttagaactgagtttaattgaagatgatttgacggagcaagagggaaaagaagcaatgggttatgttaaatggcttgattcctatgggccattaaacagaaagtattatgaagagttgggagtagtaccaagagagcttgcgccatctactgaaaaacctccagagcttgagttgaaggtgcttcctagtcacttgcggtatgagttcttgggagaagataaaaagctgccagttatagtgtcagcttctctttctgatgtggaaactgagagattgctcagagtacttcgggcgcacagcaaggctattgcatggacactgggtgatgtcaagggaatcagtccctcaactgtgatgcatcaaattctgatggaagaaaatgataaaccaacaattgatgctcaacgcagactcaatccacctatgaaggaagttgtcagaaaggaagtggtcaagtggttagatgctggagtggcttacccaatctcagatagtaaatgggttagtccagtacaagtagttccaaagaaagggggaatgacagtaatcaagaatgagaagaatgagttgattcccacaagaacagtcactggttggaggatttgtattgactgtagaaaactcaacaaagcaacccgcaaagatcagttttcttgcccttcattgatcagatgttagacagattagcag

SEQ ID NO: 286429 - DNA, 563 bp, Cannabis indica
aatgtgatcctcatgtaaccgattggacacctactttgtatataaaggggtgatccaccatgaaaatgcacctacgaatcccttgctacagtggactaagcagaacaaaatctgactgaaccactataattcatcgtcttgtttactttttccagccttgttgtttgttcttgcattcccagtcgagtactcgccattttaggttgaatactcgcacttgtcatttctcaaataattctcttttttatcaattaaattatactttttggtgttgcgaaatttgctcgacaacatttggcgccgtctgtgggaattcgactgtaagattttattcacttcaaagaacaccactcatcatggctggaaatcacgctaatggagctaacaacggatccatcaatattggaatgatgagcgtaccattgcctggagctggagtgccacctgtagacgtcatcaacggcggggtagggaggagcaacatcagacctctcaacctattcccagaaacaactggtcctcaagtcggagacacgtccacaccaccagcaaccatgcacttt

SEQ ID NO: 286430 - DNA, 712 bp, Cannabis indica
tttccaaattttctaattttttactttgaaccaaatgagagtaaattcatataataaacatttatttcagccaaaagaaacatagcataatatcacatttccaatttctaagtccactaaagggcaaaacataaatggggcaaaatgactattttgcccctccacactaaaataacataaagggcactaaagggtatttttgggaaattctaaattcccgaccactcccgacattcccaatgtctaataaaccgtcccaaaatactaacatagtaagttgtgattttactgagccaaacaccgagttccatgttcccggcagcggaaatgcaaaattatgaaattcattatatgacataaaatgcatttcagaattcaataataacagcataaataattatttaaatatcgataaataattttcgtaattaatcataattaaactaagtggtctatacaactattcccccttaaaaggattttgtccccgaaatctaacctgaacaactctagatattgagctctcatatttgactctagctcccagatggcttcctccaccttgttgtttctccagagtaccttgaccaatgctatggtcttattccgaaggactttatcctttctatctaggatctgcactggctgttcttcgtaagtcatatctggctgcagttcaaggctctcataactgagtatatgagaaggatct

SEQ ID NO: 286431 - DNA, 542 bp, Cannabis indica
acctggagggtttcagtcttttagttttagtattttggagtctgtattttggggttgcattttagcgagttagttgtgtaaaaaaaaatattatatgtacatattagtaaattactttcaacttgtattttgatactcgggatcccgacccatatggttattaagacataaattattaaaattaattttcgagtttattaatataaaatacgggcgttacatttgtgctctttttagtagtgttagtggctacaaatgctgaacaagatgacgtcacacgaagtgggaaatttaggagacattcggacacatggcgtgcaccaaatgcttctcagttgagtgtggcatcgcatgagatgataactgattgagaaattgatgaatgagacaagcgtatttggaagataatggcccttcattttcgctggattcatgatcattgaccatacttccatcaagtatcacttacttgggctatgctaaattaattttgagagattgggccttaaattgaaattacttgggaaatttacatggtatac

SEQ ID NO: 286432 - DNA, 742 bp, Cannabis indica
aggaagctgggatagggatggtgagaggaaattagggggaggcgaggcaatgctacaacgttgcgacccacctacccgtgctgatggtccgggaaaccattgagccagaaattgatgaagaagacgagttggatccccgtgtggggtccgagaaaattgtagaaccgatggagtacgtcgaggaggtatcagtgtgtgacctcgactccaccaaggtactccggctaggaaagagcctagacccggaggaaagagaaaaaataataaagacattgaagggcgccattgacttttttgcatggtgccaagaggacatgactggcacaagcccccacgtcatcacccatgtcctcaacgtcaatccagacatgctgccggtacaacaaaagcgacgacccctcaattcagtaaaggctgaggccttagagaaagaggtagataagcttttaacaaacggcatgatccgcgacgtttactacccggaatggctagccaattcgttcctggtgccgaaacctagcggaacctggcaagtttgtatagacttcactgatctaaacaaggcttgtccaaaggactgtttccctctgcccaggatcgatcagatggtagatgccacttccgaattcaagctactgtccttcatggacgcgtacgccgggtacaaccaaataaagatgcacatggcagaccaagagtgcactagcttgaggaccgataagggggtatactgctacctagt

SEQ ID NO: 286433 - DNA, 686 bp, Cannabis indica
taaatgccatagataggtttgatcattgttgacctcgcttttagccaacgacaacgagtcgaatttagtaagcgataagtgatttatagcaatcgatatataataaagcaatgtaaagacacaggaattttatagaggttcagccccgagcagttcggtaatagcctaatcctcgttatttgtattgacttaagatcaaggagaaaggttccttttcttatagctcttacaacaatatctctgaatgtataattcttagataatatatttagggtatagtctcagctaaactgttttcgacctcttgcccagtgaacatgcatcactatttatagggctagtaagcttggagaggaagagtttcccctctcgtcacaatgcgtataaacagaaagatcgtgggatcaatgctgaatacaaagatcgtgggattgatgctggatacactgatagtgggatcgtgtgtatgccatatccctgtaatctgatccctgagttatagggatttcgttgatgactcacaatgcgaaagctgaattcgctaagtgttggttgctctgcgcggattgctgattgctttgctctgggcatgccagtgaggcatcctgctcggactatgcttcccgagcagatgctccgagtggattccacgtgtcaccattcatgtgatgccacgtcagagtgca

SEQ ID NO: 286434 - DNA, 534 bp, Cannabis indica
ggagacatttattccgctgcatcaatgtaaggttttcttaactttatatgtgtttattttatcgtttttagaaagttcatatttaggatgttaataaacatacttgtgagtagatctaagatcctggtaaaataattcccaacaacttcatcactctagttgtttcttggactgacgactggtcccacgaaccaatccaagtgtttctaacgtgctttgctctgactcgcacgcttcatgggaaaatttcctaaatgaaaccaccccaagtcaaggacactcaaccatggagttccttcatgccgagctaccaaaacaagatgcttcttgctaacataggtagtcccacgactacataatctcaaaattactacacaatcatcaccttcaattcatctgggattccagacaatactcataaattgtcccacctttggtaacgctagatcacttctaaacaaaagattttgttatttgaatcaattagatcgatgcctccattaactactcattttctatattccactagggaat

SEQ ID NO: 286435 - DNA, 641 bp, Cannabis indica
gggacggtttattagacattgggaatgtcgggattggccgggaatttagaatttccaaaaatacccctttagtgctctttatgttattttagtgtgaaggggcaaaatggtcattttgccccattgatgttttgtcctttagtggacttagaaattggaaatttaaatgttaattgattttatgttggctgaatataagggatttatacttattttcttttattttcaaaagttagaaacatttagaaaaagaaaaatcaaacattttctctctagcctctctctctctttcggcctctttgtgcagcaagagtttgtgaattttcctttgtgattcaagctcattttgttcagatttggtgttcacaagttgttggtatgatttctatagcttttctttaagtttcttgaaattttggtgaaagtgtgattattgcatgctttgagttttgtggctgtagtgttgctaggttttgattatgttttcagaagcttaattatgtctaaattgaatggattagataggttgtaatgcatgcttgctaccttgtttaagtttgtgattttttgtgcaaaagctatggttttcaaagcaaattcttgattttcgttgttgtggttgctgcaatggttgagtagtg

SEQ ID NO: 286436 - DNA, 608 bp, Cannabis indica
taggtttcgatgaacgtctccataggtttaggatgccttccactcggtgggggaatcatgccaaggagtattatttctcccacttaggcgattatttaggtcggtcccggatgggttttggacctccagtgcccgttcccttggactcttcagcctatctatcttctagctggttccgtccctcggacagctatcttggggatgatgcagccagtgttaagattcgggactttgctagggctgaattagggagtcagggtaggactagcttgattgcctttttgttaagtgtatgctgttttcacaggtgttctaacacttaaccttttctcttgttgcagcagccgtatccatggacgaaatcttggccactcttgctggagcccatagtcctggtgcttcccctcctcctacttcttctcagttggtcactcccgggagggcttcctccagtgcccctccgagcactattgacttagtggacgaggaggaggtacttcttgaggaagttgaagaaggtgaagaagagcaagagatcgctcttgtgcgcaagcgcaagggcaagatggtggaggaggagccttctaagcgccccaggagggtggaca

SEQ ID NO: 286437 - DNA, 555 bp, Cannabis indica
aatgtctggtactaagctaaaaattgaaaatactaaaaatactaaagcctaaactaaaacataatcaaaaagtctgaaaaattaaagaaaacacttgggttgcctcccaagagcgctgtctttatcgtcatatagccagacgctgagctgtgttcttcatagtggcgccagaatcatggcggacttggcttggtcaaattgacctcccaagtatagctttaaacgctgtccattaactttgaaagttgttggaccttcacattttaactccaccgctccatagggaaacaccttgactactgtgaatggtcctgaccaccttgacttcaactttccaggaaacaatttcaaccttgaattgaatagtaacactcactgcccaggttgaaacttcttccttactaaaccttggtcatgccacttcttagttctctccttgtagatttttgcattctcataggcttcatttcgaaactcctctagttcattcaactgtagcagccttttctctcttgcagcttttaattccatgttaagagtcttcatggcccaaaa

SEQ ID NO: 286438 - DNA, 370 bp, Cannabis indica
ctcagatctctaaccctttcctttctgtcgcagagtataatcaagatctgagcccgaatgtccttctttgttgtctctgaattctacacagccttcctcactatgattgaggtattacttgatgtgtgtgggcactactctatcactcatagatttcgaaatagagaaggtagagagagagagggtggcggcttggagagagtttttgtgtgagaaaattctgtcaaaaatgttgtacaaaaactgaagcctttaccttctatttatagaagaccacctagggctatggttgaattaattcgcatttaaaaaattgaaaaatcaatgtgaaaaggtaagtaaggtggccggcctaggcattgtggaaaca

SEQ ID NO: 286439 - DNA, 788 bp, Cannabis indica
aatcaaatttccccattttccctcttttctcttaacttccctccagttcatacacttcagaaaaagttcatccccagattttctgccagctttcacaacatttccaatctcagacgtgatcgagagcagttcgcaggaatcaaaactaaaggttagttttctgcatttttcgtttttgtttttagagaaattgcgctttactttctgggtttggatgtttttgaaggctttttaggagtgtatgctagtgggtatttatgtgttttgggtcaatgaaactgggtaacattcatagtatagggcctgtaaactgacataaccgcacacaattcataggcactgattcacgtctcgaatactcgcggatattcggatgaacaatttgaatgttcgcgggtgttcagatgaacagcttgaataatcgcatgtttccaagacttatttccgcttaactgttagctagaccttttaggatctttacatgtcgcgggctgagtggtgagagtattaattgccattccaaatggtgggtgtgtcacagtattctaatggccatatatgcgattatatgccccttgagatactgagatacgcccagccatttgttgacgtgcgttaatgctcgaatgatcgcactctttggttgataggtagtctcgaaacggtgggggtctcccagtaacttcagggttatgctcgaaaatgcatacctcttgagtcactgggatacgcccagccgtttctggaggtataccgcacaaccgaggatgcgtgaattacttgcccaa

SEQ ID NO: 286440 - DNA, 580 bp, Cannabis indica
ttatatgtttaaaatacgataacgatatatattatattatatagcaatatatataatatcttgtagtagtattgagtaccaattatatgttttcgtaaatattttgttcctagtgcttattttcactagtttatttgagaaatttacacccattactgcctttatcatttttttttcatttgtactgtcgcacggtcattttaacttttatactattttttatttttaaatatttttggcagtatactgcctttggtaagttttattaataatggttttatggctttaaagtgtcatgctggggttattccacgtttttttttcttctactgtgtcatttatttttcctaaaatattttattaataataataataataataataataataataaaataaggaaataatgagtagttgtgtctccccacatcaaatttaaatttttttagttttattagtagtgattgatttggtacgtgagatgtgacaactctcacacacactactcaataaagcaactctctcatcaactttatttatttatttatttttcttaattttaattttctttttctataaa

SEQ ID NO: 286441 - DNA, 780 bp, Cannabis indica
catcgttcttaatttttagcttctcccatgcttccttagcaatttcacaattggctataaccttcaactggttagtggagacggcattaaacaaggcatgaagagcctttgagttgaaattcgctctttccatttcaacagtggtccattgactcatgggtttgggtataacgatttcattctccatcatcgttggtttccaccacccttcttctatggacatccaaactctttcatctacagctctcaagaaagcacgcatcttggttttccagtatggataattggctccttccagcatcggaggtctcgaggtggagcctccttctctaaacatttccatcctgcacacagaagtggtaaacagacacacaaatgttctgtagttctttgagagagaactcagaggaggttagttacgacagaatcgatcgttaaggttgactcaagaatcaacgatcaagaatcatacaggagtaggatctaacacaaatttttataaaatttcaagctctgataccaattgaaagtgcaacttgtagattttaatgattcaaattaccaagttgtctatctttagattgattgatttcaagatatgaattatgaacatgaattaaaagtcaagctgtaaatcacacatcaatttacaagcttcatctgcactgagaacacatctcagccgactagtgcttgggttccccgaaccagggtaaattcatccactaattctcaaaggttcatattacaatttccaattctctctaaaggaatcaaata

SEQ ID NO: 286442 - DNA, 784 bp, Cannabis indica
aatctactcaatcatgcatataataacttctgaaaacacaggaaatcgaccccaacaaacacagcaacaaaactcccaatttcactttgaaaaaccatagcttttgaaccaaaaattctcaaactagaacaagggtaactagcatgcatgaaacctacattaatccattcaattcaagcataaaaacacagaaacaacctagaactacagcagcaacaacatcttcaaaattaaacatgcaaccaccaacattcataattttcaagaattttaaagagaggaagagaaagagctaacctagcttgaattgaacacaacaacacttgaaatctcaaggaagaaggaccaaatcccagctgctcaaaggggccgaaaaatagagagagaatttgagagaaaaagatttttcttttaactttggtttttctcaactttcaagctttgaataaaatgaaagtaaatgcataaatgaatccttatttcagccaaacaaatgccacataatcacatatcttttccaattactaagtccactaaaggaaaaaataacaatgggacaaaatgaccattttgcccctccacactaaaataacataaagggcactaaaggggtatttttgggaaattacaaattcccggccaattctgacattcccaatgtctaaataaccgtcccacaatactaacatactaagttgtgattttactgagccaaacaccgagttccatgatactgggcaccgaaaatgcaaaattataaaattcactatatgacataaaatgc

SEQ ID NO: 286443 - DNA, 746 bp, Cannabis indica
agatcttgtgagtgatctcaaaggtcctccttaggctgatgaagaattctagagaaagattggcatggtttcaagtggatctgggaaggaagttggcgtggtttctattagagaatccaaccaacccaagaccctaacctgtgccaagagatctttgcgtcaacctctctccgatgttaagaaatttcttgaggctgggaaaaagatctcagcttcaggatatgggatcttctgatgatgaggggaataaggtctgtgcagagatcaaggctctctatgtgtagccggtctttctccgagctatgtgtagacggtctttctcgagttcattggcttcccctttcatcctttatttaggagaatgacttaatggtttgcccctaatggcatttttgtaaagacaagttcataaccagtcttaggtttttcttatcttaaatgctttaaactgtttttattcgaacttaatacaattgtatttgcttgcattttcattcacaatttaaacaactatattttgatcaaatgttcagtacctttgggttttttcattgctcgtaatcttcctgtttaagtagttagtaatctaccaaactttatgattttcgagtggttgtcaattctgcctcgcaattgcagttataatctactttaagaaaacttaaatatactttaaagattttatcactttgtatattttttatttgctcgtatgaatagttatattatctatccattttctaggt

SEQ ID NO: 286444 - DNA, 72 bp, Cannabis indica
agtagtaaactcctcgtaataggatctgacaggttgaattaaacacaacctcttctccaccattactcttcc

SEQ ID NO: 286445 - DNA, 468 bp, Cannabis indica
taacacttaggggtggatgaagctattgacgtatgtagttcagtttgaactctagattatactcaatacgccacagtaactctaagacacacatattttgattagacatggatataatataataaacaaattagcaaattattagaacttattcttgatcctatttttgttccaattaatatgttactattgtaatagaaattgataccaataaagttcttgaacatagtatcacagtaccttatttgagtgggagaattttaaaaattctaagcccatctttatttggatgacactagtgatagcttactatgttatggtcatgataggaactttagaatatcactgagatagtaaatctaaccattcatatgaatagaaataacttatcagaattttgaggataagataggaaaatttgcaaagtctattcgaatgacttgggcgaaatacctaatcttcatgaaa

SEQ ID NO: 286446 - DNA, 539 bp, Cannabis indica
tccctctaaacctttttcatctaacaataaaaaaggtattaaatgcagagaatgtgaaggttttggtcacactcaatccgaatgtgctaataccttaaagaaaaataaaaagggattaaatgttacttggagtgatgattctgagagtagtgaggatgaaaaagaaaaggttgtcctaacaagtgttttgtcaagaaatttgcaggaaaaaggaaagagcattagaagataaacttaaatgttgtgaatctgaactgtctttaaaagagtcaaagattatttctttaaccaaggaaattgataacattaaaaagaatgttaaaatgcaagatctaagttccaccatctttgaaaaaattcaaaaatctggccaaactaatcatgcggggctgggttatgttccaaatcaacctgattctaataccacttttgttaaaactaatagttttgtttctggaagaactgtttctacctcgcaggtttctgtctctacagcaaagcactctgctgttacagaaaagaagcagcacggtaagttt

SEQ ID NO: 286447 - DNA, 661 bp, Cannabis indica
tttgaattttagctcaaaaacttggtttttatggtaaaatgaagaatttggttgctgtgtttgtggtggttgttttctgctgtttgcagaagcttagttatgcatatttaagtagatttaaacagatttgaatgcatgttagaggggtttagccaagcttgagttttgaactcaaagcttggagctttaatggcattttttatatctgtgatttctggattgttttaatgctttgaaaatgttctttggggtaatttagaacaggtctggaaggtttggtatgaattgggtttgatttgaatgagttatggaattttatgtgtttcctgcgaggaaccggaattccgattgtgcaaccggaatttcggatggtgttttaggattcccagaactggaattctggttccagaaccggtttgccggttgggggatttttgggaaccctagtttttcacgtttttatgttgtttagggtattgccatgctttttatcgatagggaaacgtttagtttctagtttaagtccctaggaagtgatttagcgtatcacttatttagtgttgtgattgtcatggtttaggagcgtgtaaatcgccgcgcagttcgttccactcaggttgaccgacacacctgaattcagaatcgaggtaagattagtata

SEQ ID NO: 286448 - DNA, 138 bp, Cannabis indica
ataaccgagctttcaataagtagatataaaattcaccaagtaaattccttaacttattaattccgccttgcgccactatagatttagaattgaatagcactctcaattatatagaatgctctatatgtaccacgatat

SEQ ID NO: 286449 - DNA, 626 bp, Cannabis indica
attttatttattttaattataagatcagatattacttcttttgttattaaaatttgaaattatcttattttgatattaaaatgttaataaaatttagaaataatctagtttaaatttcaaaaaatgctaaccatattagtttttcaaaatttgttatttttgaaatatattttattaaattaaattataagattagaaaaatatttttgtaacattttatctcattaaatttaattttggcaaaataacatgaaatttttgaaaagtttgttaatttaggtttgaatagaaattttagggtttgctaaccataaaactttaaacttaggatattttgttttattaaattattaaataaaattgataatatcctaacaatcaaaatatcttatttttcaaattgttttactttgttgtatttaatttattaaattataagattaagaatataatattagaaacatctaaattttaaattcaagatattatattatattatctcattagatatttaattaatttaaattatttaaataaacttaaaatttggaaattggttagatatttgaatttaagttagaatttaagatatttgttagatcttaaatatttttcaaatattactc

SEQ ID NO: 286450 - DNA, 569 bp, Cannabis indica
aaaaacataccgaaaataaaagaaagcaaggaaagatagaacctgattagtcttggcaaaccagagacaagtctcctcaggtgggcttaccaactcaatattcttgactatccagtatcaaaaatgaattttcttttatcctgtgtctcaaaaatagaagcattagttacattttcaggaaaaagaaaatggtcattgtctaagtcatagaggaaatagtgtaaatgactaagtaaaaataattttctaatttcctcaacgactttgtctatcacatcagtatgatagcatttcttttcatccagaattaggggaagaagggtagaatgagaaagagtttctttctgaatagtggtggtatcattttcctccatgaataatgtgggtaccacatcagtatgataaccctcatttatacttggtagagtagattcttcaaaattttctccactagtggtagaggtgacacgtaccaggtgaccagataacttgctcaattcctgcttaatttgtttcaactcagcaagtaagtctttcatcatctcacaatttttcaccatagatgcttg

SEQ ID NO: 286451 - DNA, 445 bp, Cannabis indica
ggcataaaacccaacatgaagtacactgcggtccaagtggaggtggctgttgcaaaagcaataggcattcgggaggtattgagttggttgaaggagaatcgatggcctcaagtttacatcgaaaccgattccctgtgtgtggtgcaagctattcatagttccatcgatatgatatccttgtttggtagcgtcattcaagattgtaaaactatgcttgcttctcttaataatgttgttgtgtcttttgttaagcgatcagctaatgtagtggctcataagtttgctagagctgctagattatatcctgattgtacttgcagtttggagactgttccaactgagttgctgccttgtttggtagcggatgtaagggtttaatttcaataataagatgaaatttccattcaaaaaaaaaaaacgcccatatatcatgccacatcactaa

SEQ ID NO: 286452 - DNA, 1154 bp, Cannabis indica
cggaaaggcccagggcaggtttacgagttgaaggaaatctctccaagattggctgaggatatggccaaggctgagattgagtttgtagtcgggaagttggcaaatattacattgcagtctgatttactggaaagaataaagattggccaacaaaatgatcctgaattgattgaactcagaaagaaagttgagattggtgctacaaaagatttcattgtgactccaagtggactactaagatataagggtagaatttgtgttccgacagatgatcagatcagaagagaaattcttgatgagttccatactactccgtattccctacacccggggacaacaaagatgtatcatgacaccaaggcaatatattggtggccgggaatgaagagtgatattgttgaatacgtttcaaagtgtttaacctgtcagcaggttaaggctgaacatcaaaggccagcaggtttacttcagcccttgagaatacctgaatggaaatgggaagatataactatggacttcgtagtggggttgcctaggactactgggttatatgattccatatgggtgatagtggatagattcaccaagtcagcgcactttttacctgtgcgagtgacttatactgtggagcagtatgctgaattgtacattaaggaaatagtgagactccatggaaccccaaagtcaattgtttcagatcgtgatcccaaatttacttccaagttctgggagagtttacagaaagctatgggaaccaagttgagattcagtacagcttttcaccctcaaacagatggtcagtctgagagaaccattcagatattggaagacatgttgcgagcatgtgtaatagattttgaaggatcttggagcaagttcctacccttgattgagttttcatataataatagttatcagagtaccattggtatggcaccttacgagatgttgtatggtaggaaatgtcgatcgcctatccactgggatgaggctggagagagacgttatcttggacctgaattggtccaaaggaccaatgaagccattgaaaagattcgatctcgtatgcttgcttcgcaaagtagacaaaaaagctacgctgatccaaagcgtagggatatcgaatttcaagtgggagactctgtatttcttcg

SEQ ID NO: 286453 - DNA, 510 bp, Cannabis indica
cacaagaatttcagcacaaaaaattatacttgacccctagacaagattatcatcttccaatcctaataatataaataatgaacaacacctcattagttattctaggagaatgatgcatggtaatgtcaaaaaaatcattagatgataataatatttctctaacaatgataccctaagtaagaactaagaagtattgtagcgttttatttttaagagcatgaataatattaagacaattggattccacaatcaagctcttattctcctattaaaaaaaacacattaatatacatgtaaatgattcttagttttacaataataaattattaataaactcacaatttcataaaattataaagtagtaatttcaattaatttttaaaaataatttataattttttcaaaatattggttataattattatttccaattttataaaaaataaatataatttttttaaaaaaaataattattagaaacttgccataaaaggttattagattgttacc

SEQ ID NO: 286454 - DNA, 707 bp, Cannabis indica
taacatgagcaagctaaagcagttagttctccacttgcaggccatttcaagctaagctccaaacaatgtcctacaagtgagaaggataaataagaaatggcttcaataccttactcatttgcagttggcagtttgatgtatgttatggtttgtacgaggccagatattgctcatgcagttggagttgttagccgattcctctctaatcctggtaaggatcactgggaagtagtgaaatggatattgagatatctacaaggtacttccaggttgtgcttatgctttggtagtggtgaacctatgcttgatgggtacagagatgcaaacatggctggtgattgtgattccaggaaatttacttcaggatttttgatgacatttgcaggggagttgtttcatggcaatcgaggttacataagtgtgttgctttgtctactacagaagctaaatacatagttgtaactgaagcttgtaaagaagctttatggatgaaaaagttcctccaagagttgggcttgcaacaagaaagatacattgtctactgtgacagtcagagtgccattcacctctccaagaattcaacattccattcaagatccaagcatattgatgttagatatcattggattcgtgatgtgcttgagatgaaagaattgcacttagaaaaggtgcatacaagtgagaatggttccgatatgttgacaaag

SEQ ID NO: 286455 - DNA, 742 bp, Cannabis indica
tggcatctaccatctggtcgatcctgggcagcgggaagcagtccttcggacaagctttgtttagatcggtgaaatctatacaaactcgccaagttccgttcggcttgggcaccaggaccggattggctagccattccggatagtatacgtcgcggatcatgctgttcgtcagaagcttgtccacctctttctctagggcctcggcctttaccgagtcgagggggcgtcgcttttgttggactggtggcatgtccgggttgacgttgaggacgtgggtgatgacatggggacttatgccggtcatgtcctcttggcgccatgcaaaaatgtcgatggcgcccttcagtgtttttattattctttctttttcctccggatctaggctttttcccagccggagtactttggtggagtcgaggtcgcacactgatatttcctcgacatcctccattggttccacaattttttcggaccccactcgggggtccaactcatcttcttcagccattcctggctcgatggtttcccggaccatcagtacgggcaggtgggttgcaacattgtaacattgccttgcctccccctgatttcctctcaccgtccctattccagcttcctgggtagggaactttaagcacaggtgccgaatggatgtgactgcgccaaaatctaccagggccggtcggccgaggatcgcgttataagcggtcgggcagtccaccaccacaaaagtgcagtattt

SEQ ID NO: 286456 - DNA, 680 bp, Cannabis indica
acattacagatataacatgagaatgttcagagatcggtggtgtgtagacttgttttatcagaacttaacgtggtaaaatatttacaagggttgtaatttttttgtattttaagaactccattacaattgtacaaacatagttgcatagttgtttttagtactgtacagtttttatatatcgaaaagtgttcaattttaaaatttttacttacatgtcgctacaaaatcgttaacatgtcgtttaatgtcgaaaaaatttagtttctgagtgtttggtttcatgtcgctaaagcaccgcgaacatgtcgttaaaatgtcgatagtaaaatcatgttttgactcttcagttgatgtcgttaacatgtcgcaaataggtcgcgaaacgtcgatacaaaagacgtttccacattaaatggtaattaatgtgtgacatttattatcccgcctaaccaactacttcactatgtcgataacatgtcgcccggtgtcgcgacatgtcgcgaaaattgccagattgctttgtgcatgacaaacatgtgtacaattgtgtaattaaatttttacatttattatcccaccttcccaactactagttttgtctataaaagccaattgtctatctcataagttacacattttcttaatttttacccctacaagataattctcttagcaatgtc

SEQ ID NO: 286457 - DNA, 518 bp, Cannabis indica
tttcttgccaactttgctcaaatttcctagagagaaaattctcagacctagaacaaggcctttaaacactttgcgattttcccagttcttcttcgctcgttgctaccagtccttcttgtctttactcgactcacagcaggacccccagtttcaacacttcatcgtaagttttttgcatcctttgctttattgttgaatggcatgctattacttatctgtttgttcttttctgggtttgcattcgaagtttctgggtatgcaagtgtttaaatccttcatatagtctgtttgagtttactgctctagtgataggattgctattgtcacgcctctgttgttattgtttttttttttttttgtagaaggccatacgttcttcgtataatggttgcttagggcataggacagacctttttttttctttctgttttccttatcgcgtaaagccgtcttctgtgaatttactgcacccgactcttgtccagggaatccttccagggtttcctgtatgacacgtg

SEQ ID NO: 286458 - DNA, 886 bp, Cannabis indica
ctctcgaccgggctccccacacgaagtggcctcccggaagctgcttgagccttggagtaagctttctcctgagccttccggtagagatagtcctggtacttcttctcggcagtggcgatgatctcgtcccggaagatcttctccgcggcaggcgccctcacattgggacagataaccctggaaaggttagagtcctccacagattggtgcggcaggatgagcttggccttccggcaattctccgtcgtaaccaggcccccgacgtcgaggtccgcccggtcataagtggcgaaggcctgggctctccgaagaaagacctgagtaggcgcggtccgctcataagggggaatcctaacccactccgtgaggagctccggatgttccaccgctcggaacccggaagagaagaaaaaacgatggcgatactccttaacatgagtttgcctattataagggaccaccccatcattggcagggtgggcccggaatccataaaaaccgtctttaagtttgtcccccttcttggggacggaaacaagttcataaaaatacaatatctccgccgggctgggagagccccatccccgggcggagtaaaaaataaataagcctgagagcaggcggtatgcttgaggaataagttggtatggcgcaaggccgacaaaaactaaaaaattaacaaagtagtcctggagaggaagcatggccccggccatcaagtgcgtctggctccaagccccgaagccgccgtagttgtggttgggcgtctccgcatcacgaggtggccggtggtacgtcccggatgtggaaggcttgattccagctacctccacgatgttctccaactgatgggggcaagttagagtagagtgaagctctgccgcct

SEQ ID NO: 286459 - DNA, 934 bp, Cannabis indica
aatcattaccatggctttgaggcagttgttaggaatattttactataatctagatttactaacaagtatgttgaataacatcctaaacatgaattctctaaaacaatgaaattaaacacataagagtttataaaaccttacattggttgcagcagaatataatgactcatttcacttagatctctaacccttgttcctttctgtcgcagagtattatcaagatttgagtctggatctctttctctccttcgagttttgttaccaccgtcttactcactatgattgattacttgacttgctatgtgtgggcatggcactctatcaccaaaggttcgaatatgaagttcaatgaagaaggcttgaaaatcactatagaagttgtctctcatctactagttttctgacaaagaaaattaggtttgatttggttgaaggcatcaagtggatgagtgagagcatcatattgctgttatagtgtttcaactagggcttagggctgaattatatggagtaaaaaagaataaaatattgggcaaaaattcactcttagggtcggccataaagggaccaatctctagttacagttttgccacttttttcaaccgcttatacttctttcattaataccatattttctaattcaatcctgtaaatgccaaaactatttatttaataattataattaattatcaaataaaattaccatttatattatttatcagttagaccatacaaagtctattaattaataaattgaccccaaaacctcttttcttcaattaagctcttgcttagtgaaattttttaaataagacatagtctaattttagaattataattgatgaatcaaaatcaattgactgagtctgcaagcaatattatctcaattagtgaggggaccatgggctatataaccgagctttcaataagtaga

SEQ ID NO: 286460 - DNA, 777 bp, Cannabis indica
ctgtaaattatcgaactaaaattgatgtcttactaaaacaatgtgtattgcagatatagtaagtgagtctttatttattagagatatttacttgcttcaacctcaacacccaaaagagcataaaataaagaaattaagaccaaccgcgtgtgagtattggaagtgacaatgcaataataatgatgattactttgaattttcttagtaatcaagtaaaccttaattagggtggtgtacgttatatatgattttgcaaagaaaatatcgacaatatgcatataaactctaaaatttcttaagaaaataaaagaaattgtgtatcttttgctgacacaattcatcaataacaaagaaaatgaacttagaaaaaattgagtggcaggagatgaggaacatacctagaaggagtggaataagctatgcttcgccccaacccgatgggatttaggatttaggagacagagagaggagagggccatcgtccgtgggagggagcctgtacgaggcattaaatcgcagaccaggagcaagtagacacagggccggacctaaattgaaatgagctgtaaggcaaaaaaaaaaaaaaaccaaatagacccttactataaagataaattgtattttgtaaaattattaaaaaataatatgtatattttttaaagggaaatttacatggtatactaacttttgttaattttttactaaaataactgtcaggcggtactttttacttttttacttgtgtttttttttaagtttctatactgctagtatact

SEQ ID NO: 286461 - DNA, 697 bp, Cannabis indica
ttctgtaatggcatgggaattcaccacgagttctcagccccaaaaactcctcagcagaatggagttgttgaacgaaaaaacagaacactacaggaaatggctcgggtcatgatgcaggccaaggatatttcaaaacgattttgggctgaagctgtcaatactgcctgttacgtgtgcaatagagttcatcttcgcactggtacctctcaaactgcctatgagctatggaaaggaagacctcctaacgtgggccacatgcatatctttggatgtacgtgttatgtcctgaacgatcgggatcacttgaccaagtttgatcccaggagtgatgaaggaacatttttggggtactccaccaacagtcgggcttacagagtattcaacaaacggactctcactgtagttgaatcaatgaatgtgaaatttgatgatttagaaggacatgaagatgtgtggatcgaagatgactctcctgttctctcaggctctagaccagtcctcactagacagtctcaggtgtaccctgatacttctacagagtctctaaatacagcatcaggcatatcaggtgacaatcaagccagtgccagtggtacaggaagagaaaatgaagttgatagtgccatgaccaatgaactccaacaggtcaaagttcataaaaacgggcccccatcctgggttgagaaagctcatcctc

SEQ ID NO: 286462 - DNA, 756 bp, Cannabis indica
tcctaggggaatgacgctcggtgtttgctggcctacagtttgataggctcttcatatcagcacagtgacttgccgactacgatcttcaatttctgcatggtgagcccttaatgtctccatctctttgtccctccgctcggcgaacatacgcctttgttcgtcaaacacgaggtttactacggcacataattcctcctgatcgcgatggagggtattgttgtgaccctacatgagtccgagtgcagcgtggaggttttgcaattcagttgcgtctccgatggtcattttagcgttgatgcctggtagtagtcgtgttatgaacgccctagctgtgtgcggaaccgttgtttccggtctcttacacaccaggcgcagtttcagtaacagaagttgtcccaccatcaccacacttcccgtctgtcaaggattgacagtaggtggaacccttgaactctccgggtcctgcaacgttggatccagcgtctgtgactgtgctgggtcagacaggcctctacgagtttgtaccatcatgtcgagtgtggaaaagagcgacctgggattcttctctcaatgaaagcactaaaatgttgacttcgcttttagccaacgacaatgagtctttttgataagcgataaacgatatgtcgtaataaaaatatgtaataaagcaatagtaagacacataaattttatagaggttcagccttgagcacttcggtaatagcctaatcctcgttagttgtattgacttaagaa

SEQ ID NO: 286463 - DNA, 458 bp, Cannabis indica
ctagagctataaactctgcttccattgtggaatgagaaatgcaagtttgtttcttggacccccaacacctagggtaaatacccaaccagttgtggacaaattatccccaaggttggctatccaacttgcatcagtatatccttccaaaattgaaagaaatttggagtagtgaaggcataggtttttgcttttctttagataacccaaaactctccctattgccttccaatgatccacacttggattactagtaaacctactaagtttactcaccgcaaatgatatatcgggccttgtacattgggcagcgtacataaagctccctataacacttgcatactccaactgagccactgccctaccactatttttaactagtggtttactatgatcgaatggtgtgttggcctctttagcctttagatggctaaacttattcaacactttatcaatatagt

SEQ ID NO: 286464 - DNA, 626 bp, Cannabis indica
tttattttcttacaagggtcaaagtgtgacctttgaccacccaagttatggatattacacatctgccacagcctagggctcgggtcgtgacagaaaaatggtatcagagcaccgggtttaattacctcggagtgtgtcaccaaatagtttagatttattttaaataataatagtaataaatatcttggtatttatatgtataaggcatatttatattattagcatccaatcctcactaactgattagcttttggttctcagacctaagaaaatgcctccaaaaggaaagaagacaaggagaacggttggagaagacgcccctcaagctaatgtccaacctccacaagctgaattccctatgaacgcccttctcgaagccttaagagctattcccgctcaacaaatggatcctgccgctcgacaaagtcatcattttcagatctttcatcgaatccaagtgcctgagtttgagggtggacaagatcccatggtagctgaaaggtggttgaggcagataaagaaaaatttcaacacaataggaacacctgaggaataccaagttactttcgctgtgtccaagttagagggtggtgcagcagattggtgggagaccttgtccaggacaa

SEQ ID NO: 286465 - DNA, 721 bp, Cannabis indica
acaaactcctcgacaaatttcaggtaattcatctcttgttataaactgacaggtagggtttgacttatacttatctttcatttatgttcgcagatatgacttttctgaagtctgcccccgtcctgaagatcaaaccgaagggtggaacaacgacgacttcgccggttgtcgcccaaaagaggaagagcgatgcgatggctacacttgtcgcagactcttccaagaagctggccaagaccacacaagacaaggggaagaaagtcgtaattgatccacctgttcgagctcgcgacttcctagccatgcaagagaagttcctggctgagattccttatgaggatcttgttacgcgatctgccgaactggccgcgcagtcgatgactctgttcataaaagctgctgctactccttcgaaggaagccgactcgctgaagaggcaaaacgctcattttcaggagaacataaaaaagctgaagcaagaagtggcgaggatggagaaagagctcgagcaactcagcaaggcgaaggaacaggcggagcttgaagtcaagaaatcccaggcgacgatcgtggagatggcctgcgatttggagactgagaaagagaatgggaagaagcagtatgatcaggcagtgtctgattatatctataccactctttccaaagtcccagacttcgacttttctcttctcggaacagaagccgctgagatggctgaggc

SEQ ID NO: 286466 - DNA, 655 bp, Cannabis indica
aagggctcgttcagctgggaatcgtcgaccgaatctgtcccactcccttccgcctcctcctcttcctcacctgactcgcgaactggagtcgtccattcctcgtccatctcctcgacctcgatgtcaggagcatgcctcgaatgtataaggtagtcgcgtgccgacaccgtggactcgctgtctcgaatatcgatggtcccaggttctgcgagttcttgcaccatcttctcgatgtccacagaagacatcgggcctagctctattggagcggcctcctcttcggaaagcgaagtggggagaaaactgtcctcctcctggtcagcttcaccgtcaaatgcacggcctccggagccgagctgttggctatccgacaaatcgctcatctgaaagatagaagatcttttcagcgtgatggatgtgtgaaaagcaaagtaagtgatctcacccgcattagattataaagtcgcactcgatagaatggtcagcctccttgcgaatactgaccatcccctcaatatgcgagaagagataaaaatttcttgggcgagtaattcacacatcctcgaccaagcggtatacctccagaaacggctgggagtttcccagtgactcaaggagtacgcgttgtcgagcataaccctgaagttactgggag

SEQ ID NO: 286467 - DNA, 576 bp, Cannabis indica
ctttgggtttgggaacaaaaaggttttaaaactattaatagcagggatgtaatatttaaagaagatgtatttccatgtttgcctatttcttctaaccctaatgcaggtacaaaagacactaacaatgcaggtaacactgcaaatgaaagaactggatctattcaggtggaacaaacagtgaacacacctgaacagaaccagggagatcaggttcaggtggaacctgggaaccaggttcaggtggaacctgatgaagacaacactgacattgttgatgaaggcactcaagaagacttgggggattatcaactagtcagggacaggggcagaagggtaccaagacctaatcctaagtacagttttaatatttgggatgaagacattgcatatgcctttatgagtgaattggaaatggccaataatgaacctcaatcatatgaagaggccattaaaggaccaaattccaggaaatggaaaggtgcaatggatgaagagatggaatctcttaagaagaacagaacctggattgtagtgcctaaacctaaagataagagcatagtggactgtaaatggcta

SEQ ID NO: 286468 - DNA, 558 bp, Cannabis indica
caccgaaacactaccaaaacttatccaaatcactccaaacttcacagggcacatatataccatgaatactatcattcttatgtaacagaagttaaaatcgagcccttaaatggaaaacgccattaacgctcggactaagctttaaaaagttccaaactcgatttctaacccaaaactacttcaatttcaacaagaaaacatcggaactagtcccatgactacccgagaacaatcctataaggtcagaaccttcataactattctaattcacaaaacccctatacgaaaccaattgttattaaacttaaaacgaaattaaaccttaccttaagcttctccgctctgagaattcgctatcctgctactaccggagcttagatcgctaagttttggattgaaaatcaaagaaaatggatataaaaggagaaaatttggttgaaggggagaaacgagggttcgtctctctgttctctgataagttatatatataacttaataatatatatatatacgtattctaattttttttttaacgttaataataataataataataat

SEQ ID NO: 286469 - DNA, 865 bp, Cannabis indica
atacttatagaagctatagattcgatgtctttgatcagcgctcccactcaatgaactaccatgttcccgagatgaaatatccgctagaatcaaaagttagcttcacgacacctctaagaacataaataatacaactaagttgaacctagccatatcaggattaagatccagatcaaccattaatattgacttagaaagatataacagtaaatttataatatataatccaagatcaatatcgatccctactaatgtatactccatacatccgatactggtaaattttgccaataccctggaaaggacataacacttatccaaggtgtaagtataccttatcgccgattatcatgctagtctaaatccagtgaactgacaaatcatgggaattaaacttttgaacatataatcatgattatattccaccgtgctgacaacactaatcatgaacaaatatatacatatttatatatgttatcgaaggaattttacaacaccaaaaatagataataataataacaataaatataaaataagtgcgagtactcgacccagaatggcgagtattcaaatcaggaacacaaatacttagcaaacaactggaaaaataatgaacacaagaggaatatagtggttcagccagatctcggtctgcttagtccactgttgcaaagattctctctcttttacttcacgatggatcactcctttatatacaaaacaagtgttctatcatttacacaagtactgcattcattatcaatccgtttacacattgatttacaataattaagctaaaaaacgtaaacatgataaatgaagaacaatttctagtttaatctactaaatacagtaacgtatgcga

SEQ ID NO: 286470 - DNA, 505 bp, Cannabis indica
agttctgggtctaagtccttgaatctgatcctagtctgggttcgagtttgggtccgggtctgggtctaactttggttctgattctaggtgtgggtttgagttcgggtccgagtatgtgtccgggtttgtgtccaggtctggaccccgatctgtgtctaggttcgagtccagttcccagttcgggtcccaagtgtgggtccaagtttgggtcttggtcaggatctcggtccagagctaggtccagcatttcgatccaagtttgggtcttggtccaagtccaggttcgtatctggatcccaatctaagtccaagtccttgtttgggatcgggtcccagatttaggttcaagtccgggtctcagttccggtctggatacacaaccgtgtctgggcccgagttccagtctcagtttgggtctgaggctaggtcttggtccgggtccttgtttgggtccgggtctcggtcacgtaactagtcttgttctagggtcctggttcggcgattc

SEQ ID NO: 286471 - DNA, 519 bp, Cannabis indica
tcttcatacaaaatatcattcatcttttctaaagtagtgtcaacctcaaacattaacatcttactttttggattattgaatatccagttgaaaccttcaactgcccaagccccatcatatagtacaactacaaacacatttgaatctgcaaaccaaaatgaccacaaattatgaaaaaccaagatgtcgcaagatatcgcgaacctatcgctacatatcgtgaacaatttcgaaaaaaatatatgtcgacaaacgtcgcaaaattgtcgagaaaaataaaaatatccacaatataacacaagaattctatgtgtcgcgacttgtgtcgctacatatcgatacatgtcgttaaatgtcatccctaacctcatgtcagctcttaatcgctaaatgtcgctaaccatgtcgaaaaatatcgctaaaattgcaaaaaaccagtaaaaaacgcagacttgctgcatttcgtgtttcattgacaaaaagggtacataaaaagcacggatatgtgtagatctatta

SEQ ID NO: 286472 - DNA, 415 bp, Cannabis indica
tgctgattctccttcttgttgatggattcttaacaatcttccatactatgaatgagataccacttgatgtgtgtgggcactactctatcactatggtatttcgaaattgaagagaagaaaagagaagaagagggtggcatctatggctcaggtttttctctgagaaaagaataagatgcatgtccatagtttcctgaagccatcactttcgatttacagaaagcaatctaggtctaggttagaattgtatggcattaaaacaatgaaaatataaatggtaaaaaaacttgcatagtggccgaccatgatatggataatgggcctcactttgcaattttgtcattttgtcatttttcaatcccattttctcaaaaaatgccaattttccaatttaaccatttaaatgtcaattcca

SEQ ID NO: 286473 - DNA, 141 bp, Cannabis indica
gaacaactcgatgaatttagtagatcttttaggaggcacaaatgactatagatagaacctatccaatttttactgtgcgatggttagctgttcacggactagctgtacctaccgtttctttttggggtcaatatcagcaat

SEQ ID NO: 286474 - DNA, 607 bp, Cannabis indica
gttttctaaaatttctacacccttaaccaagcttactaaaaaaatcagccttttgtatggacggataagtgtgaatcaagctttcaggagctaaaacagaggttaattacagctccagtattagctctgccttctgataaagagaagtttgtggtttattattatgcatcgagacagggtctgggatgcgtgttgatgcaagctgatcaggttatcgcttatgcctcccgtcagttgaaggattatgaacagcgatatccgactcatgacctagaattagccgcggtagtgtttgctttgaaaatttggcgacattatctttatggagaaaaatgtgatatatataccgaccataaaagtctcaaatatttctttactgagaaagatttgaatatgagataaaggcgttggttggagttagtcaagaattatgattgtgagatcctttatcatccggggaaggccaatgtagtggccaaagccctgagcaggaagggtcgcgggaaagtagctagtatgattcagatttcccctcagttagcagaggacatggtcagggctagcattgagtttgttgtaggcaagcttcacaacttgacgctgcaat

SEQ ID NO: 286475 - DNA, 565 bp, Cannabis indica
tgggccctatcatgttactaggtttaaaattattgtgcagctcgttgctaatcaacgaggttaatgaaaaatgtgattaattaaaatttcctatttaattaaaacttataatattacatacaaaatacttggggatctcgtttaccaaacactttacaaaagtttactattcatttacaaaatatttgtagcccagcaactaacaacaaaagccttgatgttccgaagatcgtacgctccaggcctaaccgccctgacatgtacaatcttcatctgctcgtcctcacggttcctcaactttagccttgcccttacctacactataacatagcactatgagtcgacagactcagtaagaaaagcataaatcatataacatacatacatcccgggttatgatcagacgcccatacccctgaccataatcctaatccctttgtcccacacggtactgagtctcgaacgtttgtacgacgatacttttgatatagtaacaacctatactcggtacgctagtcatactctagccgtaccgatgtgctactatatcagcctatactcggta

SEQ ID NO: 286476 - DNA, 604 bp, Cannabis indica
gagaggtttaaagatttgatgggccagtgcccacatcatggatacgaaagttggcgtcttgtcagctatttctacgacggtctcacagccgacaaaagacaattcgtacaaatgatgtgcaatggcgacttccttcagaaagatcccgaagaagctttggaatatcttgaagaaatttctgaaaaatcatacacatggagtgcaccaagtcctacagacaagccacgaacagccggagtctaccaattgaaggaggaggatagtgtgaaagctcaacttgaagctctgaaaaaacaatttgaggctttcaaaactcaagaaggtaaagcactccaaatggttgcaaaagtggaaaagcaagaaccatgctttatttgtggagggacagatcatcaaccacaagagtgccctaatcttagtatgttgaggggaggaaatgaggaacaatgtaatgccttaggggattacaagaagccttataatgcctactccaacacatacaatcctggttggcgtaaccatcccaatttcagttggaaggatacaagtcaaaatcaagcatctgggagccaatggaaacctgatcaacaaaataattctcttg

SEQ ID NO: 286477 - DNA, 727 bp, Cannabis indica
gtccaagttagggtctgggtcaggatctcggtctagatttaggtccagcatttcgatcccattctgggtcttggtccgagtccaggatcgtatccggatccctatctaggtccaagtctgtgtttgggatcaggtcccagatttaggtccaggtcggggcctctgttccggtctgggtaggggtcccatatccagacatcgactacgggttttgtccaagcccttggtctagatccggatcccaatctcgggtcggagtctggttctacttctggtgccgggtcttgagctgggtcctaggttcaagttcgggcatgggtcgggtactaggtcccgatcctagttctatttccctggtccctatcctgattctgggtccaagtcccggttattgtgtgggtttgggtcccggtctagttcgggttcgagtcctagtctcggttcgggtttaggtctttgtctgggtttttatctgggttcgggtttgggtttaggtcctggtcttggtaatagtcctagttcggtttagtttcatttgcgattctgagttcaagtttgggtttgagttcgggtcagagttccagtcctggtctaagtttgggttcgggtccgaatttcagtctaggtccagatcaagctccaggtgtgggttcgcgtcccaagttccattcccgatctgagtccggattaagttctgggtctaagtccttgattctgatcctggtct

SEQ ID NO: 286478 - DNA, 505 bp, Cannabis indica
ttccaatcccgatctgagtctggattcagttctgggtctaagtccttggttctggtcctggtctgggttcgagtttgggtccgggtccaggtctagctttgggtctgattttatgtgtgggtttgagttctggtccgagtctgtgtccgggtttgtgtccaggtctggaccccattctaggtctaggttcgggtccaggtccaagttagggtctgggtcaggatctcggtctagatttaggtccagcatttcgatcccattctgggtcttggtccgagtccaggatcgtatccggatccctatctaggtccaagtctgtgtttgggatcaggtcccagatttaggtccaggtcggggcctctgttccggtctgggtaggggtcccatatccagacatcgactacgggttttgtccaagcccttggtctagatccggatcccaatctcgggtcggagtctggttctacttctggtgccgggtcttgagctgggtcctaggttcaag

SEQ ID NO: 286479 - DNA, 743 bp, Cannabis indica
ttcattgttagatgcagaaaattcaaaacgtaaagcagcatgtaccttaaaattactgggactgattaataagatcccactaccagagccctcgctatttgaggctccatcgacgtacaatgtccacatctctctattcgctatagcaatgtcgcttttgtcttctatgagtgctacctcggtgctggggaattcaaggataaaatctgccaaggcttgccccttgatcgcagttcttggtttatacttgatgtcgaactgactcaactccatcgcccacttcaataacctccccgatgcttctggttttgccagaacttgccttaaggggtagtttgtcaaaacttcaatactgtgagcttggaaataaggtcgcaattttcttgacgatgttatcaaggcaaatgccaacttttccatttggggatagcgcgtctcggcatccagtaatcgcttactgacataatacacgggtattgccgtccttgatcctcgcgtactagtaccgaactaatcgcatattccgacactgctaaatagatggacaggacttcaccggtcattggctttgacaagatcggaggttgccccaagtgtgtttttaaggtttgaaaagcctgctcgcatttttcggtccaatggaaccttttgttgccttttaaaatctgaaaaaactccttgcacttatcagaagatcttgatataaagcggtttaaggctgcgactttacctgtgaggctttg

SEQ ID NO: 286480 - DNA, 395 bp, Cannabis indica
agtactctatcacaaagggtagaattgaagaagaaaagaaaagagaggggcggctaggaaataggttttctttgagagaaaataaattgcaagtcttagtttcctgaagccatcactttctatttagagaatgtcatctaggttcaggttagaattgtatggcattaaaataatgaaaaaatataaatggtaattactatacaaagtggccggccatataagggataatgggcctcactttgctattttgcgattttgttatttctcaatcccattttcttaaaaatgccaattttccaattttaacaatttaaatgtcaataccaagaacctcttttctttacaattttgcccttacttagtgaaaattcataaggtagacatagtctaacttt

SEQ ID NO: 286481 - DNA, 311 bp, Cannabis indica
tttagtgtcaacaatcaatgaaatgaacatcaaagaattaacaataccttacacacctaagataccatgtccatattctagaaaacaaaattaaagttgggctctcttttgacagcaaacataagtttctaaatgctagcataattctcatcactatcatcatctatactttaatctccttcaacaattgaatgctttgtctctatccttaaccacataactacagcaacatcaatttcagttctctccaaacttgaaagtccattgcccttgtctttgaatgagcctgacgaatgttgtctagatttaga

SEQ ID NO: 286482 - DNA, 558 bp, Cannabis indica
tcccattctctttctcagcctccaaatcgcgagccatctccgtaatcattgcctgcgactttttgacttcgagctccgcctgttctttcgccctgctaagttcttcgagctccttctccttggccttgctgagttcctcgagctctttctccattctcgccacttcttgcttcagcttttttatattctcctgaaaatgagcgttctgcctcttcagcgagtcagcttccttcgaaggagtagccgcagcttttatgaacaaagccatggactgcgcggccagttcagtagatcgagtaacaagatcctcgtaagggatctcagccaggaacttttcctgcatggccaggaagtcgcgagcgcgaacaggagggtcaatgacgactttcttccccttgtcctgagtggtcttggccagcttcttggaagagtctgcgacaagcgaagccatcacatcgctcttcctcttctgggcaacgaccggcgaagtcgtcgctgttccaccctttggtttgatcttcaggacaggggcagacttcagaaaagtcatatctgcga

SEQ ID NO: 286483 - DNA, 615 bp, Cannabis indica
taaatggacaagctccctcgcactccgctccaaccgctagcctggcaggcccttcccagggctcaaggagtaaacgatcctccaaaggcagcacccggacggaggagaaacgccaaaaaagggggtacactccccagtacacccagtacacggagctgacggactcccaagagcgtgtgtactttgctactaggcaaaatacgcactaccggagaccacctcccttatacaaggatagctcccggagggatccaaacaaaagatgcgagtaccacaacgacattgggcatagcaccaacgaatgcaagaatctcaaagacgagattgaaaacctgatccgattgggccacctctatgagtggatcaagaatcggctgcctcacctcaatccgggccaggcgacaggggttgtgccacagggaacaccgggggtgcagcaggagtattggctccagttgctcccgcgggcgatgcccagcacatccccggtctgccgcccagacccaacgggagggtagccatgatctccggaggaccccatattggaggaaccacccgcaaagaactaaagcggtacgcgggggccgtaaagcacaatgaggtttgggaggttac

SEQ ID NO: 286484 - DNA, 840 bp, Cannabis indica
ggttcttttcttcttcttttttttgtacatatttgctgctgccttagaacaatatatataggtagcagtttttattcgaaggggagacaattatattttaaggcctgtccccgggccatttatatgtatatgacctgccctttgggccaggatattttttatgtgatctttcttttgccacatacttatgttttttaacctgtcctttggatcaggatttttatgcttatgctttttatttttgtgcatactttttgacctgccctttgggtcaggatattttacttagtttgtttttctgtttgtccgtgcggtataccctagtacccccctgagtggtcgactaagtaaaacgttttaaacgtttttttttaagggtttttaacggacctacctacgttttaagtttttttaaataaccaaactaattaagtaagggaaggggtaaggttaactaactttaggtttacggggtaaccggtaaaacctaaaccttttcgtttaacgaaaaacgtaaacgttaacgtttaaagtttaattttttttagttttttttcgaccttacggttaaggttaaatttttactttttcgtagggtagggtagtacggtccggacttaccttaccggtacggtttcggttcggaccaaactaaggtttccggttacctacctaccttactttttttacgtttttacgttcgtttaagtttaagtttcgggtacgggaccggaccgtttacgttttcccgttcccgtacgtttactttactaattaggttcccggtttcccccttaaccctttaaggtttcccggaacccgtaaaccccgttaaccccc

SEQ ID NO: 286485 - DNA, 942 bp, Cannabis indica
tctcaactagtgtaggggccatgagcctatatcatcaagactcccaaaaaaataattctaaaaatttaccaagtaaattcccaatcttattaattcctcctgactccactatagattcgaaatcgcactcctgtttacatagaacaatctattcaccaagaataaatatgctataaattatccattatttcaatccaaataatcaaagatcctctataaatgatttacatcgagtatggacaaatttaccgttctacccttcagtgtattttatccttaaaatacttagctccttataaatgatttctcagtaaactaatataataactgaaataagagctcttccatttatgtctgttaagccaaactcaaagaaaattatcatttcacttctaaatatagttataaaagctatagattctatatctatgattagcactcccactcaattgcactaccatgttcccaagatgttagtattaggtcgattcaattggtcagctttaacaaacaagtcaaagagcacaaataatacagttaagctagaacctaaccatctcaggattaagatcttttaatctaaggtcaaataagtgatattgacttagaaaagatataatggtaaattatgatatcttttccactgtcaatattggtccagtctaatgtataatcaatacatctgatactagtatactttgtcaatgctctggaaagggcattccacttatacaagtgtaagtaaactttatcgctgattataacgttagtgtaaatccagtacactgataaatcatgggactaaagactttgaagcatataattataattattttccagtgtgattacatcactgtaattgtgaataactatatattctggatttaatagaaattgtctattaaaactataatcatgaaaattacatgtaaacttaaatga

SEQ ID NO: 286486 - DNA, 421 bp, Cannabis indica
tggtctacccgacctgagtactcactggtagtatttccctaaatgttctccatttcaatatcgtggtactagaatgagttgcatttttttgtcatacttacccagtttgtatgctccggagtcgagaacttcgaccacctgatatggtctttcccagtggggtcctagtacgcctgacgtgctgtctttggcgtttaggaatacccttcttaggaccatatctcccacaaagaatttccgagccttcacttgtttgttgaaataccgagctactttttgttgatgagctaccaactttaagtttgcagttgctcgtttttcttcgatttcatcaagtgattctgcaaggaatatgtgattggtaccttgatcgtacgtcaaccttatgtgattggtaccttaccgtaaaatctattcaagt

SEQ ID NO: 286487 - DNA, 571 bp, Cannabis indica
ctatcattcctacacgaggtttaagacagggtgatcctctttcaccttatctgtttcttctatgtgcggaaggattctcagcattgataagagactatgaacggttggggaagattcggggttgcaaagttgctagaggggctcctgtgttatcacacatgttctttgctgatgattgttatgtgttttgtaaagcatctgaggatagtgctacgaatatgattgagttgttagaaattttccaaaaggcttcaggacaacaagttaatttgcagaagtcctctatcttttttagtgctaataccggcagtggggtgcgacaacgactttgctctatgttgggagttaatgaggcaggtgatgatagcacatatttggggttgccaaatattgtggggcgtaataaaacggccttacttgggttcttgaaggaaaaaatgcgaaaaaggattcaaggttgggaaggaagattgctttctcgagcagggaaggaattgctcataaaaactgttgcccaatctcttcctagttatgcaatgaatgttttcttgctccctgtggaaacttgtaa

SEQ ID NO: 286488 - DNA, 596 bp, Cannabis indica
cgataatcaatacacattctgagggaaccatcttttctttttcatgaacaaaactggagctccccagggcgatacactgggtcggataaaccaaatatcaagcatcccctaaagttgtaacttaagctccttgagttctgctggaaccatcctatatggagctttagaaataggttcggctccaggtgccagatcaattacgaaatcaatttctcgttgcggtggcaatctcgacaattcctcgggaaacatgtcaagaaagtcttttaccactctgactacctcaggcccaattgtttcgggtctggtggagtctatcaccactgctaaaaatcctacacatccactgtgtagtaaatctctagccctcagtacataaataatcgggatccgagacccctgaactgatccaacataaacaaatggatcttcacattctggctaaaaagtcaccatttttcgtttacaatctatactggccgaatacttggacagaagtatgatgtcaaactcagttaattcctgttctataaggttagcactcaactccctatcctcgatcctaaccggcatagacctaatgcgcctattagaga

SEQ ID NO: 286489 - DNA, 631 bp, Cannabis indica
aatttattccatttttagcattctatcatttccacatcttaattttatgcataatattaattcatgaatttattcataatcttagttattaatattatcttgttatggcataaattaatgtttattttaaataattagtgcttattttcttacctatcgtaagattaagcatgaaaaattatttggtaatgaggaacatttaaatattaatttatttaaatattgtatcttcctccaatataagattaagatccttataagtaattaattatcctatcgataataattgcttgctaaggatgcttaatatggtgaagaaaatttattaaatattatgaatcacaatttatctatcctttcgatagtaaattaatgtatttgattataatatttaatagattgttcttacctgtgtatgagttctactttattaatttgtctaagaactctagcatacatgatgatcatttgttattttgcgatcatttatttatgagaaaagagcacaaatgacatgattttgttataacatgcatttaatggttattgctcttgtttctcattcagctttaagcattccaagaacctctgccatgttgacactgaatggaaccaaccacaaacagtgggt

SEQ ID NO: 286490 - DNA, 820 bp, Cannabis indica
atgcacctcatttaattagttttattttgtataagaattaagaatatatatttttaatttttactttttttttcttgccactcacattataaaaataattacatatacagaataaaatgtattttttaaaatattaggacaaaaaaagaattaaaacaaaagtacatgacatattattagaataaaaatatataaaaaaaaacatcacaaaagaaatattattgaaattaacacaaaaaaatgtgatagatttttttttttttaaaaaaagaattattcttgttaattaagaataagaataaattttaaaaattgatttaagttgatttttttttttacaaaaaaaaattgggcagcacttccccttaaattttctctatcccaaaaataaaaattcactcaaacaatattcccaaacactcaataccacaatacaataataacaaacccaatatcatcaatatttttgcacaacacacatttatatcactcaaaatctaaaaaaaaattaatcaaattttttaaagaatgaagaaagtgatacttacaaacccgaaaaagctttactccacctccattgttgaatgttcttgaaagcttgaggttgaagttgaaaacaatggtgatttttggatttgggctattatgggttatttttggtgtgggttttgatgatatgtgtagattgttgagtgaaattgggtttttgaatagattgggtttaagaaatttgagaaaagatgaaaagattgaagattggagatgaaaaattgaatttttgagatggaaagagggtagggtcggctgagacgatttgaaa

SEQ ID NO: 286491 - DNA, 567 bp, Cannabis indica
tcctttatttttcttcttgggagatttttatttcttacacttgggttattgtttagcttgctgctgaggctggccgcctctccaagaacatcataaatcatggcttcgttctgtccgactttggggacatgaacgatgtaacgccctgactctcagggacgccacgtgtgtgcttttataaacttattattattactaatctataaatttttagaaaaagtgtggtttaattaaaacctttaattaaattcaacataaagactttcattttaaatactgttgtaatatggggatcccctgctaaggaaattcttttacaactaattacaaatccatttgaacaagaataggttatacatcaaatcatagaaaagggttgatcctgcttcacaaaagccaagataacacggttgatatgtacactgctggaagacctttgacccatggccgaacagaactgctaatcttcttacctgcaccatgaagtacccgtgagtcacagtgactcagcaagaaaagctactagataaagaaaatcatggaaaataatagcaaattatagtacca

SEQ ID NO: 286492 - DNA, 353 bp, Cannabis indica
aacattaaatgttatttctgatctaaagtaataattaaatctgattaaattgaaatgagttttatttagggcataaaacccaacagtcagcacagtggaatataatcataattacatgtttgaaagtttattccctgatttatcagttcactggatttagacttgcatgataatcaacaatacatattcttacaccttggataagtgttatgtcctttccagggcattgggaaagtttaccagtatcggatgatacatacatttttagaacatgatagtataattaagtgagagcgctaacataaatatggagtgtataacttctgtaggaatttagaagtgaaacgatgata

SEQ ID NO: 286493 - DNA, 654 bp, Cannabis indica
tgtcacgtcagagtgcaaaaattgggataacatttgccccccaagtctgtacgggacttctgaagttgcgtgtacactttatccaagctgcttctgccgttggatggggacacgtgttgagtgcgaccgtctgagactcgatgtaaagctgactgggcgtgccttcggtttttggctaataaatgctttgacaattaatattttgaaatccaattttctctctccacggctgacgactccacttgattatttttatttcccatattctcttttaagaagggatactgaggcgtcttagtttcctttgagatgattacctcttttcgcgacttgcctataaatttcaaacatcattggcacataaactcattttcatcacccttctttgctaagtaagcttcagagcaaaaagagagattcttggcttcaaagttgcagaagcgccttcataaaaactgcttgttggattgacgttgctcgaacccagacatctgactctcgagtaagtttctggtttcctttatgcttatctttgcatgttttcatttcaaatgcaccttctactttgctgtagaaaaatgtctaggaaaccctaggctcagaaacctctgcgattcttctttatcatgtcttcgtgtgattttacagtcataa

SEQ ID NO: 286494 - DNA, 587 bp, Cannabis indica
aaaaaactgaaaaatttatcaaaaaatttctctctgtccgtcccactctctcgtccctctctctcttccctcttgaatggttgtttctcggtgggtgttggtggaaaaccgaagcacaacccaatatcactcaagaatcttacaccattataatgggtaagttgtgttttaagcattttgtttgactttatgtagtttaaaattgttatatgtgtgttatttgttggaactgctgttttttggtctgaaattgttgagatctggcagatctggttttcagtcgaaatctgggttttccagtgttatcgatgatatatcgataacttatcgatggtttgtcgatgattacacgaggaaaggtcagtgatgaccattatcgacgttatgtcgacagtatgtcgacatgatgtcgacattaagcaaccaacatattatttacaatttgtcgacattttgtcgacagtttgtcgatagcatgtcgacaaaaagcatttatcttttctttagaagttgtcgatattttgtcgacaccatgtcgacattatatcgatgcaaatgaaaaaaaccataaataaaacataacataa

SEQ ID NO: 286495 - DNA, 700 bp, Cannabis indica
cataaaatcaacaagaaaactacagaaaaataacatgaaaataacaacaaaaaataacatacagataacaaaaaaatcaacaacaaattaacaagattacaacaaaaaaagaccgtattttctgtaaataaaataaaaaaaatcgtaaaaatatttaaaatttcgtgaaaccatatttttgtaacttttttgttgtttttatgtttttgtaaaataatcccaataataaatgtagagcacattatttttaatttttggctgaagtaagtaaattattaactgggcctcttctcaaagacttatcagcgagcccgtgatgtgagcattttgggccatattttatcgatggttcattagactaaatgggcccatttccctcttagttaatttgggccatacctacgggctgatttcgtcactggcgaagtttacattcaattataataatgttttataataagattgtgggtgattctacaatgcacccctttaaaagggatgtactgatgcaccctctatttaagatatcttataaaattttgagaaatttggaataatttataatagggctgaacatcgggcgggtttaccgggtttcgggttgccaggtttcgggttcacgggtttcaaacagtctattttacacacgtataaaataaaaagtcacgcgtgcaacacattgcttgaacgcaattttcag

SEQ ID NO: 286496 - DNA, 769 bp, Cannabis indica
ataatcgacctctgtacgtgacgggtatggttgctgataatcgcgtgagccgcatcatgttggattgtggatcggctgtgaatgtatccccttaaaaaccttgagagatgttggtttacacccacgtcaattgtctccatcatcattgactattcaaggttttaaccaagctggagaaaaagtaaggggaagtatcacactaaaaattgaaataggcgagttaaattctgaagccttatttcatgtcatcgattcagatacatcctacaatgtgttgttagggcgaccatggcttcatgaatatggagtcattccttcaacactccaccaatgctttaagttttgcaaggaaggcaaagtcaaaagtgtcaatgcagacccgaatcccttttacggggaacaagtgaattatgccgatgcaaaattttacaagccagctaatgtcaccatcttgaaagggaaacctgaggagagcaaacgtcacgaaaactcagtcgtacaaaactctccacaaattaagcgactatcccttgtgaaatctcctcagtccaaagaggagaacttgaaggtatctaaccaaaaacgaacctttaagtatatccctaaaagtcaacgaggagtagggcaaaaagctttgacaccgatcgaagattcgatgacagccctgatgacaagctttactttaccactaaggaaaatcgatcagtcactacccaagggtaaaatgcaaatttcagtttcctttggtaaagatagcaagaaaaataaa

SEQ ID NO: 286497 - DNA, 762 bp, Cannabis indica
ttacttcccatgcctacacgtagtaaaaattgaagagctgagtaatcttaatgaacagtaaaaagatgagtatgatgcatgagagtgaaaagattaatcagtaatcatctttgagccataaaagattggtgtgatgcatggaaacgaaagaagagcatgatgatccatggacagggggaacaccaaccctccacgcagtaaaataaaaaaaacataaaaaaaatataaatagaaaggtgagtgatcaacttgaacagcaaaaaaaaaattgtctgtgtgaagaaaaaaaaacgttgagcatttcttccttaaacacagacaagggggctaatgttgatgagtaaaaaaaagggaaatagaaaagattgtgtaaataaataaaataatgacagtagaaggagcaaattagtaaatagatgtatagatgaataaaaatatacatgaataatagccgcacaaaacctgagacgaatgtatacctgtgtttaggtgtgaatgcataaaggtaaaagcagctgccacttgatttctttacgaagatagggttcacctcaaagaggcacgatacgctacccctataaatacactcaccaaagctatcagctagaaggacagacagagagaagtaaagaggagaaagaaggtgttcagtcccatcacgcttgtcttatcaatcttcaaacaaattttccctttgctttctattccctttgctgtagaggctgtttgtaagcgtcgaagcataaacagcatgcttgcata

SEQ ID NO: 286498 - DNA, 743 bp, Cannabis indica
gttggccattgttggttattcatggccatttcttcgagcagatcataggcctcgtttacactttttctcataaatgccccaccagctgcggcgtctataattgttctggtattaccaatcagcccattgtagaaattatgaaccaacatccacttttcgatcccatgatgtggacattttctgatgagatccttgaacctctcccaagcctcatagagagattcattgtccagttgacaaaaattattaatttcacctcgcagcttggcagcttttgctggaggaaaaaacttggacaagaactttgtcgccaaatcagtccatgtagcaatggagttgggtggcaaggagatcaaccaactcttagctcgctctctcagcgagaatgggaaaagtctcaagcggatggcatcatcactaactccattgactttgaaagtctgacataactccatgaaatttgacaagtgcagattggggtcttcagaggggagtccaccgaactgaactgaggattgcaccatttggagtatggctggctttatctcaaagttgttggcatctacggcgggtggtcttatacaagactggacccccgtaaaagttggaagaatgtagtccctcagactacgaccattagcttgatcttcaacggcacctccattattaccgttgttgcctccattgttaccgccattagcattctcagccatgatttcttgtgtttcagcagttgctgaaac

SEQ ID NO: 286499 - DNA, 1155 bp, Cannabis indica
accaatttaaactatgtagtgcttctcatcaacgggccgaagtgggtcaacattcacattggttgttgatggcttcatcttcttcttcatttcggtgtactcgtcaaaccaccttggccttttcttcgttctcttctccaccggtgttggaacggtctctaaaacctgaacctctgaatcttgggtatctccaatggacgtgaccgacatgttctgaggtgtctggagtacatcttccacatcattaggtctgtaatcattcggaagaatgaactcatctcctggagacacggcgtctggctgtggctctgcctctgcgctgggccttctctgatctcccataagagccaatagggtcttcaagtaacccattatctcattctgccctttcaaaatatcagtctggccttgcttcaaagcaagctgttccttttcaacacgctccaatcttgccaatatggcagaagatattggcacctgaggctgtgaggtgctgggaatagatgctgactgcggcatagatgcagaatcgggcattgaggcagacggtggaacagaacgggcccctgatggtggagaatgtggtggtgtatcatctctgaagattccagcttcctccgctcgctgttctagcgtgagtgcaagctttgaagcttggctgcgcaaactatcctgagtaggctggccatcatcgccaataaccaattcctccatatccacaaatagaggcgcctcacctccagtgacgtggctcaaaaactcggcctcattactccgcggacataaaacggagtacactgtcaactgcaaattataacaaattgattattagacttaaattaaaataaaataaataaataaacgtaagcaaatgcaatgaattaacaaactcactttttttgcaaataatctgatgacttcctctttcccgagtggggcatccttactctcccagttcaccattcggggaaagcgatgcgatcttctgattgcaaatttctcagcaagctcgaggatggactcataagcccaatactgcaatgctacagcatatccataggccgaatactttgactccttctgagtcgttcccttctcaatcttctcatccatatgctttttcttttgtacgaagtccttactccaagtatcttt

SEQ ID NO: 286500 - DNA, 916 bp, Cannabis indica
gtaaacaaattaaaaactagtatttttttagtaacaatactagttctggtatgaagttgggaataagttggctgttgaaatcaatagtttagagggaaacatcaaatacttgggcctccctttgtttcggtccagacagaaacatgttgattttttcaattagcgttgaataatctcacttttaaacttcatgggtggaaagctaaaaatttgtccaaagttggtaggcctactctaattaaatcagtaggtctgtctctcctagtctatgctatgtagataactcaattcttgaaaagactggccgagaggattgatggataaattagagaattctggtggggttttgagaaaaataatagtggtctataccttagagcttgggacaagttgtgcctccctaaatcttgtggaggcttgggttttctaaaaactagtgaaatgaatcaagcgttcctagctaagtgtggtgtgatgccccatggcacacccacaaggggccattttataacatgagcatgccttggtgcttgatcatcagtcaagtcttgcaccaagcacctcattaggggtggggagacttttgtaattaacttttctttttgtaattttacacatatgtatggagagctaaaaatcatatatgttcttagaaattctttgaaaccccattaagctctttagggggtgacttggtgacttagaaagtaccttgtcaccaacatgataggggcacagctgtgtactccattatcctatcaaggtcatataataataaaaacgatatttatctatacttcttgtgcatgtttctatgtttcctatgtgatgactaattttttgcctttgttgggccattgtgtgtcgtttgcttatatgtttacttgtggattgtgtgagattggtccttggggac

SEQ ID NO: 286501 - DNA, 938 bp, Cannabis indica
attcctacttgctatgtgctaataatttctgaatgagattttgtgttgaaccttacttgatttctatttattgttatttgtagtatccaacatgacaatgaccaaccccatggtgtcactattgactgataataagctgaatggatctaactttcccaaatggaaagagaacattaacattgctctcattggtgaaaaggccctgtttgtgttaactgaagcggctcctgagcagccgtgtgagaatgcaaccaaagcagtaaggagaagttcgagcgttggcagaatgccaacaaagcttgatacttcatgctgtctagcatggttgacaccttgaaaacaaggtttgctaacactctcacggttgcagaaatcttgaaccagttgactgaactattcagacaggcatcaattcaagctcgctttgaagcgacaaagaatttcatcaatgcacggatgaaacctcatcagaacgtgcgtgatcaccttctccaaatggcgagttacttccaagaagctcagaatcatggagctgttatggatcagacaactcaagtgagtctgatcttgaacagtttgactccagcctttctaccttatacttcaaattatgtcatgaacaagttggaacttgatttcacgagttagtaaacaaccttcagacatttgaaaatttgattggaggaccacagaaaggaggatctaaaactcctaattctggaaatgctaatggggcggctaaggctgaggcaaactttgcctctacttccaaacccaagaacaagaagaagtggaagaatagcaagaagcctgttcaagctgtaaaacagttaaaaagaaaaaggctgctactcccggtgataagccaaaaggaaaatgcttctattgcaatgaaaagggccactggaaaccccaatgccctaagtttctagcaaaga

SEQ ID NO: 286502 - DNA, 509 bp, Cannabis indica
ggaaccctgccaaaaccgggtagccggtttttgtggctctgcaaaccggctagccggtttgcaccagtttccccaaagcttttcatttgttgctcaactctccaccaattgccatgaaaccttccagagctcctatacaatgcataagcaacaaaatccaggcagtatttcacagaacaaaccattcaaaatcaatttgccattaaagctcaaagctttgaactcaatgttcaaagttgcataaaatcaatcaataacctcaaaaccagctgctatgggctaaattcaactcaaataaactataaaattcgaaccctaatcatttcaaaacctaacagccactaaacctagaaatctcataataaccatccatgaattcaagaataaagagggataaaaactagagctcaccttagcttcaaagacaccttgaattcttcgctgcaaacacaaaaatcacagcccctttccccttgttcttgctgccttcgaagagagagagagagaga

SEQ ID NO: 286503 - DNA, 613 bp, Cannabis indica
gttgtagatatttccttgtaaagctgaaagtttgttagagtcttgagatatttgtttgcttcctaatattgtaaagagataagagatctaggcctatgaaaaatagaaccgacaactctatgagttataatggtctgttgaggcttgtaaaagatctttgttttattttccttgtaacttttatatgcgacagatagtatgagaatttatccaacaatttccacctaaatttccatactaacagtccaaaaaagtatttgcctttgctttatttacttgttgttgtctttgagggtcattgcttgattatgtgtccatttaccatactgtgtcaactcccaacaggttcatacaatgtttgaacttgttgagagtcaccaccttagttcccatatctgctgggttctcctcagtagaaactttttccacttgtatctcaacttgattcaccttgtcccttataaagtggtatttaatctctatatgtttagttcggtcatggaacacagggttcctacacaagtgtacacaactttgactgtctgagtacactctagaacctctttatgaaacttgatctctgtcaagagtcctttcacccatatgatttttt

SEQ ID NO: 286504 - DNA, 581 bp, Cannabis indica
ataaatatccataataaattatttaaatggctataaataatttcatgattaaacataaacaactgctaatttccaaattaactaagcgggctttacaaaacatgttcaaacaagaaaattagaaaaatatcaaaaatcctaacttttcggtaagcttttcgatttgcttaaaaactagaaatctaccaaaaatgagttcgatgcaaccaaatcgaaaaattcttttttcagtagttcaagaattttaaatgtgaggtgtacaaacttacagaattgaaaaatattgaaaattgatcaagtttggtaaaaaacactcttttaggtcttaaaaagtcaaaattatgcaagatagtaccaaaatcaagatttgagcattatttttgagacagtttatatatgagtatttaaacatgtaaaagctttcaaaacaacaattttctcaacaatatgaaattttggcaaatttcacccattatggccttaaaaagttaaaaataagcaaataacataccaaaattttgttcaaagcatatttcaatcaagaaaaacctttaggcatgctaaatacactcatttggaca

SEQ ID NO: 286505 - DNA, 700 bp, Cannabis indica
gttgttgcacttgcttgctcaaagcgagcaaagcgatctacgggaggctccgtggctgaggacgccgctggggtaggcgttgttttcggggctcgaggtggaccaaaatttataggcccccgaggattcagggcgccttcttccttccacatgggtacacccgccttgcggcaaagagcagtgatggtagcagggaggaataacttccccttccccctgtgtgcacaatcagcaatctcttgggcaaggacagccccgacgtcaacatcccagcccattctaatgcaatagagcatccaggcgcggtctctgctgacggtcgaatcatgtgaagtagggcagagagcagtttgcacgaatgtataccaacatttcaactcgtgctccaaatcagtgcgccgaaatcgaagattgccataattatcaaaactccattcagatcctggcttagcgagcatcggcatcatgtcacccacagtctcgtcgctcacctgccctttttgcgcggagtattggcactcgacagagtttaacccaaacaggtcgttgattgctgcagctgaaaatgagactgggacttcacgcaccaccactacagtgggccattcttgggataggaagttggcgtaaaattccttgacaacttccatgaccgcctgctctctttgttggacaaaaagtccccaatctcgcttatgaa

SEQ ID NO: 286506 - DNA, 509 bp, Cannabis indica
tatttggggtaggattttgggtgatgtttggggtagtgattggagtggtaatactaggttgggggggggggggtaggatttgaggtggtgtttagagtaggactttgggtagtattcaaggtagtgtttggatcatgcaattcacctaattgagaagaagttggtacaataaacttatccatcatggctgccaaaaaaaattatataaacaattaagcaacatattaaaaaaataacacaaaatcactagcaaaaaaaattatacttcatttcatacataaaaaataaaattatttctaagataaacattgaaaataaatatttatttgccacactaacttaatatatttatttgccaatataatatagtgacttaaaattatcatacccaacacttcaaattagactttcatatttactaaaacacaccattgattttgaaattagtattaatatagctactgtttatttctaaaaagaatgcatataatggtagcttgtatatcttc

SEQ ID NO: 286507 - DNA, 787 bp, Cannabis indica
ctgagtttgagatgaaagacttggggatagcatctaagatactgggtatcactataaagagggacagaaagttgggcaagttattcttgacacaagaggactacattcaaaagattatagagaagttttcaatgaaagattcaaagaaaacttctcagccaataactagccagtacactttgacaaaggaacaatgtcctaagactgaagcagagaaggaagcaatgagtaaagtgccttactcaagtgctgttgggactattatgtacttaatggtttgtacaaggccagatctggcctttgccataagtaccttgagcaaatacatggcaaacccaggaaagattcattggcttgcaatgaaatgggttttcaggtacctagtagggacacctaaggttggactcatctacaagcaacagaagttcagcaccaacatagaaggatacagcgatgccgactatgccggggacagagacagcagaaagtctacttcatcttacatgttcctacttggaggaaactgtgtgagttggaaagcccaactccaacctgtggttgcactttcaacaacagaatcggagtacatatcaaccacagaagctattaaagaagccatatggatgaaaggacttttgacagagatcaagttacttaaagaggttcctagagtgtactcagacagtcaaagctgtgtacacttatgtaggaaccctgtgttccatgaccgaactaaacatatagagattaaataccactttataagggacaaggtgactcaaggtga

SEQ ID NO: 286508 - DNA, 560 bp, Cannabis indica
aataataactagtactagaaataactatctagaatatatttcaatttatctaagtgtttgtctaaaatttgaaaaggaaactaatttaagttgttatagaaaaaatctaaaatatcctacttaaatatttttcaaataaaatttaattaaatatcaaagttaagttgtaaccacctaatttaaaaaaatattccattttaagttgattttaagaatttttaaaaaaatcaacttaaaaaatatcttaagaatcttcaataaccaattcctagaattcctcaacttaattttgaattcaaaagatattcaaatttaagttgagaaataaaattagttagaaataactaatttacaacttaaataggaatatttaatgaaataaaaaaaaattaagcttcagaaagaatctagtcattatttattctttatttaattaaatacaagaaaaaaaagatagtttatctagaacataattcataaaactaattgtgtttttcttaaaattaactttaaaatattaaaataaaaaaattacatatattttaaaacttaattatgtt

SEQ ID NO: 286509 - DNA, 529 bp, Cannabis indica
aaataaaatccaaacaacaccaaaacttccagacctgttctaaatatcccatagaacatttccaaagcaccaaaacaacccagaacacacagatactaaaaatgccatgtgagctccaagctttgagtttcaaactcaaacttggctaaagctcacctacaagcatcaaaacctcaatcaaactacatattcatgcatataaaaactgtagaaactgaactcaagcacaaccaaactttacagcaactattttcacattttctctttgaaaaccaaagcttttgaataaaaattccataactttaaacaacaccaccaacatgcatcacaagtagctctaatctacacaaatactcatgaataaacttcagaaatcaacaacaacatacagcagcaagaacactcaaaaattaagcatgcaaaacatcattttcttccaaaaatttccaagaaacttaaaagaagtgtgaaatcataccaacaatttggaaacactaaaacttgctaaaaggagcttgaatcaccaaga

SEQ ID NO: 286510 - DNA, 856 bp, Cannabis indica
aaagtactatgatgatcccgagccacataaggatatggcaattacagtttttaaaaactacagtattcacattaatctttatcatatttttacctggtttagtccaatgctctaccccatcattaagagtcgtgaaaatcatccaagggtccatgttattactttgagcattcaaccattgatcaagaacgagcttaaaagatactgcaacaccctccaccgtattcactttccttctccaaacaagatcattacgagaattacaaaaagactaacagagcatagcaaccgccatagtatcatcacaagagtcaaaaagctttgcaatcaccccaagaaactgttttcagcaacagtccacaccctcatgccaagccaaatccaacagctatgagcaaaagaacaacaaactaaagaatgaagaatagtctcaatcccagaatgacaacttcccacacttcttttgtaatgaataatgtcaatattacttaacaagcattgtcaaattaaaatcaccaagcttatgaaaacccaacctccattagatttatccacacacatcctctcccaactcatctaagaaatcttcatgccttgagtgagaattagagtatttccatcatccatcctaattcctcatgcatgcctttacgtaacaaaaacactcctattgcataattaggcaaagcttgaaccacaaaaattctataaaagttccttaccatctcttgacataactttatacgctttcgaatcttttagtcaaaattaagatagcattctattacgactcatagtactaggcagcccaagcccaacgactaagtaaaaatgctcaccactctcaacaatgccc

SEQ ID NO: 286511 - DNA, 433 bp, Cannabis indica
acgttcggactaagctttaaaaagttctaaactcgatttctaactcaaaatcacttcaaattcaacaagtaaacacataaactagtcccatagttaccaaagaacagttctacgaagtcagaatctccataccctttttaaatcataaagcccctatataaaaccaatcgtttttaaacttaaaacgaaattaaaccataccttaagctttcccttttcaaggatttgctatcttgctactaccggagcttagatcgctaagtgttggattgaaaatcgaaaaaaatggatatagaaggagaaagttttatcgaaggagggagaacaagggtttcgttcgtcgttcgtcgttctgttcactgtaacttaatatatatatataattaaagttaacgtattacgttaacttatatatataaataatattataata

SEQ ID NO: 286512 - DNA, 542 bp, Cannabis indica
ggatcaagctattattttgttggcatcattaccaaaatcatatgagacattagtgactacacttttggttggaaagactactttaactgtagatgaggtgtcaactgctcttttggagacagatagtatcaagcaaccaagtggtgtgtctcatactgatcaagctcttgtgacaaggtcagaatcaagtcgtggtaggagtacatcgagaggaagatatgatgacaaaagagacaatcgcgctcattcacgcttttcgagggaagtggagtgctactattgtcacaaaaagggacatgttaggcggaattgtgaagagttgactaagcatcttgaagcaatgaggaatcaagaatgcaaagacacatcagattccacaaatgttgctggtgaaggctttgaaagtgactctgatgttctctctgtcatagctgatgaaaacttttctgactcttggattttggattctggttgttcgttccacatgtgcccgtataaggagtgctttgacacttataaggcatatgatggatgtactgttt

SEQ ID NO: 286513 - DNA, 998 bp, Cannabis indica
cgccatttcttgttcggcttaggcacgagtacgggattcgcaacccaagccgggtagaaagcttcaatgatgaagttgttgttgcgcaacttttcaacttcgtctttcagggctactgctcgttctttatccagcagtcttcgtttttactgaactggtcgtatattaggatcgatattcaggacgtgcaaaataaaagaaggatcgattccgaccatatccgcatgtgaccaggcaaaaacatctaggtttgctctcaggaatttgatcaatttcgattttactccgagcaacaaaccttttccgattttctgcattctggctaggatatctggatcgaccttgatctcttctaattcttccacgagtccaacatttctgcttgggtccccaagtcgaggatccacatcttcatcctcgccttgggcggtttcctacttgggaatatttattcccttgtccgggctctggctggaggatatttccttcttagccttgaccactgcaaggttgtaacattcccgaggagatcgctggttctctctaagacaccctaccccgtttttggttgggaacttcaggcacgagtggaatattgatgtgatagcttttaagtcatacaaggtaggtcggcctagcattacgttaaaggctgaaggaacatccaatatcaagaattgtgccatgatagttatgctccttggagcttgtccaactgtgaggggtaggcagatttttcctagaggtgcaactccatgaccacagaaaccatatacgggctgaaggcatggagttaaatccttgagctggagcccaatcttctcgtaagcagtcttgaacaaaatatttgaagaaggcccattatcgatcatggttctagacaccattttatttgctatctggacttccacgaccagcgggtcgttgtgcggaaatcttatctggacagcatctttgtcgccgaatgttatggttggctctcctgctcgtcgaacttt

SEQ ID NO: 286514 - DNA, 579 bp, Cannabis indica
attgcatgttgaacttgttttgttcaacttttgactcgggactccatttcagacgttctttatatcgttggaaagctcattctaagctctatatgtttatctatattttcaataccaattttatattatgtgaaattggatttagggattaacgctatacttgtgaatcccagaaattgtgactaggattaccggcacttggtcaggagcatttggagatttggaatctccacgtttgcaggacatcatgtaagacactagttagcacgtagagtatgcatggtggcgcttatattgaaaatgatatatgtgcgtaattgggaactgagattagggttatcattctaacatgacaagtttaatggtctagggttattaccctagtgattattaatgtgaatgtgctatgccatgttatatataagtgtatattgagatttagggttatgcgttcaaggcataatcggcttggactcagtgactagaaccgagatgaaccgttctaaggccttattgtattttgacgtgtgagcgtaacacgtaggtctatgccacatacacataaataggcgtgtgagc

SEQ ID NO: 286515 - DNA, 904 bp, Cannabis indica
attaggtgacaatctatctcaacgtgcttcgtacgctcatggaagactggattttctgatatgtgaagggctgcactgttgtcacaaaaaagagttgatggaagcttgaaactgatgctgagttcatgcatgatagaatgaagccaagagagctcacaagtggcattggccatggctcgatattcggcttcagctgaggagcgtgagacagtgtgctgcttctttgatttccaggaaatgagggagttgccaagaaatatgcaataccctgaaatggagcgtcgagtgtcaaggcaagcaccccaatctacatctgcaaatgcgtgaagttgaagtggtgttggtgcagaggcatggaagaacaagccttggccgggagtgcctttgagatattggagaattctggtggcagcatgaaggtgaggttcgcgaggtgtttgaagaaattggcttaatttatttactgcgaaagagatgtcaggtctcgtaattgtgagatatattagcttgccaatgagactacgatattgtgtaggattttgtaattgttttcctgtctcattgttgagtttaaggtttgtttccatgggagtggaaactggtttagtgccaagagtgccagtatctgttaatagttgaatggtgaatgggcgttgagaaacagagattccttttgtggaatgggcaatttcaagcccaagaaagaaccgcagcttgcctaagtctttaagtttgaattgcttgtcgagagtagtgacaaaatcagacagttctgtagtgttattggttgccactatgatatcgtcgacataaacgagcaaggccatgaagaaccctgcttgtttttaataaacagagtgttatcgttttttgattgtttgaatccatgagctatgagtgtggt

SEQ ID NO: 286516 - DNA, 543 bp, Cannabis indica
tgttttcttaaaaaatggtgaaaatatgagtgaattgcatgcttacttgaagtgttgttgctgctgtgtttgtgatatattttcagaggtttaatcttgtttaattgagtagaatagagctggttatgatgcatgctagttgtgttgttcaaagtttggaatttttagctcaaaaatgtgatttttgaaggaaattgtataatctgttgctgggatgttgcttgatgtttttagttgttttcagaggttataatatgcttgtttaagaggatttgagttggtttgaatgcatgttaggtgattttactcaagtttgagtttagaactcaaagcttgagctttaatggcactttttgctatggtgcaatctgggtggttttggtgccttagaaatgttctttgggtcatatggaataggtctggaaggtttgaattgatttggagtcgatttgtgcaagttatgaatttttgagtttgctgcaatccgccgctcagctaaagttccagtcaggttgaccggcacacctgaattcagaatccagg

SEQ ID NO: 286517 - DNA, 738 bp, Cannabis indica
aacggagaaccaaccttgaaggtttggacctgaaccatccaacgtcgagggatcaatccgcaaggtatccaaaccaaagcacacaaattgatgaagaccctgaatggcgtaatcctcgcagtcgaccatcaagagacaacgacgcagaatcgccctcttcatcatcgcatggtcgcactccaagcaggtatacaaggtccggctctgtacagacgcaacagggaggacattaccatgtacatcgaggtgatctgcgtgatcacctcaacacagtttttagggcacgctctcgcgtcccacataatactgagacactccgtgatccccatgcagacgatcagggtgccaacacttataataacccgcctaccgcgccgatcgcgaccactgggatcaatgtcccagcaaatctcgccgcagtagttgcgactcccgcagtcgtagcagccccggctcctgcgactggagggattgaccaaagcatgcttctgcaggctttgaaaatgctcgagcagcaacggaagcccatataaaagttgcatggtacctcgcccttcaccacaaaagtgcgacaagctcagcttccaaaggggtttcgtctactccgaaaaccctcaaatatgaaggtacttctaaacccaatagattaccttgaaaaaatttaatactatattggaggtggatcaggtaccgcagctcgcaaaagtgccgcattcttgcggcaacactcgaggaaaa

SEQ ID NO: 286518 - DNA, 778 bp, Cannabis indica
ggtgctgatgttttctttcagcaattgcattttgctcaggtgtttcaacacatgagaactcatgtagaatgccatgtttagaaaataaatccttaaaacaccagttctggtgcattatcagaacgaaacaccttaaaaacctgcttaaattgggtttgaacataggtcagaaattgaggcaaaatgaacttaacatcagatttgtgttgcatcaaaaatatccatgtgaatctggaaaaatcatcaactaaagtaaaaaaatatctgtgattagtgtgtgatacaacatgatatggtccccaaacatcacaatgaacaatatcaaagattttattagacaccgtattgctatttggaaaagggagttttctttgtttagcaataggacaaatatagcaaggagaagttttatgcaaatcggacatgttacaattgagagtatttttaagtagattcagtcgtttatttgataagtgtccaagccgcgagtgccaaacttcatctgagacagagaagacttgagatggacttggtgtagtatcaagaatgtatagatctttgacattactacctcttccaatcgtcctcttgctggttttgtcatgcattgtaaactcatcagcagtgaaataaaaagaaattggagaattcttagtgaggtaacttatagagatgagatttgttgtagaaaattatattgctttataattgtgcaagtgtacacaatcacaaacaagtaatacaatgataagtaatcaaagttcgtctccacagggac

SEQ ID NO: 286519 - DNA, 646 bp, Cannabis indica
ttgttgcatgttaagtggattagtgttaatcttgttaaaattgagcttgttgttgttgtatgtttctttgatgaatttgggcagagattttatggtattttctagcttggaatcatgtgttgttaaggttgttgctgctgaaattgttgaattgagtgagttgaagctcaagttcatgagcttgaagattgcttagtcaaaacatgattttgtgatatatatgcaatctggttttggggggttttatgttggaattgatgcatgaaatatgttattttgaccccttaataattgctagcaaccctatttgttgatttgagagtttggttgtgaattgggatgatttggatgagtttttggcatgaaaagcgttgttggtttttgagttttctgggtttcgaacccaggtgccgcggcatggtatttaccatgccggggcgcgcccatttctttctgggcagaccctttttgcaaactttaaatggccataactttgtgatccagactccgatttgggagttctatataccgttggaaagctctttccgagctctatttgaatatctgaattttgaacaccatgtgaatattttatgaaaatgaaatcaggggttaaccctatttgtgaaatcccggattgtgtgac

SEQ ID NO: 286520 - DNA, 684 bp, Cannabis indica
acttagcttaggaactagtgatttgttaatagtgataagattaagcttatatgtattgctatttgtctaaatatgtgcatctaagttttagttatatgtttttcttttattttatgtgactacgtgacaagcatttccttactgagtttagtagctcacccttatcaaacttaccatgtgcagattaaggttctaaaacttagaaagccggtggcaagtgagaccttggaggcttgtgtgtgtactcgctgaggaccatataactgagggtggtctagggcacgctccatttattttatttagtgttattaaattaatgtcgcagttatttttatttattaattattatgtcttttaagtccaaactgagctcaaatatgaaatattttatgtttataaataaaagcgacattatagtttttccgcattttaacgcttgtaactaaattagtaatttatgaaaaagtacgggcgttacagtcgcagaaactatgctctttgcaagtgcaaaagatagaaaccctgttttagtactatgacgtattacggggtcattgaagaaatatgggagctcaattattttgcgttccgaattccactttttaaatgttcttgggttgacaacaacgttggagtaaaaactgacgagcttggttttactttggttgatttagtaagagagga

SEQ ID NO: 286521 - DNA, 545 bp, Cannabis indica
tttatcaactaattgacattctaagaatttttgtgcttttaatcttgctggtttttctttgaaatctcaggtatctatagtgtatgaaccaacaagaggactttgaacttgctcctattgatcccgagattgaacgtacattccgaagaagaagaagggttcaaaaggctaagggtcgagacatcatggctgaaaattttgatgatgatggggttgctccacaaattgctaatcccgtcatgttggcagatgatcgagcaagggctataagggagtatgcagcccccatgtttaatgagctcaatccaggcattgtgaggcctgaaatacaagcaccgcactttgagctcaagccagtgatgtttcaaatgctccaaaccgtggggcaattcagcgggatgccaactgaggatcctcacctccatctccgttcattcctggaggtgagtgattctttcaagatccaaggagtgagtgaagaggtgttaaggttgaagctattcccattctcactacgagaccgagctagatcatggctcaacact

SEQ ID NO: 286522 - DNA, 850 bp, Cannabis indica
ggggtttgtggtttgcggtttttaggttttttggtttggggttaagttattttacattaggtgtttgggtttggggttttgagtttggggttttgggtttttaggtttgggatttaaggttttggggtttgggattaacggtttgggttttggtgtttagagtctttggcttttggggtttggggtttttgactaggatctagagtttaggatcttggaccaagtatttggggtatgaggttttaagtgtggggtttggtgtttgggttttagggtttcgggtttagggttagggtttggggtttgggatttagggtatggtgtttttgtgtttggggattttaggtttgctgtttttgggattagggtttggggtttagggtttgatgtatggggttttaagattttacggtttaggggttggggtttgggatttgggttttagggtttagggtttggggttttgtagttttggcaattggggttttggggtttggggaatcgttatgggaatgggaatgggaataggaatagaaattggaatgcgaatgggcatgggtcgaggaatgggaatggggattgagaataggaataggaatgggaatgggccagggaatgggaatgggaatgggaacgagaatggaaatgggaaggggttaaggaatgggaatgggaatcccaatgggaatgggaatgggctggggaatggaaatggggatggaaatgggaatggaaattcgaatgggaatgggaatgggaatgcgaatgcaaataggaatgggaatgggaatgggaatgggtcggggaattggaatgacaatgctaacgggaatggtgatgggaatgggaa

SEQ ID NO: 286523 - DNA, 1042 bp, Cannabis indica
tgaatatgagacaaagacgttggttggagttagtgaaagattacgactgtgagatcctctatcaccctgggaaggaaaatgtagtggccgatgccccgagcagaaagggtcctgggcaggtagctagtatgattctgattttgcctcagttagcagaggatatggtcaggtctagcattgagtttgttgtaggcaagcttcacaacttgacgctgcaatcttatctgctagaacgaattaaagtcgctcagatgactgatccagaattagtaaaaatcagagaagaagtttcagctggtcaagccaaagattttactgtgtcagacagtggaatgttattgttgaaagccagggtttgtgttccaaatagtgtggaacttagaaacaaaattctcgaggaggctcataccactccatattccctaaatctcgacactaccaagatgtatcaggatcttaaaccttattactggtggagcggaatgaagaagaatgtggtagaattcttatcgaaatgcttaacctgtcagcagattaaggctgaacatcagagaccagcagggttgttccagcctttaactttacctgagtggaagtgggatgacatcacgatggactttgtggttgggttacctagaaccacgagtttgcttgattctatttgggttgtggtagatcgattcacgaagtctgctcattttctacctgttaaaacaacctattcagtggattagttagcagatttgtatgtcaaagaaatagtaaagctacatggtgtgccaaagtccatagtttcggatagggatctgaagtttacctccaagttttggcaaagtttgcaacaggctatgggtatgaaactaaaatttagtacagcattccatcctcagatagatggacagtctgaaaggacgattcaaatattggaagatatgttacgagcctgtgttatggattttgaaggcgcttggagtaagtatctgttggaaatattttaccaggatctagatttactaccaagtatgtttcattaacatcctaa

SEQ ID NO: 286524 - DNA, 644 bp, Cannabis indica
accacaagagtctcaagtacttttttcactcagaaagatctgaacatgagacaaagaaggtggttgacgctggtgaaagactatgactgcgaaatcctgtatcatcctggaaaggcaaatgttgtggctgatgccttaagccgaaaaggacctgatcagatattcaacatggtcatgatttctcctcagttagcctcagagatgactagggcaaacattgagttggtgactgagaaattatttaatctgacacttcagtcggatttgttggaaagaatcagagtggcccaattagaagatcctgaattggttaagattcgagaagatgtcttagcgggcaaagctaaggacttttcaacttctgacagtggaatgctgttgtttaaagcacgagtgtgtgtccctgatatcaatgagcttaagaaagaaattctggaagaagctcatactaccccttactcattgcatccaggaaccaccaaaatgtatcaagacttgaaaccttatttttggtggtatgggatgaagagggatgtggtggactacgtcactaagtgcttaacttgtcagcaaattaaagccgagcatcaacgaccggcagggttacttcagccattaacacttccagaatggaagtgggaaga

SEQ ID NO: 286525 - DNA, 554 bp, Cannabis indica
cgatcccaaacacaaacttggaccaaaatagggatccagatacgaacctggactaggatcaagacctacactgggatcaaaatgttggaccagatctggaccgagatcttgacctagacccaaacttctacctgcactcgggacccgaacttggacctggacccaaacctagacctagattggggactagacctagacacaaacccggacacagactcggatcaaaactcaaacccacacctagaatcagacccaaagctagacccaaacccggacccaaactcgaacccagaccaggatgagaaccaaggacttagacccagaactgaatccagactcagatcgggattggaactttggactctgacccaacctagaccaagccccaggacgcgaacccacacccaaagcctgatctggacctagattgaaattcggatctgatccctaactctgacttggactcgaactctgacctgaactcaaacccatacttgaactcagaatcgtaaatggaactagaaccaaactaggactaggaccaggaccaggac

SEQ ID NO: 286526 - DNA, 622 bp, Cannabis indica
gcagggtgctcctgcagtgccggtgccagaagttcctgtggcacctgcccctgttgctcaggccgacatagtggcagcggggaatagaatggaacccttgtatgaaatgttctagaagcaggcacctccagtttttctgggaggtccggacgtcatgaaagccgagcagtggctaacggtgattacaagaatattgaattttatgggtgtcaccgggaatgacagggtggtgtgtgccacctttcagtttcaagaggacgctctagtctggtgggacatggtgtcccagattcacgatgtcacaactatgacctgggaaaggttccaggagctcttcaatgcgaagtattacaatgaagccgttagaagtgccaagagaaaagagttcacacacctaacccagaaggaaaacatgagtgtgacagagtacactacgcagtttgatcggttggcaaggttggcctcgggaatcgtgccaaccgacttcagtaaaaaggaaaagtatttggatggattaaatgtgaagatcaagcatgacctaatgatcacaacagacgacaagaccacatatgccgagatggtggaaaaagcactgcgagctgagggcgcagttggatgtatg

SEQ ID NO: 286527 - DNA, 505 bp, Cannabis indica
ttattttattttattttatattatttttaatatataattatttatcaagaattttatcattcttcctcccacttatttttttttctttttctgtctcccaaaattgtaaccaaagatttgatatttcagaggttaaaattcggatgttccctaatagcaaactaacaatgcaaaatttttttttacatctctcttcttttgtatatatatatccactaattttttttgatgaatatgatatagaaaagagattgtgcaaatgtttttttctgttgtatttttacttcgccattagaaaattgttgagttcaaacaaatactaaaactcttaattttagttacaattttacgtagcaacttttaagaacttataaaacaataacacatattaaaaatataactccacattttaatatatttatagaagcattatcctacaattttatattttcttattattttatacaatgattataataagaaaattatttcaacgtctttattt

SEQ ID NO: 286528 - DNA, 367 bp, Cannabis indica
ctagtcctaccctgactctctaattcggccctagcaaagtttcgaatcttaatgctggcagcatcgtctccgagatagctgtccgaaggccggaaccagctggatgaaatataagctgaagggtctaaggggacgggctccggaggaccagaacccatccaggaccgacctaggaaatctcctaagttggaaaaataaaactccttcatatggtctccccaccgggtcgagggcatcctaaacctataaagacgctcatcgaaccctacaggcctaagactggcatattcgccaacagaagggacgtaatgaactgctaaaggagacttaccaccggagccggaagtgctggcacccggagccccag

SEQ ID NO: 286529 - DNA, 439 bp, Cannabis indica
gttcaggatctcagccattccctgactgtggtaagtgttcagtggtttaccaattttctcattatttttcttaaggcctttactcactcttgcctctttttcagcttgctgcagaggccggccgcctttccaagaacctggtcaatcacggctttgtcttgtccgaatttggggacatagacgaagtcgtgaagaccctgcaggacatgtctgctaaaaggcgagcattccaagaggaggctgcgcggcgggaggcccttgctaaggccaagtttgaggaagaggctaagcaaagggaagcccaggcagaggcgatgatccgagaggagatccttcagagggataggctggatgccaagcaacgggaagcactgagggcggagggcgaggttgtgccaaggccaagcgcgagctcagggaggctagggaagccttagat

SEQ ID NO: 286530 - DNA, 569 bp, Cannabis indica
cttatcatgtcaaaacactgctgctttaacattaaaagaaggtattttctctatactctctaattatagtcttgatgttcaatctattcgtggacaaggttatgatggcgcaagtaacatgcgtggacaatggaatggtttgcaagctttaatttcaagtgaatgtccttatgcttactatgttcattgttttgcacatcgtttgcaattggcattagttgctgcatctagagaagttattcctgtccatcaattttttacaaagttgaactccattgttaatattgttagtgcttcatgtaagcgcaatgaccaactaaaagttgctcaagctgcaaatattgctcatttacttgagattgatgaactagaaagtgggaaaggacttaatcaaattggttctttacaaagggcaggtgatacttgttggagttctcatttgaaatctatttctagtttaataaagatgtttagtgcagcatgtgaaattttattgaatattattgaagatgacactacttttgctcaacgaggagatgcggatgcaggttatgttgggttttgtgccc

SEQ ID NO: 286531 - DNA, 780 bp, Cannabis indica
gctcttttcagtacaaaaaatttcattattggataatgcgaattctgttatatctatattttagaaggctaattaggatttttgtctcctaaactttgacattactaaattatgccccttgaatttttttggccgttaaaaattctccctgaactattgaaattattggatttaaggactgttgtccaatttcattcaattttattaattcagtgattgtccatgtactaaattatgctccccgaactttgataactatcaaatcatgcccctcaaattttgacatgtgtcaaatcatgccccctgaactttcatccaagttaaacttttcttactaaaattagacagaagtccttaaattcaacaatctcaataattcaaggaaaatttttaacggtcttcaaagttcaggagcatgatttagtacatgtcaaagttcgaggggcaaaaatctaattagccattctagaacatacactatgggtttattaatattatattttgttgaatagttaacaatttttttttcataaattttcgacaatactgattctctcctaaaatatacggcttgttaaaaatttcccataaacttttacatttgcagaaatttagtcattcagttaagtttcgtctatattccgtttaaatgctgacatgtcattgtaaattagcaactttatcctataaattttgacaactattaaatcgtacccaaaataaaaaaatagagaaaaaaattaaacaatttttttaagttaaaatcttaaaaaaattaaa

SEQ ID NO: 286532 - DNA, 496 bp, Cannabis indica
ttctctaatttttactaactctggatcagtcatctgagcgaccttaattctttctaacagatcagattgcagtgtcaagttgtgaagcttgcctaccacaaactcaatgctagatctgaccatgtcctctgcccaggaccattcctactcagggcatcggccactacattggtcggtataaatttcacatcataatccttaactaactccaaccaacgcctctgtcttatattcaaatctttctgagtaaagaaatatttgagacttttatggtcggtataaacttcacatcattctccataaagataatgtcgccaaattttcaaggcaaatactaccgcggccaattctaggtcatgggtccgatattcataatccttcaactgacggtaggcataagcgacaacccgattagcttggatcagtacacaccccagaccttgtctggatgcatcacaataaatcacgaatttttctttgtcagaaggcaaagcta

SEQ ID NO: 286533 - DNA, 578 bp, Cannabis indica
cggggttatggaatttgaccattttacccctagctcttgaaacacctaagttgttaacttaagggcattttagtaattttgtttggggtgaggtggctgcctaggagtgtggcatgtggccacttatgttcagccaagggaaattgattttccctaattttgatttatcccatttttgtaaaaaagaaatttaagaaagaaaataatcaaaaaaaaaaaaagaaaaagaaactactctcttccttccttcttctctcttcgaatcagcaaggccaagggagtttgtctgctgaattttggtagttttctagttaaggattcaagctaggttcaagtgaggtaaaaccctaacgatcattggtttctatgttttaaagtctttttcttttggttgagtttatgaaattgtaaatcagggcgtgttagggttagagttgtttggtagtttcgtaattctagggtaagtttggtattgattttagttcctagctgctggtattgttgattggtttaagttttgtgcaactttgaacattgagttcaaagctttgagctttaatggcataaattgatttggt

SEQ ID NO: 286534 - DNA, 691 bp, Cannabis indica
tctggttctggttcaggtcccaggtcccatttctgagtttgggttcgggatcaagactagggtgcggttctaggtcccgaccctggttctgtgtccctagtatggttccatgtttgggtctgagttcaggttcgggttcgggtcctgagtccaggtttgggtttggaaccgggtccggctcctaattcgggtctaggtcttatttggagtccgggtcctggtccggttatggttcttgatctaggtccaatttcagttatgattcctagtccaagtcctagttccagtccgggtcaacttcaggttttggttccaattttgggtcacaggttacgggttcaggtccacttttgggtttgggacttggttcaggtctgggtgtgggttcgggtcctcgtcagggttcgtgtccagggcagggtcccaaatccagacacagactacgggttttatccaagccgtgggtccagatctggataccaatctcaggtcccagtctggttccatttctggtgtcaactcacgtgttggggtcctatgttcaagttcgagtctgggtcgggtactaggacccggtcctagttatgtttcccaagtccctatccttattctgggtccaagtcccagttattctgtgggtttaggtcccggtctaggttcggtttcgagtcctagtctcggttcgggttta

SEQ ID NO: 286535 - DNA, 661 bp, Cannabis indica
attggggtgattgttactaagaataaaagattaacaataatacttatcattcgagattctacgacgtttaattgctaatgaatggacatctattagggatgactatcattcaaacaagaactatgtagaaccaacaatggagatcgaatatccttaaactaaagctcgttattttaaagaattgtattttcatttgatagatatattttaatctatttattaatattcatatatttatttaattaaaattactaatttagataaatctaaatataaaatttactttaatatttataaaactatatacatacttggatagatctaaaaaaataaaataaatttattttccatcctttgtattaatttttaattaacattatgaaaattacttgatttaagttagtccaaaattaattaaagttaattttcaactcaaatctaattttctataaatgcataactatataatcataactcaaaatctaatgtattttttttttttttacatgaaatctaatgtatttaaaatacattttcaaatttgcattaaaataaaataaatgtgaaagaattattctaatttatgttggtttaaaattaattaagaaattaattttcaacttgaatataattttcttatttaattaaatttcatgaaaaa

SEQ ID NO: 286536 - DNA, 272 bp, Cannabis indica
ctgtggtattggataccactcggcctgactctgtttggtcagaaaacatcgaggtggttcaggaatttgtagatgtttttcctgatgaacttccgagtttaccacctcagcgagaaattgattttgttatttactttgcacctaaagtagaaccggtttctaaggcctcttacagaatggctccaccagaacttaaggagctgaaaattcaacttcagaggttgcttgacatagggttttctcagcctagtgtgtcaccctgggaggctcca

SEQ ID NO: 286537 - DNA, 680 bp, Cannabis indica
gatgataccatggttcgcacaaaaatcagtgaaggattggttgtcaaactgctttccattatccaaaactattttgtacggcaatccgaaccgacagattatgttcttcacaataaagttcctgaactttctttgtatgtaatagttgtcaagtggttcggcttctgtccacatagtgaagtaatcaaccgctaccactgcatactacactcctcctttgcctttgggtaattgtccgatcaggtcaattccccaaatggcaaagggccacggactttgcatctgagttaactcgttgggcagagcttgaggtatctttgagaatctctggcatttgtcacatttcttaacataggcctttgaatcttcgatcattgttggccagatagaaataaccttgccttagaattttctcaaataaactttgcctggcagcatgatttccataaaatccgtcgtgcacttcagataggagtcctgtagcttcttcttgagtaacacatctgagcaacgacatagagaatcctcttctatacataattctctctactaggatatactgtgcaaccttccttctcatctttcgagcttcattctaattatctaaagttccccagtattgaggtaggcgactatcggtgtcatccagtttggggaagtatcaatcatttcgatctctt

SEQ ID NO: 286538 - DNA, 510 bp, Cannabis indica
ttgatgtaatctataagcttctggtcctcttctatggaccaagcttcctttgtttttgcttgcttttcagaacaaggttttctcattctatgtatgtatctagctctacctacgtatacttcttattagaaatttttaataattattaagccagtttatttcaatataaattcaataaagtgtatatagatctatggaagagtaactatatacttatatatacttttatatgaactgaacacttttaatttgatgatgaaagaatgaaataacgaagaacagactaaaatcagagatgaaagtcaggtataaatattggtttgttgtacaaaaaaaacaattgtgtattattttttgttattattattattatttttttttaaaaaaaaaaagggtttgactttttgacttggactggttgttttggccatgcatgactagggtgcgtgtggttgctgggatgggaagtatcgtatgctacttgttgttgtattatatatatatatatat

SEQ ID NO: 286539 - DNA, 572 bp, Cannabis indica
cattttgatgagaattgtaaaaaataattcaaatttacataaaactttgtgtctttatgaaaataatttgaatcttgtattatggaattaaatctactaatatttgagagaaatttatttaaagcaagacacatgacttgtttaatttagtcattttatatactgacccactttttctagaatattttctcattgattcatgtttccaaaattcttttaatgaattcagtttcagtttcatcattcacataatgatttgattgatgaacaatctaattattttagacattcaaaaggttttgatcagattgaactttcatagaatatatatatatataccatcctcaaaagaatttaattttctcaactggccgctgatgcaagcaaggttggcattgtgataccaacactgcgaatcaattatttaatcatttgaatatgagtatattgttgtctcatactcccatctgaattacttagacctcatcaatatgtttgttgacctcgcttttagccaacgacagtgagtctaattttgtaagcgacaagtagtttgatatgaatgaaatata

SEQ ID NO: 286540 - DNA, 305 bp, Cannabis indica
ataggtatttagaagttaaatgatgatttccttcgagcttggctaaatagatgtaaatggaagagctcttgtttcagtgattatattttagttcactaaaacatcatttacaggtagctaagtgttttaaggatcaaaatacattaaggggtgaaacggtaaatttatccctactgggtgtaaatcatctatataaaggatctttgattattgagattatagcgatggttaaaagtgatagcgtatcattatatttttcgtttaaatgattaaattaaaataaatgaactaaaatatattataat

SEQ ID NO: 286541 - DNA, 174 bp, Cannabis indica
ggtgccactggaactactggcacaggcactgcaggagccccctgctgcctcaatctctgtatctcgaggtcttgctcttcaattctggcttgcatttcagcaaacctaacctcccaattctgggctccctgatcggcttggggagcctgggcagcctgtggcgggttctcatca

SEQ ID NO: 286542 - DNA, 593 bp, Cannabis indica
tatatatattaaaaaacgcgagtgctcgtgtactgcaaaaatgttaaacataaattatcctcgggaagattccctccaccaccttgagtttgtgtgggcgacatggcgcgaaaagcctcaaccatttcagcagcttctactccgaggattgagaagtcaaaatctggaatttcggaaagagtggtgtaaatatagtcagaaactgcctggtcatactgtttcttcccattctccttctcgacctctaagtcgcgagtcatctcctcgatcttcctctgagagttcttggcctcgagctcaacctgctccttagacttgcgaaggtcttcaagctccctgtccttatcagccgcgtcttgtttcagtttctttatgctctcttggagctgggcattttgcctcttcagcaattcaacttccttagaaccagcggcaacggctttcatgaacagagtcatcgactgcaaagccaacttcacagagcgcggaacaagctcctcagaagggatcctctccgccttggatataaactcctcgcccacgaacttatcctgcatagccagaaaatcgcgggctcggatagttggctcgat

SEQ ID NO: 286543 - DNA, 828 bp, Cannabis indica
ttcaagttttttcttcagtgtatccttcaaggtcttgttgactgcttcaacttgaccattcgcttgaggatgggccactgctgagaaacttttgatgatacaatggttcgtacaaaagtcagtgaaggattggttgtagaactgcttgccattatttgaaactatcttgtctagcagtccgaactggcagattatgttcttcacaacaaagtcttgaactttctttgatgtaatggttgcgagtggttcagcttctgtccacttagtaaagtaatcaaccgctaccactgcatactgcactcctcctttacctttgagtaactgtccaatcaggtcaattccccaaatggcaaagggccttggactctgcatttaagttaacttgttaggtggggctcaaggtatctttgaaaatctttggcatttgtcacacttcttaacataggcttttgaatcttcaatcatcgttggccagaagtaaccttgccttagaattttcttacataagctttgcccgacggcatgatttccagagaatccatcgtgtacttcagataggagtcgtgtagcttcttcttcagtaacacatctgagcaatggcattgagaatcctcttctgtacataattccctctactatgatataccatgcagcttttcttctcatttttcgagcttcattttcgattatcttagagtttcccagagtcgaggtaggttgctattagtgtcatccagtttggggaagtgtcaatcatctcgatttcttctgtgccagtgatgctaggctcttcggggaactggatggaccaagttcgccttgtcactt

SEQ ID NO: 286544 - DNA, 734 bp, Cannabis indica
aaggaatctttctccttgatcttaagtcaatacaaataacgaggattaggctattaccgaactgctcggggctgaacctctataaaactcctgtgtctttttattgctttatcatatatttgttattataaatcatttatcgcttataaaatagactcgttgtcgttggctaaaagcgaggtcaacattttggtgctttcattgacagaaggatcacgaatcgctctttattcaacatccaatcgccaatacgatggtgcaaactcgtaaaggcctgactgatccagcaaattcacagacgctggatcctacatcgcagaacccaggaaacacgagggtttcgcctgctgttaatcatggacagccgacgaacgtggggaatggtgaaatagttcctatagatgaaattgcgcctggtgtgcaagagactgggaatcacagttccgcacccaaccagagcattcataacacaactgttttgcgtagaaccaacgcccaaacgactatcggagatgccactgaattaaaaaatctccgtgacgcgctcggactcatgcagggtcataataatacccctacatcatgatcaagacgaactacgcgctgcagtaaatctcacattcgaaaacaaaggtgtatgttcgctgaatggagagatagagaaatggaggcattaaggggctcaccatgtagagatcgaagatcgtagtcggcaagctaccgtgctgatcgaa

SEQ ID NO: 286545 - DNA, 674 bp, Cannabis indica
caaatacatccttggcaatcatactcaacaaagggtatttgaggcccgtcaccttccaatagttgcatatatcaaatgactcttcagtcctaggtatcaagttctcctctaaatataaatccagttcagacttcatattctctactcgataggaagctctaacaaatctgtcaaagttagaaagggcatccaatcggcgtgttgaagacgatgttgatacattttcttcttgaacccttctttctctcaaatgaggaaacttagacccgtactcctctagtagctcgcaacaaagctcacgaaccttcgcaatttcagttacatattgctcatctccataaattacagggaaataatattcgagcaacatgaacttgtacctcgggtctaaaacaaccgccacacacataagcccgtgaatctctcgccaatatttctggaacttggacatcatttgagttgccatgtccttaataaaaggcacctctgataacatccatgattcaatgttggtcttaatttcacatatttttggaaaaaaaatattggcggtagggtactttgttccagaaattaattcggttacttcatgaaacaactctaacttatcacacaattgttgagcattttgccaatcaatttctgaaggggcacacctcaaacgcaactcccgc

SEQ ID NO: 286546 - DNA, 610 bp, Cannabis indica
aagtcgcacaaacaatgaaaaacacaataaattaattctgttaagaaataacttacatcatcgtcgagccattcgttcagcaccatcaacttcacgaaccaggatctagtggcttcgccagtgtgaacatccctaggacggccattgtccctagcataagtgatccacttctggaaaaattttaacagccgggggtccgccggtttcagtgtgtctactaccacgggcccatgtcgttgtttcttcttcccagctgtgtagtcattcaagaaaaccggcttgcgctttcgcctaagcctacagaactccaccccatctggtggcccctgcaactcttccacatcctgagattctgtatcacccagcgaaatgacaatggcgtttgcaggagtagaaggaacgtcacatacgtcaggttgccaatcttctgggtagacatcatcatcatcatcatatgtcggcggtgatggatgtaccgtctgtaatggctctgccgtgtcggatggatgtgtggggtctgattgctgtgccggccctgatggttgtgtcggctccgaaggctgcttctgtaacaaacttatcacggtcgcaatttgatccatgataagat

SEQ ID NO: 286547 - DNA, 608 bp, Cannabis indica
atcgcagacgtgcgaatgaggggccattgccgcttacgcttgatcctgcaacaggaaaagtagttggcggggagaaccaagctttcatccggcaggtgggttttgaagttagcacattattgccggggaactacttggacttttgtgatgtacctcaacatcacaaggaccaagttgtgcagagaatgaaggtaataaattgatggacataataaattttattcatgtataattaaactaagtaataatttaattcttcaaatgtagtatttttatgatatcgatggtcatgctgaacccgaaaaagtgatgaggactctttaccatgagatgggcaaaagatactcagaaagaaaaaacattaggcatactttcttccaaaatattatgaggggaacccagataatcttgaggcggcactcaatgctactcctgagcactatgtaacaagagagcattggaaagagattattgatttgtttttgagcccaaaatttatagcgcgttccaatcaaaacaagcaaaacagaaacaaatgaagtaccctcaactcaaggcacaaatcaatggcagctcagcgtcatgaatttgtaagtagacttcaaata

SEQ ID NO: 286548 - DNA, 1074 bp, Cannabis indica
tacgatgcacattaattaaaaaatattttgacaactaaattgccaaaaaaggacctaacaatctccccctttggcactttagataatcaaaatattattaattaacaaacacctacaaaacaaagttagcgaaacaaacataaaaactccccctaagaagcacaacattaaaccaaaataaaaagctaactttgaccaaagacgaacacaaacacaaacctcaactccccctagacagttgagtatacaattaaaaacccaattactccccctttttgtttatctataagggccaaagacaaaaagaaatgaaaatatagaaatatgtccaacaaaaacaaaaagaaagaaaacttatgccccataaagcttgatcaatgaggacagctgcttggacatctcttgctgaacctcctccatggcagcaagacgattggagcagcaagaggagcatttgagggggcttgttcggattccaccattttccttggatgccctaggttcttagttttagccatgaatttctgaaagtaagaatgagaaacaaagaagcaagaacacaaagaaataggaatcgggtagctaggttatgaaaataaaagacaaaggaagttggtttatataatcatgtgagagaggatcaaaagaggaaaccaacttaaaaagagaaactaccagcccaagaacacaaaaggaaaccgccccactatcttgcaaaaaaaaaatttctcctttcctttttttaaaaaaaataaagggaaactagaaataccaacattatttccaaaaatatcctatttaagacaatctttcaagattaaaacacattaccatataagagatcaatctttaaatggaaacatatcaaaataaatcaagaaagaataaatattgatacttaccaattaagcacaaatttccttagcccatgaatcaagtcaccaacacctccctctctttattttttttattttttaattttaaagaaccgaaaataaaataaaagatgtacaataaatataagaaattctaaaccaagcaatttaatcaaaaatcattacaaatgacaaaaat

SEQ ID NO: 286549 - DNA, 740 bp, Cannabis indica
cccgagagagtgcttctccagtagacacgattcagcttggttcctcgaacaagatactccgaagacatggcttggagacgatgtaagtttttaagatttttttacttctttggtttttaaagactttatctaactttttttatttaatctctgacatatttaattttcatgttttagcatttagatgcggcatttcatttgatgaggaggcgacaacacttttatccagaggtgtacccaaatagatgtgtcatcatgccgtgtattttcccatcaggagttatttgttggtgggaagctgcgggtaggggtgtgcagaaagtcatccaatccaattccaaccgaccgatccaatcccaaccgatccaatagaatcggatatccaatcataattggatcggatcggatgcaaattttaaaaatccaattggatcggatcggatattggatgagacatccgatccaatggataaccgatccaatccaatccaatatcatccaatgtccatccaatcatatttaatatttataattttatatatttaattattttatttaatattttatatattattttattatttattaggttttaaattatattttttcatatatatatttttttaatgaaattagcctaaatagtggttaaaatggattggattcatccatgggattcattggatggatccaatccaatctaataaaaaccagttaaagcatccaatggatggaaccga

SEQ ID NO: 286550 - DNA, 871 bp, Cannabis indica
aaaataaaaaataaagcaatgtacattactaaaattagtagaaatcagatttataccttaatagacgttgagatacaatgttttctcctctaaaaacggtggccggaggtataaccaccacaaccactacctctaccttcggtttacccaaaaaatgaggaaaaatgtgatcttttcaggtatatagttttaagtatgaaaaatagaagatttagaaacaaaaatgagctaaaatggtgaaaaaatggtgaaatgggggtgatttttcgtggtggttggcggagagggtttggggtttctctgatttggggatttctgggctggctggtcgaatgaggaagacgaagtgatgagctagggttataaacccttttggcgtcggttatttgggcacaccctatggcgtcggttatttccaaataaccgacgccaaaagtggcgtcaaattcccttctaaaaaatttcaaccctatggcgtcggttattaattattatgctgaaaaaagcgactctaaaggcttgttttgtagtagtgaatagagagaaccacaaataatcataaaaattcaaacattaaatgcatatcacaccgtccactagatccctagctctcaataccaatcatcgaaaatgacattcaaaactgggtagttgcacatgataaccaccataatacccagagctcagattcaattcactccagggacgaagggacttatgcctatatgtaggctttaagccctcactcagatatataccattaaatttttcacatgtagatatgtacatatattaattcacttcactcaatttattaaagcccaatccacaaagccctcactcaatatcttaatcataattcataaaccta

SEQ ID NO: 286551 - DNA, 617 bp, Cannabis indica
ggttcaaaaattgaagagagaaagagagagagaaggattcgaatatgagagagatagaaggctcaaaatttgactgaaggcaagtgaatgcttaagcttacatcatcttttaatttgagtccatcactatctatttataggaatccatctaggtttaggtttgaattatttggcattaaaaaattgataaataaatggtaaaatcatgcttaagtggccggccataggatgtgggcccaccacgtacaattttgccatttttcaatatttatcttatttttctcacaaatgccatatgttccaattcaacaacttaaatgtcaaaactatttatttaataattaaaattaattatcaaataaaattatcatttaatatatttattaatcagacttaataaaatctcttaattaacaaataaaccctagaatctctattaactaagtcttacaagtagtattgtctcaactagtgtgaggaccatgggcatatataaccaagcttctaataggcagatctataatttaccaataaattccctaacttattaattcctccttgcactactatagaacttggaattgcactctcatttatatagaacgcactatatgttc

SEQ ID NO: 286552 - DNA, 852 bp, Cannabis indica
tcaaaggccccggctgatggatcaacccatgacattcacggaagaagacgccaagacggtgcgcttccctcaccatgatccgctggttatcgagaccaccatcgctaataaggtggtggccagagtcttgattgacaacggaaactccgtgaatatactcttcaaggaggccttcactgcaataggcctaacggaccgagacttctcacccagtggttcccaactcacatggtttaatggaacggtgcttatcccaatgggaaaagtgagacttccagtcaccttgtgtccggacacccccagagcacattcaagtaccacacttttgtggtggtggactgcccgaccacttacaacgcgatcctcggccgaccggccttggtagattttggcgcagtcacgtccattcggcacctgtgcttaaagttccctacccaggaagctggaatcgggacggtgagaggaaaccagggggaagcaaggcaatgttacaatgttgaaacccacctgcccgtgttgatggtccgggaaaccattgagccacaaatggctgaagaagatgagttggattcccgactgcccgtgcggatgtcgaggaaatatcagtgtgcgacctcgactccaccaaagtacttcggctgggaaagagcctagatccggaggaaaaagaaaaaataataaaatcactgaagggcgccatcgacatttttgcatggcgccaagaggacatgactggcataagtccccacgtcatcacccacgtcctcaacgttaacccggacatgccaccagtccaacaaaagcgacgccctctcgactcggtgaaagccgaggctctagagaaagaggtgg

SEQ ID NO: 286553 - DNA, 504 bp, Cannabis indica
cgaacaggatttggtggtcccaatggaggaggaccgtgagggggacgctgaagtccaggaggttgaggagctggacgaggcacgtccgggcagccctcccgctgctgagggagaggaggagattgaacccccaaactatggggagtacaatgaggctgggcaaccagttgatgctgacggggacgtcctggttgcaggcgtcgactacgtcaccgaggagcttgctgaggcggttcctcataggaggcagggtgccctgggcgccagatgggtgagtcctccgtccaagatttcggaggcacgcctccgcactctcgaccaggacggatacctgggcgagctggactgcttcattcccgcccacgacaatcgcgcttcaaaccctagtgagagaatgtgcgaagggtcgagggctcacggccaacaaggggcgctgatgcccttgcacaagtacttccaggatgtggcagacttcttcggcctctgcccggcctagatctctcc

SEQ ID NO: 286554 - DNA, 811 bp, Cannabis indica
aagttgaagggaggtgcccaggctaagcaatatgcccaggagcctttgaatcctgaagatgaagctgaggaagagcaaatgactccactgtaagaggaagaagaaactcccggcctcgcccaggcctgttgaacatgcaattcgcataagggagcccatttcacctgctcggccatctcctcccatgttcggaaaagggaaagctgtcatgtctgagataagatcgatgtcaggtgatgatggacttctgagtcttgtgcgggtggtcaccttgcattttactttatcttgttcttaagcttcttgattttcatgccttgtgtttctgaaggctgtcttctaaccatacaattttgttctgtgcagacatgtctcggcagataatcgacgctctgaggaacagaatgggcggaacctctagcgcctctcctccggccaagaagtctaaggacggtgaggggtcctcttcaaaggaaaagagaccttctggggaggttattgatctttccgaggagctgactattgcgaacccctctactcccaaagctgctaagtccaaggagtctggaccaccaatggctaggtctgaactggtcaggagtgatcctgaacgggtgcaggcaccaactccacctttgccagtgcttctagaggccaaaaagggcaagaagatgctggcccattacatgaaccggcaggttcctgaggtcagtgagcaactggctggtgccaacaatgactcttctttggatgtgctggtgggcggagtcttgaacgagttcaccagtgtaagtctttttgatacttccct

SEQ ID NO: 286555 - DNA, 622 bp, Cannabis indica
ttaaaagaaaaatcaaatcctcttgaactctctctctctcttgctttcggctgggacaaaccaaggggctaggaccagaattttcttctcttttctttggaattaagcaaggattcaaggcaatttcaagtgaggtaaaaccctagacctttgattgttgtttttaagctttttatttaggttgaatatgtgattcttggtgttgggagctgttaggttttaaaatgcttagggtttgaattctaagtctattttgagttgattttgaactctggttattaactttgagctgtggtgagggtagtgagcaagcttgagctttgaagctcaaggtttgagcttcaatggcataatttgatttattggtttgttctgtgaattattggttggaaatggttgtttatgcattgtataggtgtactggagagtttgataaagtttggttgagatttgaggtcatgggggaaatttttgggttcccagcacagaaccggaattccggttctgggggacctgtaccaaccggtcgaccggatggtgacccagaaccggatttctggttgggaaccggtctgcctgttgggggaatttccagaaccctagttttggccaattttgagat

SEQ ID NO: 286556 - DNA, 592 bp, Cannabis indica
taattcaaaggcctcattagcacttttcctcatgaaaactccaccagcagcggcatctatgagtgttcgggtttcattcatcaacccattgtaaaagttgtgcacttgcagccacttctcaatcccatgattagggcactttctcagtaagtccttgaacctctcccatgcttcataaagagattcactgtcctgttgggtgaagttattgatatcagctctcagcttggcaatctttgcaggaggaaagaacttggataggaatttcagggccaattcctcccaagtgttgatagaatgagttggtaaagaaataaaccaacttttggctcgttcccttagtgagaatgggaacagccttagtctgatggcgtcatcgctaactccgttcatcttgaatgtctggcacaattcttcgaagttggcgaggtgcatgtttgggtcttctgacggcagtcccccaaactggactgaagattggaccatctgcagtatggctggcttgatttcaaaattgtttgcgtcaacagcaggtggccttatgcaggatcgggcccctgttaagttaggaagtaagtagtccctcaggcta

SEQ ID NO: 286557 - DNA, 533 bp, Cannabis indica
accttaaaattgcttggactgatgagtattatgctgccactggagccttcgcaattagaggctccatcgacgtataaagtccatccctcgccatttggtacatcagtatcaatttttttcttctacgagtgctacctcagtgcttgggaactcgagaatgaaatctgccaaggcctgccccgtaatcgcagatcttggtttgtacttgatgtcgaattggcttagtactactgaccatttcaacaaccttcctgatgcttctggctttgctaaaacttgccccaaagggtagttcgttaaaacctcaatgctatgggcctgaaaataaggtcgcaattttcttgacgatattactagggcaaacaccagtttttccattggagggtaacgagtctcaacgtctaataaacgcttactgacatagtacaccgggtattgccgaccttggtctttgcagattagtactgagctaatcgcatattcggatatcgccaggtaaatggataaaacttctccaggcattggttttgaca

SEQ ID NO: 286558 - DNA, 492 bp, Cannabis indica
ctattatagaatctgggggtgccctactcttgtcttaagaaagaaagaaggaaaactagaagcgcgaactgaagtttgtaatgatgataaagtgtttgtttctacaaacaacactttccttgaagattactatataaagaacttcaagccgtaaagtaaagtagtgttagatgaaatgctttcggaaataactccatctattgttccattatcttctactcaagtagaggataatcccactcccgtggttgaaccaatgcaagttgttacaactgagaaatctaccataaatgttcctgttcagaaggtcacgactccttgtcgtagtgggagggtttccacaaaactaactcgttatagcttggatggtgaaatcaatatggttgttggtgacggtattgatggcgatccattaacctataaataggcaatggcaagtccgaaactaaaacaatggtcagccgacatggattcagaaatggattccatgaa

SEQ ID NO: 286559 - DNA, 499 bp, Cannabis indica
gtgtctatccaattttttttcttagttgcttagttatttatttaattttttttatcatttttttagtttatattaatttttcttgctttaattttagtgagtgtgggttgaatgaaattcttttgacaataatttttctcgtgtttgacatgtgctttttttttttttttttacttttttacgttagtagttcgtttactttagtcgactaggttcggtttcgtttgggtaaaaggtaaaaaattttaaggtttttaaggtttaagtagtagtaaagttaaacttttcgttagttagtttggttggtagtaagtttaagtttaaatttaactttaacgtaaaaaagtaaaagtagtaattaatttactttcctactagtagtttagttttggttccgtttaaccctttaacctttcgttagttaaattttaaactttacgtcgttaaaccttttaaacgttcgttttttttttaaaaaacttttttttttttttttaaa

SEQ ID NO: 286560 - DNA, 704 bp, Cannabis indica
agtggacagaagctttattggaatttggaggtctcgtttcaaagctttgattcttatcccagctatagagagctcgggtggtactttgatagtgtgggacactagaagcatcacgattttagactcgatggtaggtgatttttcgatttcaactttgattcaagttgatggcaaagacccttggtggttttgaggggtctatgggccttgttcttataagattagagctgatttttgggatgaattggcgggattgagttcaatatgtggcgaatcatggtgtttagggggggattttaatgtggtcagaagagttgaagaaaaaatgaatagtacctctagtactaaaagtatgagaatgtttgatgagttagttcaagagttgaggcttatgaatccaaaagtaaacaacaaaaggttcacttggtcgaacttcagatcggtacccatttggaacagattggatcaattcttattcagtaataaataatcatggactccaatttacctaaatggagcccgcgccttttcggtttgataaccagtggttggatcacaactcctccaatttttttgaggtttggtggaaaaatgcagtggcgttgggatggtcaaggaccaagctcatgtgtaaattgaagatggttaaagaaaacatcaagttgtggagtaagtcgattttcggtaacaatcagatgataaaa

SEQ ID NO: 286561 - DNA, 527 bp, Cannabis indica
tgtcgtacccactactatggctcccaacttgataactctaagatttagagttattatcatatctttaagcttgaatttaatgtgaattgtggatcaattaatgtttatattgtgtaattgtgtctagtttgttgtgtctttgtaataaatgaaagtgtgtgtgttagtaagtgttaaatagacttatgttattgtttttatgtgttttaagcagaaaaaaatacaagaataggtatttgaaaatttttgggacaaggggaaaaaggagcaggaaaatgattattgctgactggcattgctgtagcactcatcgcgtagcaatttgtcagcccagtaagtttattttggcagaatgtccagctggctttaatgaaaagaaaaacgagctgaggtggcggaatttggctattgactcaacaaacatgtggaaaatgaaggacaagtgggtgatgattgggatttccaattagggggatgaattaaatgatggctggctgcactttgaaccagtacgaaatatacagcag

SEQ ID NO: 286562 - DNA, 523 bp, Cannabis indica
tttgggtcccaggtctaggtctgggttcgagtttggttctttgtctgggttctggtcttagtctgtctcccacatctagacaccgactactggtctgttctaggccccgttacccgaatcccaagtcaagatctggatcactatcacagatctcagtctggttctctttcatgtcccaggtcccgtttctaagtttgggttcgggatcgagactggggtgcggttctaggtccggacactggttttgtgtccctattctggttccatattgggtttgagttcaggttcgggttcgggtcccgagtccagctttgggtggggatccgggtccggctcccaattcgggtctaggtcagatttggattccgggtcctggtccggttacggttcttgatctagatccaatttaagttatgattccaagtccaagtcctagttccaatcccggtcaacttccgattttggtttccaattttgggtcatagggtatgggttcgggtccacttttgtgtttgggactggg

SEQ ID NO: 286563 - DNA, 566 bp, Cannabis indica
aacatctgcgcagacgatgggatctggtgaagttgatgcatttttcctagaaacagtaacagtgtcatcagaatcaaccatacaacaaccagaaaacaacagagaaaaaactacagcagtagatgaagatttcgacttcaccgactatgcaaagcttgtggctgcagaaatggtacagcaactagaaaacaaccaggaagaagaagaggaagtggacaacacagaaatgatgatcatcaatgacaaacgacatgaaacaatagagaaggggcaaatttacaaggacaaagaaacattgataagtacactatgctactttgcaatcaagaagacatttcaatacaaagtagtgaaatcttgcacaaaagaatacaacatagtgtgtttggacacaaactgcaaatggagtttaaaggctacaaaaaatggaaacacagaaacattcataataaggagctacgaagaagaacacacatgtgcagttacaataagatttggagatcaacgacaagctacatcaaagttgatagcagattttgtaaaaccaaaattcttgaacctgaaaa

SEQ ID NO: 286564 - DNA, 737 bp, Cannabis indica
agaacgcctcgcaatatcttaactatcattggagggccccaatcgcaggagactcccgcaagtcgcaagagcgatatgccaaagaagccagggagaagccgctcaccaatgtaaacaatcttagtgagcggccagagaaattgtttaagaaagaatgcgacgacatcacctttatggagagtgatgcgagatgggtccatcacccgcattccgacgcactagttatcatcgccaatattggcggagataatgtccaccgcatactcgtggacaatggaagttcagtgaatcttttgaacttccaagccttcaaacaaatggggttgcaagagaaggacctgcgacccgtgacgtcgagcatatacggttttactggcgacgtcatcgcattaaaaggaatgatcaaactcccaatcaccttgggaaccgccccagtaacagccaaatcaatggctgacttcgcagtaatcgaccagtattcggcatataatgccgtgattggtcgaccaattttgaaggagatgaagatcataacctcgatctatcatctcacaatgaagttccctactcccgctggagtaggttctgtgcgaggagtccagtcagactcacgagaatgctacaacgcagcagtcaatctcacggagaaaaggtcagtaaatgttatctacctattggaggcaccacctcctcgccaggaggtccccataatcgaagagataccgcacgtggacgaa

SEQ ID NO: 286565 - DNA, 596 bp, Cannabis indica
tgtagtttgctttgctcttatgaaagtcaagggtacccttgtagacatttatgggctacaatgaaaagattaaacatgagaagaatacctaattctcttctcatgaagcgatggagcaaatccgcaaagataaatctccacctacattttaacccgccagcacaaccacaacagcacatttacgagatggctaggtttggatctctcagttcactgacttataacttcactttctatgcagcgaaatcagaggactcgtacaaccgtgcaaaggaagagcttgaacggctaactctaatgttcaaggaagaatttgacttgaattccaatccggaaggagagacgccacaacctggaagatatcgtagcaaccccaacattattaaagaccccgaagttgtgagaacaaagggtacgggaaatacaagggaaggaccaaacggggagcagatcccaagaaactcaagacattgtcgcatttgtcgctcatcagaccatgattatcgacggtgcccaaatcgtcaacataacactggatctcaggggcaacaacctccaaacaatcaaccagcatctgactcattcaatgaccactc

SEQ ID NO: 286566 - DNA, 638 bp, Cannabis indica
gacatgcattttgttcgagacagggtcctggcacagcaacttgacattcgctatgttgaaaccgaaaaccagcttgcagaccttctcacaaaacctctaccaacacagtcttttcagttcttcattaacaagttaacacttggtcttaaccagtgtcacttgagggggggtgttggaacaactgaatatggttaagatccttttactgctatatgtatttttactggtttattgcttactgtgtatttaggtagttaaaagtctgttatagactgttacatttgattccttatttttcggttataagttgttgtaatctgttcaaactcttcatatataaatatcagaagtctagccaactgtattcagttgagccttccattcattctccttcttcctccatttttcctccatcattttcttctttgctcaatcttgagtactgagttttcagtactcctacatcacctattgtcattgtcatcgtcttcccaccatctatcatcagagacataaattttacaagaagcatgtgaacacccgcgagaataatcacttcattcaataagcaaaaatcacgcaattccaaaagaatctcctataagaatattttttatttaagaaaatatatttctatt

SEQ ID NO: 286567 - DNA, 578 bp, Cannabis indica
tgatgtctagtgattggaaaaaaaaaagtagtagaaaaaatctcaatcatggttagttgtgggaacacttcgggaaattttaaaattatgagaagcttgtgggttcttttgtgcttatgatatctttagccaaaattgtcttttattttccgaatatctaagccataaattctaaccttaaaatgtccttttgattccaaaaagaatgtcgtcaacattagtggagggaggtaagcatgcaagcatattggctattggtttgtggactagtttgatggagtgaaaccattatgacattatttcgatactgaaattagtttgtatctctacattgtgtgataagatgagcatcctaattaattgttagagtttttaaaattgaaaatctagtttagttaatggaaggaaatttcacatgagccaacaataatataattatctgatagcttagttaatcgagttttagtgttagtcttagtcttactcgagggcgagtaagaatctagtttgggggaatttgttaggctatttttagcctacattttgggtcactttttatagttgttttccttctttat

SEQ ID NO: 286568 - DNA, 615 bp, Cannabis indica
tgagatgcaactcatgttctttatctgtttcagattacaccaagatgtcatcgataaacacgatcacacatctaatcaggtaatcttggaacgtccgattcatataatctatatcaagtatactacgtagctttggcccatctttcaccctgatggtgattcttacatttcggacattcaagatatgacttgaaagaggattcgtgaccttgacggtcacctcaatttccccgatactttctattactccctgatacttcgaaagcctcagccttccgtttgtaatcagggttgccactgtcggtccccttactgacgttaccactagcaggcggattcgatgtcatgacggcatcctttgcggtctgctcatttattacagattattcagcctcctcaacaattaaggctagctctatcactttcttgtacaaagtgtcatatgaagtggtaaccttcaagtcccgactgattgtggcattcagtcctctcttcatccactgcttggccttaattatgtcaatacctcctagaaaagtcggaggttgcagcttcacgaaccgctcaaacaccgagtctcaatgcggcataacaaacccctggttacccaccact

SEQ ID NO: 286569 - DNA, 1134 bp, Cannabis indica
gttgtttattgggaatatgatttggtctagttgtttcctgttcatttttaggtaatcaatgagtaacattttgattttaaatcattgtagtttatgttcgtagagttgtttctaattttcagtttgttttcagtttttttttttatagttttattatagtttggatacttgtatatgctatttgtttatatttgctatgtgtgttaaattgcaggtctgggattacaaattcagcctctctgatttttatagatcaaaatgtgtttgtactagtaatttctctattattgataatatcaagaatactttatctgtcaatttgttgtctatgttccgtgacacccaattcggtcattttttggatatacatgattttgttttccacccccaagttgtccataacctactattgaggaaagtataccagcccaatctaaaagaattttgggctaaggttgatggtcgttgtatacggttcagtgccgaggagttttacttgatcactggtattgattgtgttggtgattgcaacaaactgttgttttgccaagaatcaaaccagttgattgaggtttgtttccgtggtgtaacaacaatagatcataaagctataaaggatgctttcttgggaagtaggtggggtcaggatgagtctctttgtttgaaactatctgtactgtatttcatccaatgtttccttcttagcatactccagataaagaagtttctaggtttgatctagatgttgttgatggcggtcgttgggatgagtattgttggggtagggagtcctttgaattgactattgattcattcaaaggtagaatacagcatgggattaaaataaaaaataaaaaagaagagaagggaggtcagtatgatggtttgtatagagagttggactgtccttgggtgtttattatttggttttatgaatgttgtcctgccaggtatacacattttgcaaaagagtttcatctaggattccaagaattttgaattggagcaataatattgtgaccaaaaatctaactcttagagacttgaagggcaagattttttatttgccgttgaacaaggtaattttcagtttctttactgttttattttttttttgtgctgatttattaatat

SEQ ID NO: 286570 - DNA, 573 bp, Cannabis indica
tgttctgtgaaaaaaaagaaagagaaaattccagcagttaggccccataccaaaccctaagtcaagaaaaagggaatgggggtcccctaaccgctggaaagaggccccctccggacacgtgtcacacgggaaaccctagaaagattccctgaacaagtgtcgggtgcagtaaaatcgcagaaggtggttttacacgataaaggaaacagaaagaaaagatcctattctatgccctaagcaaccattgaacgaagagcgtatggtcttctacaatgaaaatgcacaataacaacagaggcatgataatggcgatcctacaactaaagcagtaaatgcaaaacagaatacatgaaggacttaaacacttgcatgcccagaaatctcgaatgcaaacccagaaaagaacaaacagaacgagtaatagcatgtcattaccaaaggatgcaaaaaacttacaatgaagtgttgaactgggggtcctgatgcgagtcgagtaaagacgagaaggactggtagcagcaagcaaggaagaactgggaaaattgcaaagtgttcaaaggtttcgtgctgggt

SEQ ID NO: 286571 - DNA, 814 bp, Cannabis indica
aaaagtcagagagttgaattttttgggactgttaatctgcagctgaatactgggcattttttggagttgcatgatgttgcttatttaccctctattaggaggaatttgatctctgtatctattttggatagactaggttatagtcttcattttggaactggaaaactgactttgtatcgtgactctatgttgattggaaatggaactttgtgtggaaacttatataagcttgatttgcttgatgttgttcctgttacttctccctcttgtccttcttcttcttctcttaatgctgttgttggttctaaacgtgcaagatcagatttgaaatcttccatgctttggcacaaacgtttaggccatatttctagagatagaatggagagattggtgaaagatggtgtgcttcaggatcttgatttttctgattttactgcctgtgttgattgtataaaaggaaagttgactgccaaggttagaaagagtaagtcagacaggtctgcagatgtgttagagcttattcatactgatatttgtgggccttttgttccacctgctatgggtggttataaatactttatcaccttcattgatgatttttcccgatatggtcatgttgagctcattcgtgaaaaatctgaatctttagatgctttcaagattttcaagacgaatgttgagcttcaaaagggaaagaagattaaagctgtcaattcggatagaggtggagagtattatgggcgttatgatgagactggaaggaaccccgggccttttgccaaatacttgctggaatgtggtattgatgcaagat

SEQ ID NO: 286572 - DNA, 743 bp, Cannabis indica
tagagctagaggaaaagccaaactcaagtttcagaacaggattttggatttagacaatgtcttatttattccaaatttcagttgaaacttgatttctgtttcatgtttacagttgcaacaatacaaattgaattttttgatttctcgttctatcatttctcgaaatgacattcaaatttctgttgcatctatggaacaggggctttctgttctaagaccaaatgaaccatttgcggttaataacgaactatttaacatagctaaacctagaaaccacaaaaggcagaagatcgataatgaaaatgaaacatatctatggcacttacgtcttggtcatataggctatgatagacttcacaggttaaccaaaggtggtccattgaaaaatgtcaccttaggtgaattaccagtttgtgaatcttgcctaaaaggcaaaatgacaaaacgttctttctctacaaagggagagcgtgccaaggaactactaggcatagtgcattcagatctttgtggaccactgaatgtcaaagctaggggtggttatgagtactttgtcactttgatcgacgattactctagatatggtcatatttaccttatgcataagaaatctgaaacgtttgagaagtttcaagaatttctagcattggctcaaaaccaattgggtaaaactttaaagatcttgcgaactgataggggtggagaatatgtgggtatgcagttcaaagatcatttaattgaac

SEQ ID NO: 286573 - DNA, 477 bp, Cannabis indica
gattcaggatgcacttatcatatctgttcgaacttattttctttgattatatagagaccaataatggtggtgcaattccaagttctatgagtggatgcaatgagaaattaataaattagttggatttacttggtaaattctagatcagcttattggaagctcattagaattggcatttaaatggttagaattggaaaagtgatatttttgagaaaataaaggaaaattgtcaaaagtggaaaaattctctagtggggcccattagtatggccgaccactatagatggaattaacacttaatttttctattattttaatgcctaataattcctaacctaaacttacgtggttacctataaatagatagtgatggctcacacttaatgattgatgaaatttcttgtcttcagaaaattgagcctcctacctataccctctcttttcttcttcaaattttcatacctggagtgatagagt

SEQ ID NO: 286574 - DNA, 584 bp, Cannabis indica
ggatctccttgccttagccctctggtaggaaagactttcacaaacctccccattaacagagaaagaaatggtagcagtagttaggcatttcatgatattagaaacaaactttacaggaaagttaaagtgatacatcagactttgaaggaagtcccattcaaccctatcaaaagcttttgacattcaagtttaagggccgcccagcctactttcccattcttcctattattaatggcatgaacaacttcattcgcaaggagaatgttatcaaaaatgatacgcccagaaataaaagcactttggttaggggaaactattttatccaaaacaaccttcagccgatttgccaggattttcgaaataattttatatagggtggtacaaagactaataggcctgaagtccttaagagaatgagcccgttgctttttgggaatgagaacaatgagcgaagaattgattgaggaaaaatccgcaccatgattaaggcaatccaagatagccttagtcaagtcagaccccaagacagaccaattcttttggtaaaaataagcattgaagccatcaagacctacagccttatc

SEQ ID NO: 286575 - DNA, 548 bp, Cannabis indica
aaaaaaaaaagttagaaaaaaaatacgaaaaaaagagaaagttatacatatttatacatatatattgttatatattatatattatatagtatactatatatatatacatatttattggtagttgatggcattttgtgcctcctacatatacttgttagttgagtgcatttttgcctcctaacctttttttttcttttctttagtagttgagtgcattttgtgcctcctacatcttgatagttgagtgcatttttgcctcctattatatcccctctagtgatggcattagtgcctcctagcttttattcttgtttatcattttagttgatggcatcttgtgcctcctaaaatcttattattagtactactactactattattattactattattattattactattattattattactactactattattattatagttagttgatggcattttgtgcctcctaactttaatataactatctatcattattattgtatttatttagttgtaattttatttactttgcttaagaaaatacttgaaaaaaa

SEQ ID NO: 286576 - DNA, 734 bp, Cannabis indica
ccaaaccctaaaccaagaaaaagggaatgggggtcccctaactggtggaaagaggcccccaacaggaaaccctagaaggattccctggacaagagtcgggtgcaataaattcacagaagacggcattgcgcaccagagaaaaagaaagggcagaaagtcgaaagaaagcaatctatcctatgccctaaacgaccagcatacgaagaacgtatggtcttttgcaaaaaatattaacaaatgcgtgacaagagcaatcctatcaccagaaatggtgaacctagacctgttacgtgaagaatctaaaagtttgcattcccagaaacttcaaatacaaaacccagaaaaaacaagcagataagtaaaagcatgccatgcatattaacaataaagcaaggggtgcaagaaacttacaatgaagtgttgagactgggggtcctgctgtaaatcaaacgaagataagaaggactgacagtagtgaacgaagatgaactgggaaaaattgcaaagtgttcaacagtgtttttcttggtctgagaattttttctctctgggaaatttgagcaaagttggcaagaaatgggaagtaaccgaaatgaaggaaaggtggtggcttttataggcaaaactgcatgaggaacaggcactatcacctaccaatcaaacggtgggggaaacgcacgattcgaattctcaaagatcaacggaccagattgacttgtaattaaggcggtgga

SEQ ID NO: 286577 - DNA, 515 bp, Cannabis indica
ctggaattttctctttcttttttgtttttcacagaatagaaaatgtctgcctctggttcgaagtcttcgaagaagagcgggaaacgcatggccactttggaggaggtttccctgggacccgttgcccaggaggggtataagtcccgagcaaccgggtgggaagcggctgagcttcattccaccttaacctgtcctcatcaactggagaatattatggacgttgctgggatcaaaccttccacttcggggacctatcaccggccacctcgcgactcggagacgcctaaccataattacggcggcttcggagcctggagccagacgcacctgatggccggtgccatgctcccacttcaggactattttgttaattttcttgtttttgtcggccttgcgccataccaactcattcctcaagcttatcgcctgctttcaggcttatttattttttatgccgcccgcggatggggatctccccgcccggcggaaattttgtatttttatgaacttgtatc

SEQ ID NO: 286578 - DNA, 628 bp, Cannabis indica
tatattgctcaagacacactgcggaggatatgtggtggcattactcgcagagaccaaaagaagacggtgtgcttaggcatcctgcggatgctaaagaatggaagcagtttgaccgccttcatctatctattgctgttgaacctagaaatgtcagactgggattggactgacggttttaatctatttggcaacatgagcaactcttacagcctgtggccagttatttgtgtcccatataatttgccaccgtggaagtgtatgagttctgaatcgttgttgttggccttattaattccaggtccatcatctcctaggaaagacatagatgtattcatgagaccgttaattgatgaactgaaacagttgtgggagacgggtgttgaaacccgagatgcctacaacggaactgtgttttcaatgcgtgcggcagtgttgtggacaataaatgattttcctgtttatgcactaatgtctggttggagcacaaaatggtatatggcgtgtcccacttgcaatgaacatactccttccattggccttaatagtaagattggatatgttggccacagacgttttctcgaaataagtgatccgagaaggagaagcaaaaagtacaatggtaagcctg

SEQ ID NO: 286579 - DNA, 642 bp, Cannabis indica
atttatctttattcaaaaaaaaataaaaaaaatacgatattaaagtgatattaaagtgatgaatattaacattacttgggagaataagcagagagaaaaatctggagaagaagagaagtggtgtaacggccaacaaaaaaaattagagggtatatgattctgttatatataatggaatgaaaaaatagagagaagagatgagatataaatgagttttggattgatgacatatattattattctcagcaagctctgaaataaattagaataagaatgtccaaattataataggaaaaggaatacatagatatctaatttttaaattctttacggcgaactaaataataaataaaaaaataaaacaaaagctaaaataacaaaaaaaaaaagtaataaataaaaaaaaaataaaaaataaaacaaaaactaaaaaacaaaaaaaaaaaaataaataaaaaagaataaataaaataaataacaatgtcctgctccatgaatgaacggtgatgattttccctgacccaacgatcatcaaaagtcttgatttttcccctttcggtagcagcaggggatgacccaattacagtcccccggaacacgaatagtagctgcgggatcatcacttgattttatatactgttt

SEQ ID NO: 286580 - DNA, 867 bp, Cannabis indica
cttcaccaagaaagtggtttcttcatcaaggaactaattttgttacacaacaataataaagattatgaaaacaaaacaaaaatgatatacactgaaaaataattgaaaccagtttcatcaatcaaccaaatagagaaaaaaaaatacaaaaaaaattaccaagaaaccgaaaaaaaaccagtttcttggtgattagtccgataatttttccggtgacaatgccaattttgacgaatttctcagagtttactgtcggtactgaaaaagtcaccggagtagatgtcggtgtattagtcgtcagagttgctaccaatgctagaaaattcgtcataattgccattgtcgtcagaaaaattaccggaaaaattaccaaaaaactggtttcttcatcaagaaaccagaaaccagtttcttggtaatttttccggcgactatgccaattctgatgacttttctgaagtttactgtcgctgccggaaaagtcgccggagtagctgctagcgtcagaaaagtcgtcagaattggcattgtcaacggaaaaatcaccaagaaaccggtttcttagacttcaagaaaccggtttcttggtgatttttcagtgatttttccggcgaaaatgccaattccgacgaattttccggcgccggcagcaactccgacgacttttccggcaccgaccgctactccggcgacttttccggcaccggcagcaaactccggtgacttttccggcatcaatgacaaataaaacttcctaaacaaataaaaacattaaatatgggatttagaaacctaattacatatatatggcatatcaaataccataaaaaaacctaaaaacaaaaaataccatataaattggccaaa

SEQ ID NO: 286581 - DNA, 686 bp, Cannabis indica
attttcaacatcaatatttgtaacatttgatactttttggtgttttgattataatctttcaattagaatataatttgattgatggtaagtttatttttaaataaaaaatttaccatagtaataaaaattgtaaacaaatgaacgaatagttttttatataataaaatcatattaaatataccatttatctaaatgtcaaaactttatcttagaatttaagcttttgtatgtttgtaactgtaaagactcggttttgaccgagtcaaatgtatatatataaaataataattaaataataatatatacatgtatgtatatacataaaaaatacatacaataaagcagaccccccctgtcgttcccctctctctatctatctctctttttctctctctctctctcaacacaaacaagaaacccacaaccaccatcaccaccacactccagtcgacccacctccggccacccgccccgcctcacgcgccagacaatcggaagcccaagtgccggcgacctcacccccaacgcggcgccgcttctctcactgccgttagcttgggattgcaagtcaaagtttgggaaattaaaactttaaacgtaattttcggtcacctctggcgtgcgtttgacgagacgctttcaacagtaaactcaggtcgtcgaggagaacaacctacactaaacca

SEQ ID NO: 286582 - DNA, 544 bp, Cannabis indica
catccccaaacgtgaaaaataacacaaaatcgatttcttgccagaccacaactcgtatggcgtctttggaaccgacttgctaggcacttgattcaagatataagcaacagtccttaatccctcaccccataaaaactctggtaagctagaatgaattaacatacaacgtaccatatcaagaagtgtgtgatttcttctttcagcaatttcattctgttggggtgtacctggcattatatatatcttgcatcaatgccacgttcgtgcaagtatctggcaaacggcctggggttccttctagtttcatcataacgcccataatactcttcacctctatcagaattgacaactttaatcttctttcccatttgaagctcaacattcgtcttgaaaatcttaaggcatttaaagattcagacttctcacgaatgaactcaatatgaccatatcgggaaaaatcatcaatgaaggtaatgaagtatttatagccgcccatagcaagtaggacaaaggacccacaaaagtcagtgtgaacaagctccaa

SEQ ID NO: 286583 - DNA, 502 bp, Cannabis indica
gatcttgcttaaaataaattgaatcaagcaagaaaacccagccctagcagctcccaagcttggccgaaaagagagagagagagcttttgaaatttctaattttctaagtttttgaagtctttgaataatgagagtgaaatgcaattacaacctttacttcagccaacaaataacatcaattaacatttaatttcaaatttctaagtccactaaaggaaaaaataaaaagggggaaaaatgaccattttgccccttcacactaaaatagcataaagagcactaaaggggtatttttgggaaattctaaattcccggccaatcctgacattcccaatgtctaataaaccgtcccacaatactaacatactaagttgtgattttactgagccaaacaccgagttccatgttaccgggcaccggaaatgcaaaattatgaaaatcactaaatgacataaaatgcatttcagaattcaataataacagcataataattatttaaata

SEQ ID NO: 286584 - DNA, 529 bp, Cannabis indica
ttgctctcacacgtctatttataaggccttagtaaggtttatctcggttataattaccgagtctaacctggttatgccttgctcgcataaccctattcatatatatttacgtaatccatacattacgttctctcagtggtttatcctgataatatataccaggtctaaccaagttatgtcttatacacataactcttgatatatatacatacattccatatacactataacatataaaatcttagggtaataaccctaacttgtataccaaatagtctctcatataatatactattgcatgctcaaaataacacttatagagattaaattaataaccctaattcatgctctcacttgattagcaatattattatacatcatcgctttcttaccttcatataaattctaaggtaataaccctatttcacattactatcaaactcaaggtactaatttaccgaatctaacttaattatgccttacgcgcataattctttattataatatatttagcatggcatagcattta

SEQ ID NO: 286585 - DNA, 569 bp, Cannabis indica
ttttctcctttgtcatccgcttggggatgactttcctcgctccttttgtacttgtcgaatttccctctccagatcagctcgtctatttcatcttgcaagacccaacattctagagtagtgtgaccaatgtccttgtggtatttacagaatttttaaggatcccttcggtcgcgatttcccctgatggggggcggcttcttgaagactccgtttctttcttcaatcgcgtagatatggtctcgcgggactgcgagttcagtataattgacgaagcgaggtccacccttcctttttggcgaggactccttctttggaggagacttggccagcttcggacttcgctgtcttcgggggctgcgtcttctcgggcttcggcccctggagctctttcctcgcggactgcgagatcgtgaccgcggtatgggtgaccgatgcttgtccttccccttctctaactccgctagagaattctcaattcttttgtgaggttcggccatggcgaagaactctactaaggactcgggccttcgagcttgtagttccttccaaaagtcggtcctcggcaagat

SEQ ID NO: 286586 - DNA, 661 bp, Cannabis indica
agattattgctattaatggagagatcaataaaatagtaagaaaacggggagctttgatctggtcacaagagaagtttttagtattaacggtggcactatctcacgtccccgaattgctttaatatatcgatagcatttggcatagtaccataaagaatgttgatgagacaactaggtacacaatgttaatacaggagttagcaacgaaattccatagtttctctttcgagaagacttatactgcagcagtcaatggtgtggagaaaacatgcatcaagaccgtacggtacaaacttagtgataagagtaagaaagatattaccgatttcattgaccctacaactgaacgagactgtaaagaaacaaaaaggcctgactatttcgaggtgacagaaaatatgttagtagtggaattaaagagtctaccagaaattgaagtagaagagataatagaaacgatggaactccttttggactcaaaatctgaagatgaagagatggtagaaaatttagacgaatcagagtattccccatcgtcagataatgaggaattagaaaatgcagaactgtctccaataacaaatgataacaagtcaaatggagatataccagattatcatttcgaggtagagatcagaatcagagtcagaaaataaaaatt

SEQ ID NO: 286587 - DNA, 667 bp, Cannabis indica
gggatttttagcataatttttggtggaaaatagtggaagtcagcgagctcgattgtataaggcggaacttaattgcaaattcagacaactatagaggcagaattggactttgagctcaacataaaagctttatatcttgttcttatctttccagaacatcttcaatcgtctaattccgagtaatatcgagagagttatggccaaaatactatcagtcgtcgcagtaggaaatttctggaaaaaagatagcgaaaataaagatagcttttcaagtagagttgcgatttttaaatctttttttcaaaagatgagttcttttcttttactgagatattccctaatactattattaatagaatcctaattttaaggggatttatctatccactataaatagaatcctaattctaataggattcatcttactttcccattactataaataagacctcttagactacaaattgaataattcaaaaggctacaaattagagagagaaaatcagagagagagcaaggaagagacagagatcgggttcgaagtgttcttcatcataattcttttcttctccttctacttttactaaatattatgattttggttataatgtctagttctgagtagttttctttttttttttagtgttatgagtagttttcttttagt

SEQ ID NO: 286588 - DNA, 482 bp, Cannabis indica
ctttattgatattgaataatccggattacattgaaatggagttttatttagggcataaaacccaacagttagttcgttgggtggtgcacgtggtatctttgaaaatctccggcatttatcacatttcttactgtaggccttggagtcttgaatcatggttggccagaaataaccttgccttagaattttctttgataaactctgcccagctgcatggttgccatacaatccatcatgtacctctaataaaagtcgtgcagcttcttcttgtgtaacacatctgagtagtggcatggagaaacctcttctatacataagtccctcaacaatgatgtactgtgcagcctttctcctcattttccgagcttcattcttgttatcagggagttccccagtgttgagataggctgttattagcatcatccagtttggcgatgtatcaatcatttcaatctccttcgtgcctgtgatactgggttttt

SEQ ID NO: 286589 - DNA, 400 bp, Cannabis indica
gtaaaataatttccaacaactgcgccaaagtccactagggctggtcgaccgaggattgcgttgtaagcagttgggcgatctaccactatgcatgtgcaatatttaaaagtgctctggggtgtgtccagacacaaggtaactggcaacctcacttttcccattcagataagtgtgattccattgaaccccgtgagctgggaaccgcttggcgaaagatctcggtccgtgaggcctatcgccgtgaaggcttctttaaataataaattcacagaactttcattgtcgatcagtattttggccacaatcttgttggcgatgggtatctctatgaccagagggtcatggtgaggaaaacgcaccatctttgcgtcttcttccgtgaatgtaattggttgatcca

SEQ ID NO: 286590 - DNA, 624 bp, Cannabis indica
acaggaaagggaggagtaaagtatgcgatagtagcagtagactacttcaccaagtggacggaggctgagccaatgaagactataactgctaaaaaagcactagactttgttatcaaaaacatagtgtgtcgatacggcttgcctcacaaaatagtctctgacaatggaaagcaattcgattgcgaagagttcactgacttctgcaaccaacacggagtcgttaaaagcttctccgcggtggcaaggccgcaaacaaacggacaagaagaagcaatcaaccaaatcctaaaggtcaccctaaagaaaaagctgctggcctgcaaaaacaattggcctgaagaattgccaagagtgttatcggcctaccggacgaccccaagaaccatgactgcccactcgccattttcaatggcgtacggttgtgaagcaatggtcccggtagaaacgttattcctgtcccacaggagaacaacttacgatccaacaataaacaaagctttattacaggatgtaacgcccttacttatgtaaaataagatgccataaataaactggcgttaagatactaatgttgcctttattaaaaaaataacaattttcaaaacatgggtacccagttgaaaa

SEQ ID NO: 286591 - DNA, 589 bp, Cannabis indica
gtcccacaggagaacaacttacgatccaacaacaaacaaagctttattacaagaagcgttggatcaaattgaggaactccgagatgagtctcaaatacaaatggcaacttatcaaaagaaggtgactaagtactttaactctaaagttaaaagtagaaaatttactattggtgatatggtcctaagaagagtcttctcagccactcaagaacccggagtgggggtacttgggccaaattgggaagggctatataaaattgaggatgagatcggctccggaacctataagctaaaaagattggacagaaccattgtgccaagggcttggaacgccgatcatctccgaaagtattaccaatagtccgaaaatgtaaacgtaggcattgttaaaagaatttgtaccgtaaagtgtatgcaacctctaaatttcaaataaagctaagtgccttaaaaaataaagttttcatgccactcaggggggtactaaggcataccacacggacagatgtaaaacaggccaaaagtaaaaacacgatcaaacagaatatatatcaaaatgaacatatatatttaaatatcctgacccaaa

SEQ ID NO: 286592 - DNA, 523 bp, Cannabis indica
tcctcgcaggcagcaacaatcaaaaattcatatcttgctcaaatcaactccaaatcatctcaaaccttccagacctattccatataacccctagaacatttctaaggcatcaaaaccacccagattgcacataatcaaaaatcaccattagagctcaagctttgagttctaaactcaaacttgagcaaacctagctagcatgcaatcaaatccatctaaacttacttaaacatgcttagaataacctctggaaacaactaaaaacatcaccaacatcacagcaacagattcaacacatttccttcaaaaaaccacatttttgagctaaaaattccaaacttgaaacaaagcaatttacatgcatttctaacagcttaattaacttcaaattaacatgcttacatctcagaaattatcaataaaacacagcagtaacaacaactaaaaatccatgcatgcatcatcatcttttcatcaaaattcaacaatttaaagaaggaaacaagaggagctaacctagctt

SEQ ID NO: 286593 - DNA, 596 bp, Cannabis indica
ctctctcactcttaattcttctctctcccatagcgattcaacatgcgatcaaaatcgcagtcggattttcttggatcgaaatctgcaagcatcgattaacattttctccacactgatcaattagttctcttgcaaacaatctgcacaaatcaaatctgacaacaacaatcaaactcatctccaatattcatcatcggcagcaacaattgaagaatactcaagagaaattcacatcatcctatctacacatattacaaggttagataaattataataaatgatcatcttttcatgatatattcaatgattatatatatatatatatgcattatgcaaaatttaaacactcatttttatcataacatgtttcattattatctttctataaataaaaaaaaatatatataaattaatgtaaaactataatttttaatatatatatatataagtactatataatatcacataaaaataataattacaataaacttgcattgaatactgaaataaatcaaatacgaaaccagttaaataaactatattattagacaatatactttatacaactaattgaagatagactttaaaaaacaaat

SEQ ID NO: 286594 - DNA, 646 bp, Cannabis indica
tgatttatgtggttttaaggtggaggggcaaaatggtctttttgccccattagtgttttgtcttttgtgacttgactattgaaaaataaatgtttatttgtttaattagtggctgaaataaaatggtataagtggcttttattcattttcttctcattttcaacacttagcaaaaaaatagaaaattttgaaaaagaaaactctctcaagttctctctctctctcggctgtgcatgtgggtgcaaagagctggatttttgctctgattttcaagtgaattctcatccaatctaagcattcttcaagctaggttagcttctcttgttttcttcttgaaatttgttgaattttgatgaaattgatgtaatgcatgcatgataaattgaggttgttgctgctgtgttttgttgttgatttctgaggtttaaagcatgtttaattgaagttaaatgagctgtttataaagcatgattcttaggttgagcaagttatagtttttatatgcaaaaatgtgatttttgaaagaaattgtttaatctgttgctgggttgttgctggatgtttttaattgttttcagaggcttagatatgcttgtttaagtagattcaagctagtttgattgcatgttaggtggttttgctcaag

SEQ ID NO: 286595 - DNA, 659 bp, Cannabis indica
ttaggggcattttagtctttttcttttgtggattatgtggctgtgtgagcgtgtgacagctgccctctttgtgggctgaatcaatgcataggaaatgcatttctcacatttgaagaaaaaggaaaaaataaaggaaatattaaaaattcaagagaagctctcttttcttcacctctctctctttgaaccagctaggaaccaggggatttcttgctgaatttgtgatttctaccaagatttcaaggagaatcaaactaaggtaaaccctagaacccttgagtatgtgtattttcaagttttgagttagcttgaaatagtgaatttgagaattggtggctgttaggtttaggtgtgcttagggttcgatttatagggttcaattgagttggtattagcttcttgtggctggttttgatggttggtataggttttatgcaactttgagctttgagttcaaagctttgatcattaatggcatatcttgattcattgagtttttctttggtttattggttggaatgtattgtgtatgcccttattaggtactctggaaggtttcattgcatttggtggagaattgagcaaagaatgaaaagctttggggaaactggtgcaaaccggctagccggttttggcagggttccccgggcctttcattt

SEQ ID NO: 286596 - DNA, 761 bp, Cannabis indica
taattttttcaagtgtgccgtaaaaattttgtccatcttcaccgggcaccataacaccgctattttgtgttttgcggttatcatccctttccttgaccaaaaatttaataccgttcactatgcaccctggataaaaataaattgctgcattcgctgggttagcaatagcatacaactcatctgacactgcaccctggttgctcaaccgtagttcattaatctacatttcaggaaaaatattaaattaagaaaagtttaacagttattgagaacaagattatgagtattgagaggcaacaatgcttactcgagttttgaaccattcagggaactcagtctcttgcactttttcaatattgcctacaccccttgcttgaagcaactccttgtgctcactatataatataatgcacttagtaagttaagaattttttaggtgaagtcgactattgtgagtaactgtttatggaatttatacttacttgatatacggctcaacctctgtgcaattgttcaaaatgtaccactccgccttacgcttgctttgcatgggtaaggtgtcgactgtcctcataccgagcggtcggccaacatgcttgaatacagaaaattgtcgagttggcatgttttggacaatgtcattgttccggtcaggacggttgaatcgagtttccacttctcgaaagtacattgagcaaaaggttaatgcctcattaaccacaaaagattcagcaatagagccttccggacgggcacgattc

SEQ ID NO: 286597 - DNA, 289 bp, Cannabis indica
aaaaccaagtgaggcccaatacacaccatggccgaccacttaagcaggtttttcaaattgatattttcattattttaatgccaagtaattactaacctaaacctagtagttgcctataaatagaaagtgatggctcagtcaaataataagtttcgtaagttttcaacaagctttttctcagaaaatcaatttcttcagaaaactgagccttccctttctcttctatagccaaaatcaaccctctctcttttcttcttctaaatttcgaaaccctcattgatagagtagt

SEQ ID NO: 286598 - DNA, 520 bp, Cannabis indica
ggcggtatgcttggggaataagttggtatggcgcaaggccgacaaaaactagaaaattaacaaagtaatcctgaagaggaagcatggccccagccatcaggtgcgtttggctccaggccccgaagccgccgtagttgtggttgggcgtctccgcgtcgcgaggtggccgatggtaggtccctgaggtggaaggcttgattccagcaacctccacaatgttctccaattggtggggacaggtcaaggtggaataaagctcagccgcttcccatccggtcgcccgggacttatacccctcctgggcaacgggtcccagggagacctcttcaagggtagccatgcgcttaccacttttctttgatgactttgagccagaagcagacatttttctattctgtaaaaagagtaaaattccagcagttaggccccataccaaaccctaaattaagaaaaagggaatgggggtcccctaaccgctggaaagaggccccctccggacacgtgtcacacaggaaaccct

SEQ ID NO: 286599 - DNA, 398 bp, Cannabis indica
attccctggacaagtgtcgggtgcagtaaattcacagaagacgactttacgcgataaagaaaacagaaagaaaagagtctgtcctatgccctaagcaaccattatacgaagaacgtatggccctctacaaagaaaatagacaataacaacggaggcgtgacaatggcaatcctatcactagagcagtaaattcaaacagactacatgaaggatttaaacacttacatggccagaaatttcgaatgcaaacccaaaaaagaacaaacagataagtaatagcatgccattcaataataaagcaaaggatgcaaaaaacttatgatgaagtgttgaactaggggtcctgccgcaagtcgagtaaagacaagaaggactggtagcaacgaacgaagaagaac

SEQ ID NO: 286600 - DNA, 605 bp, Cannabis indica
aggccaagaactgggtcagtttttgaacgggtaggcccccgaaggggtagagacctgcgagacgccctcaacagaaatagagacaatcgcggttccaacatagtgaacccacctgagccagaccaaggggaccaagcgaatgttggtgccaatattgctcaacctcaaccagccacagatccggtgatccaggctcggttggacgagttaactcgattggtcaaggaccttaccgcaccaaaacccactgatttggacctcgaaaggaggagagggtctgccttctcccaaatgattaatgacctccctattccagccaagttcaagatgcccacttgcaagtacacgggtagtgaagacccattaactcatgtggagaacttcaaaatccaaatggaccttcaaggaatcagggatgaccttaggtgtcgaattttccctgcaaccctcacggacacggcgcaacaatggtttactaaactacccccaggaagaattacttcttgggatgaatttgaggggttattttacacccaattctcttcagcccgacagataccagcagagttgggtgacttagtcgccatcaagcagaagcccgatga

SEQ ID NO: 286601 - DNA, 1023 bp, Cannabis indica
agttcttatttaagtttacagtactaaaaatatttttgttttaaacagtgagatctcatgcttagatatttttcaataaagaagtattttattgtctttatcttattaaattgttttatacggactatcctgtgtgacatctcgggaaatcagggtgttacaatatggtatcagagcaacacggtcttaaagaatgtggttagccctaacatgtaaagtttaccgccatgagacgagcttgactcactgtactgtaagtggttattacttataattaagttgcctttaaattctgcacgcgagagtgcaatatccttttcatgtaaatttgttgatcaaaatgatctttcttgatgtgttttggtctgtgtggttcaggagtttagaaatgcctcctggaaggtcagtcagattgggtcgaggtcgaggtcgaggtcaaggccaaggctgagatagaggccaagatgatggagggatcaatgaatcacctcaagcaccacagggatgggaagagcgccttgccgcattggaaggaaccatcgtaggcagaatgaagaactcgtcagctgagacgtcaaccagagtcgccagttcaaataaggccgtcagagccaaaaaatagagaaccaccagctgcggtggtatatccttctacagaggctagacatgagatgttagtagagagatttcacacccacctgagtttgagggaggcaaagactcagtggtggctgaagagtggatgagtcgtatagaaagcattttacaaatgctaaaggttgatgggaatgaccgagtgaagtgtgcatcatacatgctgagtaaagatgctcgtatcttgtgggaggtggtggagcaaacaaaggatgtagatacaatgaactgggatgatttcaaaagggtttttaatgagaaagattataactcggtagttctagtagcaaaggtcgatgaatttacacgattagcccaagggagccttactgttacagagtatacacaaaaatttgatagactggcaaa

SEQ ID NO: 286602 - DNA, 550 bp, Cannabis indica
aaaataaaaaaaaaatagattttaatctttagtgacactctatatttttagtgacacacattgcaagagactaacactgaatatttagagtctaattgtgtatgtcactaaaaatcactcctatctatttagtgacccgcacttttgtgcgtgtcactaaatagtgtcactgacacggctgcagaaatcatgactgagttaactaatctattcggaatggcatcaatcgaatctcgctttgaagcgacaaggaaatttatcaatgcacgaatgagtcgtcatcagaacgtgcatgatcaccttctccagatggcaagttatttccaggaagctcagaatcatggagctgaaatggatcagacgactcaagttagtctaatcttgaatagtctgactctagcttttctaccctacacttcgaattatgtcatgaataagaaggaacaagaatttcacaccttggttaacgaccttcagacatatgaaaatttgattggaggaccgcaaaaaaagggacctaaagctcctaattctggaaatggtaatggag

SEQ ID NO: 286603 - DNA, 638 bp, Cannabis indica
ccgaccggttctgatacaccagaacccatccggtcgaccggttctggcagaccaggaacaaaagttcctcttcaccaaaatcgaaccaaaacccctccaaacctaaccaaactttccagaacagtatattaacataaatatggcataacctaagctgcaaaacacagtggttcaatctctagcttaaaatcacacactcaagtgaagaaatcaaatttcttttagcttcctcactcaccaatcaatcccaacagccatgaattcaattcaaacatacattaacagaccttattcaacttagataacaaacctaaaccttcaccaaacctacagctttgaaaactttcaaaaaaagtaacaaacctagcttggaaacctaagaaaacatcaaaacaaaaggatgaacttacctagggtgcaaggttgacttgaaggtggagtttagctctgaaaattggagttggctgaagcaaaacaatccccctagtggctggtttcagctgctcgaaggaagaggaggaagaaggttgagaaaaaatgtttcttgccttggaagaaagcttcctctttctttaaaatgctttgttttctttttctttttaaatttccttccttaaataacaataggcagcagaaaa

SEQ ID NO: 286604 - DNA, 740 bp, Cannabis indica
ggtgttcccggaggcatacccccagccacctgacccggattgaggtggggcaacctattcttgatccactcatagaggtggcccaatcggattagattttcgatctcgtccttgagattcttacattcattggtgctatgaccaatgtcgttgtggtactcgcatcttttgctcggatctctccgggagctgtctttgtacaacggctgtggtctccggtagtgtgtattttgcctagtggcgaagtacacacgttcttgggagtccgatagctccgtgtattgagtatattggggggtgtacccctttttctggcgcttctctcccgtccgggtgctgcctttggaggaccttttactccttgatccctgggaagggcctgttaagctagcagccggagcagaatgtgaaggagcttgcccatttactccggacgggttgccaaaatgagaagatgctggtgccaaagcttggccctggctatacccgggggtagcagagaactgtataccacttgtttgtggggtcgcggtcggggcagtacccgagggcgatactccgggcataaaccctgctattccggtgggatagtagcccccataagccacgatttgggcttcttcgaggttgatatatttttggactctcttctggaagtcctggaggctagcagccccttcttgctgcaactcattccagaaaggagtcccagtacggattcctgcttggagaagtgcaag

SEQ ID NO: 286605 - DNA, 518 bp, Cannabis indica
atctctgggctagctttagcccggcaattagagcttcatactcgggttcattgttagatgctttaaatccaaacttgactacaacgtgcatgtgttgcctccaagtgtgacaagggcaattcctgcactagataactgatctgtagctcacccatctacatgtagtttccaggtcggcttaccttcactgttacttggctgaggtgtttgtactggctcggagttgctttctggtatgctttcttttttgcccgtgcattctaccacaaagttttctaaggcttggcatttgactgctgttcggggtcggaaagtgatttcatactggcccaactctactgcccacttgagtagccgtccagaagcatctgcttttgcaatatttggcgtaatggctggtcggtgtatacccgaacaggatgagcttggaaataaggcctaacttcttgttgctagaataaggcagtatgtaagcttttctattaatggataccggccctcggccttaataagtcttt

SEQ ID NO: 286606 - DNA, 519 bp, Cannabis indica
tttctaagtttattaaaaatgaattttgaggaaaatagattgataatttctggttaattctctctctcacccgaaccctctccctctcttaccctcttgtttttcaaaactttgattattgaagaaaaagcttggtttttggtttgaatgaagcttgattttagaggaagatcattgctcttgttttgttgagaatcaaggtagtttttatgatcttaaccttgttttaattgctgaaatatggtgggaaaaaagcatgttctttgagttttgaatgttcttgttgcatgatgagtgaattggtgttaattttgtggaaattgagcttctatttgttgtatgctttgttgttgagcttgggcagagattgtatgggatttctaggtttgattttcatgttaaaatggtgttatgctgctggatttttattaggtttgtgttgggttgagttcatgttcttgaacttgagattttgatgagttaaacatgatttttgagtcatttatgtaatctgaattt

SEQ ID NO: 286607 - DNA, 557 bp, Cannabis indica
tgggtctaagtccttggttctgatcttggtctgggttcgagtttgggtctgggtctgggtgtagctttgggtctgattctaggtgtgggtgtttgagttcgggtgcaagtctgtgtccgagtttgtgtccaggtttggacccggatctgggtctaggttcgggtccaggtccaagttcgggtctcgagtgcgggtccaagtttgggtctgggtcaggatctcagtctagatctaggcccagcatttcgatctaagtttcggtcttggcccgagtcctggttcgtatctggatctctatctaggtccaagtctatatttgggatttggtcccagatttaagtccaggttcgggtctcagttccagtttgggtacacaaccgtgttcgagccagagttccagtctcagtttgggtttgaggctaggtctgtgtttgggtctaggtctgggtccgggtcctggtcatggtcctagtgctgttctagggtcgttgttcggcgattcttgttaaggttctaattttttgtcccaggtctaggtctgggttcgggtttggttc

SEQ ID NO: 286608 - DNA, 596 bp, Cannabis indica
atcaagacaccgacaacggattttgtccaagagctgggtttagatcttgatcccaatctcgggtcccactctggtgccgggtcacgagctaggttctaggttgaagttcgggtctgggtcgggtactaggtctcggtcatagttctttttcctaggtccctatcctgattctgggtccaggtcccagttattgtgttgggttgattcccggtctaggttcgggttcgattccatgtctcagtttgggtttaggtctctgtttgggttttaatctgggttcaagtttgggtttaggtccttgtcctggtcctagtccttgttcggttgtagttccatttgcgattctgagctcgagtttgggttttagttcgagtcagagttcgagtccttgtctgagttttggttcgggtccggatttcagtctaggtcttgatcaggcttcgggtgtgggttcgcgtccggggtcttggtctaggttgggtccatgtcccaagttccaattctaatcttagtcacgattcatttctgggtctatgttcttggttctgatgctggtgtgggttcgagtttgggtccgggtccgggtccgggtctag

SEQ ID NO: 286609 - DNA, 520 bp, Cannabis indica
gtgttggtggtcctggattcgagtcccaggttatgcaatgtaatatataaacgcttaaatcaaaaaaaaaatatatatatatatatacacgatatacgatgtacaaattttccttattacttgacggaaaagggtaataagattgagatgttctatggaaagtgataagacttgaaatcattttttaacaaagtctataaagtgaaaagtcatgaattattttaaacaaataaagtactttataaaattataagtcatgaatcatttttgagtagacaaactcattaattttttcataagaaaactgagaaatatgtttgaacaacatatgtaaagataaatatatgcaaataaaattaaacattagaagataacagcttaattggtcgtccaactaaacaaaagttgacaaagttcaaaaactactaaaataaaacttgatcaacaaatatgatcatgaagattgtctcagatttaaagccattcaattaatataataatacaaaaaaaaaaaacaaaa

SEQ ID NO: 286610 - DNA, 524 bp, Cannabis indica
gctcttcttctgtctcagagtaccccaaaatgtcatcaatgaatacaatcacgaacccatccaggtaatccttaaacacccggttcatcaaatccatatcaaatatagtatgcatccttggcccgacactcacccggatggtgcttcttgcatttaggacactcgggataagatcggattgaggacccgcggccctgacggccacctctgtttccccagaactttctgttaccccctgatgctccggaagcctcaaccttccgtttgtgatcagggttgccaacgtcggtccccttactgacattaccactagcaggaggattcgatgccatgatggcatcctttaccgtctgctctttcgcaacatgttgctcagcctcctcagcaatcaaggctagctctaccactttcttgtacaaagtgtcatgtgaagtggtaatcttcaagtcccgactgattgtggcattcaatcctctcacatatttctgctttctggtgaaatctgtaggcaccagatcaccagc

SEQ ID NO: 286611 - DNA, 1320 bp, Cannabis indica
aattattttttatttatttatagttaatttataattatcgtgagattgtatttcttatttttttcttggttggtttcttacttttctcagctaaaaaatatatttttgtgattttaaaactttaaaaaggtttttataaaaaaattaagttgtaaaattgtaaataaaatacaaaataaaagttttttgaaaatttcccaaaataatattaatttagtatttttttttaattaaaaaaacacattaggtatggaaacaccaaaaaatgaaaaagaaaaaataaataaatagcaatatagaaaattgagaaagaaataaaaaacttaataacaataaagaattttaattatccttaaagctgaaaaattaggaatatcatatattattttattattatttataacgattattttagaattttcttagagataacttgaaaaacacccttttttgtgtaagttaactaaaaatgacctgcaaattatattcatttactattttacttacttttattaaggaaattacccaatattccctcacatgtaccacaattgatatacacattatctcttctatatatattctatcaaaaaaaaaaaaaaattaagaatggtattgaaagctattaaagatatattttgtgacaataaatcaatcaggttgcattttagaacaacatgaactctataaggtcaaaggcacattgactttgagctaattgttattaaaataaagttcagagtaataaggtgtctatagaacataataaggacaaacaccatattttgtgtgatctggatcattaagaatataccacttaaggcttttcaggagcttattgctcatatatggatatagtattatttaagattgtgctggtttagtgggagtttgtatttgagatgttctatcaagctgatacatatttatggtttgattctgcagataaagtatggatttaagttttgagtactctgaatgtattctttctattgagatttaagtataaggttagaaagaattaataaagaattgatctcaattaaggaggaccagttggaaatagacatgctaagatcacatttgcatgtaattttcatgctacgcatccatgattgatctatgtcatttggttatattgatatacgtgaccattgatgggtttagctacgataaatgttgcgaaggccgctttgatcctatgttagtataattaatggacgagattgttttgaaatacctataattatgatagcaaaagttaagcgcttataaggttacacactatcagaaaacatatgtagcccaagtgggagattg

SEQ ID NO: 286612 - DNA, 581 bp, Cannabis indica
cttaagcgcataattcataatctcaatatatacatatatccgacatggcatagtatttacacaacatatatcactatagtaataaccctaggctattaaaccgctcatattaaggtaataaccctaatcccggttacaattactcacatatatcatattcaacataagcgccactgcgcatactctatgtgcaaactactgtcttacctgttgtcccgcaataacagagattccaaacccctgggtgctcctgatcaggtgccggtaatcctagtcacacaatccgggatttcacaaatagggttaatccccaatttcactttcacaaaatataaacatggcattcaaaacacaaataatcaaatagagctcagaacgagctttccaacgatataaagaacgtcccaaacggagtcccgagtcaaaagttatggccaaaacaaattggaaaaaatagaatttctcactgccaaacccagtcacgatggccaaaaatcatgtcgcaacgactgggtttagaacacccaaaaactaaatttttaaggtctaaaaatgcctacttaaccatatattcgaacctc

SEQ ID NO: 286613 - DNA, 520 bp, Cannabis indica
aataaatatatgagatgagtgggattggggtggcaactggtatatatttttttttaacatatttaggatgtattcatttgagaggttgatgggtagtgtttggttactgagaaaagctagatgtagctttagtttaatgcttcagttgcattctaatgtgatttattagtgctcagaaaaattgatatattgtaatttatttgtttaatattgcaggaatcttcatctgctgaagctgtgaaatcaaaagaaatttctcaattgttaagggggcagttggtgcaacaggaaccattgtactagtttgttctccttttacaatttgtagtaccacctgcttaaggtacttttactatgatataacattctttctcataatttaatagaagagtttgaatatcctatatattcatccatagagaagtaggttttgagattttgtgtgttgcggtgataattgaaggttgataacttgcctattttagtgaagtaggatctgtgaaatttatgtgctgcggtg

SEQ ID NO: 286614 - DNA, 643 bp, Cannabis indica
cctttctgtctttatctaagtcgttttgtttttcctactgagggctccaacattagacctgaaactttttatatggcttcaatgatggcccacggacacaaagtttcacttgcaccctctgttttgggatacatttatcgagctttgtatgattcagccatacatggccaggggcgaggtcaagccttcttacctatgcattatgtgataggttggttagccgagcattttcgccatctctatagtggttgggatcttatggatcttcctcatttaagtaagtatggcgggatccctgctgaacgtcgaagcatgaatggggctagacatattttaaggggagaggattatgttatgcatcggccatattcatttcccatggagaaagatctagactttctggataatgaagatttatctgatgagaaatttgagttactgatttctatgcgttcttctttgctacccgtaagagtgggtaacgatgcatatttagaaccttattatcctaacagatttgctcgccagtttggtttcgatcaaggtgtgccctcagataagttttgtctgagtattcctaggaggaggcagtgtggaataagcgaaatcgctaaagcttgggttttaatattaaggagaaata

SEQ ID NO: 286615 - DNA, 898 bp, Cannabis indica
atccattcccagtataatgtcaaactcagttaattccagttctataagatcaacgcttaactccctatcttcgattctaacgggcatagacctaatacgcctattagagaccaccaactccccactaggcactagggttccaaaccctcttcctaaaatatcccaaggcctacccaaaatgaattattctcatagctacatataaacgtgcggctcccgaatcaaacaacacgatataaaagaagtcgtttacagggagctaacctgccactacagaagggcttgctgcatcatcagcttgagcattagcatacaccggagtaggaacaaataccacttcctgctcttgttcttctttctccacctgtgggcaatctttcttaaaatgcccaaccttgccacattgaaaacatacctttcggttgcattctccgggatggtgtttcatgcaacgtgggcactcagggtaagaataaccctggcgtccacccttgccttgaaaccttcggaaccgcttgttctgtcttaaacccaccactgatgacgtaggtttcctcttccgctcaatcatggagctcctaccactttcaccataatctggattcaggcaggtaaaattctgaccctccaccataatctcctgaggtctcataataatttcctcagggctttcagcccaagaagcattcttcatatttgaacctccctgaaagtctgaaggttcttggatccaaatctttccatgcaatggttccacttgattaccagccattccatactttgctggtaataccgaatcaaaaaagattggcatatgtggcaaagatactacaggagacctttgttgtttcaacctctgaatctcttcttcatgtcgttgaatcacagcttccatttt

SEQ ID NO: 286616 - DNA, 710 bp, Cannabis indica
ttatcttactcgagggcgagtaagtaataatctagttttgggggaattttgttaggttatatttagcctatgtttcgggtctaatagctaagcattttctcagttattggtgtattttggagcgattttacgcttgattttcctggtttcaggttcccggggcattaaagttcaaattcagtcaattgacgaaaagacgggacaaactggtgaaaaattggccaaagctgctgaaagggagtcagtagtcgcgaccagaaggaagcctagtcacgatccttttatctggtcgcaactagggagatttggcagaaacgccaattttcgagttatgcctgtggtcgcaaccagcccttaaggtggtcgcgaccaggtacgaaaatcgagatttttgacctaattcagatttttttccaattggaggcacacctttcattcctatataaggaacacgactcagaaggccaaaacaagcaagaataggcctgaaaagtgaatgaaagaggagagaaagcaatcttgaagacccggagcaatatcaccatctagtttctttcttttaccctctatttatcttctatgtctagttttgcttcagaattaatcatggatgtttttattattgttatgagctaaatttcccatttagggaggatgatgaatgttgtttaaagttttgcctagttaatgaataattgccattcctccat

SEQ ID NO: 286617 - DNA, 451 bp, Cannabis indica
cacaacttagtatgttagtattcagggacggttatttagacattaggaatgtcgggagtggtcgggaatttagaaattcccaaaatacccctttagtgccctttatgttattttagtgtggaggggcaaaatggtcattttgccccaatgatattttgtcctttagtggacattatgtgatgaaattatatgactttaaatgataattgttggctgaataaagagttaaattttacattttgtcccttattttcaaattggaaaaaattagaaagaaaatcaaaactttttctctcaactctctctctctatttcggccctcttggagcagcaagaagctggccatttttcttggatttcaagctcatttgaatcaaatttagtgatcacaagttgttggtatgttttccttagctttcctttaagtttttttgaagttttgagaaatgtt

SEQ ID NO: 286618 - DNA, 537 bp, Cannabis indica
attttaggcagtatgcaagcatctagagtatatatgtgtaatgtgatgccatgcttttaaatgatatatgattaagtgtttatttatatggggtaaatagatgagttagggtttaaggaaataggtgcataagtgtggtattggtgcttaactcgctggggttgttgattacaggggtactagtaatggaacctccgcaatcatctagaccactgggcgagcaagtagagcctggggttgcccaaactgatccaccgacactgcctccacctccgtagaatccgggggataatgcgggggttggcaatgctaatcctcctgccgattggcagcaaatgttccaagaaatgtgaggtatcatacttcgtcaggaagaagagttgcgtagattaacgcaatcggctacccttgttgatcaagtgttaccacagcacctgtgccagtggtgggtaaccaagggtttattatgtcgcacagagattctgtatttgagcggtttgtgaagctgcaacctctgacttttctgggaggtactga

SEQ ID NO: 286619 - DNA, 659 bp, Cannabis indica
aaggacttaaacccagaactgaatccagactcagatcgggattggaacttgggactcggacccaaccagaccaagacccaggatgcgaacccacacccggagcttgatctggacttagtctgaaatccggacccgaacccaaactcagaccaggactcgaactccgacccgaactcaaacccaaactcgaagtaagaatcgcaaatggaactagaaccgaactaggactaggaccaggaccaggagctaaacccaaacccgaacccagatcaaaacccagacagagatctaaacccgaattgagactcccgaaccgagactagactcgaacgcgaacctagatcgggaccaaaacccacataataacttggacctggatccaaaatcaggatagtgacctgggaaacagaacgaggaccgggactatagtacccgacccagagcccaacttgaacctaggacccagttcgcgacacgacacaaaaaatggaactagactagcacccgagattgggatccaaatctggaccgagggcttggacaaaacctatagtcggtctcgtggatttgggacccagccctgtactcgaaccgtaacaaggacccaaacactcactcggacctacacccagtcccaaacccaaaagtggacccgaacc

SEQ ID NO: 286620 - DNA, 530 bp, Cannabis indica
ttaattatttatttcttgaatttaatacatttgattaaattgaaaatttaaatatttaagttgattttcatcatgatacttaaatgttattattttcattgttgcccctgattttgcccaatatacatggaccaaccggacagggacacatggctcaaaacatcttaatacttgaattatttgctacgtctttatgaaagaaggcaacatccgggacttgtctcccggagaaggcacccgaagccccctatgctcccggaagcctaagtaacatcaaagcatctccgcgaggtgtcagacttcccctgagcagtcattttgcatttaatgccacattggggaaacgtgttgggactgctacacgcaataaagtctgacggcacaaccgccaatttgcacctgcgaagtaatgatcatttaagtctattgacggctacactgtgaagagtcacgtcagtcaaaagacaataaggacatttcacataaaagccctacaacacctagggatttgaccatgcattacccatggt

SEQ ID NO: 286621 - DNA, 791 bp, Cannabis indica
agaatcttacagataatgacattacacataagcaaagaaaggaaaagaaagagaaagggtaaaaatcgagaaagacaaagtcttctctgtacccttgaaggtcatcacgtaaagaacagatgggcctttggaaaaatataatgtgcaaaataagagtgattcaaacaccagaaaagagaaatctaaacgtgttacacagaaactcaaggcgaaaaattcccagaaacttcgaacattaaacccagaaaaagcagatgaacagtaaagcatgccatgaacacaaacgataaagtaagggatgcgaaaaacttacataaagtgttagaactgggagttgttgttgatcgacgatgaaatgttgactgacagtaacgaatgaaggttagtaagaaacctatagagtttgaaggttttctggtttgagggttttctttctctctggaaaattcgaagaaatttggtgaaaggctgaaagtgaccaaatgaaggaagaatggtggcttttataggccaaggtgcatgtggaacaggcgcaatcacctaccaatcgaatggctagggaggcgcacgattcgaattcccaagatccaacggctagattggttcgtcatcaaggcagtggaaacgcttgagtgttcgtctgacacacattaatgcgccgtatcaattaatggacgtgaaatgaatcgacgcctacaaaaagtgaatcgctgcagtaatggctatcattaattacaccttcacgcgcccaaagcacgtgccaggaaccgaggagccaaccggaggcatct

SEQ ID NO: 286622 - DNA, 500 bp, Cannabis indica
ggagtttcgggctcagatcttggtgatactctgctacagaaaggatataagggttagagatttgagtggaaggagtcatataattccgctgcacccactgtaaggtttctcaaactttatatgtgtttatttacattattttaaaattcatattaggatgttaaacaacatatatggtagtaaatctagatcctggtaaaataattttaacacatggctcataatcaaggataaagggcaaagggtaaaggaggctttaggggtaaaggaggcccttagttggctaaagggcaaagggtggagcacgatcgaggtggaaactgacagcttactcactgttccagcaatctttagtaaacaacaaatgtcttctgtctttggcttgattactaatgattataaaattttattgtctttttcacctaatactagtttatgtttattaacgattagcaaatcgagtggcccattttgtggctagacgctctcgattttactct

SEQ ID NO: 286623 - DNA, 817 bp, Cannabis indica
aaatagagagattacaatggaagaataaaaataagatgaataaaagactaagacaattacaactctaaacaaaatattacaaggacaatatattaaataaagagttacaatcccaaagcacaaaatacaaataaaagaaaagagttacaactcaaaactcaaagatacaagtaaatataaactatataaaagcatatataaataatagtgtatatatatatgatatagaatatatatataatagagtatatatatatgatataggatatatataatagagtatatatatatgatatagaatatatatataatagatgatatatagtagagatataaagagtgtatatatagtatgtatataaaatatatataatactatataatcaatatataaatatatgatatataggagagtttagaggaggacaagaaaacaatataaaacttgagaatagaacaaaataagaaagaagaacaaacacccaaagtggagatggggatcaccaaaagcttgaacaaagtttctacacctttgtccaagaagattatttccccctctatgaaacacttagggctttgtggaaatacttctaagaattatcaagccttagaactctctagctttgtgtttgaaagataaatagaagagaagagtatgtctcaaaggatgaaccaagacctctatttatagtgtttaggacttaatggggtgtaaatgggattaaatgggtgatttggaggttatgggagttgttctaaaagccatcccaatagcaaaaaaacgttactactattaatgctgaaaaaaaaatagtaa

SEQ ID NO: 286624 - DNA, 652 bp, Cannabis indica
ttttttaaagctttaataagtaaaaaacagtaaaaaagaaaaaaaattaacaaaagtataaatgtaaaaatttctttgtctaattataaatgtaatgtttgaaaaaaaaaagttagtatttggtgtaaattttccaaatagaaagaaaccctaaaatgtaaatgtaaaataaattaaaaaaaaataaaactaattaagttagaaacaaaaacatgaaatatgggtttggataataggtttacaaaactatggcatatcaaataccatagaaaatcttaaatgtgaaaaaatgccatagaagagtggcaaacctataaatgccatatttttgtaacttttttacaaaatcccatatttcatgtaattttcactttgaatattaatcattaatagtctttaaaatttgtaatatttaaaaaatcaattacataccttttctttttactgtcaattacataccttgttatttggaaattggaatacaatcaacaattacacacattattgatttgtgattgaaagacataaattttcaacactcacatgtgcggtaaattaactaagggcgcgtttggaaagccacctgagaattggaattggatgtaattgtccaattctcatacccccccatgagaattgggtgtaattacac

SEQ ID NO: 286625 - DNA, 611 bp, Cannabis indica
ttttttcaatgcctccaaggccagctggcacttttcgtcccaattgaatttgcggtttccccttagtaagtcgtagaatggaaggcttctgtctgagagttttgagataaagcggcttaaggcggctatcttacctgttaatttttggatgtctctcacggtgcggggctgtcctgtcgcttgaaatgcttcgatttggtccgggttcacttctacccctcgtcaagttactagatgacctaggaactttcccgatccgacagtgaaagcgcacttggctgggttgagcttcatcgagtgggcgaggaggatctagaaacactctcgcagatgatcgacgtggtcagcgccatctttggatttcactaacatgtcatcgatataagcttccatagtaagtcccaattgttgggcgaacatcttattcaccatttgctgatacgttgccccggcatttttaagtccgcagggcatcaccttgtagcagtatgtcccccgttcagtgatgaatgatgttttatctccgtcgggagggtgcatcattatttgattataccctgagaaggcgtcaatgaagctcattagttagtgccccgcggtggcgtcaatta

SEQ ID NO: 286626 - DNA, 612 bp, Cannabis indica
gtttttataaaatttataattttgaatatacctttttgaaataatctaggatattaagaaaaaatctttaaaacaatgattatgtaaacagataaaatttcaaaagtgtaaaaatgttgtgtgtatccttctgaaaaaattatattctgttcaactttattcaatgttgagaaaccagtttttataaaactgtcaatcactaaaattatattctgttcaactttattcaatgatgagaaaccagtttttataaaactgtcaatgaatatctatttatcttgtagctgatcaatcattcttctttgactcgttgcttttgttattctgttttggaggtttgtaaagctgtgggttattgcacgttcttcggttgtggccaacttttccgcaccttgtgcatttcaagacaacttttggttctccttttgatcttattcttttctttctaggtctcccagctggttttcttgattttggtggccacactattctttccatgctctcaggtatagtccattctctttcatttggtagaggatgtacagttctttcataggttgccttcattgttgttgttttgtagtaatcggcaacatagtcataagctcttaa

SEQ ID NO: 286627 - DNA, 574 bp, Cannabis indica
taacatatcagatatatgttaggcaaatctatagccatcaaattagcaaatcagggcaacagtgaggtgtacatagagttgcaccgagatgccatcagatatatgctaggctatcaaatagtatggatgaactgctaccacatcagtgcgattagagtactgagtataggttggattcgcggttagacatactttgtcaagatcgatcctgattcagttagtgttatggttaggtgtatgggcgcctgattataacccgggatatttgtatatttattatgttatgcttttcttactgagtctatcaactcacattgctattactatgtgtaggtaagggcaaaactaaagttgaggagccgtgagagcgagtagatgaagattgtacatgtcggggcagttaggcctagagcgtacgctaggcgacaagtattttgtaatcatgtagtaaacttttgtaacagtattttgtaaacgggatctcgcaagtttatcaaagttatatattatattttaattaaaataagcaaaattttaattattcgtcgcttttcctaactaacctcgttgatta

SEQ ID NO: 286628 - DNA, 646 bp, Cannabis indica
ttctttttaatgttatcaatttccttggttaaagaaataatttttgactcttttaaagacaattcagattcacaacatttgagtttatcttccaactcattaatgttgttacacaaaattttattatctttaaccagggagcgattttcagcactagtttccaaccacttaccaaacattaccttgtaggattcaatcatggaatcctcatcaatttctgactcatctgattcggatctggattcttccttgttgtcattgatcaggatattgttcaagcaaatgctttttcctttttcctgcaaatttcttgacaaaacacttgttaggacaactttttctttttcatcctcactactctcagaatcatcactccaagtaacattcaatccctttttatttttctttaaggtattagcacattcagattgagtgtgaccaaaaccttcacattctctgcatttaatacctttattgttagattggaaaaaggtttagagggaatgttaccagaaatgttaccttttgggttctttgaaaagacttttattcactagattcagatttgaattttgcaatgaacattcatcatcatttcatcatcagaacaaaaatatttcaataaagcattaaaggcaataccttt

SEQ ID NO: 286629 - DNA, 580 bp, Cannabis indica
tccataattttggtttaagtttttgcaaagtggtaactctttttcgttatataaagtggaagaagcattttcttttcaatgagtaatttcttgtggaacaagctaactccaatactaattgatgaagcataggtagagaataattaataggctttctgtgttcggaattcgtaaccaccaattattctatgcttaattacagtgtgaaaacataaaatttaattctagtatattctttctctgtttttggattggatatagttccaaattccaatcatttcttacaatcttaaccctaatttcatatatagctttcatttcaatgctcaatgcgtatgtttatagatcagtttttttaaatatatatttatttatatatatttttgataaattttatttacacatctaaaatttctaaatacaccacattttaataatttttattttatataagatttatatatttaattatactaagtttttttaatttttttcttcaaattcatattcttaaaaaatataccgttcaaacaaaaataaattatattttaaatattatgacaaaaaattaaataaaaaa

SEQ ID NO: 286630 - DNA, 198 bp, Cannabis indica
gtatcaacttgtaaaggttcaaccaaggaaatgggattaccctctacttgagtagaagaggatggaacattagaaggagctatatctgaaagcatttcctccaatactactttgctttgtggtctgaattcttaatatagtcatcttcaaggaaagtggcgtttgtcgaaataaacattttatcatccttgtgactat

SEQ ID NO: 286631 - DNA, 560 bp, Cannabis indica
gagtttagtagctcacccttatcaaacttaccatgtgcagattaaggttctaaaacttagagagccggtggcaagtgagaccttggaggcttgtgtgtgtactcgctgaggaccatataactgagggtggtctagggcacgctccatttattttatttagagttattagactaatgtcgcagttattttgatttattaattattatgtcttttaagtccaaactgagctcaaatatgaaatattttatgtttataaataaaagcgacattatagattttccgcattttaacgcttgtaactaaattagtaatttatgaaaagtacgggcgttacaatctcagagacaaaagaattcaacaaagtgtcatgataattttgtttatcttggagaaggagaatatgatattgatcattttgtggatcctgtcacttacagtgaagcacctaattgtccacattcttcaaaatggatagaagctatggatgatgagattaagttcatggacaaaaataatgtatgtgtggaagttagttctaatacttgatggtttcaaaccaa

SEQ ID NO: 286632 - DNA, 535 bp, Cannabis indica
ttggaatttattttaccaggatcttgttggaattattttactaggatcttagatctactcacaagtatgaacttctaaaacgataataaacacatataaaattaagaaaatcttacattggttgcagcggaataatatgtctccttccactaagatctcgaacccttgtatcatttctgttgtagagtattatcaagatctgagtccgaatgtccttctcttggatttggatccctcacaatcttcaaactatgattgaggtactgcttgctgtgtgtgggcactactctttcactagggtcattcgaaattttatctctcggagaagaagaagaagagggtcggctatatatagagaaaaggaaaggctcaattttctgaaagaaagcagtttcctgaattactgaataattgcttaactgccttatttggtgtaagccatcactttctatttaaagacaactgctagatttaggttagtaattaaatggaattaaaataatgaaaataataattggaaaatgcatgcacaagt

SEQ ID NO: 286633 - DNA, 510 bp, Cannabis indica
ctataagctatctaaaccatataggtactctcgtcctctatcgaaattcagttctattttactatagcataatcgacactcacttctcagatctcgcatcaaaatcataaaataattaattgatggccagacaattaaaagtaattaagtacgaatgaaatagaatacatagaaactgaaggaaaataaatcatattaaaaccataaaataatgtcaaacaatatccatcgaaaccctaatcaagtgtttagctactcatgttcatggaagtaaaattacacatattaacttaagaaaagagaagaaaatagagaagaaaagaatgctgaaaaccctctgaagaatgcctctagtattgcagttgatctctgaaattcgtactccgtcttctgctgcttatttccttctgaattgctccccaaaaactattgaagtccacttcttttatagccaaaaaataataaaataaaaaaaaacactgaaaagaaaacatattctgcttaggatta

SEQ ID NO: 286634 - DNA, 451 bp, Cannabis indica
atttagggcacaaaacccaacagatttcacgtgcataggggcaatctatgagatcaccttaatgaagcattccttgcacattctcaaaattcgaggaactgcgacatagaggaggaaccccgtgatccccatttggtcgatgaaggtatccccctcagtggacaacctcttgttagtgtaaacaacgcagcaaatgccaataacccgccatccgcacccgctgctgtcgacaatgtgggagtacttacaaatatagtgacagtagccgccccacctggtaaccaagtcgcactacccaataatgtaatcctatagggaggaattgatcactaaaaacctcctactagctctaagaatgattgtgttgggttttatgccctaaataaaacccatttcaataaaatcagatttaccaataaagatctaaaataacattttatgttgcatggtt

SEQ ID NO: 286635 - DNA, 623 bp, Cannabis indica
ctcccaaatcgtggtatgccaggtgaatggagaatacctagcaagaggcgggagattggttaaatacttagccattgtccgcgaaataatgcagaagttcaaaaatatagtcgtgtctcgagtaccgcgtgctcaaaatgcacacgcagacgcattggcccgtttggcctcaactagagaagccgaattgctcgatgtgattccggtagatgtattggctcacccaactataaatcaagaagtgatcatggaaatagataccgttcaggagattacctggatgactcctatcctcgcatatctggaaaaagggctcttgcccgatgataaaatagaagcaagaaagttgcgacagcgagccgcccgttatgtaatatatgaccaaaggttgtatcgcaggagttttagtcaacctcttctcaaatgtatcagcggagaggattgtggttacatacttcgtgaggtacacgaggggatttgtggcaatcataccggaggtaactcccttgcattaaaatcatgcggcaagggtattactggccaaccttgcgacaagatgctctcgcgtttgcgaagaagtgtgacaggtgtcagcgaatagccacatatacccaccaacctcc

SEQ ID NO: 286636 - DNA, 544 bp, Cannabis indica
taaggtaaaggatgatcttatatgtgaggtaatatttacttgtgttttgattcaccaagtgcttaaagtttatacatttgagtagtatatttttcttctattttttatctctatattaatatatttatctatttagtattatatagaaatagtcatgctttttctatgtgaatatgattaggataaatatatattaatattataattttatgattaatctcttattgcattattaccaaacaaaaggtatattgtcattcttagatttttcataagattattttctacaatcttaatgtgagaattctatattactcaaatacattttttttattatatgttcttcaagttttatcttccgattaaattattgggaagtgaataatttaattgtgttatatgtgtgaatcaaaacccaaataaatgagccaaacatataggtgattcttgaaaccttatcatttttgttattataattttctaccaattttatttgctttaaatttattttcaaaattttctcaaaaacccattgacttattta

SEQ ID NO: 286637 - DNA, 777 bp, Cannabis indica
atattaaagtgtatatatatgttatatatgtgtgaggtatgtaacatatatagttgtgtaattaatgtatatatatgtatattatagtatatatgtatatatatatatgagatatgtaacatatatattgtgaatttaatattgatattatgtgtatgttacatatgagatgttgattagtaacatacatattatattaatatatgagttacatagcatgataataatgttgatagtaataaaatagtgtttattattattgtgagaattattatcatctattttgtgaataaagaatattttaaattctttttcaatttggtggtgaacatctcactttatgagataataaaagatggcttttgagaagttacatcttttattggattataagagataatcatctcatattatgagataagaaaagtgaactatatgagagttacacttatgagaattgtcttgtcatagcaagaacaaatggattaaaagtggatccaaacttgtgaaatgagccataaattggaagagcaattttggactcaaaagtaaatgaatcaatgtggattcaaaaaaaaagaagcaattttgaatcttaaataatcaaagttgtaaacaaaattgatgagaattttgttaactttggtataattttgggctaatctcaatgaggagataactttaaaattatgggtaaaaataatcacattattttatgagtagtaatgtgagtttgatttttagttttgttgagaaaactaaaaatatcaaatggta

SEQ ID NO: 286638 - DNA, 587 bp, Cannabis indica
ggtgaccatgagaaatcgtaaggatccagcttactgggaaggtctccaagtctttatggaacttgcgtctaaacacaaagattgtgacggaagaattttctgtccttgtgttaaatgcaagaataccatattgcatcctttgaatactgtggaggcacatatctttacaaagggtttcgaaagcagttatgagaggtggatttaccatggggagccggatgaacctgtcgaggctaacatcaatgttgatgcggatgagatggttgatgtcattgaagatttcttccctcctataaatgatgacgaaagagctagtgatgatgacatacagaggggtcaatattatgatggcatgtttgaggagattgaggcaaagttgtagtttggttgcgattggatatcctccctcaactttatagcaaagttgatgcacttaaaaaatttgggaaaaataccaaattatatctttgatgaattattgaagttgttgaagtttgcatttccgaaggagaataaaattcctgcaacacactatgaggcgaagaagaaactaggaaaattagaattagggtacgaatcaatccacg

SEQ ID NO: 286639 - DNA, 606 bp, Cannabis indica
tagtcgcgactaggggaaagacgagatttttgggcagcttttaactttttcagaggtagcaaccctaatttctatttaaggggctcgtgttttagaacgaagagagtagaaattggcccgaaagtgaatgcaggaggagaggaagcaatcttgaagacccggagcgatatcaccatctagtttctttcttttaccctctatttcccttttatgtttatttttgtttcagaattaatcatggatgtttatattatttttatgagctaaattttccatttagggaggatgatgaatgttgtttaaagttttgcctagttaatgaataatttccattccttcaattttgatttgtgaaattatctatatttgtgtttaattccatgtgtaagcttgatcaccttttacaagttctatgatctcaattcaaaatctgaaatgtgagaattgagaatgctaaaattggataatcatggatctatgtgaaacgagagtatttgcatgacatatgtgacacttagattattacttaatgatgattacatgtgagtttaattaagagattaattagagaacatgtggtttagaacctaaaagatctgaaaagag

SEQ ID NO: 286640 - DNA, 433 bp, Cannabis indica
aaatattttagtgcatacaatatacgatgtatgctaaattagctttatccccaaataattacaaacgaaagtattgcaaacaaattatgaaatttaaaagagtaaatactgttttaaattttgtatttattaaaaattattaattacactttctattttattaaatataaaataaacctatattttctaaaatacttaaaataagacttaaactcaatttttaaaaaatttacttttttaatataacccaaataatttttagggtaaaatagcggcataagtattcaaagtttcacatttatatgacttaagtacccaaattttttttttagttggcaaaagtagcacaatgttcacttctgttagtattttttagttacccaattcaattctgtcaatttgtgtacaactcagattaattcactcatttact

SEQ ID NO: 286641 - DNA, 298 bp, Cannabis indica
atagcagtaatagtatacatagagttgtactgattactgataaatgtatgttggctgaaatactaatcgatgttgtcacatcaatatggctagagtatgactgaggagccgtgagagcgagcaggtgaagattgtacatgtcggggcggttaggcctgaagcgtacgatctttgggacatcagggcttatggtattcggtcactaggcgacaagtattttgtatatgaatagtaaacttttgtacctgtattttgtaaacgggatcccaaaattttataaatgtaatatattatgttt

SEQ ID NO: 286642 - DNA, 736 bp, Cannabis indica
tgctaccttgtgtaggtaaaggaaacaaagctggaggaacagtgaggcagaactcggcaatgattgtacatatcgcggcagtgcaacctggagggtttcggtcttttactattttggagtctgtattttgggttgcattttagcgagttggttttaaaaaaaaatatatgtattacatgtacatattagtaaaatacttttaacttgtattttgatactcgggatcccgacccatatggttattaagctataaattattaaaattaacttttaagtttattaaatataaaatacgggcgttacagtttggtatcagagccaccaggttgtccactaaagaccgtcaagatatgtacaatcaaggccagtgtcgagttcaactcacggttctgtaagctttatttctttttgcaaactgttttaagatatgttgtatatatgattaaataagatgttttaaaccctaattgcggtcttgaaaatattttgaccactgtctgacctacgtgccttgtgggttcgcaggctaagtcctaattaatggacgaccagcgaaacgttagaaggcagggtgagttggttgagaccggaggtggtcggggtggtagaaatccccaaaacccccgtggacgcggtagaggccgcggtcgtgtcccgagaggtggacaagagaatccacctcaggccccggttgattgggaacaaaggtttgctgagatgcaaactagaattgagc

SEQ ID NO: 286643 - DNA, 875 bp, Cannabis indica
atattcccagctcttctccgtcaagaggttttgagagtacgggaggtttagcaagttgtgcttttagctcttggaaagctttttcacactcctccgtccactcgaactgcttgtttcctcgcaggatgttgaagaatgggacacacttatctgttgattttgaaacaaatctgctgagtgcggcgatccgaccagtcaagctttgcacttctttggtttttgttggcgagttcatatctaggagggcttgaatcttttctggattagcttcaattcctcgggcattgacgatgaagcctagaaactttcccgagctaactccaaaggaacactttaagggatttagtttcatattgtatttcctgaggactttgaagcattcgtccaggtcgtctatgtgcccccagcctttctggatttgacgagcatatcatccacgtacacttccatatttcgcccgatctggtctttaaacattttgtttaccaatctttggtatgtagctccagcatttttcagaccaaacggcattactttgtagcaatatagacccatatctgttcggaaacttgtatgttcttggtctggtggatgcattttgatttgattgtagcctgagtaagcgtccatgaagcttagtatttcatgccctgctgttgcatctacgagctgatcgatccttggaagtggaaaacagtctttagggcatgctttgttgaggtctgtgaaatcaatacagactcgccatttcttgttcggcttgggcactaatacgggattcgcgacccaagccgggtagaaagcttcaactatgaagtcgttgttgcgtagcttttcaacttcttccttcagggctactgctcgttctttgtcca

SEQ ID NO: 286644 - DNA, 784 bp, Cannabis indica
attgcaaaatagttgataatacataatttttagtttcaatccccggcaacagcgccaaaaacttgttgtaaaaattatatacgcaagtatacgcagccaaacaagtaatatagtgataagtaagatcgtctccatagggattgcaaacaaagtttgaagtaaaaccaactaattacaacttaaagtaagaggaaataacatgaaaatggttgagcaatgattcaaaattaaaaatgatagtaattaaacttgctgaaattattactattgttgctagaaaaattacttgtaaagaaaaaaatagtaatatggtaaaagtggcttgaatagctaattccttctagtcaggttttttcccaggtattacagcatcggttcagcattactccaggattttgcacagagataacataaattcctctaggcttgtgagaattttccaaaactcgcaaattaaggtctaccacttagctcaatatattcctatatcaaaccagcaagcagaacactattcaaacatcaattcttaagttatgcaaggtaaatgaaatattcctattccacttacaaagaaaaacctaaatctagaatttctcttgctccattcaagttgaactactaaatctagcccttccggaacaagatctagcttagcaaattgttattcatggccaagaaacaacaatcaaataaaataaaactcacttgaatgaacaaaggcaaaaatactaaagtaagcttaaaaattaatcatacccaacatagaagttcatagccattcaag

SEQ ID NO: 286645 - DNA, 536 bp, Cannabis indica
gagaggcaagggacactaaaacatgaagttgacaagttgttagttaacagctttatacgcgaagtgttttatccctcatggatagccatcctgttctcatcccgaaacataacagaacttggagaacttttattgacttctctgatctgaataaggcgtgtccaaaaagattgtttcccacttcctaagatcgaccagttagtggatgcaacagctgggcacgagcttatgtcatttttggacgcatattctagatataaccaaataaaaatgtatgtcccagatcaagaacacacaagcttcgtaaccaacataggactctattgtaataaagtcatgtcgttcggactaaagaatgcttgggcaacgtatcaacgattggtaaacgaaatgttcgcaaaccaaatagggcagaacatggaagtttacgtcgatgatatgttggtaaaattaataaacagtaaggatcatacttcagatctcgcgaaatgctttaagatattaaagaagtataacatgaagctaaacccaaaaat

SEQ ID NO: 286646 - DNA, 779 bp, Cannabis indica
taaaaattaatttctttcatgtaaaattttaaaaaaattattaaaaccgcgcgaagcgcggatctattccctagtcaataataaaagagagaaaggcttcaagcttccaccattatttcatacttttgtaagtcttactaatagtcgcaaccattagggtgatccatactaaaaataaaacacttataaataatacttatctttgagattctacgacgttaaattactaatgaacgttcctccattagggaggattactcactaaaacaagaactatgtagaatcaacaatggagatcgaatgtccttataataaagctcattatttaaagtgtattttcttctaatatttattttaaaccaattaatttaaatatatatttatttaattaaaatgtatattacatagttttatttgaatattactatgacgtatactaaataaaactaatttcatatatatgcttactattttaaaaaggtatataaaataattggtaaataaaaatagtagcttattatattgtttgacaaactcatttgtttcgaaaataaattttaaagttacccaagtgtattttaaataataagataacacaatataacttaaaaatagctattgattattaagatgtttacaataagattttagaggtaaccaaattataagtaaaagtaactaactagtttcttatcagcatcataagtaaccaaaaggttacttttgaaaacctaagaaaataatagaaaaaaaaacggaatttgggattaatttcgttt

SEQ ID NO: 286647 - DNA, 483 bp, Cannabis indica
ttatgattgggcgtctccgcatcacgaggtggccggtggtaagtcccagatgtggaaggtttcattccagctacctccacgatgttttccagctgatggggacaagttagagtggagtgaagctcggccgcctcccatccggttgcccgagacttgtacccctcctgggcaacaggacccagcgagacctcctcgagggtagccaggcgcttaccgctcttcttagatgactttgagccagaagcagacatgtttcgattctgtaaaaagaattaaggttccagcagttaggccccataccaaaccctaaaccaagaaaaagggaatgggggtcccctaaccgctggaaagaggccccgtccggacacctgtcatacaggaaaccctagaaggattccctggacaggagtcgggtgcaataaattcacagaagacggcattgcgaccattatacgaagaacgtatggtcttctacaaaaaata

SEQ ID NO: 286648 - DNA, 699 bp, Cannabis indica
taaggccgaataagatatatgtaaaaaaaaaggagataaaaataagtgtttaaatagctcgagtcccaagctcttggttcggttcttcggggccaactggagcaggaggatctgttgtctgaacgggagaagcatcagcagcctaatcggaggttgaagcagctgcctcagtcccaccataagccacttgggccgcgcagtactcgaggtacatgtccttagtgtcgcccaagtagtcgaagttggtccggggattagccttccaaaaatcaaagaagagctcgagaccggctatcaccaaggcattgaccatctctttcaacctgtccacctcggccgaaagcttcccctccttggcatccttctcctccttcatccgaagaagaactactcgcaaagaagtcctctcatcttgaagactatttacctcagcagataagatctcgatggtctcctcaaaatggtcagcaacctcgagatccttagtcagcacggagatcttcttctcaacagcaaacagcttcttgttggcctcgcccaactccaaccgaacagctccggcttctgccctggcttcttcagcttccttcttggccaagtctgcctccgccttcaaggtgtcggacagagccacgttcttggaagcaacagacttagcccgggagtaagtgtaggccaaacttcagaccggcctgcaca

SEQ ID NO: 286649 - DNA, 741 bp, Cannabis indica
gtaaaagctcataaaataagaataatcttgactctcaccttccgggacaacgttggattcttattttgatcgaataaaaggttgctagaatggtatccattttagatgagctgacaaatctattcaatgaatgatatctttgactctcgcgtaccgggacactgtatcagttcgttagaaaccttagaaattatttaagatatgatagttttgtattttcacatgtctttgttacttgctgaatgtatgataatttttaaattgtgtatgaatttatattgaacctatgttactttctattattaattgtagtataatttcgaatcttcattgttggtctaacttaccttgttgttttaatgggacaaatccgaaaggattgtcatccgttagacaaacataatagtgttagatctcaacagattagtatttgttaatgcaacatctagttgtacatccaaagatgacaacttagactagtgtttacaatatgaaacaatgaagaatttataaaataagaataactttgactcccgcctatcgggacatcgttggattcttattttaatcgaaattatcctttaattttttcctcttagcttattcatttcgaatttgcttaaatagtatatcattggatgaatggtttataaattatctgcttatgatgcactctgatttttcttatgaaattgaatggagcagatgattatactcccgacattctatcccaaaatgata

SEQ ID NO: 286650 - DNA, 629 bp, Cannabis indica
gttaaattttagtgttaaatgccaactaagatgacaagttagattgttattgtgtacatttatgtacatatagcatatatttattagtccatacaattgtaattattttaatttttacaaattatttacaattataaaaaataaataaaattaaaaaaatcatatattttttgaggagatatttacataaatatggtaataagaaatacagttttgcataaatatgataattaaattttatagtataaaatttggtatttaaaataaaaaaaaaattaacatatatgggatatgtcatttatattaccataaaaaatattaaaatttatttcatatttttttaaaaaaaaaaaactaaataaaactacagtgattaccaaagttgccactagtgtcagaaaaatcgttagaatttactatcagtgccgaaaaagtcatcggagtttgctaccggtgctaaaaaagtcgtcggagttgctgccgatattgaaaaatttgtcaaaattggcattgttgccaaaaaaatcaccaaaaaatttgtcgaagttgtcactgtcactggagtttgatgccgaagtcgtcaccggagttagacgttggaatctgactaatagaaaccagttacgttt

SEQ ID NO: 286651 - DNA, 77 bp, Cannabis indica
gagcctttctctctacctttggccgccactctctctctctctcttcttccttagtatttcgaaaccccttagtgatt

SEQ ID NO: 286652 - DNA, 697 bp, Cannabis indica
taagcagtcttgaacaaaatgtttgaagaagctccattatcgatcatggttctagcaaccattttatttgctatctggacttccacgaccaacgggtcgttgtgcggaaatctgattttgagagcatcttcatcgttgaaagttatggttggctctcgtgcttgtggaactttgggcttcctttcctccacggccaggatgacttcttcttgctcgtactaagctattcgggcatacctctctcgagctttgcccgaatctccagcgatgtgcgggcctccaataatgacttgtaagtgtccatctacggctggaggtagcagatcctggttgttttgaccttggttggtcttgacatacttctgtaggtgcgtgttgtttctcttgatcgaaaattcaatttcccgctttagattataacatttgttggtgtcgtggccgtagtctctgtggaaccgacaaaattttgtcatgtcccttttgctggtatctttcttcatgggcccgaattttttgtacggaattaacgactaagttgccatatacgcactctctatatctttagttagaatagtgaatgcagtgtgtttggcatgatcacggggagtctgtctggatttatcggtgaactttcctttcttcccgttttcttgcttgtggttgttgcttgaacacttgccacttgaattgttggaat

SEQ ID NO: 286653 - DNA, 600 bp, Cannabis indica
aattataatttctacatatgactaaaatattgaaagtgatatgtcttaccaaccgtccaaaacataagaactccctttgttctacacttaataaatttttgttggtaactcgatagtcaaggccggtcctgaaatgtagtgggctatagagtaaaaattatattttgggcccttatttagaaaaaaatggtatttttcaaaatcagtaaaaaaattgtgtaattttaaagggtaaaatttttttttgggcccctagactaggtgggccctaagcacaggcctagcccgcctatgcccagggccggccctgtcgatagtataaatataaatgtgatttttgttaagtctataaataaatatgtatatataataataataataaagctaattagtaatttttttcctccgaattttgacatgtactaaattatgctcctgaatttttttagccgttaaaaaatttcctttgaactattaagattaagattgttagattaaaaacttttatctaattttagtaaaaaaattctaacatggttgaaagtttatgtgcatgatttaatacatatcaaatttgtggagcatgatttagtacataaa

SEQ ID NO: 286654 - DNA, 622 bp, Cannabis indica
ttttcagattctaaagcaacaaaaagttccactggactgaaaaaatgcgatgaggcttttcaagccttaaaaatgcatttgggacaacctccgatcttatcaaagcccacgactgacgaagtcctgtccatctatttagcagtgttggattatgcaattagtttggtaccaatacgcgaggatcaaggacgacaatatccgatatattatgtcagtaagcgattactggatgtcgagacacgctacccccaaatagaaaagttggcatttgccttgataacatcgtcaaggaaattgcgaccttatttccaggctcacagtatcgaggttttgacaaactaccccttaaggcaagttttggcaaaaccagaagcatcagggaggttattgaaatgggaaatggagttgagtcaattcgacatcaagcataaaccaagaactgcgatcaaggggcaagccttggtagattttatccttgaattccccaacaccgaggtagcactcatagaagacaaaagcgacattgctatagcgaatagagagatgtagacattgtacgtcgacggagcctcaaataacgagggctctggtagcgggatctattaatcagtcccagcaattt

SEQ ID NO: 286655 - DNA, 730 bp, Cannabis indica
aggctgaatacattgatagtggggatcgtgtgtatgcccacatccacgtaagtttgatcactgagttgtaggggatttgaaccggtgactcatgatgcattaagctgaattcgctaagtgttgctcattctacacggcgccgttgaatattccattttgaatatgccagcgaggcatcctgctctgcatattgatccgaacagatgcactaagtcgagtccacgtgtcaccattatcgtgatgccacgtcaaagtgccaaatttgggataacattttccccccaagtctatacgggacctccgaggttgcgtgtagacttatttcgagctagctctggcttggtatggggacactagtcgagcatgaccgttcgagactcgatgtgaagctgactgggcgtcctttcagttttcggctaattaatgctctaacaattaatattttgaaaatccgaatttctctctccacggctgacggttgcactcgattattgttgatttcccatattcacttttgaggcgaaagccgaggcgtctaaggttcctttatgtacagttaccctttttcctataaatacgtggagtattggcacattacctcattttatcacccttctttgttaagtaaactttcagagcgaaaagagaaaattttctggcttcagagttgccaaagtgcctacagacgattgctgacttgcttgaacccggacattcgaatctttgagta

SEQ ID NO: 286656 - DNA, 93 bp, Cannabis indica
aaatcaaagaacacgaatagcctctcaagattgtgcctaatcataacaggcgatattgacttgaatagatataacggtaagtttaataaatct

SEQ ID NO: 286657 - DNA, 691 bp, Cannabis indica
ggcaaaatggtctttttgccccattagtgttttgtcttttgtgaatttattattgaaaaataaatgttatttgtttaattagtggctgaaataaaatggtataagtggcatttattcattttttcttctcattctcaacacttagcaaaaaaatagaaaattttgaaaaagaaaactctctcaacctttctctctatttcggctgggcatatgggtgcttgaagctggatttttgctttgattttcagctagtttcaacctatattcaagtaatcctttgttgtggtaggtctctctaactttatttctttgtttcttggaaaaaaatgatgagtattgttgatgcatgcttaattgttagttgctgtggctgctgtaagtttgtcttgatttctgtagtttaaagcttgttagattagggttatttaagtggttttgaaagcatgttagataggttgtgcaaagctttgagttttctatgtaaaatatgtgatttttgaagaaatgtagtgaatctgtttctgtgttgttgttattgtttttaattgttttcagaggcttagttaagcttgattaagtagaattaagctggtttgaatgcatgttaggtggttttgctcaagtttgagtttagaactcaaagcttgagctccaatggcatattttgtatctgtggtttctaggctatttt

SEQ ID NO: 286658 - DNA, 788 bp, Cannabis indica
atctttacgaatggattaagaactggttgcctcacctcaatctagttcaggcagcaggacctttgctccaaggagcaccaggggctgtagccgaagcattggcccccgttgctccccccagagaagcccagcaaattcctggcctaccgccgagacccaacagaagattagccatgatctcaggaggacctcactgttggaaattattttaccaggatcttagatctactcacaagtatgttgatttaacaacctaaatatgaacttctaaaacgatggaaaattaaacacataaaagaaagagaaatcttacactgggtgcagcggaatatatgtctcctcccactcagatctctaacccttgattccagtctgttgcagagtataatcaggatctgagctcgatagtccttctttgttgtctctgaattctacacagccttcctcactatgattgagatattacttgatgtgtgtgggcactactctatcactcatagatttcgaaacagagaaggtagagagagagagagggtggcggcttagagagagtttttgtgtgagaaaattctgtcaaaatgttgttgtacaaaaactgaagcctttaccttctatttatagaagaccacctagggctatggttgaattaattggcatttaaaaattgaaaaatcaatgtgaaaagggaagcaaggtggccggcctaggcattgtggaaacaaggcttgccacttttccaacttctttcctacattgctagtttcctattttgtcaaaaactgccaatt

SEQ ID NO: 286659 - DNA, 599 bp, Cannabis indica
gtaaatcattaccacggctctgaggcaagttgttagaaattattttaccaggctctagatttactaacaagtatgttttattaacatcctaatatgaatttactaaaacaataaaataaacacataagggtttaagaaaaccttacattgggtgcagcggaatataatgactccttccgttctgatctctagcccttgattactttctgtagcagagcattatcaagatatgaacctggatctctttctctccttccttgatcccgattctccttcttgttgattgtattcttcacaatcttacacactgtgattgagataccacttgatgtgtgtgggcactcactctatcactcaagctatgaaaaaattgaagaagaaaagagagggtttagaggttctgctataggtataggtaagatggctcaattttcttgaaggtaagaaaatttcatcaactttaagtgtgagctatcactatctatttataggtaacaacctaggtttaggttagaattatttggcattaaaataatagaaaaaataaatggtaaattccttgcatagtggtcggctatgatatggataatgggcctcac

SEQ ID NO: 286660 - DNA, 598 bp, Cannabis indica
cttgtctttacaaaaatgccactaggggcaaaccattaaatcatcttcctaaacaaagatacaaagggggttgataaactcgagaaagactgtcaacatatagctcagagaaagaccgtctagcttggagaaaggtcggctacacatagcttgagagagaccatccacacatagaaggtctcgacctcttcctagaccttattctccacatcagaagatcccatttcttccagctgagacctcattcccagcctcaagaaatttctcgataccagagagaggttggcacaaaggtcttcttgtgcaagcttgggtcttgggttggttgggttctttagtagaatctgaaaccacttgaactttcctcttggattccttgtcagcctgaggaggacctctaagatcgctcgcaaaatctttgtccattcctgtggagacagaaataaaagatcaatggagcaacaaaaaataataataatatgtataatccagttcaaaccaccattcacaagggataatatttaccgtcaagaatcacttgtgaggatcgcccataacgacaacggcctttccttgtttggattgatcggaagctcct

SEQ ID NO: 286661 - DNA, 554 bp, Cannabis indica
  modified_base (550)..(550): a, c, t, g, unknown or other
ccatccaccatgaagtactcattcaacaaagcgcccaatctggctgatggccttatcatccgtgcccgtcaaccccttgaagcctggttgagagaagtagaagtacctcaacctgccttgcgttaggggtggacttcaaatcgaagtaccaagcatactcgtggggagagggcataccccatttctgggaggcataaaggacgaagagggtagacagatacttgatgcccttaggagtgaactgggctaggcagaggctgaagaagtccgcctaaaaccctgaaagaattaatgcaagggcatcaacgctccttgctggccatgggcacccaaccaggtgcaccatccccttctcagggtttgtgacaaaattattgtgggcgggaatgtagctgtccaactgcccaggtatctgccctggtcaagagtttgaaggcgcgcctccgtaatcttggacggaggcttacccatctggcgcccaagggaccttgccttctatgaggaatcgccgcagcgagctcctcactgacatagtcgacgccctcaaccnggac

SEQ ID NO: 286662 - DNA, 579 bp, Cannabis indica
catttgagtttaccgctgaatgtaatgaagcatttttgaagttgaagacagctcttgttacggcccccgtgattgtagcacccgattggtcattgccctttgaactcatgtgtgatgcaagtgattttgccgttggggctgttcttgggcagcggaagaataagatctttcattccatttattatgcaagcaaaactcttgttgatgcccaaattaactacaccactactgagaaagagttgctagcggtggtttttgcctttgagaaattcagatcgtatcttgtgggaaccaaggtggttgtgtatactgaccattcggcaatcaagtatttgataaccaagaaagattctaaaccgaggcttattcgttgggttttgttgctacaagagtttgacttggaaattcgagacagaaaagggacagaaaacaaagtggcggatcatctctctaggttggaaactaacaatcacagcagccacttagagggagaattacaaattcaagactcattcccagatgagcaactgctagtggtagagcaaacacgggtaccatggtatgcagacattgtcaatt

SEQ ID NO: 286663 - DNA, 694 bp, Cannabis indica
aatacccctagagtttaataaaatctccgaaattgagaaattataactctaatatttatttctaaatattggggtccacatttaaatttaattcataaataataataaaataataaaaattagtgctaattgcctttactaatccaaatactagagcggtcattacatagggcctccattcaacgcgtaatttttccattcagatcgtccggcacatttgaattcgaaaatgaggtaagactagcatagaacacattatatatatgcatgttgtgtttgtgacagtatatgttttgggtgatatcatagcgtcacaattattgtgtcagttcggcagtataggcaccgtactggttaagagtgatattcaccccagaaagtattaattggcgctatcatagcagcacaactattgtgtcggttcggcagtacgggcatagtactggttaagagtgatatcatggccaattatacttttgggtactattgatgctatcatagcggtacgaacatagtgccgatcccgcagtgcgatcatagtgctggtagtgggtgatatcatggtcgatagtaccaactgttaagaacgttcttgatcatttggtaagccttgtgaataggtgtataggcgcctagacacaggtcgattatttatattttgttgtatgctattcttactgagtctattggctca

SEQ ID NO: 286664 - DNA, 457 bp, Cannabis indica
gaggaaacaaaaagttcgagtggacagaagaatgtgaaagagctttttaagatctaaaggcacagcttgcaaaacctcctgtcctttctaaacctctggacggtgaggagctggggatatacctagcggttacggagcataccgtgagtgacatgctgatcagagaagagaacagcgtacaacaccaagtctatcacatcagtaaaagactcgtcgaggccgaaggccgatatccgttaatagaaaagctcgcctactggcttattctagaaacaaggaagttgaggccttattttcaagctcatcctgctcgggtgtataccgaacaaccactacgacaaatactgcaaaagccagatgcctctggacggttactcaagttgggcggtggaattgggtcagtacaaaatcaacttcccacccgaacagccattaacggccaagccttggccgactt

SEQ ID NO: 286665 - DNA, 190 bp, Cannabis indica
aattaatttaagaaaaacaaacttagtttaatgaattaatttctagataaactatttgtatttttcttgtatttaattaaataaagaattttaactaactagattctttctaactaattttacttagttaatggtatatattctagacagttatttctatactagttattatttctaatattaaatagga

SEQ ID NO: 286666 - DNA, 639 bp, Cannabis indica
gtgtgggttcgcgtcctgggtcttggtcaagggttggtccaagtcccaagttccaatccgatccgagtctggattcagttctaggtataagtccttggttctgatcctggacagggttcgagtttgggtccgggtccgggtctagctttgggtctgattctacgtgtgggtttgagttcgggtccaagtctttgtccgggttttgtgtccaggtctggaccccgatctgggtctaggttcgggtccaggtccaacttggggtcccgagtgcgggtcaaagtttgggtctgggtcaagatctaggtctagatccaagtcaaccatttcgatcccagtctgggtcttggtccgagtccaggttcttatccagatccctatctaggtccaagtctgtgtttgggatcgggtcccagatttaggtccaggaccgggtctcagttccgctctacgtacacgaccgtgtctgggcccgagttccagtctcagtttgggtctgaggctaggtctgtgttcggttctacgtcagggtccgggtctttgtcacggtcctagtcttgttcaagtgtccttgttgggcgattcttgttcaggttctaattttaggtctcaggtctacgtcttggttcgggtttggttctt

SEQ ID NO: 286667 - DNA, 704 bp, Cannabis indica
aaattattaccaaataacatataattactaaatatatgtttaataaaaatggaaaattcaaaatataaatttattgtctaaattaacccaaaataagaaaaatatgaatttctaaaaataaatgaaaaacttaattttcagatttttttttttttttgtaaaaaatagcctaaaaatatgacatgtagttttttccacataaagtggaaaatgacacgtcgttcggggggtcgatcttcaaccttgagcatgggtcatttagacccgataacctacaactgggatcactcggatttgatccaaacccgctcgactcaattccaacgaccaaattaacccaaatcaaagcctaatgaatctaaatggaaaaattaattggtttaggatttgaaaactgttttatgtttttgaaaattaaaatggtgggggtccacctaagaattcttgattggttgagtattttcaaaaacaaaatttgaatattattttgagttttaggctaaaaaatgaaaatactatttttatattttttatgttttcaaatcatggaatccaaaaactctccaattattctcatacttttttattttgagattctcaaccaatcacatattcaattttttaaaactcaaaaacataaaatcacactacaaccaatcacatatttagaaacaattttttatttacaaaatttaaacttttat

SEQ ID NO: 286668 - DNA, 604 bp, Cannabis indica
ttttacgtggttgggcgttaatgagccttagtccacgagtctgtgtatttatgatagtatttaatacagagaatgttcttggtgagtttttactcttctagcacttatgcaacccagaattctcgacccctctttaatgagctttggggggtatttatagtgtttttgtggggtgatccccagaattaacatacatgcatttctgtaactatcagtaaagttgtatatttccaatgaatatatcatgggtaatgtaacgccctaaaataattaggcacgctacccaaaaatgcttatgaaaccctaatcccctaatcgggattactaaccaaaatagcgcagaatttaaacttttatattaaacagaatgaaaataaacttgtaatatatttaaactttcaaaatagttgggatcccaaaaatctttagaaacttaattacaagtcttttctttctagccgacctaagcggcaaaacagaattcaaaagttcaacactgatagacccacaacccgcttggtctgatatggcatgaacatgtacatccttcgccctgctcctaaaactcatggctgatcagctaatgccttaccctttcctgcac

SEQ ID NO: 286669 - DNA, 494 bp, Cannabis indica
tattatctcaactagtggggggaccatgggtctatataaccgagcttccaataagcagatcaagaatttataacctaaattcactgacttattaattcttcgttaaagggattagattaccgtgacaccctacaatgtattttatccttaaaacacttaacctcgtataaatgatattttagctatgtgaaatgagtatgtaacgccccaatattttgccttattttacaaagtgctaattttgatgcattaattaaaaagattcaaagttgtttgaaaatacacagtgggttttacaataaatatgcaaaaaggtgaatgatcattcatattaaaacaaaataagtagttgagtgcaaaaaaaataaatttgtaacatcccactgagctcagattactttactataaagaaaaaaaaaacaaaaccaaggctcaccagcgttctgaccgtttgctcgtccataaccccttacagtatacataccagaactgac

SEQ ID NO: 286670 - DNA, 519 bp, Cannabis indica
ggtaataaataaaagatttgggcatccacataattattaatatttataacaattcacaataattatacaaaacaacataaccattcagaagacacctattcacaatattggattttatgtgctaaataaaactcatttcaatacaatcagatttactaattagtaaatgatcagaaatcacattttatgttgcatggttcgcattatttatatcatgattatgtttaatatattaattctattaagtccagaagatatataaacatgtatatatttgttcatgattatattgtcgtcagcatagtggaatataatcatgattacatgttcaaaagtttaattctcatgatttgtcagttcactagatttagacaggcatgataatcagtgagaaggtatacttacaccttggataagtgatatgttatttccagggcattggaaaagtttaccagtatcggatgtatgtagtatacattggatgggaccaatattgaacttggataagataacataaac

SEQ ID NO: 286671 - DNA, 878 bp, Cannabis indica
cgtttgtagtcagaaaatgattgtcgtttttccatagtttgagaaaaataattgtcgttttttctgttttgtaatctgagaaaataattgtcgtttttcaattttgtagtctgacaaaatgattgtcgtttttccgttttgtagcctaagaaaatgattgtcgtttttccattttgtagtcttaagaaaaaagattgtcgtttttcaatcttgtagtgagaaaataattgtcgtttttctatattgtagtctgagaaaaaaagattgtcgtttttaccattttgtagcttgagaaaattaattgtcgtttttcccgttttgtagtctgagaaaataattgttgtttttcaattttgttgtctgacaaaatgattgtcgtttttccgttttgtagtctaagaaaatgattgtcgtttttcccattttatagtctaagaaaaaagattgtcgtttttccattttgtagtgagaaaatgattgtcgtttttccatattatagtctgagaaaaaagattgtcgtttttctattctctacgacgaagaataaacgaacgaacgatcccatgtaaatgggcctattctagcccagcccagcccaggcccatcccttccctcctactccgagaacgaagaaacgaacccagaaacgctggctgcctcggccactcccggatctccgcccagagccgccgcttttctccggtcacctttgaagctatccaaatccgaagacctaaacccatttcatcatttcattcacattttctctttcgctaatttgctctgtatatcaaaattgttagaattggtctttcaatgatgggaaattatgctctcgaaccttcttcatcacgtcagttaataatccctttctccaa

SEQ ID NO: 286672 - DNA, 756 bp, Cannabis indica
ggtctggtggatgcattttgatttgattgtagcccgagtaagcatccatgaagcttaatatttcgtgcccggctgttgcatcgacgagctgatcgattcttggaagtgggaaacagtctttagggcatgctttgttgaggtctgtgaagtcaatacagactcgccatttcttgttcggcttaggcacgagtacggggttcgcgacccaagccgggtaaaaggcttcaatgatgaagttgttgttgcgcagcttttcaacttcatctttcagggctactgctcgttctttatccagcaatcttcgtttttgctgaactggccggatgttaggatcgatattcaggacgtgcgaaataatagaaggatcgattccgaccatatccgcatgtgaccaggcaaaaacatctaggtttgctctcagaaattttatcaattctgattttacttcgagcaacaaaccctttccaatttttagctttctggccgggatagctggatcgatctcgatctcttctaattcttccacaggtccaacattgctgcttgggtccccaagtcgaggatccacatcttcatcctcgccttgggaagtttcctacttgggaatgtttattcccttgtctgggctctggctggaggatatttccttcttagccttggccactgcaaggttgtaacattcccgagcagattgctgattccctctaagacaccctaccccgtttttggttgggaacttcaggcacgagtgaaata

SEQ ID NO: 286673 - DNA, 663 bp, Cannabis indica
tgagttctgcacgtcccaagtggcctatggcgaaacagaggcgactgcttcaacctccggtcaggctgctgatgcacatcctgttcaaacaacagatcctcctactccgattggcccagaagaaccgaaccaagagcctgggactccagctgcttaaacacttctctcttcatcttcttatttgatatatcttattttgcctcagggccttttctaagacatcatgaccggccaaccggtctttaaacttggaattacgtgcttttgttatccttaatgaatttcattccctatttataattgtcatgcaatcgtgattgttttatttttaccaaatgatttgtacaggtataggtgcccccaagtgaccgagaaaacgtatgactcttggtcacttctcttttacaaatatattgtttatctgtttggtgttttgggtttgacaagaccttttgtactcattgtatggtaaattataaacatactaataatttcgactcaattgaactttgaaataactatctttattcatttattgatcgaaaagtgtatttgttaccgtagtaacttacatcagagttatttgatctaatctgatcttttagcttaacatgaaataaaacaaattgcagtcatcaaatgattctgcaaggagtatgtgat

SEQ ID NO: 286674 - DNA, 651 bp, Cannabis indica
gaatctatttcatccttatttagacttttctcttttctcaccctttgacctctcctaggttcaatgggttgttctacaactttagtagtgttctcctcttgagatcctcttttagaagtagaagcttgagaattattttcatataaaatattctcacctagaggtgtggaactttgagagttgtcctcatacaacttattctcaaaaaattctacttctctagattcaattacaacattggattccacatccaatagcctatatgccttactattgttggcataaccaacaaatgcacattttatggcccttgaacccaacttggttctatttggttcggtcttcttacaataagcaagacacccccacactttgaagtaaccaatatttggttttcttcctctccataactcatatggagacatgtcatttttcttcataggtattctattaagaatatgacatgcggttaaaagtgctccccccataagttgttgttcaacttagagtacactatcatagaattgaccatttcaagaaatgttctattcttcctttcggctacaccattttgttgtggtgtatgtggtgccgaactctcatgaattataccatttcctcacaaaaatgagtaaattcattagagaagta

SEQ ID NO: 286675 - DNA, 705 bp, Cannabis indica
agcttttgaatcttcgatcatggtcagccagaaaatatccttgccttggtattttaattgataggctttgcccagctgcgtggttgccacagaatccatcatgtacttcagacaaaagccgtgtagcttcttcttgtgtaacacatctaagtagtggcatggaaaatccccttctatacatgactccttctacgatgatatactgtgcaacctttcttctcatcttcagagcttcatttctatcatttggaagttctccagtactgaggtaggctgctattggtggtatctagtttggtgatgggtcaatcatttcaatttctcctgcacaggtgatgttaggttcttcaaggaattgaattgggattagattagccttatcacctatgttattgcttgcaagtcggcctaaggcatcagcagttgcataatccaaatttgactaccccgtgtaggtgttgcccacaggtgtgacaagggcaatccctgcactagacagttgatctgtagctgaaccgtccacgtgtagtttctaggtaggtttgttttccttattgttcggctgaggctcttatactagcttcaggttgccttttgaaatgctttcttctttgtccgtgccctcaactacaaagtctggtaagacctatctgtaacaccctaactattaaaggtgtgttagcgtgatttttaatgtactgtgca

SEQ ID NO: 286676 - DNA, 581 bp, Cannabis indica
aagtatttccccgaccagattatgcgaaaatagcattcccgactgatgaggtgtctagtgtgctaaatttttacccacaacgatgcttgtggtggtcactttttggtgaagaaaaccgactgcaaaaatacttacagtgcggtctttactggcacactttgttcaaagacaccaatgatttttgtcgttcttgtgtaaggtgccaaaggttcggctccttgtcccgacggcacatgatgcccttgaacccaatccttgtcataaaaatatttcattgttgggggatagactttatgtcaaaataatgataacgcttcagttgtgaaatttttaaaagaaaatgtgttatcgaggttgggtaccccttgtgctatcattagtgatcaaggcactcatttggcaaccgatcttttgaggctctcttgcgaaagtacgatgtacttcacaaagttgcaaaggcctatcatccacaaaccaatggtcaagctgagctagctaatagggagataacattcttgaaaagatggtaaatcccgaccgaaaagattggtcaacacgtcttcaagacgcactttgggcat

SEQ ID NO: 286677 - DNA, 678 bp, Cannabis indica
gcaagtgaaaacctagatttaggcttttctttgtaagtgggataggaatatttcatttaccttgcataacttaccaaatgaatgcttgaatggtgttctgcttgctggtttgatataggaatatattgagctaaatggtagaattaaagttgtgagtgttggaaaattctcacaagcctagaggaatttgttgttatctctgtgcagaatgctagagtaatgctgaaccaatgctgtactgactgtaaaaaaacctgactagaaggaattagttattcaagccatttttgccatattatattttttatcttgcaaacaatttttctagcagcagtagttttaattttagcaagtttaattcttgtcaattttaattttgaatcattactcaaccatttgcatattatttctttttattttaagttgtaattagttggttttacaagatatttttgtttgcaatccctgtggagacgatcttacttatcactttattacttgtttgactgcgtatacttgcgtatataattttcacaacaagtttttggcgccgttgccggggattgaaactaaaaattgtgtattatcaactattttgcaatttattttctggtttaaagttttaatcctatttggtgcgctgaatttttatttttcaggtgtaaactagtgtatgaa

SEQ ID NO: 286678 - DNA, 786 bp, Cannabis indica
tggtgcagtcacatccattcagcacctgtgcttaaagttccctacccaggaagctggaattgggacggtgagaggaaatcagggggaggcaaggcaatgttacaatgttgcaacccacctgcccgtactgatggtccgggaaaccattgagccagaaatggctgaagaagatgagttggatccccgagtggggtccgaaaaaattgtggaaccaatggaggatgtcgaggaaatatcagtgtgcgacctcgactccaccaaggtactccggctaggaaaaagcctagatccggaggaaaaagaaaaaataataaaaacactgaagggcgccatcgacatttttgcatggcgccaagaggacatgactggcataagtccccatgtcatcacccacgtcctcaacgtcaacccggacatgccaccagtccaacaaaagcgacgccctctcgactcggtaaaagccgaggccctagagaaagaggtggataagcttctgacgaacagcatgatccgcgacgtatactacccggaatggctagccaatccggtcctggtgcccaagccgaacggaacttggcgagtttgtatagatttcaccgatctaaacaaagcttgtccgaaggactgcttcccgctgcccaggatcgaccagatggtagatgccacttccggattcaaattactatccttcatggacgcctacgccgggtataaccaaataaagatgcacacagcggaccaagagtgcactagcttcaggaccgataagggggtatactgttacct

SEQ ID NO: 286679 - DNA, 643 bp, Cannabis indica
cattggcgccagaaacaaaacaccatttcttgatggatctttacctcaacctcctccacatgattccctgtacagctcctggaacagatgcaatcaaatggttatgtcgtggatcattcactcggtttcaccagaaatcaaaacaagtatcatgtacctcgacacagcagcagagatgtggaccgtactcaacaaccgattcaatcaaggtaatggccctagaatctttgaactcaatgaatctcttctttatcttcatcaaggtgatgaatctgttagtgcttacttcactaaactcacggctatttgggatgagatcaatcaactcaggccaagaataccatgtgtttgtgctgctgctgcacaaaaccatgatcacataaatcatgatcaagttttgcaatttctcaaaggtctgcatgaatcttatcatgctgttagagaccaaatcttgcttattgatccatgtccacccttaaataaagtcttttctatggtgatccaccaagaaagacaaagaactttgggtaatcgcaacatccctccaattgctgctacagcagacacaacatccacacttagcactgatccagctgcaaatcaaacatcaaagaacaaacggcctcgccctcactatactcat

SEQ ID NO: 286680 - DNA, 624 bp, Cannabis indica
gataaatttaccgtttcacccctcaatgtattttatccttaaaatacgtagcttcctataaatgatgtttcagtgaactaaaatataatcactgatacaagagctcttccatttatctctattaagcaatgctcgaaggaaatcatcgtttcacttctatgtcatgatagaagctatagattccatatctatgtttagcactcccactcaatcatactactatgttcccaaaatgtatgtattaccctaaccagaaagtaggcttaactaacaaatcaaagaacatgtatagcactcctgagattgaacctaagcatgtcaggattaagatcttttgatctaagatcaaccagtaattctgatgaaaccaaagaaatacaaaggcaagttgaaggattgatgaccaaagggcatgtgagagaaagcatgagcccttgtgcggttccagtaattctcgttcctaaaaaggatggaacatggaggacgtgtgttgactgtcgagccatcaacaacataacggtaaaatatcgacatcccattcctcgtttagatgatatgttagatgagttgcatggttcttgtgtgtttctaagattgaacttaagagtgggtatcatcaaatac

SEQ ID NO: 286681 - DNA, 505 bp, Cannabis indica
ctactttcagattatttgttacttgtttggtttgtgatgtttgattatttatttatttattcaatttgtttttacaaacctattatttatttgatctaaattgctatgattaacttgttgacagatctaatgatctgattttaattatagttcaattgtcaatagatcttataaataatttgtaacaggtaaattttgcaatttctttcatctgtgtaaacctagtaacatgataaggcccatctaaatcatttgacctgtgtgagcctatatgtttacttttgggcttagatgcatataagaagcccatttaagttttattaattaaatggactagattgctaaactaaaatttcacttaagtaattttatttaggcccaattagaattaggctaattcaatgaataacaattatttatttaaaggttaaattcctcttctttgggccttgtgtgagagttagggggccatagtagtgggtacgacatactgaacccaaccctc

SEQ ID NO: 286682 - DNA, 673 bp, Cannabis indica
ctttgcacttatcagaagatctggatataaagcggtttaaggctgcgactttacctgtgaggctttgaacttcctttggcttggttggtgatggcatttccaccaatgccctgatcttcgcaggattggcctctattcctcgctgattaaccatgaacccaaggaatttcccagagccaactccaaagacacatttcagagggtttagccgcatcttataccgtcgtaatatatcgaacatggcctgtaagtgggcaatatgatccttcgcatgttgagattttacgagcatatcgtcaacatatacctccatggtttttccaatgagatctgcgaacatcatgttcactagcctctgataagtcgcacctgcgtttattaaaccaaaaggcatcactttgtaacagtatagtcctcgatcagtaatgaacgaggtgtgttcctggtctggttcatacatcgggatttgattatatcccgagtatgcgtccatgaaactcaagagttcgtgacctgcagtggcatcaacaagctggtcaatgctaggaaggggaaagctgtctttgggacaggctttgtttaggtctgtaaagtcaacacatgtgcgccatgagccattaggcttaggcacgagtacggggttcgctaaccagttggggtaaaacgactcccg

SEQ ID NO: 286683 - DNA, 760 bp, Cannabis indica
atttcaacaattttttttgagagagagccattagcgttttcaggtgctcttatccatcagctcttcatgcataagataaaatcagataaagatgatgaggtgcatttttatattgcaaagaagagatgccgattcggccgaactgagtttgccttggtgactgggcttaatttgttacgtggaccgactgaggctgaggtttcggagagggcgacgtcagaccgtttgatagtagaatattttaatggggatccatctatcagcattggtcgtctgcgcagcgtctttgagagttgcactgagaaggatgattgttacaagttgggtttggtgctgttcgtgatgggtgttctgactgggaaagaagagaagaccctggttcccccatttatcattagaatgttgaggacctcccttttttctacaattacccgtgggggaaaatttctttcaacttgttgaaagatacttggagtaaggacttcgtacaaaagaaaaagcatatggatgagaagattgagaagggaacgactcagaaggagtcaaagtattcggcctatggatatgctgtagcattgcagtattgggcttatgagtccatcctcgagcttgctgagaaatttgcaatcagaagatcgcatcgctttccccgaatggtgaactgggagagtaaggatgccccactcgggaaagaggaagtcatcagattatttgcaaaaaaagtgagtttgttaattcattgcatttgcttacgtttatt

SEQ ID NO: 286684 - DNA, 755 bp, Cannabis indica
gaactcgggcccggacacggtcgtgtaccaaaactggaactgagacctggacctggacctaaatctaggatccgatcccaagcacagacttggacctagatagggattcagatacgaaactggactcggacgaagacacagactaggatcgaaatgctggacctagatctagaccgagatcctgacctagacccaaacttggacccgcactcgggatccaaactatgacctagacccgaacctagacccagacacaaacccgaacacagactaggacccgaactcaaacacccatacctagaatcataccaaaagctagacccggacacaactcgaacccagaccaggatcagaaccaaggacttagacctagaacttaatccaaactcagatcgggattggaacttgggactcggacccaacctagaccaagacccaggacgcgaacccacacccggagcctgatcttgacctagactgaaatcaggacccgaacccaaactcagatcagtactcgaactccgactcgaactcaaacccaaactcgaactcagaatcacaaatggaactagaatcgaactaggactaggactaggactaggacctaaacaaaaacccaaacccggatcaaaacccagacagagacctaaacctgaaccaagctagcactcgaacccgaacctagaccgggacccaaaccaacacaataaccgggacttggacctagaataaggatagggacctgggaaacagaa

SEQ ID NO: 286685 - DNA, 671 bp, Cannabis indica
gcatagtaaagagcttctcggcggtctcgcacccccagtcaaacgggcaggtagaggcggtgaataagaccttaaaagacaccttgaaaaaaagactcgaagaagcgaaaggaagctggccagagcaattacccgaagttttgtggtcatataggacaacagaaagaacagctactggtgataccccctttgcccttgcttatgggtatgatgcgatgataccggtcgagctagacccaccctcccaccgacgagtgacatacaaccaagtcagtaatcaccagatgatgaatgaatcgttggacctattggaaaatcgtagggaagcctcacaaatacggttagcagcataccaacaaaaagtagccagatactttaattcaaaagttaaggaaagaagcttcaaggtaggagatctagtactacgcagagtcttggccaacactaaagacccaacagcaggagtattggggccaaattgggaaggtccatacgaggttacagaagttgtaccccccggcacgtataggctcggccggtatgactctaacatgaaccttataccagtaccccgatattggaacggccaacacctccgcaaatattatcaataacaattgcttttcagcaacaactcatgctaagggtgtgcccgtaagcaacttagaatc

SEQ ID NO: 286686 - DNA, 703 bp, Cannabis indica
aagatattgaaataaatggaaagtaaactaatgaagtattgagattattaccttattagttgtataggaagatactaatatgaataatttttataataatttgaatggtataataattaggagattatctatttaaataataaataaggaagcattatgtcataattatttagggtaattggttaaaattacaagatatcatgaattgtaaaaatattataaaatttaatagctaacaattatggtatataattatgagattattgccttattagtttattatagataacataatattaattttgggtatataaattataaatatgaatttattatagataacataatattatagataatataatattaattttggtatataaattataaatgtgggattttgtaataaattggaggtagggacattaattgtgaattgagaatactttgttttactttgttttttatttttggaaagatattgaaataaatgggaaataaatgctaatgaagtattgagagtattgccttattagttgtataggaagatactaatatgaatagtttttataataatttaaatggaataataattatgaggttatctatttaaataataaataaggaagcattatgtcataatgccgaattggattaattaatattaatttaatatttttaattaaatgtatgatgaagtggt

SEQ ID NO: 286687 - DNA, 620 bp, Cannabis indica
taagaaagtgagaagggtgtttcgccagttgtagatcgaggagttgtattataagaccataggacttgcggtaactcgtctggccaagcccctttgcgatcttctagtttccctttaatggtgtgttttattattttgttaacagcttcagtctgtccattgctttgcgggtaagcaaccgcggagaatgcctttttgattcccaaatcgtcgcatagttgtcgcatctctttacaatcaaactgtcttccattgtctgagatgagtttgtatggaataccaaagcgacaaattatggaggtatagacaaactcgcgcaattttgttgctgtgatggttgcgagtgctttggcttcggcccatttcgtgaagtaatctactgcgactaccgcatatttgactccacctttccctttaggtaactcgccgattaagtcaatcccccatactgcaaagggccatggacttgtgatagaatggaggttacttggaggttggtgggtatatgtggctattcgctggcacctgtcacacttcttcgcaaatgcgagagcatcttgtcgcaaggttggccagtaatacccttgtcgcatgatttttaatgcaagggagttacctcc

SEQ ID NO: 286688 - DNA, 738 bp, Cannabis indica
ccactgaaaggagtcaaactaagaaagtagctggtgtgctagaggttgatgccatcacaaaattgacagctcaagttgaggccttgacaaagctgattgcagggcaagctaaacaagcccaagttatttgtgagatatgtggaggcaaccatcacttttcagagtgtcaggcagatgtggataatttgccaatggatcaagcaaaagccattgggaactactcccaaaataataattatgggcacaaccaacaggggttctaccagcagagaaatcagccccaacaaaaccaacaacaaagtcctagtggctccaatatccaagctgatttattgctccaattcatgatggaaactagagcctctattaaaactctagaaactcaaatggaacaattggctactcaagtggcaaaccaagctcaaggaaattcagctagcactagtgaggcaaaaggaaaagagcaatgtaaagcaatttccttgaggagtggaaagaattatgatgggcctgatgtggtacaaccattcaatgaagaagttaaagatcaatcagcaccaactccaacatcaatagaaaagaaaactactgatagccctgcaccaccacaacagtctccaccaatcagtattgatcatcatgtgaagataccttatcctcagagactccgaaagaccaatctagacaagcagtttacaaaatttctagaggtcttcaaaagactacacatcaacattc

SEQ ID NO: 286689 - DNA, 389 bp, Cannabis indica
aatttattttcattttaatattttaaagttaattttaagaaaaacactcttagtttaagatattatttctagataaactatttgtatttttcttgtatttaattaaataaagaattttaactaactagattctttctgaagcttattttaattatttcattaaatattcctatttaagttataaattagttattactaactatttttttcttatcaacttaaatttgaatatcttttgaatttaaaattaagctgaggaattctaggagttggttattgaagattctagagatattttttaagttgttaaacttaaaatggaatattcttaaattaggtagttacaacttaattttgatatttaattaaattttatttgtaaatttttt

SEQ ID NO: 286690 - DNA, 599 bp, Cannabis indica
gatctgaaaaaattgtagaaccaatggaggacgttgaggaagtatcagtgtgcgacctcgactccaccaaaatccttcggctaggaaagagcctagaaccagaggaaaaaaaatactaaagacacggaggggcaccacggacattttcgcgtggtgccaagaagacatgaccggcataagtccccacgtcatcacccatgtccttaatgtcaacccggacatgccaccggtccagcagaagcgacgtccccgcgactcaataaaggcgaaagccttagaaaaataggtggacaaactactaacgagtggcatgattcaagatgtctactacccagagtggttagccaatccggtactggtgccgaagcccaacggaacatggcaggtttgtatagactttaccgaccgaaacaaagcctccccaaagaactgtttccctttgccaaggatcgaccagatggtggatgccacctccggattcaaactactgtccttcatggacgcatacactggttacaaccaaattaagatgcacgtggcagatcaagagtgcactagctccaggaccaataagggggtatactgctacctagtcatgc

SEQ ID NO: 286691 - DNA, 737 bp, Cannabis indica
tctttgttcttcaatttttttttcaactcccagtaaacgaatctcataaccgttttccctcttgttgtccatagcctacttttgagggaagtataccagcccaatccaaaagaattttgggctaaggttgctggctgttgtatacgattcagtgccgaggagttttacttgatcactggtattgattgttttgctgattgcaacaaactgttgttttcccaagaatcaaaccagttgattgaggtttgtttccgtggtgtaaaaaccatagatcataaagctatagaggatgctttcttgggaagtaggtggggtcaggatgagtcacttggtttgaaactatctatgttatatttcatctaatgtttccttattagcaatactccagataaagaagtttctaggtttgatctagatgttgttgatagtggtcgttgggatgagtattgttggggtagggagtcatttgaattgactattgattcattcaaaggaagaatagagcatgggataaaaatgaaaagtaaaaaagaggagaggggaggtcagtatgatggttggtatagagcgttgggctgtccttggatgtttattgtttagttttatgaatgttgtcctgccatggtaaacacattttgcaaaagaatttcatccaggattccaagaattctgaattggagcaataatgttgtgaccaaaaatccaacttttagagacttgaagggcaagatttttga

SEQ ID NO: 286692 - DNA, 98 bp, Cannabis indica
gagagagagagagggtcagctatagagagaaagtggaaggctcaatttttctgaaaggcaatctcttgaattactgaaacactctttaaaaactctta

SEQ ID NO: 286693 - DNA, 554 bp, Cannabis indica
ttatgtcttatgcacataactcttgacatatatgcgtgcattcaataaataccaaagcatatagaatcttagggtaataaccctaatttacatactaaataatcattcctacaacatattacggcatgctcgaaataacacttattgagggtattaaccctaacttatgccttcacttaattagcaatataaccatacatcattgctttcttacctttataatattctagggtaataaccctagaccgcattaaaaattaaactcaagatactagtttactgagtctagcttaattatgtcttagacacataatcctttattccaacatatttatcatggcataacatccaacaccgtgtatatatcactagggtaataaccttaggctattaaaccgctcatgttagggtaataaccctaatcccggttactaattactcacatatatcatttccaatataagcgtcaccgtgcataactctatgtgctaactactgtcttacctgatgtcccgcaatagtggagattccaaatccccgggtgctcctgacca

SEQ ID NO: 286694 - DNA, 727 bp, Cannabis indica
tttattttcagtctgtttaatatagaagtttaaattcttcgctattttaattagtaatcccagttaggggattagggtttcataagcattcttgggtagcgtgcctaattatttagggcgttacacactctctctgtatcactgccgccgactccgctgagtgtcactcgatcctgtcccggccgactgccacctccaccattttcaccctcaacctccacctcactcaacaaagcaatgggtaagtatttttcttagtaaatagtgtagttttttgttgaattgcatggatctgaacgttgttagttgtaatttgtgacttttgtgtccttgaaatggaggtagagtttgtggctaacagtctgtgtttttctgggtttttttgttttttgcgattttatgcgacatcatgcgatgttttgtgcgatgtcatgagaaatctgaggttagggatgacatgattaattttggcgactttgtacgattattgtacgattttatgtgcgatagtgatgtttggcgatttgtgtgcgatatgttgtgcatcgttatgcgattttgttgactatgtgatattgtgcgactttatgcgatttctttcctttgttgtgcgattattgtgcgacatcataactggtttatattatgttagcttaaggcgatattgtgcgatgtagtgtgcgatatagtatggtgatttttaaatgtaagtttgtttgtatttctt

SEQ ID NO: 286695 - DNA, 542 bp, Cannabis indica
aggagtgggtttgtgttcgggtccgagtctgtgtttgggtttgtgtccaagtctgaaccccgattgggtctaggttcgggtcgaggtccaagttggggtcccgagtgcgggtccaagtttggtctgggtcaggatctcggtctaaatctaagtccaacatttcgatcccagtctgggtcttggtcctcgtcaaggttcttatccggatccctttctaggtccaagtctgtgtttgggatcggatgccagatttaggtccaggtccgagtctcagttccgttctgggtacacgaccgtgccgggcccgagttccagtctcagtttgggtctgaggctaggcctgtgttcggttctaggtcttggtccgggtcctggtcgcggtcttagtcttgttctagggtcgtggttcggcgattcttgttcttgttttaatttggggtcccaggtctaggtctgggtttgggtttggttcttcatctaggttttggtcctagtttgattcccagatctagacaccgactactggtctgttccaggccccg

SEQ ID NO: 286696 - DNA, 457 bp, Cannabis indica
tatatttattaattagacataacaaagtcttccaattaataaataaaacctacaatctcttttcttcacaagtttgtccttgcttagtgaaaattcataaactagacatagtataatcttagaattatgattgattaattaaaaccaattaactgagtcttacaagcagtatggtctcaactagaatggggaccatgagcctatatttctgagcttcaaataagctgatcaagaatttatcaagtaaattcacttgcttattaattccttgttgcatccactcttgggacttagaattgtactctcattcatatagaacgctctatatgttccaccatatagatacgctatcaaatttaaccattgttataatctaaataatcaaagatcctccatatagatgatttacaccgagtagggagtaatttaccgtttcacccctcaatgtattttgatc

SEQ ID NO: 286697 - DNA, 746 bp, Cannabis indica
acgcttcctcccatgcagcattaaatgcgacttgattgctcaggagaagcgtgacacctcgcggagaggctttatgttatgcgagcttccgggagcaccttgcactccgggtgcctcctccgggacctatgcccatggtgcttccgcgtggcatgcaaagacttagcaaatatttacaagttatctgatctacgtgtccctgttcgattggtccacgtatactgggtgaaattaggggcaacatttaccccccaagccttgtttacttggaaaataaaccaaggcttgtttaggtgcctccggttgactcctcggttccctggctcaagctcagagcgcgtgggggcgtatttaatgataacatttaatgcaccgattcgctttttgcagaggtgtctccggtcgactcctcgatttcaaggcacgagcttggggcgcgtgagggtgcgtctaatgatggcattaaatgcagcgattcgctttttgcagaggtcgatttgtttcatgcccattgattgatggggcgcattaatggtgtcagacggatactcaaacgtttccaccgcctttatttcgactcaatctggcccgttgatctttcggtatttgaatcgtgcgtttcccccaccgttcgattggtaggtggtgacgcctgttcctcatgcacttttgcctataaaagccaccatctttccttcatttcggttactttccattccttgccatttttgctcgaatttcccaga

SEQ ID NO: 286698 - DNA, 567 bp, Cannabis indica
aattaattgaatatacaacatacaaaaatatatactctatttaaaaattttatttttctatcgaattgaacttttttttcttatcgaaatataatggaaaagttattcttattaaagggtttatatatcctcacctttttttgggtttatccttacttttaataaagaaaaaagaaaagagagttatcctatgaatagacccgatcaagttaaaaagataagagaaaagaacaaaataagttcaaatacttaatttatattttaaataatgtggttatttcacttaagaatgtagatgacaaaaattagatcctaatttaactacaattattgtaatagaatcgaatatttcacaaaaataatacctctaatacaccccttagagatgtcctgatattcttttatttattttggtgtttaagagaattttttagtttattatttttagttatttaaaatatctcaaaattttaagacgaaaaaaatttaacacactgaaaataattgcatgcgtgtctcacaatatcttaaataactgttgctccagaattcgcccaaaatacgtgg

SEQ ID NO: 286699 - DNA, 540 bp, Cannabis indica
tctggtcggtttatcgcaaagaagcaagtcgcaacaagtttagccttgtaaaggtagtaaggtccgatttggtaactctcgaaaccaagtcctcgcacgagaagggctcgttcagctgagtgtcgtccactgaatcagttccactcccttctgcctcttcttcctcctcgcctgactcgcgagctaggaccgtccaatcgtcatccatatcctggacctcaacgtcaggggcatgcctggagtggataagataatcgcgggctgacactgtagactcgctgtctcgaatctcgatgccccctggttcagcgagctcctgcaccatcttctcaatatctacggaagacatcagacctaattctatgcctacgacaggtgcaatctcctcttctgagatcgaagtcaggataaagctatcctccctctggtcctcgtcaccgtcaaatgtatcgcctcccgagccaagcagctgactatccgacaggtcgctcatctgaaagatagaagatcttttcagcgtggtgaatgtgtgaaaaaaca

SEQ ID NO: 286700 - DNA, 690 bp, Cannabis indica
aaagaagttaaaataaaaacattattatcgttatcaaatcacaaactatatacaacacacacacacacaaagtatataaatataattggtcgacatttgaggagccgcaaaattgcattaaattctgatgatagccataactacacacataccattcaaaatatacattttttacacacaatttaattttgtataatagtacagcactaaaaaaattattctaatacttccaattttaacatttaagaaaaaattttagtttattattttaataatattatagttatttgtattttgtatgattacatatacatttttttaaaatttctcaatatataattacggtatcgaaagtttattacacgatcaattattttttttcatatatataataattattttttgtatattataaattatttaaaatttttgaaaaatttattagatgattctaagtataactaaaaatacacgatggatcataatattaaaataaattaaaaaattactcttagatttcaaaacaaataaaagtgtgtaccgtgatttttcttttaattttaacttatatataattaattttaaattaaagaattattccacattaaatctaattatatatatggttaatattaattatacattgatgcaaaataatgtaataaaatttagtacatgcatgtattatcg

SEQ ID NO: 286701 - DNA, 433 bp, Cannabis indica
cttgtttcagtgattatatatttgttcactgaaacatcatttataggaagctaagtattttaaggataaaatacattgaagggtgaaacggtaaatttatccctactcagtgtaaatcatctatagaggatctttgattattgagattagaatgatggttaaatgtttatagcgtatctatatcgtggaacatatagagcgttctgtatggctgagagtgtaattttcaagttccatggtggatgcaataaggaattaaaaagttaggagatttacttggtaaattctagttctacttattggaagctcggttgtataggcccatggtgtccatactagttgagaccatactgcttgtaagactcagatgattgattttaattaatcaattataattctaaaattagactctgtctagtttatgaattttcac

SEQ ID NO: 286702 - DNA, 654 bp, Cannabis indica
caggtgtgcgaactctttctcttggcacttctaacggcctcattgtaatatttcgcgttgaagagttcctggaacctttcccaggtcatagttgtgacgtcgtgaatctgggacaccacctcccaccagacctaacgacgtcctcttcgaaactgaaaggtagcacacaccaccctgtccattcccagtgacacccataaaattcaaatattttagtaatcaccgttagccactgctcggctttcatgacgtccggacctcccagaaaaactggaggtgcctgcttccggaaccattcatacaaggggtccattttgttcgccgctaccactttctcggcctgagcaacaggggccggtgccactggaacttctggcaccggcactgcaggagcaccctactgcctcaatctgtgaatctcttgatcttgctcctctatcctggcttgcacttcagcaaaccttgtttcccaattctgggcttcctgattggcttcagcagcctgggcagcctgtggtgggttatcatcaccccgaccacgggccctgcccttgggacctctagggaaactgagctccttgaccctgatttgacccgactgagttgccctgactcctggtctttcgcctggcgtccatctagtctgaacagcct

SEQ ID NO: 286703 - DNA, 559 bp, Cannabis indica
atttacaagtcttgacaaaatttgaaaatttaacaaacatgaggcatttcctttatataatcaatagtacattatggcatatatacccccctatacttaggatttttttttatgaaaaatgtctaagtataagtacaagagcgaacatagtttaataatgcgagtactattgataatataattttaaactctcgccattccaagctcgtggaatcgcagtaccatcgagtgctgcgagtcggtatgtggcgtcaccaattttttccgcgatgagatatggtccttcccaattatctccaaagaccccatgtgttgggttcttggtatttggcattacccttctaaggaccaagtctcctgctcgcaggacctttactttcaccttggagttaaagtatcttgcagttcgctgctggtaagccgcattttttaagtgcgcttgatcacgtttttcctccagaagatcaaggcagagtaactgcttctcgtcgttctgcgagatgttgaaaacatctctgcgtagggaacctgccccgatttcaactggcaacatggcctc

SEQ ID NO: 286704 - DNA, 933 bp, Cannabis indica
ttatgtaattttaattaccaaaataccacttacactatcatcacttacacaatcagacgatggttgcagagtggttgctgcgtggttgcgcggtggttgcatcagacgaaggtttcaatcagacgatggttgcatggtggttgctaagtggttggccgaaggttgcatcagacgaaggtttcaatcacacgaaagtttctgggtggttgctgggcagttggtcgaaggttgcatcaaacgaaagtttcaatcagaccaaataattgttagtaaaatgtttatgcaactataatgcaactgttgtgaaacattaaaaatcagaacattattttcacgtacataactctatctacatgtctttttataatttaatatgaacaaattcaccattagaaattcggaaaacaacaaaatacaccaggataaatattttactatagtattgatgtattttttttttggattatacttgagttggattgtttgggaattccaattcaactttttgagatctgcctttcatggatctaaaaattgaagtcaagacattagttttatgtaaattaaactggatttccagttgaattttagtttcgtagtagtttttctacattttttttatgaattcgaaacaacctctgttttgattgattctggtcgtcttctcaggtgaagtcgccagaattaatggtggttctctttctgactgaattttcgtttcgcttgcattgggttgctgcatagttgcacgatggttgcgcgatggttgcgtgatagttgcccaggaagcatagatcatgggttaaaggtgtgtgtaagtggtatttgtgtaattttttttagttgggatgtatatttgtttatttggccagctggaagtatttttgtaatattattacttttttttgttaaaactgaaaaaatcccaaaaaa

SEQ ID NO: 286705 - DNA, 964 bp, Cannabis indica
atcaggggaagaagagtttgaagtttgaccagcaggcaactccatacgcatggtaaaatttagacccagacctctcccgctgcggccaacaatgtctcaatggccttgctcgaagaagcagtagcggtgggttgccctcggggatgaggagcattggcatcagaaatgactggaagaggaacctgtttcttggatctcattgtcagagacctcgagatcgatgggctcagccagtgaattcttcttgtgggcggtggttttcctttgcctcttgggaggaaccactttagcagttgtagggaccccaaggttggttaccctcttttcccttttcggtccatgatatcttcataacccatgtctgcaaaacaaggcaaaacattacaattgttaaaaaggctgatgaaaaagggtaagagtacaatttttcacctaagggatttaccaaactcccaaggggcaagttatcactagacgaaggggtagagggaccatagtgatacgaaccacaccaacatttgtgacgaaacacgagaccaattatggcagcctctaagaattcttgaaatttggatgtggaaccgcgacccaatgcttagttgagcatgaaccttgttatgaaggaagacgccacaaatggtggtggaaatccgtttgataagtcaggttgagccacaaggaatactccttgataagttcgaatagttctcttaagaactcaagaagaaaacctctcaaaattttattcccaaaatattctaatttttcaaagtgtttacaaggctttatatagccaacttacaaccaagaaaaaaggaaactaaaagaaagacaattctctaaataaaacaaagacaaaataaaggaaacaaaataaaaaaggaaagctgccaaatgtcttgaaaaacgtgataagctcaatttgggtctaaattgagtctactttgatgagaagcgcaaatct

SEQ ID NO: 286706 - DNA, 525 bp, Cannabis indica
attataattataaaattagactacgtttagtttgtgaattctcactaagcaagggcaaaattgtgaagaaagtctctagggtacatttgttaattaagagactttggttagtataattaataaatatattaaatgacattattatttaataattaattttttgttattaaataattggaaattgcatttaaatggttaaattggaaaattaacatttttgagaaaataagatgcagaaatgataaaacagcaaaattggaaaagtggggcccattatcaaattgctatggccggccacttatgtaggtatttatcaattattttttcactattttaatgccaaataattctaacgtaaccctagtagtttgctataaataggtagtgatggcttcaggaaaagatgacacatcttaattccttcagagaaaacctgagtgtcttctatcttaacctagccgccacttcttctccctcttcttctcttctgaaaaccgaagcccatagtgagtgagtgagtgccca

SEQ ID NO: 286707 - DNA, 651 bp, Cannabis indica
ctaagtatttatttttatagttattgatctttctgttattttaatcaaaatatataatataattaaacaccatttaaatccttttgtccaaaaaagatttatctctaaacatttttcttttgtaaaatattattttattctacctaataaaaaatgattatacattttttaaacaggaaaagattttttgtttagataaatagaaaaataatattgatatctggaagtaagcaaaattaactatatatatatataaaataaaaaagaacatgcagaaatagatcttcgtacagactttattttgaacagtatccaagcaatttttatattttattatttttttactataaacaactatttttatcttaatttggccacaataagttatttgaaaattcaataaacacaatcataaaaaaataacaaaattagaaatatttcaattagaccagttgcaattacggtgtacgtcggttgatttaatcgggttattgggttgcaaatattcaattgtaacccgcccaattaaaaattagaaaaagttcaaccagcccaataattttataggtttggtcgggttaatccgtccaaactgttcctcacttttttcttataattaattattattcttagtttctaattcaaaaaatt

SEQ ID NO: 286708 - DNA, 611 bp, Cannabis indica
acaggaaatacaatgcttgaacaaaggaacagagatagaagtaagtttgtactctatttcataacataatcaaaccagttttaaaattcgttgcctcggactaataaccattgcaaaaacacaggaaaggaaagacattccattcctagtcttctacaatggaaaattcgatgatcgaatgaattatgaaaattatgaagccagtggacactacatttctgccaattgtaactatgaagatttgcaacagaaactcaaagatgccctggaatgcaaccaagaaaacactgttttgcaactgaaatatcaagtgaaggaaggataccaaccattgaggataaaggatgatcaaagcctgcatttctacatacaactcaaactgaaagaccccgacttcacaacatacccaatgtgtgtgaatgtcatcaacaacccaacaacaaccatcgatgcaacattctttggaaatgacaattcattaattacacatagaagcgccttccaaccaatcgaatacaatgcagcaacaacagaagactcaacaaatcaacaacatataattgaagcaagagtaccggaatttggggaagaaagttttgacttcatggact

SEQ ID NO: 286709 - DNA, 471 bp, Cannabis indica
aacatcggctgttgggactgtgatcctccaaaaaatcagagtagaaaaatggaggagactgggaggagcgtccaaacatgttcggaataagaggagattgggaggcacttccttgcacattaggagattgctgagtctgctgtaaaggttgttgttgcggccttggacatgttgcactaccctgaggttgggtaggtaaatattgttggaggaatctgtcaaatcgcgggtcatacagatcagaagtgtcctgtcccggtggaaagcgttcacgcaatctctgaaacatctcagccataataccaacatcttgagaaatagtagacccagcttgagattgagtttgactttggctcgaagagctagatgatgttgttgatcttttccccttctttgctatgttgtaaccgactcctcgaatatagtcactcctgtcacccatgaccttgcccatgaccttgaattggatgt

SEQ ID NO: 286710 - DNA, 656 bp, Cannabis indica
aactctttataaactaaggttgtggttagactaatagtctaacatatagatatattctatttgtagatgttcgattaagatgaggtcttataagccttataaaaggaatatggactctaaaatagtaaggaactatactttaccgtatactctagtaattaaaaagctacaagttttgtgatcccacactatggttcaattttaagacgagacactttaataattttgaggatgttgagtttgggggagaaataagattattatagatattgttcttgagaaggaattgacgttaaactcaattccaactatcacttttgacaatgtttaggtttctatgactttcattgatcaataagtgaatctagaaccttgataagacaataacaaacaacttcccattcaaaatatggtaaatgtttcagataatcaaactcaacaacctcaaagatcagtgtcattaaagaaatccatgagagaaaggacataaggaaataatggaatgatgaacgatggtccaatcaactttatcatgccatgaaggttccaactctcgaaactggattgatatcataaataaagagtacaaattgatgtgagacaataaaatttttgtaacgccctaatgctaaggcacgctacagtgctttttaaat

SEQ ID NO: 286711 - DNA, 303 bp, Cannabis indica
aggtgatgcgattttcctggcgacgcactgggcataagtacgggcgtcagtgaaatgataagtacaaggcgtagatacgagctcgtctaattagacgatgcgatatattggtgccagattgtggcacgggctcacctgattaggtgatgcaattatatgatatatgggtgcaggcttttggcacaggctcacctgattaggtgatgcagttatgcaacatatggttgctaggatgtggcacgggcttgcctgattaggcgatacaatacaagattatcaggttaatgttggaaatattttacc

SEQ ID NO: 286712 - DNA, 574 bp, Cannabis indica
ctttcaagctttaaaacacacttgggtcaacctccgatcttgtcaaagccattgtccggagaagtcctatccatctatttagccgtttcagaatatgcgattagttcggtactaatacgcgaggaccaaggacgccaatacccagtgtattatgtcagtaagcgattactggatgccgagacgcgttatccccaaatggagaaattggctttcgccttgataatatcctcaagaaaattgcgaccttatttccaggctcacagcattgaagttttgacgaactaccccttaagacaagttctagcgaaaccagaagcatcggggagattgttaaaatgggcgatggagttgagtcagtttgacatcaagtataaaccaagaactgcgatcaaggggcaagccttggcagattttatacttgaattccccagcaccgaggtagcactcatagaggacagaagcgacagtgctatagtgaacagagagacgtggacattgtacgtcgatggagcctcaaatagcgaaggttctggtagtgggatcttgttaatcagtcccaataatttcaaggtac

SEQ ID NO: 286713 - DNA, 698 bp, Cannabis indica
tcagaagtgatcgagagcaatcgcaggaacaacttgccaaaactaaaggttagtttcgagttccattgtattttttgttttctgtgtttgagaaagaatgtttttctgggttttggtattttgaggctctttaggaatgtatgtttgtaagggatatgtatgaggttacgttttttgggtaaaaaactgggtaatcttatgaaaaatgacctgtaaattggaataaccgcatactgtgtaagaaatatttgctgtttcatactttgaatactcgcgggtattcggatgaacagtttgaatactcgcacactgacagaacttatttacttctgattattggctagatcttttaggattttatatgctgtgagttgaattgcgagagtattaatcgcttttccaaatggtgggtgtgtcacagtattctaatggtcatatacgcggttatatgccccttgagatactgtgatacacccagccatttgcgacatgcgttaatattcaaatgagcgtactccttggctgataggtagtctcggaacggtgggagtaactcagtaatttcagggtcatgcttgagaatgcatgccccttgagtaactgagtttctcccaaccgtttctggaggtacatcgcttggcccgggatgcgtgacttattcgcatctctactcgcatatggatggggtggtcagcatt

SEQ ID NO: 286714 - DNA, 460 bp, Cannabis indica
tgatttttttaatatttataattattttttaaaattaatattatgtggaccactaaaaatttaccacgtgtacaagtgtgtatacgtagacagtccaccgtggcacttaacagtgatttttggacagaggtgtgcagagcaaaacgggatgggggtttaggtagtttagctgccgaaaattcattttttgtggttaagtgttacaaaccgtaaaattcaggtgatttagtgcatgtttggcatcataactgaaaaactgttttttgtttttaaaaacagaaaattgtttttaaaaacaatttggcttgtttgaccttattttttaaaaacagttttcagacaaagttacaaaaaacaagaattttgaaaataacaaaatgttgttttctgttttaaaaaccaattcacttttggtcaatactgtttttaaaaattattaaccaaatgtgacttgtgtttt

SEQ ID NO: 286715 - DNA, 618 bp, Cannabis indica
ctggtcctgatgacccaacagcctcgataaaccaatatagactcgcatgtcttggttctatcagctcgttatacgatgtccgtacatgcgaggttacaagaacgcagacatcttagactcaactaagtgttaggtttattctaagtccacgagcttacgaaagaatatgaacagccaactcgcacattagaagtcgcatacgttgccgtatttagtgaatagaaactgttcttcatttattaatgtttacgttttttagcttaattattgtaaatcaatgtacgaacggattgacaatgaatgcaatccttgtgtaaatgatcggacacttgctttgtatataaaggactgatccaccgtgaaatgacacacatacaaaatccttgtaatagtggactaagcagaccatgatctgactggaccactatattcactcgtgttctttgtatttccagtttttgttaagtatttgtgttcccagttcgagtactcgccgttctaggttaaatactcgcacttattcatcatattattactatcattattattagtattatttattttggcgccgtctgtggtaacgagaagtactttcttgctgatttagaaggagaatca

SEQ ID NO: 286716 - DNA, 502 bp, Cannabis indica
aattttagcttttgacaaatccatagtcattctcttctcgggcactatagggcctagaaacaccatctcttttcagcagggctggactttgtgagttttcctcttagtttctcattagatgacactccaacatacttatactactgtccataatataagtcgtaattggattgtagtatcctttgcttatgttgtgccttgaattcctttatgttgcatgagtattttctaatcccaacacttatcagaaacttgtatagtccttgccatgccatgaaattcttcaatatatgttactttggtcctaattgtgtctcacttttctcctgtctctaagtgaggctttcctaacattttctcattgagctatactccacaccattgttgttgtatcagtgagtatttggaatctagagatgtcacccttgaatgctaattcttcctctttcttaagttttgaatttgcgatctactctctgaagttgtttgttgtacacccgcc

SEQ ID NO: 286717 - DNA, 750 bp, Cannabis indica
agcagtttctgatgctctaccaacttgtcctcctaactggttactaagtgtgtaagtatttccccaacttgtcctgtttgccttcaacatgttgatgtcgagacagcttctcatattcttctcaactgccctcttgctttaagttgttggcacaaagctgatttgatccctcatgctgatccgaatggcactattggacactggcttgacagtgtgtttaatagatatgatgatgatgctatttgccgtgtggttatgatttgttgggctctttggaaagcaagaaacaccttagtttgggataaaaaagcttcctcttctactcaaatactcacttcggcttgggttactcttgatcattggcgaaaagctcaagataaaacatgtttattatcatcctctcttttgcatgatggtagtaacattgagcaatggacgacacctgcttctaatacggttaagatcaatgtcgatggtgcaatatttgagaaggaaaatgcctatgggtttggtgtggttgcacgtgattcgaatggccaaattatcgactttattgccaaatattaccatgggacttacacggctgaggttgttgaggctttaggggttaaggaggcccttagttggctaaaaggcaaaaggtggagcacgatcgaggtggaaactgacagcttactcactgttcaagcaatctttagtaaacaacaaatgtcttctgtctttggcttgattactaatgattgtaaaatt

SEQ ID NO: 286718 - DNA, 412 bp, Cannabis indica
cttccttcccaactgatcaaaatcctcacttttcaccagtctttaaggctttatcaaccttctcttccttttttttttctcataaaataaattaaattttatagaattatttaagagattttacaaaaaaaaattaaaaattcggaataatatgcaaatatagaaagttatataagatgtggtaattagaattctcaatatttttatttggcgaaataattagtttttactaaaaaaaaaaaaaaaaaaattaaaatatttttagttgtaaatatttaaaatatatattttttttaataattccgaacgcacttaaatctttttttattattattttataattcctggcaaataattatctaaattacccaaataataaaaaaatttttttctaaataatttaagagtatta

SEQ ID NO: 286719 - DNA, 572 bp, Cannabis indica
ggagaggcagacacaaactttattttatcaccagaggatgaagctgagttatcttcaatggtcaaatcatgcccttgattgtataacagtttgtatccaacggaggttctgtctccatacggcttctgattttggagagcttgattcatggcagcagtgcccgagggaacatgagaaagggattgcttcgctctcacaagttcagaagtcaatttgtatatctcactatctttggaacacaactccaatgtcatcttcttgagcttatcttctagttcacatttactatcatcaagagctttgttcaaaccctgtagttccttcactctcttagccatataaccccattgagaaaacatttcctcataagccttattcttctcatcaactgttgattcagaatcagacaaggtgtcatctccctcaacttcttcaggaacagattccctaaccataaatgccattacagacttatcatccttagattcatcactagcctcttcttcttcactatcactccatgtgacagccaaggccttctttttcttaagagtatttgcacattctgcctg

SEQ ID NO: 286720 - DNA, 611 bp, Cannabis indica
gactaaaagtttcctcatagtccacactttctctttgggtataacccttagcgaccagtctaggtttaaaagttttgacttcacctctaacacctcttttcttcttgtagacccacttacatccaattggacgataatcatcaggcgcgtctacatattcccagactttgttctttttcatggaatccatttttgagtccatgccagctgaccattgtttctgttctggacttgccattgcttgtttataggttaatagatagtcatcaataccatcaccaacaaccatattgatttaaccatccaagccataacgagatggttttgcagaaacccccctcactacaatgaggagctgtgatcttctgaactggaacattagtggtagatttctcagttgtatcaacttgcaaaggttcaagcgagggagtgggattatcctctacttgagtacaagatgatggaacattagaatgagttatatctgaaagcatttcctccaatactactttaatttgcggcttgaagttcttaatatagttatcttcaaggaaagtggcatttgtggaaacgaacactttattatcatccttgtgactataaaatagtcc

SEQ ID NO: 286721 - DNA, 159 bp, Cannabis indica
atttaatattattttcttttaatctatcctattataaaaaaaaaaaaattatatattaatattgttttattttaaaaaaaaaaaaaacaaacagaattttttttattaatattatatttattatattatatagtattacataaaaaaaaaaaaaaaaaa

SEQ ID NO: 286722 - DNA, 669 bp, Cannabis indica
aataacttctttattaaagttttaaaaaaaagtcagataagaattgataaaacataagtaattaaaggaaaaagcagcaatggaaaaacagggaattaaatacattgatagtcaatttgaaaatacaagtacattgtttgtatatagttggaaaatagtttctatatagttgtgcgactgtatataaaaacttgaacaattagaaaaacatacaacttctgctgatacaaacatatagaataaacataatataaagattaatgtcaaatatcctaaaagtttaaaaccagatccagagtataaaaccaaatatgatacctatattcaaccaataacactaactattgtctgataatataatcaaccaataacaccaaattgtcaccaacttaaaagaccctactttttcaatttggaagccttagaagacttgctttgcttctcatcctcgctatcaatgctttcatcaattttcctttggccatatgagaagaaaagggcagcaagacgagtacgataaacttcgatgtcaaaatccgcaggaacatcttttccatgaatgaagaactcggcaaatgcagccacatatgctccgcaatcactataaaacagacaaaggaaaacagtttagcaactaaaaaacaacataaaataaacttaaaagaaaca

SEQ ID NO: 286723 - DNA, 300 bp, Cannabis indica
gtaaaataatttccaacacacgattcgatatgtacactcccattgtagagtattaatcgacaaagatttaagaaagtttggagtttgctatgtaggctccaccctattggaaatattttaccaggatctagatttactaccatttatgtttcattgacatcctaatatgaattctaaaacaatgaaataaacacatataaattttaggacaccttacattcagtgcagcggaatataatgactccttcctttcagatctctagcccttgattcctttttgtagcagaacataatcaagat

SEQ ID NO: 286724 - DNA, 722 bp, Cannabis indica
aatactcccgggggtatgctgaggtggaagcccttaggagggtcttgcgagttgagatgcaaaatactctcaacaacccggaataccagaatccgtgggatctaaatttggaccccctgtcggactggttcggtcgcttcctcgggcccaccttagctccctttgctgcggagatgactggcgagtttgcgtcccagcttacccggtgtgcacctaagcggttcgctgcttgtgcatccttgaactccatcttccaagtccaggacctcagccactctctcactgtggtaagtgttttgtagtttgcttttccccttattgttttcttttctggagattcttacttatacttgcattattttttagcttgctgctgaagccggccgtctctccaagaacataatcaaccatggcttcgtcctgtccgattttggggacatggacgaagtcagaaagattcttcaggatcttgctaatgaggaagaggctaagcggagggaagcgcaggtggaggcaatgatccgggaggaggccctgcggagagataagctggaggccaggcaccaggaggggctgaggacggaaggtgaagctactgcgaaggccaagcgggagcttcaggaggccagggaagccttggaagagatggctgccaaggtgaggtccgtagaggaaactcaccaggcaaacttagaatccagggccaccctggccgcggagct

SEQ ID NO: 286725 - DNA, 554 bp, Cannabis indica
attttggagaagattcatatgtcaagcagtttgctattgcgtttttaatttctgtttcgttactctccgcccttaaaatagagtaagtatgataattattataaatatagtatacaaaaatttaatttttttgtaaaatgtgtagctataatagtatgtgtatttgattttatgagtattaccattccttcagtgcttctgcctcggggagttgaggattgattttgaaggtactcgtgtcgcgtgacgatagagacagccctaaatcaaaatgtatgtgttaattgaatttttgaattttcgcttttaaatatcagtagtttaattaatgcaataacctctcttggtttgaacaattagttttgatcccaatattatgggtctgtcttcgattacttctgctatttgtaagcattcatcgtggactttatgcccccacatcgtcaaacatactggtttgaagctacaactttgtaaagaaataaaaaaatgtattagcataaattttgttaaatagtatttaatatatcgcaataaaaatgaacacaagggtg

SEQ ID NO: 286726 - DNA, 667 bp, Cannabis indica
gttattaggagaaacacttagtcaaaacttgaatgaataatgccattcttttaagttttaagactgtatatgactagcaattttagttattgtatcatcattgctgctacatagttgatcatttttaaatttttgatgtgaaattttatattgtgagctttttatagtttctaatagacttcaatgagtaatagatttatataattatacttggaataaatgttgataatgttgtttggtggattcctattttgttattaggtaacataatattattattcgttaggtctgtcataattattaagtgagaatgaatcaatttaaaaaccttttactatattgaaaggtgagattaattttttattttactatataaaatgtgtatatatataggagagtttatagttatactaaaactcctcaaacttctttataggaatattacatctataacctatataaaagtgagaatagctttttgggctttcactaattgaattacaaaattagcctttactatatattcaagcataaaaaattttaactaagcaattgaaacatgtacactattatatatatttttctaaactaagcttctccctaattaacatttattttttgtaaatatttgtgaaaatgatattttgtcttagtttttttttttttt

SEQ ID NO: 286727 - DNA, 170 bp, Cannabis indica
gtgtgagcttcatcaaggatctctttcttaagctcatcaatactagagacacaaacgcaaaatttatacagtaacattccattattcgagattgagaagtctttaggctgaccagccatcacctcatctcgaaccttgactagctcgagatcttctaattgtgcgtttct

SEQ ID NO: 286728 - DNA, 878 bp, Cannabis indica
attttggtaaggtttaagttgagtttttggttagggtttgtgtgatttcggggctgaagtgtaaattgagtttagaatgtgttattaggcttgaattaagaatttgtttaagcttgaattggttagaaataatggttgattgatttgaattgatttaagtgaaaattattgagtttgatttcacttgggaatacaattttgagtaaatggatgagttgtggtgttttgatgcattggttatgttgtgtttatgatattatattgatctggagcagttggacaggtttggtgaagatttggttcgagtttgggggaaaggaaccctagatttcctggtctgccagaaccggtcgaccggttgctagcgggggaaatttttgggttttttcttcaggatttggttttggcttggggttgtatccagtatctattgtaggttaattatgtgtagtatgacatgttatggggtgttggagattaggtgttgtcgggatttaagaatttggattttcttagagattttcattaaaatatttatcgagagttgttatcgtgacataggacgcgggattgccaagctttgattccttttagaagggatgcacactaaacttctggacagaggtaagaaaagtattaaatactgtataaggttaatgttatgattgttacagtttcgattaagatcgaaatcttgttatacattgttgggacttaattctaatcgaggttaacgatatgtttaggatgtgactcgattatgatcgagggaaatattatgaaacgattattatcgtttgactcgattatgatcgagggaaatattatgaaacaattattatcgtttgactcgattatgatcgagggaaatattatga

SEQ ID NO: 286729 - DNA, 501 bp, Cannabis indica
agagccatggtaatgatttactttcatgaaatatgaattaaaacgatgttatgtgttgatttggatggtttcatgtggtttatgtgcttatttgatgatagtttagaaatcgcaatatatgtcactggaaatattttttatttcgatctggaattattttttctggaaagtagacgaaaaattaataaatttaggcttttacagaacctaatttggattttttatgaattagttatgattttttgaagttgaacgaaaatatcaggttttgagtgtcacacgcgcgcgcacgtacttgggctcgctcggacaaacacgcttcagacaacatgcgtgtccgagcatgctcggtcaaatgaggctgcttgcagcctctgtcctcgcccacgtcttgctttccgcgcgcgcaggggtatgcaatgcatacccctgtgcctcaaacttgttttcttcataacttttgattcaaaaaatcgtttttcattgaaacaaaagccaatt

SEQ ID NO: 286730 - DNA, 842 bp, Cannabis indica
tttgaatacttatgacaatctttatttgctagaaacaattgcatcctataatgaaaccttgcatgtggaatcacgaggtactaaacgcaaattaaataaagaaaattcagcgtcattatggcataaacgcttaggtcatatctcaagaggtagaattgagcgtcttgtgtctgatgacattttagagtctcttgacttcacagatttcaatgtctgtgtagattgtatcaagggaaaacagaccaaaactaagagattaggtgccaatagagcttcagaagtcttagaattgattcacacagatatttgtgggccattccctacggcatcttggaatggtcaacattattttatatcattcatagacgattactcacgttatgggtacctatatctcattcatgaaaaatctcagtctgtggacgtgttcaaagcttacaaagctgaagttgagaatcaactcaacaaaaggattaagaacgtcaaatctgatcgtggtggtgagtactacggtagatatgatggctcaggtgaacaacgtccaggaccatttgctaaattcctagaggaatgtggtattgtcccacagtacaccatgccaggatcacctagcatgaatggtgttgctgagagacgaaataggactcttaaggatatggtaaggagcatgatcactcattctaccttacctgagtccctctggggagaagcattaaagacagcagcttacattctgaatagagtaccaagtaaagcagttgcaaaaacaccttatgagctttggacaggtcgaaagcctagtctaaagcatttccacatttggggatgtccagctaaggcaa

SEQ ID NO: 286731 - DNA, 609 bp, Cannabis indica
tatggttttagttcgaaggaccttttccttcctatccagaatttgcactggttgttcatcataagatagatcaggttgcaactccaacatttcataactcaaaacgtgcattggatcagatacatacttcctcagcatggaaacatgaaatacattatgcactgctgacaaggaaggaggtaaggctaaccgataagcaacttgcccaaccttctccagaatttcaaaaggtccaataaacctagggctcaacttgcctttctttccaaagcgtctaatccctttcatcggagacactcgcaagaaaacatggtccccaggttggaatgtaacatcccgtcgcttgggatctgcataactcttctgcctgctttgagaagcaagcattcgcgccttaatcttatctattgcctcatttgttttctgaaccaactcagggcctaagtatttccgctctcctgtttcgtcccaatgaattggagaacgacattttctgccatagagcagctcatagggagccattcctatggtactttgatagctattattataggagaattcaatcagaggcaaatacttactccatgaccctccaaaatccatgacaca

SEQ ID NO: 286732 - DNA, 634 bp, Cannabis indica
tctcattttatgagcttccaccattgtttcatattctgtaagtttatttctaagtagtcaccataggggagagtctaacagaaacgaaaacttacaaaatacttgtcatatgagatcttacggtgttaatgcttacaacgaataaccatccataacggggacgaagtctagcgtctcgaggttatattgaaaatatttaaccattgtaagaccaacaatggagattaaatacctctttgattaaagctcattatttaaaataatgtatttttaattaatcatttattttaatctatatattttaatagtaaaaatgacctaatttaagttgatccaaaattaattaaaaattaattttcaaacaataatttcaaaaatctatttataaataattataaaatttcaaaattatataaaatataataaaataaatttctgaaaaatatctaatttaagttgttccaaaataacaaaattttcaacttaaataattttccaaaatttaattaaatatcaaattaagtattttgaactaatcaccttaattggaaaaatatccatatttaaattgatccaaaattaacaaattttcaacttaaaaaaatattttaaagaatatctgaataattaattt

SEQ ID NO: 286733 - DNA, 1134 bp, Cannabis indica
agtcccagatctagacaccgactactggtctgttccaggccccgtcacccgagtcccgagtcatgatctggatcactgtcgtgggtctcggtctggttctggtttaggtcccaggtcccatttctgagttcgcgtttgggatcgagattggggtgcggttctaggtcccgaccctggttctttatccctagtctcgttccatgtttggttctgagttcaggttcgggttaaggtcgtcagtccaggttttggttgggatccgggttcggctccaaattcgggtctaggtttgatttggagtacgggtcctggtcctgttacgattctagatctaggtcaaatttcagttatgattccaagtccaagtcttagttccagtcccagtcaacttccggttttggttcaaattttgggtcacaaggtacgggttcgggtctctttttgtttttggactaagttcaggtccgggtgtgggttcgggttcttgtcagggttcgagtccagggctgggtcgcaaatccagacactgactatgggttttgtccaagccttgggtcaagatccggatcccaatctcgggtcccagtctggttccatttctggtgacgggtcacgagctgggtcctacgttaaagtttgggtctgggtcgggtactaggtccctgtcctagttctatttcctagttccctatcttgattcttggtccaggttcagttattgtgtgggtttgggttgaggtctaggttcgggttcgagtcctagtctcggttcgggtttaggtctctgtctgggttttgatcttggttcgggtttgggtttaggtcctggtcctggtcctagtcctagttcggttctagttccatttgcgattctgagttcgagtttgggtttgagttcgggtcggagttcgagtcctggtctgagtttgggttcgggtccggatttaagtctaggtccagatcaggctccgggtgtgggttcgcgtcatgggtcttgtcctaggttgggtgcgagtcccaagttcccatcccgatcttagtctggattctgttcttggtctaagtccttggttctgatcctagtctaggtttgagtcttgatcggggttcgagtctagctttgggtctaattct

SEQ ID NO: 286734 - DNA, 574 bp, Cannabis indica
aaaagagagaaaaaaaaaagaaaaaaaaagaaaaaagagagagagagagtgagttttatttagggttttaatttaacatttttattttgatggcaaaaatcaagaggaagaagaagaggaatttagaagaaaaactcagagtcttgtgacaactctaaaatgagtttttatttctatctcaattttcttttaaactttgtaatttttgcacaatctattatgagttaatttttattttgctagaattatttttgttgacttgaattgtgatttggtattttgttgctatgtttagtgaattgattttgttcattcaagagtgcttattgtgtaatagcttacatttgcttgatcaccattagtaagttgcaagctaatcttgattttaaaaaaatagggttagtggaattgcttgaatgatgcatgaatatcacattggaaaagtgtgatttgtaaatggcataggaatatgttatttaccttgtatgacttgaaggaattgtacttaaattggtattcttaaaattaattgggcataggaatatgttaattaattagagaatcaaatcataaa

SEQ ID NO: 286735 - DNA, 496 bp, Cannabis indica
gtttacgtgtaggtaagggcaagaccaaagctgaggaaccgtgaggacgagtagatgaagattgtacatgtcggggcggttaggcctggagcgtacgatcctcaggacaacagtacttttgtagttagtcgctaggcgacgaatataatgtattgaatagtaaactttcgtaaagtattttgcaaacgggatcccaaaatattttgtatgtgatattataagttgtaattaatcacgattttcattaacctcgttgattagcaacgagctgcacagtacgtttaaaattacgtcaacacgcctatgctagttagggtgttacaggtcccttccaatgcatactccatgcatccaacccaagcttacttcaaccaatgccttagaaaggacatagcacttattcaaggtgtaagtaaactacattgtagattatcctattagttaaatcttgtgtacttataaatcatacaaatacatttaatcacataatcttgat

SEQ ID NO: 286736 - DNA, 776 bp, Cannabis indica
atgaatttctgaaagtaagaatgagaaacaaagaacaagaacacaaagaaataggaatcgggtagctaggttatgaaaataaaagacaaaggaagttggtttatataatcatgtgagagaggatcaaaagaggaaaccaacttaaaaagagaaactaccagcccaagaacacaaaaggaaaccgccccactatcttgcaaaaaaaaaaaaatttctacctttacctttttttttttaaaaaaaaaaaataaagggaaactagaaataccaacattatttccaaaaatatcctatttaagacaatctttcaagattaaaacacattaccatataagagatcaatctttaaatggaaacatatcaaaataaatcaagaaagaataaatattgatacttaccaattaagcacaaatttcctttagcccatgaatcaagtcaccaacacctccctctctttatttttttttattttttaattttaaagaaccgaaaataaaataaaagatgtacaataaatataagaaattctaaaccaagcaatttaatcaaaaatcattacaaatgacaaaaatacatgttatgctttcgaaagagtataaatagttagtatctcaagaacaaatcatacttaattgatgttgaggaaaaagatatgcatgttactaacaattgtgaaccaggatttttaatttattttagtagaggagacttacagaattgaacacacttgtcagacataagtgtgtgcagtgaaaataggatcattgtccttggca

SEQ ID NO: 286737 - DNA, 699 bp, Cannabis indica
ttgtgaaaaattaggttaagttttatacttttatgtcttaattttgtagtcattttgtaagttgcaattccaaaccttgtttttcttttcataatctttctttccattttagggcaaattgaacacaattgtcataattaagttataaaaaatgtaagcataagtactcttgtgatttttgtaattagttaaattatatgtaatataaaaaagtggatttttataagaacgtattttattttaaaataaaattaaaaaagataaagaatatgtatgtttaattaagatcaaaaagattacaaataatatttttaaactaattaatccgattgcaaatctatcaaataaattgtatttaaattttttgactagattcccttaaaaaatgtgactagaaatagctaattattaggagttgattttttttttttattaatttattaattactgtgtattcaaaaaaaaaaatctatatatttgattttttattaaaaaaaaaaataaaacgtataaagaatctgatgtatattttgaattattctttaaattaataatatatagatataatctaaaatatccactaaaaaaaatctaaaataatgtaactaatcctaatcctaactataataaagaatttgaaaaataatatatatattgatcatcactaccgactgaattattatatgccataaactttct

SEQ ID NO: 286738 - DNA, 491 bp, Cannabis indica
gcctagcaccttcttcaaatgtcacgttatgtcacgttgtgattggttagcgatactctctaaaagctattatattaaattatatgcgacctgatacttaattggaccaatagcgatattgacacgtaggtgctaagcaccagtagtaccgtttaacatttctcacaataataataataataataataataataataataataatagtaataataataataataaaagggcttctattgattcaagcacatattccatcattaatggggggaaaacaataccaataaatatgcatatacttgttttctaggtggattatgccatatgcatccccaaactttatcatagtgaattgccttttcactccatgccatattcatatatattttgtttgatttttgatacagttcattatttgatgctagaaaacaattactaatagatcttccttaacataattagatatagctcccctaatatatactttcttg

SEQ ID NO: 286739 - DNA, 525 bp, Cannabis indica
ttgagtaacttcccatatctcattgtgtttcgcggcctcggcgtatcgatttcgctccttgcgagtgttccctccgatatggggacctccggagatcatggccacccgcccgttaggccagggcggtagcccgggaatatgctgggcgtcacctgcgggagcagctggagccaatactcctgctgtaccccctggtgttcccggaggcatacccccagccacctgtcccggattaaggtggggcaacctatttttgatccactcatagaggtggcccaaacggattagattttcaatctcgtccttgagattcttacactcattggtgctatgaccaatgtcgttgtggtactcgcatcttttgctcggatctctccgggagctgtctttgtacaacggctgtggtctccggtagtgcgtattttgcctagtggcgaagtacacacgttcctgagagtccgatagctccgtgtactgagtatattggggtgtgtaccccttcttctggcacttctctcccgttcg

SEQ ID NO: 286740 - DNA, 689 bp, Cannabis indica
ttctgctccttaagggctgcttctgcggcagctagtttctcttgtaaatttgaagactgacgattggagaccatgaattgagtcacaccctaaaaaaaataagagaatgaaagggtgtcagcacaataaaaggatatgagatcatataaatatgagcgtgcacataagaagataggctattatcaatacagtttgataaataatccatcacgtacccgaaggatgtcttggactcctttagtgacagtatcaccttcgtagttggacatgtcacgcaccacctcaacggttgcagtttttcgaacaaggaggtcaatgttgtcatgcacagactctagcatctgaattgtggcatcatcgggacgaattatgggaaccacgatggaaggtctcctcatgcggccaccaatatttgggacagaaggagagacttgagcattctcctcgccttctaccgcggcaggacaaggcttcctcagttgggagcaggctcgagggactagaggaaggtctggagcactttcctctcctccagactcattaacatcctcactctcaccataactcgcaattagttggtggaacatatctgaatctgtaaaaaaaatcattaatatcacaatacacacaacatcataatgttatcatatgggtatgtcaaaaaaaaaaaaaaaaaacaaacgtaaaat

SEQ ID NO: 286741 - DNA, 598 bp, Cannabis indica
atccttgttgcattatctttaatctattcttcttcaagcttaagttctttattaattagttttcaaaaatatcggtaaaagttactatataactacaatatattctaccgtataaaaaaacaattgattacaatcaatcaatatatcaatcaatatatatatataaaggaaagcacaaagggagtttaggtggcaacctattattttttcttcttattttttctattttatcacacattctcttattttatttgagaaatacactatacatataaactaaaagtcccacatcatttaaaaatcgtttagaagttatccatgtaggttataagtagtagttttatcactttactttcttttatctaaaaaatattatttttttatgagtaattgaataatttcttactcaatattttttttatatacatatttatttatataagtaattatttattttttaataattaactttgtagtaataatttttaattttatatatatttatgaaataaattttagtttaaaaattttattttactattctaaatttttatatgttcgagttaaaaataattttttataactaaaattaatttac

SEQ ID NO: 286742 - DNA, 607 bp, Cannabis indica
ctctctccacggctgacggttgcactcgattattttgatttcccatattcgctttcaaggcgggaagccgaggcatctaaggttcctttacgtacagttacccttttgcctataaatacttggagtactggcacattacctcatttcatcacccttcgttgttaagcaatcttcagagtgaaaagagagaactttcgcgcttcaaagttgtcgaagtgcatacagacgatttctggcttgcttgaacacggacatacgaatctttgagtaagtttctggttccctttatgcttttcatttgcatgcttacgctttgaatgtaacttcgttgtagaaaaaacacttcaggaaaccctagggtctgaaacttctacgactcttattttccatgtccttatgttagctttcagccgtaaggcttattctagaactgcattgcgtctgttttccattttacttattccaagcttcataaacttttttgccctaactcaagaaactttctgacttcttgagtttagacttttctttgaacatgatcgtcctttaatctgttggttactcctggtcagcatatttgcttattttttgtttgatactctgtcca

SEQ ID NO: 286743 - DNA, 528 bp, Cannabis indica
ttatatgtgtttaatttcattatttagaattcatattagggtgttaatcaaacatacttggtagtaaatctagatcctggtaaaatatttccaacacccatatatcgcataactgcatcacctaatcaggtgagactatgccaaaaacctgcacccatatatcatattattggatcacataatcaggtgagcttgtgccataaccaaacaccaatatatcgcattgtttaatcagacgagcccgtacctacgctcggtacttatcatatgtcactgacgcccgtatctacacgtcgccaggaggaaaccctacaacagattcattctatgccataacctggcaattttgatatcacttatgccgtatctacacgtcaccagtaggaaaccttacaatggtttcattctatgccataacctggcaattttcatatcactgatgacgtatctacacgtcactaggaggatcgcatcacctaatcaggtgagcctgtacctacgctccgtactcatatgtcactaatgccc

SEQ ID NO: 286744 - DNA, 654 bp, Cannabis indica
ctctctccccataggtccgttttcagtgatctaggtaccgttttaaagataatttaatgatctatattttttatgaagaaactctttcctaattctgattatttcgatgtcaaaaaattcatgttttacactgactgtcgatttacagtttttttaaaatttctttccgatattgccttagtaaaagtgtgatatctctctcgatatctattattttacagcgattcttatactgttagaaagataattcaataatccatattttctttgaagaaacctttctctagttcggagttcttaccagtcaaaagttaggatctttactcggttatggtatttggttttaagttttgttatcagaaaagtatcttcagtaaaaattcaatatctctctctctcttttgtatccattttaaaagtaatctttatctcgttttaaagtcttagcaaataagctacattttttatttgaagaaagtaattgtctagatcgggtggtaactatttttaaaacttttaatttttgggttcgtgtattctagaaatacggcgatgatccaggagttttaaagtaaaactagttttgtagaaaacaatgcataactacctaggttattagcgtccgacttttgtatgtatctttattaccgttag

SEQ ID NO: 286745 - DNA, 303 bp, Cannabis indica
aactttcccttcttcccgttcccttgcttgtggttgttgcctgaacgtttgccacttgaattgctagaatattagggaagctgggtagacgttccattagaaggagccttcattttgttcggctttggctcaccttctgctcgctgaatggcttattcgaacttgatgaaaccttcggcccggtcaaggaaatcactcatcgagtcgaccggtccgtttttccttacgcccttccatagttcgccaaggacttcaatgccccccagtatcgcggataaatttccatcctcggttacccgttat

SEQ ID NO: 286746 - DNA, 557 bp, Cannabis indica
tcagttgttaattctcattgcttttggtaaaatttacacctttaatacttctttgttacttttgttgtgctattttgagtgaaggtggctttataatgagcagatgaaattttaatacttctttgttactttataatcgagactttgagaattgagggttccttctttgtctaatttacacacgctttgcttattcttaattttgtaatatttgtttttccaggtcaaagatgttcttgctgctattattttaagaactggaacaaatgcaacatattataaccttattattattgtttccaatatgtttttactagacataaaagtttaatttaaatttattattcaaatctctctaaattaaatattatttattttttatttatttatttccttacgaagtcataatataatatttaatataaaacatagcatacgtgcatcgcacgtaacaatataccagtatatatataattatatgcacatatactttttatttgatagaatatttttaataaatttctcttttatatttcaaaatacaagcacatatatac

SEQ ID NO: 286747 - DNA, 470 bp, Cannabis indica
ttcaagttcgggtctgggtcaggtactaggtcccggtcctagttctgtttcccacgtccctatcctgattctgtgtccaagtcccagttattgtgtgggtttggctcccgttctaggttcgagtttgagtcctagtcgcgaatcgggtttaggtctctgtctggattttgatgtgggttcgggtttgggtttaggtcatgaacctggtcctagtcatagtttggttctagttcaatttgtgattctgagtttgagctttggtttgagtttgggtcggagttcgagttctagtctgagtttgggttcggacctggatttcagtctaggtccagatcaggttccgagtgtgggtttgcctccttggtcttggtctaggtatggtccgagtcctaagttcctatccttattttagtctggattcagttctgggtctaagtccttggttcttatccatgtttgggttcgcgttt

SEQ ID NO: 286748 - DNA, 495 bp, Cannabis indica
ctggattctaagtttgcctggtgagtttcctctaaggacatcaccttggcagccatctcctccaaggcttccctagcctcccgaagctctcgcctggccttcacagtggcttcaccttccgtccttaactcctcctggtgcctggcctccagcctatctctccgcagggcctcctcccggatcattgcctccgcttgcgcttccctccgcttggcctcttcctcattagctttggcagcggcctcccggcgctcagcaacctcctgataaagccgcctctcaacagtaagatcctgaagaatcttcctgatttcatccatgtccccaaaatcgaacaggacgaaaccgtggttgattatgttcttggagagacgaccggcttcagcagcaagctaaaaaataataatacaagtataagtaagaatctccgaaaaagaaagcaataaggaaaaaagtgaactacaaaacacttaccacagtgagggagtggctaag

SEQ ID NO: 286749 - DNA, 727 bp, Cannabis indica
attattggacttgatttaatatgtgttgaataccattaaacatattctaatttttatgatttgtaaatttttcaaaaaattgaaaacttaatttacatatgtttctggactgctttgagacacagagtgcccaattatatttttgtgcaaatatttatgcaggttatgattttggatttattcaaaatataaccattatgctgctagattttgtagaaaataaaaaggatatatgttcttttgttattcttattattttcctacttttgattatactgatgagagccatattgatcaagatttatgcatattgttgtttcacaacctagcgtctctgtcatcataggtagataaggtgtgcactcacctgtaggtgaaagacctagaatctatacaagaagtgaattgattctgagtcccaacaatatggtgggtatcaggtgcgactaggggtaagcataaaatctagaaaaccgaaaaaatccttcaaaccaacctaccgaacactgttggaaccgaaaccagtggaatcgaaaatccaaaaaaccaccaatggtcggtcggttttttttttggatagtaaaccgacctattaaaccgaaactgaccaaaatacccattggttcttttattgctattcaattttggctcttttttctcatatttcattactattacatcaagaacatcattatagaaaaaggacattacaatccaatttcttgtc

SEQ ID NO: 286750 - DNA, 505 bp, Cannabis indica
ggaagagattgaaccccctaagttatgggtagtacaatgaggctgggaaaccagttgatgctgagagggacgtcctagttgagggcgttgattacgtcagtgaggagcttgctgaggcggttcctcacaggacggcagggtgccttgggcgccaggtgggtaagtcctccgtacaagatttcggaggcacgcctccgcactctcgatcaggacggatacctgggcgaactggactgctacattcccacccacgacaatcgtgccacaaaccctggtaaggggatgtgtgcctggtcgggggctcacggccagcaaggggcgctgatgcccttgcataagtactttcggtatgtggcggacttcttcggcctctgcctggcccagattactcccaagggaattaagtatttgttcgttctcttcgtcctctacgcttcccatggatgggatgctccttctccccacgaggtcgcttggttcttcgacctgaagtctacccccaagc

SEQ ID NO: 286751 - DNA, 713 bp, Cannabis indica
tttgtttagttgggcggttcattctttcagccaccccgttttgctgaggtgtaatcctcactgttctatgtcgctgcaagccattttctttacaatagaggtcaaattcattgttacaaaattccaaaccattatcagttcttaaagttttcagcttttcattagttaagttctcaaccaataatttccaatgtttgaattttgtaaaagcatcatttttattcttaagtagatatatccatactttcctagaataatcatctactatagataaaaaataagaacaaccaccatgagtgctgattttttctggaccccataaatcagaatgtacatactcaagtattcttttagagttgtgagtacctgctgtgaactttaatctgtgatgctttccaagtatgcaatgttcacaaaagtctagtttactcactttatccttacccaacagttgttgctcactcatgagttgcaagcctcgctcacttatatgccctaatcttctgtgccatagagtagctatctcttcttctttgtcgttgtgagttgtaatgttacagcttgaaataggagagccttgtaggtagtaaagtccaccatttttgattcctttcatgattgttaatgctcctctactaagcttcatatgacctgcctctaccttactcacaacacccaaatcatcaagcacactaatagaaattaaatttcta

SEQ ID NO: 286752 - DNA, 816 bp, Cannabis indica
aataaataatctttttccctcaaaaatatttgtccaatttttctgtggaatctgccactatttatatgaatataggttggcagttatttacaatggggatcagtttaaaatgtaaccgttcatgaaacgtgaacaattccttcgtttcatttaattgcatgtgggatagtactggataactgcttaactgctttttgttctcatccttatcgatggttaatgttgatttggacaattgtatttgtatcttacttaactttcgagtcattatccttatctatcttgatgtctaaagatcgctaagtgttaacagatgattcgcctcgtcaaacctctttaattagaatcgcgaggtggcttatctcgctattcgtaacccgaggttgtttagtataattgtattcattttactttgagtaaataaattattttctttgtctgtgtactccaagacaggtgcatgtctcgtcaatataagtttcaatagtcttttattctttcctcgctaaagactactgtggtcagcgagttatgaatatcttctattaaacctttgttaacgagttattttatcttgtatttaatgatataaaatttattataccaggtggttcatattctactgcaagacatgtgtcacttttttgaagtatagccgaattttgggtataacaatttctcctcaaaatgttcttttttaaatataaagagctttttaaatgattgtaagggtatttctgtcttaatcccaattaaaaaaaataacatgctttgagtttttggcggttcatgattttcgaggcacatcattagcat

SEQ ID NO: 286753 - DNA, 496 bp, Cannabis indica
ccctaatgggagaaatacaacaaaccactctaaggaggaaagacagtacggcaggtgtgctcggaccaaactaggaaggaccatatcaagtggtcaaagttctagactcaggggcataaaaattgggtaagtatgatgaaagatgcaactcgttctggtaccaaggtattggaacggggaacatttaagaaaatgctactagtaaaagtaccatgtcggatgaccatatcaagtacgaaataaaagaacattttctcttaagtgaatggccttctaggcggaccacgcccaaaggttcggataaaattatcaagtactcaggtaagatgaccacctttgaaagtacaatttttattttctgcaatttgttttgtttatgctaagctaaagatcagatcagatcaacataatagctttgatgtaagttactacggtaacagacatatttccgaccaataaatgagtaaagatgttatttaaattcaaattgagtcga

SEQ ID NO: 286754 - DNA, 540 bp, Cannabis indica
tattcgatctctattgttggtccaacatgaagttaatatgttttcaatataacctcgagacgctagacttcgtccccctaatggatggttattcgttgaagcatttaacactgtaactatctcttatgatatgtattttgtaagtttttgtctctattagactctctcctacggtgactacttagagataaatttgcgaagtatgaaacaatgatagaagctcatacaataagaatagccttgactctcgtcgaggttgctagaatgtttttcattttagatgagctgacaactctattcaataaatgatactttgactctcgtctaccgggacactgtatcaatttgttggaaaccttggaaattatttaggatgtgcttgttttgtattttcacatgtctttgttatttgatagatgcataataatttcgaaattgtgttgtgaatttatattgaacaatgttattttcttttattaattgtagtttaaattttgaatcttcactgttggtctaacttggcttgttgtttttaatggg

SEQ ID NO: 286755 - DNA, 782 bp, Cannabis indica
attttaaaatgtacaaatgaaaaaagaaatgctaaaagttacctatgatgtctgacatctttttgaagtataatattattattactgcaatttaatatcgagtttcacttattttacttttataaaaaagctaattaggatttttatcctctgaactttgacatgtaccaaatcatgtcccttgaacttttaaggtcgttataatgttccctgaactattgagattgttggatttaaggattttgttccaattttagtaaaaaagtttaacatggatgaaaatttaggggccataatttagtacatgtcaaagttcgaggagtataatttggtagtatggggagcatggtttagtacataaataatcactgaaatagtaaaattgaatgaaattagacaaaagtccttaaatctaataatttcaatagttcaaggggcatgatttagtacatgtcaaagttcaaggagcaaaaatcatccttataaatattagggtaaattgcggtataaatacctaatgtttacttttgaaggcaaaaatacctaatgttacaattctcttacaccgttaccaccacttccgttaactcataaatatggacacgtggataattcagatgcattacattttttttattttaaaacttaatattcttaatattagaaacaaaatgctacttgctttttttttttaaaaaaaaacagttatcataacaattttcacatgatatcggtacttcaattcgataatcatgttccatatactgcactggttcacttag

SEQ ID NO: 286756 - DNA, 684 bp, Cannabis indica
caagttagtaaagtcactatatgggttaaaacagtcacctagacaatggaacaaaaggtttgatggatttatgctaaaactaggattttctagaagttactatgaccattgtttgtattacaaaggaactgatattaataaaactacttctgtatgtagatgatatgcttataatcagtaaggaaagagcaagagtaaacacaatgaagggcctactcaagactgagtttgaaatgaaagatctaggggaagctactaagattctaggaatttctattaagagaaacagagtagaagggacacttagcctaaatcaggaagactacatccataagataattgagaaattctcaatgaagggatctaaaattgctagccaacctataactacacagtttacattatctaagaagcaatgccctgagagcaaagcagagaaggaggaaatgagtaaaattccctatgctaatgctattggatctgttatgtacttaatggtaagcactagaccagacctagcttatgctattagtgtacttagcagattcatgacaaatcctggtaagacacactggcttgctatgaaatggttactaaggtacttaattgggacaactaaactaggactcaaatacaagaaacaacaaggaaaaacagcaatagaatgcttcagtgatgcagact

SEQ ID NO: 286757 - DNA, 865 bp, Cannabis indica
gagagagagagcttcgatcgacaatggtgtgttgggtttgtatttcctttctcatttgcattctctttgtttcatcgttgaatggatacatctcttatgacggagtttctcaggaagtccggcggtgccgccgttatcgacggcggactcgccacagagctcgaacgccatggcgcggacctcaacgatcctctatggagcgccaaatgccttctcacttcccctcaccttattcgtggggtactctttctacctttttattttcctttactttgcttgactctgtgtttgggtgtctgatttttctttctttctttcttcatgtatgaagaatggaggtacttattaacagagttatgtttattcatgaatttggacccgaaaattaagaaataatgaattttgtataactgggttattgttgaattttttcctattaggaaatcatctattgggattgtgaatgtaccaaaagtgattttaatcgtttcacatgacatttattagggagattctttgtcttctggcttgttagtaaatgaacttatgaacaatggctaaagattctgcagtgaacttattaattcagtttaaaattatatatggaccactgtggtggttttttcttttgtcttggcttttcgcagcctttaaaacttgccattagcagccttgaattttttttctttttaattgaagtttcattagagaaaaccagcagtcaatcattacattgtgattcttacccagcttcattttctctgctccattctatttctaatgttagttttcacgttttagattttcaaatttttcttaattagtatatatgtttccagtctagctcttcaaatctctaccatat

SEQ ID NO: 286758 - DNA, 607 bp, Cannabis indica
ttttttcaactattctggtttaaattgaataggtgtctgttaaagataacttatttgtggtatattctgttaaatttttggtatattctgttaagtgcacaacaaaaacggttaaataggcattttatatattaggtaagatatatatatactagtatattgttacgtgcgatgcacgtatgctatgttttatattaagtattatattatgagtcggaaggaaataaatgaatcaaaaataaataatattttatttacagagatttgaataataaatttaaatttaacttttatgtccagtataatggagtttaaattaaactacaaatgttagtaaaaacatattggaaacaatttgcatttgttccagttcaaatattacaaaattaagaataactaacacttgaaggaacattctcactaccaagaagaaatcttagatatggagtcaaaaatagagcaaaatcaaaattaatgtgtacaagtattcctaagaagctaccactgtcagcctaccagaagtcatgaattttaacaatgctaactgaaatctcatctgctcattataaagccaccgtcactcaaaatagcacaacaaaagtaacaa

SEQ ID NO: 286759 - DNA, 517 bp, Cannabis indica
agcttgtttatttgagttgatttgaactgttgtgaagcatgatagttaggttgagtaaagttatgatttttctatgttaaaactatggttttcaaagagaattggttagattctgttgctgtgatgttgttgatatttttagttgttttcagaagcttaatcatgcatatttaagtagatttaatcaggtttgaatgcatgttagagggatttgctcaagtttgagtttagaactcaaagcttgagctttaatggcaattttcgtatctgtgatttctgggttgttttagtgctttgaaaatgttctttggggtatttagaacaggtctggaaggtttggtatgaattgggtttgatttgattgagttaggaatttttgaaaaattcctgcgaggaaccggaattccggttgtgcaaccggaattccaaccggaattccggatgagggtccagtaattcccagaaccggaattccggttgcagaaccggtctaccggttggggaattttcagaaccc

SEQ ID NO: 286760 - DNA, 602 bp, Cannabis indica
ctttctcaccagagatcaatctcctcccactatcccacacgttcaaatgccgacctggaagatgtacactgggagagaagatcctctttcccatctcaagtatttcaaaatgcagatggatttgcaagaaatatggggagatgtatgctgcagaatcttccccgccactctgtcagaagccgctccgcaattgtatttcaagttggctcctgaaaagtttagttcatggaaaaccttctcttcggaattccatgcacaattctcctcctcacgccaacttccattgcatttgggagacttggtcaaagttaagcaacgaccaggcgagccactccgggcatacatcagtagattcatgacggaagcgacaaaagtttcacgggtaaccgaagatggaaagttatctgcaatattgggggcatcgaagtccgcggtgaactttggaaggacataaggaagaacaggccggtagactcaatgagtgatttccttgaccgagctaaaggctccatcaagcttgaagaagccattcaatgagcagaaggtgaacaaaagccgagcaagtcaaaggctccttccactggaacatccgcccaccttcc

SEQ ID NO: 286761 - DNA, 538 bp, Cannabis indica
gttttagggctatattacgcttgattctttggtttcaggtcctcgggcatttaaagaaagtatgttcaagaattgaggaaaagttgtgaaagaatcgagaagaaaatccaagattggtgtcgctgcctgttccagtcgcgacggggaatttgccagtcgcgacgggaactggcagagagattttcaaggagtcaaagtttactcccgtcgcgacggggaacatgccagtcgcgacgggaactggcagagaggatcttgaagtttcaaagtttaatcccgtcgcgacgggagctttgccagtcgcgacggggaccccagtgacgggatttttgggcagtttcgtaatttcacgaatttttaagttgagacttggtttaaatagtgagagttcgtgaaaattagggattattcagaattggaaccctagaaacaaaggaggaggctagaagagcggcttgtggcgacccggatcaattgcttcaactagttctttctcttctctttaatttttctatgctattttctgtttcaatgttaa

SEQ ID NO: 286762 - DNA, 984 bp, Cannabis indica
gatcttgtggcacagttttgagagccgacacaagcaggagcttagaggagcaagtatgcagtggatcagtggggccttttgtatgaagccgtgggtatgcggttgggccagagggccaatgttttgaacttcgcgaagagaatctgtgcaagagtgcacttggtgctgcattgggtgcagttggcttgcgagcctcgtccaggtgggacgcaccaaactttatcctgcgatgagagtgtcttgctcgattgccattaggaggatggtgcaccatggagttggtgtatgaagtttccagagggacttgtccagagggacttggcttcagtggaagcgtgtttgtaggtgtcgttggggtgcaccatacttaccccgaggggtgcaccatacctagtccttgtcaaaaaggagtatgcattggacgattggcgagtgagctactatcaaaggatgtgttagcttcagggtcagtgttacattggctactttgttgactggagggacgttgtgttggacttggaggagttcatgttggggggaagtattctagtgcggaggcactactccttgggtgattctgaataacgacagtggcacagggtctttgatcaagtccaagagtgggcaagcgagatcgtcaccaagagggtggttctacggaagtagagggacaagtgcagacttaggattcaggagaagcttggggtaagcttaggagtcgagattaggaagatttgcctgcggcccgtcgatgagggcatcgacatgttgaagtgggggagaatgttacgtgcaggctaagatggcacgttacaagctaagtgatgcccacaagttggccaagtggtggcgcatgttgtggtgcatgcaggtggcatgctgatgcttagtttgtatgcagtggcattttcgtaaatatcttcaatattgtccggatcgggacgggacttggtattcgccatttatttgggtctacaaatagaa

SEQ ID NO: 286763 - DNA, 605 bp, Cannabis indica
aaagagttttatttagggcataaaacccaacacgcggctccaccaatgagcggcatacagttctctgctactcccggatacagtcagggccaggccttggcccccgcatcatcccattttggaaatccctcagggataaatggacaagctccctcgcactccgctccaaccgccagcctggcaggcccttcccagggctcgaggagtaaacgatcctccaaaggcagcacccggacggaggaaaaacgccaaaagagggggtacactccacagtacacccagtacacggagctgacggactcccaagagcgtgtgtactttgctactaggcaaaatacgcactaccggagaccacctcccttgtacaaggatagctcccggagggaccccaacaaaagatgcgagtaccacaacgacattgggcacaacaccaatgaatgcaaaaatctcaaggatgagatcaaaaacctgatccgattggggcacctctatgagtggatcaagaatcggctgcctcaccttaatccgagtcaggcgacaggggttgtaccgcagggagcaccaaggggtgcagcaggagtattggctccagttgctcccgctgg

SEQ ID NO: 286764 - DNA, 640 bp, Cannabis indica
acgtgcgaggcacgtatagtataaatttattagtttttctatgttatttgaaagtgatacgattaaaaattaaagaaaaaatattattagttattaggtgagattattattatgtgtatctaaatattatagtttataatgttgtcaattaaaagtgaatatcgaatgcattatattagtatttaagaaggcttaatgatttaaatatgttcttaagttaatccaaaaataaactaaaaattgatgttccaataattaaagaaatattacttaaatgggggtaagataaaaagaaaattaaaaatcaatctctaaattgttgataattgaagatagcattagtcttaaaattgtagataagaaaactaatgatagtcatcaatctctgttatatatattggaatgaaaaaagacagagaagagatgataaataggttttgggttgatgacatatattattattctcagctagctatgatataaattagaataagaatgtccaaattataataggaaaaggaatacatagatatttaatttttaaattctttatggcgaactaaataataaataaaaaaaagataaaaaataaaacaaaagctaaataacaaaaaaaataataaataaaaaaaagataaaa

SEQ ID NO: 286765 - DNA, 902 bp, Cannabis indica
caagccttgggaggcatccgagcagattctagaccaaccctacaagttatatacgtgtgtaagggtgcaagatgggggctcgcttgcgagcatggatgagtgtgtgtgtgtgtgtgtgtgtgtgtgtgctcgtccggtgtagggtgcaagataagaggcacgcatgtgagtgtgcgtgtgtgtgtacggatgtagggtgcgagacgcggacgggggctcgcatgcgagcgtgcatgtgtgtgtgagtgggggctcgcatgtgagtcgtgtgtgtcaagtgcaagtgtgtgcaagtgcatgtgtgtgcgagtgggaggctcgtatgctgatgagtgcacattcgtacactcattcttagtcaattattaaatggattagtatttattttttgtatagatttgatgtgttttctcaagtgcataggtttgtgcttaaaagataattttgtgatgactgagatctttgagctcatttttgacaatgtttatatcatttttttcaaagagcttatgaaatccaaaatgatagagctcgttcacagcttttcaaaacatgttaaatgatctcatttggagtctgaacgcgaaaattatgcataatttactaagtaagatcgaagtagtaaaatagggacaaaaaatggcatgtggctatagcaccaaaattgttgtgctacagcgccaattttggaaaaaaaaaatgtttgtttttgcactaaaataaagcctcgagagtaccgcatggcgttatagcgctgggtcttctacgctataacgttgtatgtgtattttttaatttaaatcataattctaaatagattctttctatcttgttttgagcctatataaagaatgatgtaattcgactttggggatgactggagagatagaaataagcaactt

SEQ ID NO: 286766 - DNA, 476 bp, Cannabis indica
gaaaggatacaagggttagagtgaacggaaggagacatttaattccgctgcacccaatgtaaggtttctgatactttatatgtgtttatttcataatcgttttagaagttcatatttaaggtgttaatcaacatacttgtgagtagatctaagatcttggtaaaataatttccaacatctagtgggctagggtctggttcagaccgtgtgtaagctgtcaataaggtgtatattgattataaatacaccttatagccgctaggttttggatctctttcaaacacttagaattgtattcatatcttaaggaaagagtgtctttgttatgtagagaagagatgttctactcttcctctgtgtatttgtagttgtattgtcttgagtctgtattcaagcctacatcgaagaagaataacagtgcaaccttcgggagaaggtgtttacaagttttagggagattgcttttgaagtcttgc

SEQ ID NO: 286767 - DNA, 555 bp, Cannabis indica
aaaaaaactatatcattgggttaagccttacatttattagtttatttgagttttatagttgaagctgttttagtttcatatttattaaattttacaattacgttattttttagttgttatattgttgtttttatgttgttcaatacatgatatacttacaattatgtttaactattaatcgtattttaatggttcattattttattaattttgtcatcttaatatttacaggtgtgtgataagacctttgatggtgtttaaaagttgaaccttctaaagaaaatattacaaggtttataactttatttttttgatttttcttatctgaatcgttctctgcttgtagttcattcatttgaagaaaaaaatcatagtagaacaacaatataaaaacataaagacaatagttgctaatatgttttttaactgttaacaactataacaatgatataaaaatataaaaataattgatgaacaaataattgtatattcttcaatatttagcttcttcgagtgtcagtatcaacaaaagtaacatcttttgaaactgatccc

SEQ ID NO: 286768 - DNA, 849 bp, Cannabis indica
tcttcttctttcctctcatctactttatattattttataacagatggagatttatactgtttatagcaacctacatagaaactaccggagaaatcacttaagaaactcaaactgtaaatttagaaaaaaaaagttaaaaaaattaaatagtatataggataatttccttatgtagaatctattttattatatattaatttttttgctatgatatatatatttttgagtatttaatttagtattgttataatttttatgtatatagttttatcactacgatatatttaatttttagtgatacaatatatcattgtatatatttaataatctaatatatttatttatttttgttacaatatattagtatgtaatattaaaagttatataacttaatttaattattatattttttaaaaaaattatatgtaataaatgtattttataatttttattagttaatttaatatatttgattgttttactattttatttttttaaaaaaaattaatatttactaacttaatttttaaatttaaggccacttaagaaaaattaaatatgaaataattacaaataaaatagggaaaattacatgtggacacgtttttttccatttaattctaataataacgttactttttaaattattgaatataccgtcagttttacaattttttcattttattttatttctttatgtttggcttgttgagcatgcttagtggatgaggggggttgacgtcagtatcaattgaatgggatggaggtcatgtcaaagtgggctgcagagaaggatgacgtcagtgacagttggatgggacgtgcgtcaggaggtgcagagcacatgat

SEQ ID NO: 286769 - DNA, 394 bp, Cannabis indica
aaaaaggttattagattattaccttattaattttttttagttcccatcaatgagtattacccattaagaagtgttccatatatatatatatatatatatatatatatatgctactattattcattttaaagtaaagataatgggttggaaggggatcctctctttagagagtgtgtccaatttcttgtctaatatatagtattaggacatgtgtcaatataattaatatacaataagataatattgtttggtagaattgtttaatagaaaaaaaaagggaaaaaaaagaacattaatactactaaaaataaaaataatgtaaaataaaacaaaatcaacatataattattcataatttcaaaaaaaaatatatatatatatatacatataatta

SEQ ID NO: 286770 - DNA, 500 bp, Cannabis indica
ctcaagcttgcttaaaactaacatcaagcaagaaaatcagctgctagggacttcaatcaactcaaaccaaccctagaattcaaaattcaaacaactctaaccctaacagcccctgatttataattccacataatcaacctaacttaaaacttgaaaactataaaagagcttcattagagcttaccttaggttgattccccttgaatctatggctgaaaacacaagaaaaatggcaacttgtttgagtttccttctggtttgagaggggccgaacaccaagagagagaagagaaatgatatttccttcaattttcaatttctttcttaattgattcttttcaaagagtatttctcttttacataacttaggctgaaataatataggtgtcaccacccaaggctgccacctatcacacatttaatcaatttactaaatgtccaaaatgccctttagacttaaaactagggtatttctaaagctaggggtaaaatggtcaatt

SEQ ID NO: 286771 - DNA, 683 bp, Cannabis indica
caaactgtttacattttctgtatctattcgtgttaggaattgtcttacaagttaggttaaaaattaaaaaaaaaaaaaaaaaaaaaaagttgtacaacaattaagctcatggtcctatttaaactattttgaaaaatacagggtcaattttatcatttagcaaaacagatggtctaatctataacttttgaaaaatatagaatccaaaatagcatttaccccttttttttcaagggcagtgtggccgactttatatgagttctccatggtactaatgcttaattattaatgagttaatggtaattataaatttggaaataatgaaaactttcatttataaggtgggaaaaaaatatccatgttataaattctgcgaagtcaaagttagttaaacaaaacattttaatatattattttgtaacatctgtcaattttagtgtattatttgtcattattgtcaaatatattttgtttttttttaactgggccaaatatatttatttagacgttttgacaataaattttaattacaataatctcttgtcacatcattaaaaaatattttaattttaaaataatatattaaaacaaaattaatttccaattcttttatttttacaataaaaaaattttatttttagtgataattttttagtcacaatatattttttttttgagtaaat

SEQ ID NO: 286772 - DNA, 699 bp, Cannabis indica
tttctccttgttcttgagtcaatacaaataacgaggactaggctattaccgaactgtttggggttgaacctctataaaattcttgtgtctttacattgctttactatatatctatcaccataaattacttatcgcttactaaataagattcactgtcgttggctaaaagcgaggtcaatattttggtgctttcattgagagaagaatcaagaatcgctcttcattcaaaatctaatcacaagtacgatggtggtacagactcgtaggggcctgattgatcgaactaatccacaggcggtggatcttgcattgcagaacccaggaaacgcaagggttccgccagctgttaatcttgaacagccgtcgaacgtaggtcatggtgtgacgaatcctgtagatgaaatcgcgccttgtgtgcaagagactgggaataccagttcagcacccagccaggtcattcataacacagtcatccgacctactaccaacgtttgaacgaccattggagatgatactgagatccaaaacctctgcgctgctcttggactcatgcaaggtcataccaatatcctacatcatgatcaggaggaactctgcgctgtggtaaatctcacgttcgaggaacaaagacgcatgtttgccgagtggagagagaaagtgtaatacccgggattaagaaaaggattagcaaaaccctaa

SEQ ID NO: 286773 - DNA, 559 bp, Cannabis indica
gtggattcaatgaggaattaataagttagtgaatttacttagtaaattctagatctgcttattggaagctcggttatataggcccatggtccccatactagttgagaaaaactacttataagactcaattaattgattttagttaatcaattataattccaaaattagactatgtctagtttatgaatttttcactaagatatggcttgattgtgaagaaatagtattttggggtttatttgttaattaagagactttatggagtctaattaataaatattataaatgacaattttatttgatagttattttaattattaaataaatagttttagcatttatagggttgaaagtaaaaaaactggcatttatgaaaaataggtaaaatagttgggaaaaatgacaaaatccaaacttgagtggggctcattaagtggccggccatcaagtggtttttcaccctatttttatcatttttttattcctaataattcaaccctaaccctattgaagatagtataaaaggaaggttatggtctcttcatccaactaatgcctc

SEQ ID NO: 286774 - DNA, 641 bp, Cannabis indica
tcattcaaatattaacgcatgtcgcaaatggctgggtgtatctcagtatctcaaggggcatataaccgcgtatatggccattagaatactgtgacacacccaccatttggaatagcgattaataccctcgcaactcagcctgcgacatataaaaatcctaaaagatctagctaacagtcaaatggaaataaatattggcaacatgcgaacattcaagttgttcatccgaatatccgagacgtggaacagtgcctatgaattgtgtgcggttatgtcagtttacaggtcatatcctacgaatttgcccaggttttcttacctaaaacacatagcctcattaacacccactagcatacattcctaaaaaacctttaaaatacccgaacccagaaagtaaagcatattttccccaaaacagaaaacgaaaatgcagtgatttgaaaactaacctttagttctgatttctgcgattgctttcgatcacttctgagattgagaatgttgtggaaaaatggtagaaaatctggggatggattttcgaagtgtatgtaatggagggaaagaagaagttaagagtgagagggaaaaatgggaattttgattcgtatcaaagtatttaaatacccatatcccttattaat

SEQ ID NO: 286775 - DNA, 877 bp, Cannabis indica
tccaaaaggtggattaggtctatgccgatcagaattgacgataaggagttaagtgctgacctaatagagatgagcttagtagattttgatatcatactgggaatggatttcctatccaagtattcagctagtattgactgtaagaggaagatggtaatcttccaaccggaaggagaagaaccgtttgtttttgtcggttcagtttagggatctcggatcctggtgattttggccctatcagctagagaattattgtgtaacggttgtttagggtttctggccgtggtggtggacaccactcggccagacactattcagccagaggatatcaagttggtttgggaatttctagatgtttttcctgaagaacttatgggtttaccacctcagcgggaaattgactttgtgatagatttagcacccagagtggaactggtttccaaggctccttatagaatggctccaactgagcttaaagaattgaaaattcagctccagggattgcttgacatagggtttattcggcctagtgtgtcaccctggggagctccgatattatttgtcaagaagaaggatgggtctatgagaatgtgcattgactattgggagttaaacaagctaacaattaagcatagatatccattacctaggatcgatgatcttttcaatcaacttcaggggaagacggtcttctccaagattgacctccgattgggctatcatcagttgagaatccgagaggaggacattccgaacatagccttcagtactaggtatggacattacgaattcttggttatgtcgtttggattaaccaatgctcctacagcattcatggatctgatgaatagagtattcaaggatttcctcgatatct

SEQ ID NO: 286776 - DNA, 678 bp, Cannabis indica
attaattagtcaatgaaagtctaaatagttattgtctgtttgcttgaagtatttttctagtaatatttaattaaatagaaaattaatatttaagttgattttaatcataatacttaaatatttgatactcaaacattgcctctacttccaaacccaagaacaagaagaaatggaagaatagtaagaagtctgttcaagctgtgaaaacagttaaaaagaaaaaggctgctactcccagagataagccaaaaggaaaatgcttctattgcaatgaaaagggccactggaaaccccaatgccctaagtttctagcaaagaaacaaggtatttctttctatgctataaactcatgtgttttagagaattattatccccttgggttattaattctggacctactaaccatgtttgtttttcttcttatttcagctccagctgcttgaacttggattgctatcctagcgagttgagtcggatggttggacagatgggtggagatagtccaagattgaagatgaagctcggaatcttctattttattataatttttgaattaattgttttaatttaagaacaatttggatttcaattattggtttgagatatttattcccaatttttcatattattacaaacaatttattttcttgggaatattataataaagttttctctttt

SEQ ID NO: 286777 - DNA, 558 bp, Cannabis indica
tgtgtttcggatcgggtcccagatttaagtccaagttcgggtctccgttccggtctgggtacacgaccgtgtcgaggcccgagttccaatctcagttttggtctgaggctaggtctgtgtttggttctaggtctgggtccaggtcctggtcacggtcctagtcttgttctagggtcctgggtcggcgattcttgttcaggttctaattttgggtcccaagtctaggtctgggtttgggtttggttcttcgtctgtgttctggtccttgtctgattccaagatctagacaccgactactggtctattctaggccccgttacccgaatctttagtcaagatccgaatcactgtcatgggtctcgctctggttctggttcaggtcctaggtctcatttctgagtttgggttcgggatcgagactgggtgcagttctaggtcccgaccttggttctgtgtccctagtctggttccatgtttgggtttgagttcaagttcgggttcgggtcccgagtccaggtttgggttgggatctaggtccagctcccaattcgggtctag

SEQ ID NO: 286778 - DNA, 698 bp, Cannabis indica
gttacactctcccggatgatgtttcttgcaccgtggatactcagggtaagagtaaccctggcgtccacctctgccttggttcccacgaaaccgcttactttgccctgagccaccagaagctggggtgaatttccttttttgatcagtggtggagtcaccaccatccctaccataaataggagtaggaacagtgggggttccaccaacactcggagtcacccggggctcctgaagaaatttcaccgcaccctcggctctcaaagccttttcgaccatttctgcatacgtagttgcctcggtggtagtaatcaccagatcgtgccgaatcttcgcactcaaaccagccagatatttttctttcttactgaagtcagttggcacaattcccgctgccagcttggccaaacggtcaaactttgtcgtatactcagtaaccgacatgccctcagtttgaaccaattcagtgaactctttccgctttgcactgcggactgcttcgttgtaatacttggagttaaacaactccttgaattcttcccaggtcatcactgtgacgtcccgagtgagggttatcaactcccaccacacgagagcgtcttcctaaaactggaaagtggcgcatgtcacccgatcattaccaaccactcccataaagttgaggatacgctcgatcactgaaagccactgctcggccttca

SEQ ID NO: 286779 - DNA, 516 bp, Cannabis indica
ttcttctcctaagagcaagtccaaggacacggcaaaattttatatatgccgtgattttgtttcaaggagactgcaattttatcactattttcaagttttgtctacaatgtcgtgcactgtaaatcactgcatttttttttctttttttttaataatttaattaatatttatatataattatattattataattataaaattaagaataattttttgaaaaattttacaatacacatttttaaaagtgatggacgaatctactcttatttttagtctattttttatatagtagtgtatattatagttatttaatacattttgcaaaattttggaaaaattagaaaaatttaatacgccgaaaactgcatttctctaaaagtgtcgcactgatatactcctacctatttcgacattcaagagatttatgtagtctttttttatagtcatgtacattattattatttaagacatcttgcaaaatttcaaaaaatttagaaaaatttaacacgccgaaaa

SEQ ID NO: 286780 - DNA, 872 bp, Cannabis indica
ttgtaacattgccttgcctccccatgatttcctctcaccgtcccaattccagcttcctgggtagggaactttaagcataggtgccgaatggatgtgactgcgccaaaatctaccagggccggtcggccgaggatcgcgttataagcggtcgggcagtccaccaccacaaaagtgcagtatttgaacgtgctttggggggtgtccgggcacaaagtgacgggaagcctcacttttcccattgggataagcgttgttccgttaaaccctgtgagttgggaaccgctgggtgagaggtctcggtccgtcaggcctattacagtgaaggcctccttgaaaagtaagttcacggaacttccatagtcaatcaagactctggccaccactttattggcaatgggggtctcaatgactaacagatcatgatgagggaagcacaccggcttggcgtcttcttccgtgaacgtgatgggttgatccatcagccggggcctttgagctgggagttgagtaacctcccaaacctcattgtgctttacggcccccgcgtaccgctttagttctttgcgggtggtttctccagagatcattgctaccctcccgttgggtctaggcggcagactggggatgtgttgggcatcgcccgcgggagcaactggagccaatactcctgctgcacccctcggtgttccctggggcacaacccctgtcgcctggcccggattgaggtgaggcagccgattcttgatccactaatagaggtggcccaatcgtatcaggttttcaatctcgtcttttagattcttgcattcgttggtgctatgaccaatgtcgttgtggtactcgcatcttttgtttggatccctccgggagct

SEQ ID NO: 286781 - DNA, 602 bp, Cannabis indica
gaaaaaccattgccatgagttgttgttttctaaatccacaacagaaaaaactaggggaaaaatgtgtccatttgcatcttgtgtacaagcagagagcaatgtccctccatatgttgatttaaggaaagttccatcaacaactattatgggtttgcacttcttccatccttttattgaagtatctagtgccacaaacaagtacttgaagctgttgtcttcctctgtttgcatgtgtacaatggttccgagattagttttctgcagcatgtgcaaaaaacttggcagcaacttgtatgattcgtttgcttttcctcgtaattcttcttacgcgtgatctttgcttctccatgctttcatgtagttcattctcaccccatacttatgtttcatttctcctctgatgtcttgtggcgtttgagttgtttttatgttggtaaaccttggcttgatgtagtttccaatcaacttcgttgtagcttgtcttttgtctgcaaatcttatgtttagatcacaagtgtgtatcacctttctgtcatactttcgaattatgaatgactttgttggtccgtttctagatgccgttagtgcccacttgcattttg

SEQ ID NO: 286782 - DNA, 540 bp, Cannabis indica
aaagtaaccgatccaatccgcagttttgcggattggattggattggatttgagctattgtgcggattggattggatccaaaaaatgaaatctacacttagtgcggatcagatgttgtttgaccaaaaaagtgcggattgaatcggatgaaaggccctactcctaagcggaatgttcaaagccaactcaggttgactaattattaccatgatttccatctgcttacaaaaagtaaaagaaaattgttatttttcaaagagacattgaatatatattcatattttattgggtaattttatagtattcctaaaattttaaaagaaataaatttttatttgtttgggcaatatgaagagcctaaatagtctaattatttttcataatattatacgtcttaattatttaaaattactactcaaatagtggcttaccacatatataaaataaaacgttacttatgcaataaaatatttaaactttaattttcggtaatataaactattcagaattttataaaaattaataaaaatttaaataacta

SEQ ID NO: 286783 - DNA, 627 bp, Cannabis indica
ccttgaaaacaaggtttgcaaacactctcacagctacagaaatcatgaatcagttaactgaactgttcaggatggcatcaattcaagctcgctttgaagcgactaagaatttcatcaatgcacggatgaaacctcatcagagcgtgcatgatcacctactccagatgactagttacttctaagaagctgagaatcatggagctgttatagatcagataactcaagtgagtttgatcttgaacagtttgactccagcctttctgcctttcacttcaaattatgtcatgaacaagttggagcttgacttctacgagttcatcaacaacctatagacatttgaaaatttgattggaggaccacagaaaggaggagctaaagctcctaattctaggactgctaatggtacggtcaaggctgaggcaaacattgcctctatttcaaaacccaacaacaagaagaagtggaagaatatcaagaagccagttcaagttgtgaaaacagttaaaaagaaaaaggctgctaatcccgatgaaagccaaaaggaaaatgcttctattgcaatgaaaagggccactgaaaaccccaatgccctaagtttctagcaaagaaacaaggtatttctttcta

SEQ ID NO: 286784 - DNA, 446 bp, Cannabis indica
aaataagtcaggatacagctcccgcaactacgaatttaactctcgaatcgcctttcaatcttgctattctctcagggcactaaaactaacggtatagtctttacttcgcaacactttctctttcaattcagaaaatctataccgactgctcctcatatgacaagtctgtttgaatttcaatattttcataactccatatatataccgcttctacctcatactcctgaaacattgaagtgcatattagaaaccctatataaagcagggagtatgtttagctaataagctacccgacctaccctttccagaaattcagacggaccggttaatctgagacttaactttcctttcttcccaatttctgaatttcctcattggaacaacctgaagaaagataaaattccaacttggaatttaatatctatacactttgaatcagcatagct

SEQ ID NO: 286785 - DNA, 668 bp, Cannabis indica
tggaaaagtatttaggggagtgaccatggaaaagaattcgaaaactccatattctctgagttctgcaatggaatgggaattctccatgaatttttagcccctaaaactcctcagcagaatggggttgttgagcggaaaaacagaactctccaagaaatggctcgagtcatgatgcaagccaaggatatttcaaaacgcttttgggccgaagctgtcaatactgcctgctatgtgtgcaatagagttcatcttcgcactggtacttctcagactgcttatgagctatggaaagggagaccaccaaatgttagccacatgcacattttcggatgtacgtgctatgttctaaatgatcgagatcacttagccaagtttgatcctagaagtgatgaaggaacatttctgggttactccatcaacagtcgtgcgtacagggtatacaataaaaggactctctcagtggtcgaatcaatgaacgtaaaatttgatgacttagaaggacatgaagaagtgtgtgtcgaggatgatgcccctgtcctctctggactagaccagtcatcactagaccgactcaagtatatcctgacactcctacagagtcgctaaacacagaaccaggtgtatcaggtgacgatcaagcaaatgtcagtgatccagatagaggaact

SEQ ID NO: 286786 - DNA, 391 bp, Cannabis indica
atatattttcaatatatatatatatataagttgttgtcactttaaccattatcacgatcaattatttttatgcaattgttgcgttgtcctttttcttttaggtaaagggttctagtcaagccctccgacctgatggtccttgaattatttgcatgtaaagtccttttataattattatatatctagctattatatagcgttacggtatacatataatattattttaagaagggaaaattaaagaaagtataacagaattaaggatttgattaagatatatatatatactagatgatcgttacgtgccaagtcacgtactattagttttatttaatattttaattttttattttaattaataattaaaatagtataattatttgaacgattt

SEQ ID NO: 286787 - DNA, 502 bp, Cannabis indica
tgcggcggtgtgatcgaggattcttggatccaagtctggttcgtctatgtgcggcacctcctcgatcctgaggatctcctggcgaggaggtggtgcttccaaaaggtagataacatttaccgtccttttttctgcgagtttaacggctgcgttataacattctcgtgagtcggattggactccccgcaccgaacctactccagcgggagtagggaacttcatcgtcagatgatagatcgaggttatgatcttcatctccttcaggattggtcgaccaattacggcgttatacgctgagtattggtcgattactgcgaagtcggccattgacttggctgttactggggcagttcccaaagtgattgggagcttgatcattcctttaattgctatgacatctcccgaaaagccataaatgcttgatgtcataggtcgcaaatccttctcttgcaaccccatttgcttgaaggcttggaaattcagcagattcactgaactccca

SEQ ID NO: 286788 - DNA, 544 bp, Cannabis indica
ttttttagaaaagttattttttaccaaaaaaaaaaatcatttatttaatgtgatgtaggatcatggtggataacttttagagttgtcaaacaataattagagtattttatgtaggaaaagcacccaaatcttatgtgtaggggtgttcattagatcacatccaatggatttggacccaaccgatccaatccaattatttattggatattgaattttgtcatccgatccaatctaatcaaattgagttatccaatccgatctgatccaatggatatattggattggatcggttccaaccattagatgcattgacttgttttctattggattggattggattggattggatccatccaatccattttaggtaccatttaagttgatttcattaaaaagaagaataaaaatatgaaaatataatttaaaacttaataatccaacatacataataaacattagattagtctaaccaaaattgctaaaaaaaaaaaatttaattcaatacgtattgacaattttattagcgtttaggaagataagaatt

SEQ ID NO: 286789 - DNA, 872 bp, Cannabis indica
cttgttccttgaatccctgagctccttcagctccgcggctagagcggccctggactctaagtttgcttggtgagtttcctctaaggatctcaccttggcaaccatctcgtccaaggcttccctggcctcccggagctcccgcttggcctttgcagtggcctcaccttccgccctcagctcctcttgatgcttggcctccagcctgtctctccgcagggcctcatcccggatcatggcctccgcctgggcttccctccgcttagcctcctcctcattggccttggcagcagcctcccggcgctcagcagcctcctggtaaagctgcctctccgcagtaaggtcctgaagaaccttcctgacttcgttcatgtccccaaaatcagacagaacgaagccatggttgattatgttcttggagaggcggccagcctcagcagcaagctaaacaacaatgcaagtgtaagaaagaatctccaaaaaaagaataaggggaaaaacaaaattacaaagcacttaccacagtgagggagtggctgaggtcctggacctggaagatggagttcagggaggcacaagtagcgaaccgcttaggcgcgcaccgggtaagctgagacgcaaactcgccagtcatctccgcggcgaagggagccaaggtgggcccaaggaagcgacggaaccagtccgatagggggtccaaatttaggtcccacggatcctggtactccgggttgttgatggtgtcttgcacctcaacccgcagaaccctcctaagggcttccacctcagcaaacccccgggagtattcatccatggcgtagttatgcttagctatccggagctcctgcctcgcctcgtctccaggaaccggagtc

SEQ ID NO: 286790 - DNA, 560 bp, Cannabis indica
gagggtcaagagaaaaaaaatttaaggaagagactcggtttttgacaagtgaagtggttaggtgttgagctagcttaaatacatcctataccataccctaacccaagcctaacattcaagcctagtcaagtccttttgatctaagttgcaaagctaagctacattagtggagaggattgcactaattcaacttatggaagcaaacctttaaacttgaggatcaaaggtggttgttatagaaattcaagttgttggtgggaagtatttaaggacataaataccatgcaaaattctgttgaaacacacaagttcgaggcatattcactactaccaattacatttccatttcatctaattctgagagcaaatttcgtccctagaccaagtatgaaagagcaagattttctctactgcaagcgtgttagtgtcgctgtcattttctgttcttattgtttagttctttgtgtttttcattactcgaggacgagcaatactctaagtttggggtgtgataactctatgttatagagttaatttttatgcttttaaactaaagtatt

SEQ ID NO: 286791 - DNA, 803 bp, Cannabis indica
aacaacattcatcatcctcccttaataggagtttagttcataaaatccataataacatccataatcaaaactaaaacagaaattaacatagaaattaagagtttaagaaagaactagttggtgattgcattctggatcgccacaattgcttcctttgcctccttcttcatctctagggttttatttctgcctcctttccttctaaaacacaagccccttaaatagaaattagggttgctacctttgaaaaagtcaaaaactgcccaaaaatctcgtttttcgcccatagtcgcgactacataaagtctagtcgctaccataggcaaaatacgaaaaaatactcgctgtttagctcctagtcgcgaccatggtcgcgaccatggaaagtggtggtcgcgactactgaagcaaaatttgacagcttcagcatctttcagtaaaatgtgcataactttcacatacgaactccaaatgagttgattcaagatgcgttggaaagaagaaaaagaaatataaaacttttatgttttgactttttccaaaatctgataagaacatagtcgaatttaagcttgaagtttcagctttattttcttgcagaattttctctattctatagcttgttagtttccgaaatttgatcgattgatatattccaagtgtgaaacctgaaatcaaagaaaacaagcgtaattctattccaaaaagaataacaaagaaggaaaacaactataaaaagtgacccaaaatgtaggctaaaaatagcctaacaataagatacaaataaacagagtaagagtcga

SEQ ID NO: 286792 - DNA, 626 bp, Cannabis indica
tcccagctaacccggtgcgcaccaaaaaggttcgctgcttgtgcatccttgaactccgtctttcaagttcaggatctcagccattccttgactgtggtaagtattttgtggtttacctcttttctcattatttttcttaaggcctttactcactcttgcctccttttccagcttgctgcagaggcgggccgcctttccaagaacctagtcaatcacggctttgtcttgtccgaatttgggggcatagacgaagtcgcgaagaccctgcaggacctgtctgctgaaaggcgggtgttccaagaggaggctgcgcggcgggaggcccttgctaaagccaagttcgaggaagaggccaagcaaagggatgctcaagcggaggcgatgatccgagaggaggtctttcagagggatagactggaggccaagcaccgggaggcattaagggcggagggcgaggctgctgccaaggccaaacgcgagctccgggaggctagggaggccttagacgaaatggccgccaaggtgaagtccttagaggaattgcaccaggcggacttggagtccagggctaacctggccgtggagttgaaggagctgaaggattttaaagcccaagccttgaagaa

SEQ ID NO: 286793 - DNA, 595 bp, Cannabis indica
agtaataatttttttttgatggaataagcaataaaaaatttccatcaattagtggatgatgtaaacactattataccatattaattagtctagaagaagaatcatgatagactttgtcacgtccattattaacaaaacatatttacatattgatgttataattatatatatgagaaatgatattattatatttgtatttccggcttatattataacgtataacatcatattcggtgtatgtatgttatgataaaaaccctataataatttaatctcataatatttgtatttcagtttattttaaagttatttgttttgtgaaaaaaatagtaataataataatttgtttatatatgtgtaagtatttttgatagaacagctttgtcgatgaaataaattcgttgttaattggacgattcccaggagaagtccacctatactatagtagggatgagacggtagataatactgagcaatcggtaatggaggacttcttaaacactctaactccgaatggattacccccacatgaattaaaactcaaaaaaaattgtcccataatgctgcttagaaacattaatccttctgaaggttt

SEQ ID NO: 286794 - DNA, 571 bp, Cannabis indica
cataaactcgcaaaatgtaacaggcaaatgaaaaaacatgtttaaatcgcacaaaaatcgcataaaatcgttgaaaatcacagtttagcaaaacaaataccaaaacaacaaagaaagtcagattgacatacccttttctcaaatagggtagcgacatcaggttgcttcacatcatgtttcgtaaccgtgttgggggtgctccaattcaacattcgagggaatctagtccctctgcactgcccgtacttcttccccaaatcttgcatcacctcaaaggcccagtattgtagcgccggtgcatatccgtagacattgtacttcgcctctggttgagtaatttttttctccttcttccctttcttcttatccttagtagatttatcaaggtagttcttcctcaggtcagtcatacttttggctgtggatgacaacaacttctgatatgaaagaaggccccacggatattcgaagaacttctcctcgttttctactaacttcagcatatccgaccatatataaacaccctcagcccttgatagaagcactccttcaacaaatgcacacagcccca

SEQ ID NO: 286795 - DNA, 393 bp, Cannabis indica
ccagagtggagtactcgtgtataagagccattattcattttagaacgctctatatggtccacgatatagatacactataaacatttaaccatcgttttaatcccaataatcaaagatcctctatagataatttacagcgagtggagacaaatttactgtttcacccttcaatgtattttattcttaaaacacttagctttctataaatgatatttcagtaaactaatataatcattgaaataagagctcttccagttatctttattaagtcaagcttaaaggaaatcatcgtttcacttttatgtccagatagaagctatagattccatatctatgtttagcgttcccactcaattgtactatcatgttcccaaaaatgtacgtatcacccag

SEQ ID NO: 286796 - DNA, 490 bp, Cannabis indica
gaattagatgaaaaggaagtgtatttggcagtagtgaatatgccttgaacttgtgtgtatcaacagaattttgcatgctatttatgtctttaaaacttatcaagagtaactcaatcaataaagtgtgcaaatacttcccaccaacaacttgaatttctataacaactaccctcgatcctcaagtttaaaaagtttgcttccataagttgaactagtgcaatcctctccactaatgtaacttagctttacaactcagatcaaaaggactttattaggcttgaaatgtgagccttcggttcgggtttggtaaaggatgacatttcttaggctcatgacctaattacctcaatttatcaaggactttttttttcctcaagcgctcacccaaaatttcattctcaacccacaatgttcactcaatctagttcccactctcttgctatatgtatgtactatatatatgtatattttttttcaaatcaactagata

SEQ ID NO: 286797 - DNA, 536 bp, Cannabis indica
ggaatatatatttaatcacataatcttgcttactttccactgttctgacgacacaagaaacaagaatataaatgtgacatgggtttgaaagaatttataaatcaaataaacaagtaaatgataatatgaaccaagtgacacacaaataagtgatgaaaatacttttgtttctttattgatatttaaaagataaagattacactgaaatggagttttatttagggcataaaacccaacatcgcattgtctaactcttttcttttttgttctctatttcgtacaaaaattttgagtacttatcttccatctatcgttctttctttcttagttggcaaatcttgtttatgcttttgggtgataattagcttagtgtcttgtactcttcatacttttgaggttgggttaaaagattcaagttacttgtttatgtgtgatcaggataaattaaagtattaatgtacagagttgagcgatttttatttcagtttcttatcaggccccttactggaatagagctacccatactgaggtgtgaa

SEQ ID NO: 286798 - DNA, 465 bp, Cannabis indica
gagttttttgctgcaaaagcattgttcatcttatcaagtaacagaaattacaaccaaactgaagaattacaaaatttaaaataagttgtacaacaaagcaattaccgagatgcgagtgggcatgtaccaaacacgaggttggtcagctaatcgactatcacgttcgtacttgttcattagtatagaaaaacagtcaatgatctgcaacaaaatgaaatatgatttacacatgtacaataaatgatacatatttagtaactactttgacacttacgaatccctcaacttctcgcaagggtcgcaacgatgccatgcacctcctatccacttcaaaatttcgaaattttgcaagcacatatctgattcaattgtaatcaatgtaactgttattaaaaatttctacaagtatatcataatgagaaatacgaaaataacatttacttaccccggatctaatgtgttgct

SEQ ID NO: 286799 - DNA, 656 bp, Cannabis indica
catagtcaagctcgtagaagatgctttttttccgccaattatgattttctgcaactcgcctacgcttcacaccaccaaagagctcatgatttccagggaggtggggtgggagtttgtttacttgttctaatacttcttcacaagtaaaacgtcttggaggaggtcttctctcaatttgtccgtcaaattgagtatcccttctcattcgatggttatttggcaaaaatcttctatgacccacgtaagatgtcttaccaattactcgaatagaagatgtatcttcattgcaagtaggacaagctttatatccctgaccactccaaccagacaaataactacgagcaggaaaatcattcactgtccacaaaagagctgcacgcaacttgaagacagtgttggttcgacaatctctcgtatctactccgttaacccacaactccttcaactcatccaccaagggtcttaaaaatatgtctatgtccattccgggtgatttatctccaggaattagaatggtcaacataaaattattatctttcatacataaccaaggtggaagattatagttcgccaaaactacaggccacatactgtaagcttggctcatattgccaaatggattaaagccatcggcagctaaaccgagacgaacattt

SEQ ID NO: 286800 - DNA, 498 bp, Cannabis indica
ttcctttgcgggagacaacaggtaagacagtagttgcacgtagagatatgcacggtggtgcttatattgaatattatattggtgataattagaaaccgagattagggttattaccctaaagtgagcggtttaatggcctagggttattaccctagtaattattaatgtgtaaatgctatgccatgctaaatatattgtaataaagaattatgcgcacaaggcataattaagttagactcggtaaattagtaccttgagtttgatagtaatgcggtctagggttattaccctagaagttatgtgaaggtaagaaagtcatgatgtacaataatattgctaatcaagtgaaagcatgaattagggttattaatctctataagtgttattttgagcatgcaatgatatgttatatgagagactatttggtatgtaatttagggttattaccctaagattctatatgttttgttatctattgaatacatacatatatttcaa

SEQ ID NO: 286801 - DNA, 872 bp, Cannabis indica
gaacctgggaccatcgacattcgagacagcgagtccacggtgtcggcccgcgactaccttatacactcgaggcatgctcctgacgtcgaggtcgaggagatggatgatgactggacgaccccagttcgcgagtcaggcgaggatgaagaggaggcggaagggagcgggacagactcggttgacgatacccagctgaatgagcccttcgcgtgtgaagatctgatttcgagggtttccaaatcagatttcactacctttgtgaggttaaatttgctgcgacttgcgtttcagcgacctaaaccgtcccagagggcgcatcttccgtttaccaaccctgcgattattcccacagaggatgtggtagtctcaatacccattctccgatgtggggtatcggtccccttccatcctttcatcgcagctattctcaggcgatacgatgtatcaccttttcagctaactccaaacagttatcgcactgccctagccttctatgcgatgtacatggaatatgttcatagggctccctcagtagaagagttcagctatttctacgacataaaaagcgtaggtcttcataatggcttctactgttttagcaaatgggcgacttctgagatcaatggagtagaaggaatggtatcgaacatgggggactggaaatcgaagtggttttatgtctttaaagtccctgggattagaactgactttaatcgcagacctagtatgtcgcgtatttttaacttagacattttctgaattacttttgagatcctttgcttactcgctctttcttgctctcgcagatagaccagttcgaccggcacttgacgcgactcgcagagagacagctgaaatcctcgggagccttc

SEQ ID NO: 286802 - DNA, 532 bp, Cannabis indica
gtaatagccattcggtgtgtggtgtctgaatttcaaagtttgtgatcctaaacactataaatagaggcgtgggttcaccctttgagacacactcttctcttctatctttcaaacacaaagctagagagttctaaggcttgataattcctagaagtatttccacaaagccctaagtgtttcatagagggggaaataatcttcttggacaaaggtgtagaaactttgttcaagcttttggtgatccccatctccactttgggtgtttgttctattctcaagttttatattattttcttgttctcctctaaacactcctatatatatactatcatatatttatatattgactatatagtactatatatattctatatcatatatatatactctattatatatattctgtatcttatatatatactctattatatatatatattctatatcatatatacacactattatatatatgcttttatatagtttacatttacttgtatctttgagtttttgagttgtaactcttttcttt

SEQ ID NO: 286803 - DNA, 582 bp, Cannabis indica
gatgacactccaacatacttatactattgtccataaagcaaattgtgagtggattgtagttttgtttgcttacgatgtgccttgaatccatttacgtttcatgagcattttctaatcccaacacttctcaaagactcgtatggcccttgtcatgccatgaaattctttaagatacgtcactttggccttatatgtgtctcacttttcccatgtctctaatattagggagtctttcctaacgttttctcctcaagctatgcactacccttctattgttgtgtcgatgggtatgtagaatctaagtatgtcactcgtgaaagttaatttctcttcttcctcttttgaatttgtgatctcctctctatagctgtttgttgtaccacccaccataaatttgtattcacaatgtattagttgtgcaattgtgacctgttccaagtagttgtcctcttgttgtctctccttcatgttgtacccaaattgttagtcgtgcctagaccttcttagtctttctcctttgaaaatgtcactgtcgaaaccatgcacattttactctattgtctcctccaccaagtagatgac

SEQ ID NO: 286804 - DNA, 836 bp, Cannabis indica
gttgtaataaccaggtcatgtctgattttggcattcagcccagccaaatacttttctttcttgctgaagtctgttggtacgattccggaggctaacttggccaagcgatcaaacttggttgtatattcggttactgacataccctcaccttgtaccaactcaacaaattccttccgctttgcactgcggaccgcctcattgtaatatttggcgttgaacaattcccggaactcttcccaggtcattctggtcacatctctggtgagggataccatttcccaccaaatcagggcatcctcttgaaattgaaatgtggcacatgccaccctatcatttccagctactcccataaaattcaatattttctcaataacggtcaaccactgctcagcctttaaaacatcagggcctcccagaaatactggaggcgcttgctttctgaacctctcatataaaggctccatgcggttaccagcaatattttgctcagctggcaccacaggggctgcaggagctgcaggagccgcagcaggcggttgcgggggaggctcaacaggagcatcccgttgcctgagtcgtcggatctcttcttcttgttgctcaattctagtttgcatctcagcaaacctttgttcccaatcaacaggggcctgaggtggattctcctgtccacctctcgggactcgaccgcggcctctaccgcgtccacgggggttttggggatttctaccaccccgaccacctccggtctcaaccaattcaccctgccttctaacgtttcgctggtcgtccattatttaggacttagcctgcgaacccacaaggcacgtaggtca

SEQ ID NO: 286805 - DNA, 886 bp, Cannabis indica
aattacttaccatatcaattatatactcattaattacatgtcaccattgtataattataaaattaaaaaaattataaacaagtaaccaattagtattatgttaatttaaatatcatcagttatcataaaaaactccgacatcacaatattttttattagcatcatcagcaactgaaagtttttttttttaatttatcaataaaaatagcatattaataaaagaaatgaatcattttcatgttgtgtgggaaagtaacttcatagttccttctaattattatttttggtatcaaaagaaactaaatagttacttttaattatggtgacgatgagcaaatatatatttttctgcttttcatttagttaaccaaaaagtaaccaaattcgtaaagttattttctgaccatatcgttgcttgcttaagttaaaaaaattatcatcgtgatctactctttaatgtgatcgttttaagatgtgggaacatatattttttccttatttcaaaaataaaataaactattgaggtacctatgataccaattatatactgattagttaccattaaattattttaattgtttaaagaaaatttaatttgtaattagcttctaccctttctacaataaaataaacttggaggttactcaaatgtattttaaataataagatattataatataacataaaaataactaatttattattaaaatgtatacaattaagttttgaaaaaaaaccaaaaaaagtatctcaaattatatactgattagttaccacactccaaatactatttagttaacaaatcaaatttactattaaaaataaaaatagcttatactaaataaaactatttcatatatatgcttacttgttatattatacgaaa

SEQ ID NO: 286806 - DNA, 639 bp, Cannabis indica
ttctcttacaccgttactactatttctgttaactcataaatatagacacgtggagggttcagatgcattatatttatttttattttattttaaaacttaatattcttaatataagaaatacttgttaccaaaaaaaaaaaaaaaccaagttctcataacaattttcacatgatattgacacttcaattcgataatcatgttccatatactgcactgaatcactcaactattgtaatttagtatttcatatcttcttttttttttgtttaaacaagtcatttagtttttgatattaagaatattaaattttaaaataaataaataaataaatgtaatatattggagccctccacgtgtctatatttatgataagttaacggaagtggtagtaacggtgtaagagaattgtaacattaagtatttttgcctccaaaaataaagattaggtatttaagtgtataaaatctgaaacattaaatatttatgccgcaatttgttgggttttatgccctaaaaaaaactccatttcaatgtaatccattttatttaacatcaatacagaaacagaagcatttttttcattcatttgtgtaagttttggttcatgttatcaatagtttgtctatttgatttataaat

SEQ ID NO: 286807 - DNA, 813 bp, Cannabis indica
ctcatcagaacttttgcttgcaacagaatctttttcttcgtcactatcgctccaggtggcaacaagggctttcttctttttgagagtgttggcacactcggcctgaatgtgtccgaacccatcacattctctacactgaatgcccatgctcttattgtcactgggttgctgaccatgccagaagttcccaaaggatttcttttgggaacattttccttaccctcagaacacaatttcttgtacttctttttcaagaattttgcatagttcttggtcagcaaatctacagcttcatctgagaaaccagcagacacatctgggatagacttcttttcttctttgtgaatgaacgcaatactgttgtcccctttttctttgttcacatccttcttctttttttctttcttccaccttgttaaggacatttcataattctgcaaggatccaatcagttcatcaagatccagttcctccacgtttctcatttcttcaatggaggttactttagacataaatctcctaggtagaactccaagaactttacgaaccaactttgcatttgaataagtctttcccaaagcataagactcatttgatatgtcacacaatttggcatggaactcagccaccgtttcttcttcctccattgataaatcttcaaacgcttttgccaaagcacgaagacgggatttctttactgcatctgttccttcatttttaattcgtagtttttcccaagcctctttggccatctcacagttcgcaatgaccttcaattgatttgtggacactgcattgaatagagcatgcatg

SEQ ID NO: 286808 - DNA, 508 bp, Cannabis indica
gaatattggaactttaacctttttgccctgtacataatgaaataccattcagccttgagcccgaatctttaatcaaaattacattgaaaggcactcatcaatggaaactagttctagaaagaaagtgctagcagcagcaataacatttaaaattgactcccattcctatggcacattatcttgcaatcataaactgtacccaagctggatcgataaaaaaaacatacttttcaagcacacatagttgatgatgaaacaaatctaaacaagaataagataacaaatatagtcagaacccagatgaagtacaatattgacaatacaagagaggatattattaagatacattgaaatacaagaagtataataaagtgtaatcattttaaattaatattataagtataataaaattttaattatgaaattatatgtgtataattttaaattattaagagttttgttataaaaattaaaataatttaagtgtaaaaaaaataaattgctaaaa

SEQ ID NO: 286809 - DNA, 656 bp, Cannabis indica
agttcctggtaaaataacttccaacactttcaacttagcctcgggcttaagttgaataagctcatcctccttatgagctcgttcaggccggccaacaccagacttcctcttcttccccaccacagacttaggagtaaagtcctcgggataaagcccgtacctcacaagattatcatcggaggtcaactggataatattcatgtctttccccagcaaccgggaaagtttttgagctctatccctaagagcaagagtgagaggaggacggtgatatgtcgaaatctactgaaactgagttcgggtaatgctcggatccttcaccatgaagtactcatcaataaaacgccttattttgctaatggccttgtcatccgtgccggttaaccacttgaagccttactgagagaaatagaagtaccccgacctaccttgtttgggggtggacttcagatcaaagaaccaggcaacctcgtggggagaaggaataccccatccttgggaagcgtagaggacgaagagggcggacaaatacttaatgcccttaggagtaggaatggcaaattggggttttttcgcggatcggatcggggccccgacctgatggggtagtcccgccccggtagaatcgaatcgatattcgggtctttgccccgccc

SEQ ID NO: 286810 - DNA, 430 bp, Cannabis indica
acctctcgaacatgtccattcatttcgaataagtttacttgagacaccctaaaccctccttgattttaagaccattttgtcacatggctaattgtgaggttgccacgtatattaggaaaatagaagggtaacattgttaattttgatactttgtgggtaaattaataaatatatttaaattatattttaacttataattattaaattaaaaatagtatttaaaataaatttaaattgaattaataaatgaattgaaaaaataaataaatttattaagtcattatattttggtttgaaataagatgaaaaaattatgtgtgaggttcacaagcatatttcgataagttacataaaattgcttaatttttttttacttttattttgattaattaatttaaaggtttaaattaaaaaataataaaatattgtt

SEQ ID NO: 286811 - DNA, 595 bp, Cannabis indica
aagccaatgtagtggctgatgccctaagtaggaagggtcgtgggcaggtaactagtatgattcagatttcacctcaattagcagaagacatggtcagatcaagcatcgagtttgttgtaggcaaacttcataacttgacgatgcaatctgatctgttagaacaaattaaagttgctcagttaaatgatccagagttagtgaaaatcagagaagaggtttcagctagttaagccagagattttacaatgtcaaattgttggatgctattattcaagaccagggttttgtgttctaagtagtgcagaacttagaattgaaattcttgaagaggctcataccactccatattccttgcatctggtggagcagaatgaagaagaatgtggtagaattcgtatcgcgatgcctaacctatcagcagatcaaggttgaacatcagagaccggcaggtttgttacagcctttaacactacctaagtggaagtgggaagatatcacaatggactttgtggttgggtgacctggaaccacgagtttatttgattcaatttggttgtggtagatcgattcaggaagtctgcacattttctaccag

SEQ ID NO: 286812 - DNA, 551 bp, Cannabis indica
aagcaaaaaagatagatatttactattttcaaattcaaattacactaatatcatgaattaattaaaaaaaattaattaatttaattatgatatttagaattgaaataggaatagtaaatatctaaatacaaaactacacaaaaaatcggaagttaaatccatgaaatagcatgaaaaatcgaagaaaaacgaaaaattgcgagctgtacggacagtatgctgtgcatactgcccgcgcgcgcgaggagggagtgcactgccgagaaactacggcgcaggggaggagctgcagcatttacacacgcggagaaggggtttcaaacacccatgtgcgtgttgctcagacaagatcttgtccgaacacgcatatgaccgaggatcactcagttccgcgcgcgcgagggtgagtgcttcatcacgatattttacgaaacttaaataatatcataactaattcaaattaaatcgaaattgagttctgtaaaaaagtaattgcttaattttttccatactatccaataaaaataattccagaaacagaatttcaatta

SEQ ID NO: 286813 - DNA, 738 bp, Cannabis indica
ctagttccatttgcgattctgagttcgagtttgggtttgagttcaggtcggagttcaagtcctggtctgagtttgggttcgggtccaaatttaagtctatgtccagatcaggctccgggtgtgggttcgtgtcctggatcttggtctaggttgggtcccagtcctaggttccaatctcgatctgagtcttgattcagttctgggtctaagtccttggttctgatcctggtctgggttcgagtttgggtctgggcccgggtgtagcttttggtctgattctatgtgtgggtgtttgagttcgggtccgagtctgtgtccgggtttgtgtccatgtctggaccccgatctgggtctaggttcgggtctaggtccaagttcttgtcccgtgtgtgggtccaagttttggtctgggtcaggatctcggtccagatcttggtctagcatttcgattccagtctgggtcttggtccgagtccaggttcgtattcggatccctatctaagtttgggatcaggtcccaaatttaggtccatgtccgggactcagttccggtctgggtacacgaccgtgtccgggcacgagttctagtttcagtttgggtctgaggctaggtctgtgtttagttctaggtttgggtccgggtcctggtcatggtccttgtcttgttctagagtcctggcttggcgattcttgttcacgttctaattttgggtcacaggtctaggtctgggttttggt

SEQ ID NO: 286814 - DNA, 558 bp, Cannabis indica
ccggatccccacccaaacctggactcatgacccgaacctgaactcagacacaaacatggaaccagactagggacatagaaccaaggtcgggaccaagaaccgcaccccagactcgatcccgaacccaaactctgaaatgggacatgggacctgaaccagaacttgaccgagacccgtgacagtgatccagatcttgactcgagatttgggtaacggggcttggaacagaccagttgtcggtgtctagatctgggactcagacaaggaccagaaacaagacgaagaaccaaaccgaaacccagacctagacttgggacccaaaattagaacttgaacaagaattgccgaacccggacccagacctagacctagaaccgaacacacacctagcccgagacccaaattgagactggaactcatgcccggacacggtcgtgtacccagaccgaaacttagacccggacctggacctaaatttgggacccgatccctaacacagacttggacctagatagggatccggatacaaacctggactcggaccaagacccagactgg

SEQ ID NO: 286815 - DNA, 527 bp, Cannabis indica
tgatacgtacattttgggagcatggtagtacaattgagtgggagcgctaagcatagatatggaatctatagcttctataggtatttagaagtgaaacgatgatttccttcgagcttgctaaatagagataaatgatagagcgctcagtttaatgactatattagttcactataatatcatttataggtgggcaagagatttcctttgcaatgtagatcatctataaaggatcattgattattgggattataacaatggataattaatagcgtatttgcaatgtagatcatctataaaggatcattgattattgggattataacaatgaataattaatagcgtatctatatcgtggaacatatagagagttctatatgactgagagtgcaattccaagttctatgcgtggatgcaaaaaggaattaataagtcagtgaacttacttggtaaattctaggactgcttagtagaagctcggttatataggcccatggtccccatactagttgatgttggaaattatttta

SEQ ID NO: 286816 - DNA, 672 bp, Cannabis indica
ataatattttcaaattcataaattggttattttggaatatttaattgtttataaattataagttagaaaaattatattttaggggatttttcaatattatacctaaaattgattttatttacaaaaatacctttaagaaaattatttgcacaaataccgttgtgccaggtcagcatacatactgaaattcaaaataattaccgaaaatagaaaaagtagaaaaatctcgtttccagaaattttttgctttttgggagttttgaaaaaaacaactatttaattgcttttgatgtgaataaggtatcaattggttacttttcaattaaaatatatatttcagaatattacacatatataaataataaaataaccattcggtctccaaaaaggacgattaatattaaatgaaacttttttgtttcttttttatatttttaggctatattatgttattttattgtttaagatacaatgaggttacctttttttttttgtaataaagagggtagaaatttattcaacaagaaaaattatcctctcttacaatcgaaagcaaatcaggaggagcagaaagctcatccaaaatacaacctgacataaaacaagacttccttcgcaatgcaatgagcagccctactttgtcagatcgtttaactaaaaacgaaataaaaa

SEQ ID NO: 286817 - DNA, 647 bp, Cannabis indica
tgaaatgagatgatcaatttcaagtgtaatccctcaagttacaaatactatctaaatattcgaatcaatttgattacactttagattttctttttgaaagggattagactttagatttggagctaggtttattattaaacaaaagaaataaagaaataccttaatttgacttataagataggaaatcccataacataatatcattgaattctaataataattttgtggggaacataatactactatataattagatcttattacaaattttataagtttttatagtgtaaaattatatatttttttcagaaaagttattttatggaaaaaatttaagaaaaatttaaaaaaagttatcatgtaactttaaggtaactagagaggtaaccaattaccttatactagttttttttttttgtttcaaattttttaatatttatttagtttttgtcataaaataatttttttgagaaaaaaaataataattttgcaaacttatatcttaataaccgtaaaatgaaaattctccataataaaaggaatttttacaaaaatactaaattttgagtcaaagtttacaattttactgtcacacgaaattttttacaaaaatactattttttataaaacaaccgtaaaacaataaa

SEQ ID NO: 286818 - DNA, 644 bp, Cannabis indica
atggtcggtcctaggtataggtaggctaaactcgcgcttagagtctacttattttaaaaacttaaataaaaaaatacattttaaaaaatatatattttttaataatttttaaaaatatcatttatctttataataaagacctatttttttttctttttatctaggaccgaccctaattacaagttggaaggagctatacacttcgccatctcacagtactaattcacacgtaacgatacttattaattagtaactattttataatcaaccattattgatacatgcacgtgtgtgtatatatattaaattagtaatgcacgtgtgtgtatataaactaaattagtaattatttcgtcaaaccataacaaactaagatttttttttttgaaaaaattcaactacaactaaaaaacgtaccttcttctttgtattatattttgttttactatccttttattagctatattttagttgaagctttttttttttgtaagaaattacacttattatgagattttaaaagtttttaattgataaataatgacacatttaagtttgaccaatttatatgatattttttttgtttttaaggttctttttattggtatttgatatgccatatatatatatatataattaggttt

SEQ ID NO: 286819 - DNA, 696 bp, Cannabis indica
aaagagttttatttagggcataaaactcaacattttccaagatcgcaactcctctaaccaacttgactcgaaagacgcagaagtttgtctggtcagaaaagtgtgagggtagcttccaaacacttaaggacaaactaataacagcccctgtattatgtgttcccaataacaaggataagtttgtggtgtactgcgatgcatcaaaacaagggctgggatgcgtgctgatgcaaaatgacaaagtagtagcgtatgcctcaagacaacttaaggagtatgaacaaaggtacccaacacacgatctggagttggcagcagtagtttttgcgctaaaaatatggaggcactatctctacggggagaaatgtgaaatttataccgaccacaagagcctgaagtacttctttacgcaaaaggaactcaacatgaggcagaggcgatggctagagcttgttaaggactatgattgtgaaatccactaccatccggggaaggccaacgtagtagcagacgcgctaagtagacgcagttatgccagcttggcaatactagcaaaaatagaaatgccactacaacaagaactccaaagaagtcatataaatatcattactaaaaaagtagacaaacctaaccattcgcctaaacactgctacaagaacataagatgcacagattgttgatgagttcttacagaag

SEQ ID NO: 286820 - DNA, 804 bp, Cannabis indica
aattattattttgcaacaaccgcttgacctattttcctcttttataatttttttaaaatattatgtgaattttccacttcgatgcaatctcctacatctctaccacaaacccatttctctattcaaccagctatagttaaatttttcattgatttttaataatttgcttgctatttttctactgttatgcttatttgtgaaaaagaaacaacaattttaattagctggtaatctactttgataattttttttttacaatttttagattaatgaagatgatttcaacgaggagtgaaaatagttaacaattattgattttatagttattacattttttacttaattttcattttttaaaagaaaaaaaaataacttgaaccaatcttggactgacacactaatttagctcttaaaggtgttaaaaaataagattgagcataaaattacttcttctttttttttcttttgaataaaagtgttctttattaacttgagcaatcactcattaggatagacatcaaatccataggaacactgttaatagggaacatacgttcaactaaagaaatagaatgccgggcaataaaatgcgcggtacgattcgcagaacgcttaacaaaaataacgaaatatttaacaaacttttgagcaacttcttgcactcctccacaaccaatctgaaaccagaaaacaaatctttctggacttctaattgcttcgacacaaaccagactgtctgtctcaatggctgcccctatgtaatgttgcacttgagccaacttaaagcctctctaatgcccataa

SEQ ID NO: 286821 - DNA, 696 bp, Cannabis indica
tgcatctatcaaacttcatggagttatgtcagactttcaaagtcaatggggttagtgatgacgtcatctgtttgagactgtttccattctcacttagggaaagagccaagagctggttaatctccttgccaccaaattctatagcaacatggacagacttagcaacaaatttctgtctaaattctttcctccaacaaagtctgctaaaatatggggagaaatcaacaaattttgtcagttagataatgaatctctccatgagtcctgggagaggtttaaggacctcatcagaaaatgtcctcatcatggtattgagaagtggatgctagttcacaatttttataatgggttggttggtaacactagaacactcatagatgctgcagctggtgcagcattcatgaggaagagtgcaaatgaagcctatgatttgttaggggagatggccctgaataatcaacagtgaccaaccgaaagaaatcagacaaagaaggtggctggtatgcttgaggtagatgccattataaagctgacaacctaggtagaggccctgacaaaactgatagctgttcaagtaaaacaggttcaagttgtttgtgagctttgtggaggccctcacccctatgaggaatgtccggtggatgtgaacagcttaccaatggatcaagcaaaagctattggaaactatgcccaaaa

SEQ ID NO: 286822 - DNA, 817 bp, Cannabis indica
aaatggaactagaaccgaactaggactatgacaaggacctaaacccaaatcagaaccaatatcaaaaccgagatagagacctaaacccgaaatgagactaggactcgaacccgaacctagaacgagattcaaacccacacaataatcgggacctgaaccaagaatcaggatagggagttgggaaacagaactaggacatgaacctagtacccgacccagacccgtacttgaacctaggacccagctcgtgtcccggtatcagaaatggaactagacttggacccgagattaggatccggatatggacccagagcttggacaaaacttgtagtcggtgtcttgatttgggacacagccctggacccgaaccctgacaaggacctaaacccacacccggaccgaaacccagttccaaacctaaaacaggaagttgagcgggactggaactaggacttcgacttggaatcataactgaaattgaacctagatccagaaccataaccagacaaggacccgaactccaaatcagacctagacctgaattgggagctggacccggatcccaaccaaaacctggactcgagacccgaacccgaacctgaactcagacccaacatggaatcagactagggacacagacccagggtcggaacctaaaaccgcaccccagtctcgatctcgaacccaaactcagaaatgtgacctgtgacctgaaccagaacaagaacaagacccgagatagtgatccagattttgactccatattcaggtaacaaagcatagaacagaccagtagtcggtgtctagatctgggact

SEQ ID NO: 286823 - DNA, 493 bp, Cannabis indica
cctagatgtttttgcctggtcacatgcggatatggtcggaatcgacgcttctattatttcacacgacttgaatatcgatcctaacatccagccagttcagcaaaaacgaagactgctggataaagaacgagcagtagccctgaacgatgaagttgaaaagctgcgcaacaacaacttcataattgaagctttttacctggcttgggtcgcgaatcccgtactcgtgcccaagccgaacaagaaatggcaagtctgtattgatttcacagacctcaacaaagcatgccctaatgactgttttccacttccaaagatcgatcagctcatagacgcgacagccggacacaaaattttaagcttcatggacgctcattcgggctacaatcagatcaaaatgcatccgccagaccaagaacatacaagtttccgaacaaatatgggtctctactgctacaatattatgtcgtttggtctaaaaaacgctggagctacg

SEQ ID NO: 286824 - DNA, 751 bp, Cannabis indica
ggtccccaagtcgaggatccacatcttcatcctcgccttgggaagtttcctacttgggaatatttattcccttgtccgggctctggctggaggatacttccttcttagccttggccactgcaaggttgtaacattcccgagcagattgctggttccctctaagacaccctaccctgtttttggttggaaacttcaggcacgagtggaatattgatgtgacagcttttaagtcatacaaggctagtcggcctagcattacgttaaaggctgaaggaacatccaatatcaggaattgtaccatgatagttatgctcgttggagtttgtccaactgtgaggggtagccagattcgtcccagaggcgcaactccttggccggagaaaccatagacgagctgaaagcatggagttaaatccttgagctggagccccatcttctcgtaagcagttttaaacaaaatatttgaagaagccccattatcaatcatggttctagacaccattttgtttgctatctggacttccacgactagcgggtcgttgtgcggaaatcttatctggacagcatcttcatcgctaaatgttatggtttgctctcctggtcgtggaactttgggcttcctttcttccacggccaggatgacttcttcttgctcgtattgagctgtgcgggcatatcgttctcgagctttgcccgtgtctccaccgatgtgcgggcctccatgatgacttacaagtgtccatctatcggt

SEQ ID NO: 286825 - DNA, 439 bp, Cannabis indica
attcttgattcttctctcaatgaaagcatcaaaatattgacatcgcttttagccaacgataatgagtctatttgataagcgataaatgatttataataacagatatatgatatagcaataaaaggacacaggaattttatagaggttcagcctcgagcagtttggtaatagcctaatcctcgttatttgtattgacttaagattaaggagaaagattccttttgttatagctcttacaacagtatctttgaatatataattcttagttaataatatagtcttagcttaactgcttttcgaccgatcccctgcccagtgaacatacatcactatttataggggtaggaggcttggggaggaagagtattcccactcgttacaatgcgtataagtagaaagatcgtgggatcaatgctgaatacaaggatcgtgggattga

SEQ ID NO: 286826 - DNA, 522 bp, Cannabis indica
aatttatattagtttatatatatgtgtatattatttgttattataataaatactataataaataattaaaacttatagctttttgatattgtatgtaacggttggggtttgcacgtgcgacgatgtcagtcatgtatttcaaaacataaaaaccacattcttagtttttaggttgtcttagacaatttgctagtgaaattccttgtcacgggccaagatacttatgtgtttcccctatatatccatatgcactgtttgaaaaattatattagcatttcaattcattagttaattaaaatttgttacataaatattcattaaattattacctttccaatatttgagtaatttgttcggaaacttggtggccacgtatagggtctaaatggacaattttctttggcgtaacgacctgtagcatccaatgcgcactagaaaattatattggactataagtaagatagtataaaaataatttaagtcataatatagaaatgaacaattagcactaaagaattaaat

SEQ ID NO: 286827 - DNA, 461 bp, Cannabis indica
ggcttgctgcatcatcagcttggacattagcatacaccggagtaggaacaaatatcgcttccttgctcttgttcttctttctccacctgtgggcaatctttcttaaaatgcccaaccatgcgacattgaaacatacttttcggttgcattctccgggatggtgtttcatgcaacgtgggcactcagggtaagaataaccctggcgtcatcctttgcctcgaaaccttcagaaccgcttgttctgtcttaaacccaccactgatgacgtaggtttcctcttccgctcaatcatggagctcctgccacttccaccataatctgaaattagggaggtgatattctgaccctctgccataatctcgtgaggtctcagaataatttatcagggctttcagcccaaaagtgttctccatatttgaatctccttgaaagactgaaggttcatgcatccaaatctttcc

SEQ ID NO: 286828 - DNA, 622 bp, Cannabis indica
ctttttaagcggtacacgggtactcgcaatttgtacttagacaaatttatatttattgcccttttgaacaacatatatcccttcggggatatttacttatgttattatataatattatcgcagtacacgggtactcgcattttttgttaatcatctcgattgtggtttaattacagcttggtgtaataaatactaaagtagaaaaattttaaaagcttgagaaaattccataactctttataagaaatagattaatcaatagtacaaagtgagtgggttacataccccctatacttagattttttatgtagataaattgactaagtataaatacataatgagtacaaccgatacaatgtgagtactattgataataaaatttcaagctttcgccattccaagctcttcggattacagttccatcgagttcttcaagtcgatatcttgcattaccaaccttctcggcgataaggtatggtccttcccaattatctccgaaaaccccatgcgctgggtttttcgtgtttggtcattacttttcgtaagaaccaaatctcctactcgcagaattctctctttgaccttagagttgaaataccgcgcggttcgctgctgataagcc

SEQ ID NO: 286829 - DNA, 123 bp, Cannabis indica
attacaaaacagcactgttgtcccaaggatcgtacgctccaagcctaaccgccccgacatgtacaatcttcaccggctcgctctcacggttcttcagctttagccttgcccttacctacacat

SEQ ID NO: 286830 - DNA, 629 bp, Cannabis indica
catgcatgccaaaatatagtgttcactttgtgaccacttttctccttaagtacttaagctttgaaaattcaatcataaaagattaattttcacacaactcaaattctcaataattttgataccaaacatatcaaaaatacaccaatttagacaccaaacatgtctaaattctcatattttatttttagacaccaagtatgtctaaactttctcatattggagtcacactttcacatttcattatcaagacaatatcttgattttaaaatatagaagaccacgttgtccttataatttttcttaaatttaatttccttcttgaaattatttttaccaaaaatttgacaccaaatatgtcaatattttcacttatgcacataaccaaacttgatttagaatttgaattcaaaatcaaataaattaatcaacaatgtctcaacacattttgattaaatttgtggctcacccccacatttttaccataaagtgtatataaaatatcacttttgtgtatttcctcttgaaatgactttttaaaggcctcttaaaaaataccatttgacatttttagttttctcacaaaactaaaaaccaaactcacattactactcacaaaataatgtgattat

SEQ ID NO: 286831 - DNA, 616 bp, Cannabis indica
aatagatttgtcaataattcacatttgtttataatatatatattatataaacaaatgtacatgtgaataatagattgatacatatttgtttggagtgttgtgattaatggggcaatcgatttaattaaaaatgcatattgttagttgaagagtaacaatatgtattaaaaatgcatatatgtattaataatgtcaatttcactttgatgaataataatataatgcatgcatgcattatatgtgttgcttttatgtttacgtacctactaaatagttatatccaacttatcacatatttgtatgcatgtaactacttttatcttaaaaaataatggaatagtattcagttgagctggaattgtttgaagtttgggtagtaataattgttgggttttcgtttttatttatttatttatttatttctacttcttattaatttatggtaggtgccctataattctgtacaaacccaaaataccctctttttcttttctctttctttttaattatatagattaattagtatttttaatatatagattaattagtagtagtagtgttattataaatagaatgcttgtagaactcatcatacacatataatagtttacacaat

SEQ ID NO: 286832 - DNA, 548 bp, Cannabis indica
ggggctcctacccctcctgcatcaggctttagcaggggaggtagtggttcggccatggatcagaaaaggaaggcatccactgcaagcgatggcttgggtcagaacaagaggtttcgagggaaccacggtcgatgtagtcatcaggttagttctgagacccaatatacttacccagagtgccccagctgtaaaaggaaccatctgggggagtgtagaggacaagggtgcttccaatgtggcatgctagggcgttacaagagggattgccctcaactcagaagcgaagcaccaaaggctccggcgagacccactccagcaaggatgttcgccattactcaggctgatgcagaagccaacccttcagtggtgacaggtcagctctcggtcaacaactctttttacttgtttgactctagggccacacattcttatgtggcagccagaatctttagtaaattggatataccgcatgatagttatgaatcagagtttggaaccctattacctggcgaagagttagttatctccaaaaggtggattaggtctat

SEQ ID NO: 286833 - DNA, 673 bp, Cannabis indica
caatatgaagacactggaatttttatagaggttcggccccaacagttcggtaatagcctaatcctcattatttgtattaactcaagaacaaggagaaaggttccttttcttatagctcttacaacaatatctctgaatatgaattcttagacaatatctctcaagtaaaatctttttaccctttgcccagtgagcatacatcactatttatagggctgtgggcttggagaggaagtatttcccttctcgttacaatggatataagcagagagattgcataataaatacagaatacacagttcgtgggatttggacagcttgccatatctctgcaatctgatccccaagctatatggatttctttaatgactcatgatgcgaaagctgaattcgctaagtgttggtcacgctgtgcggattgctgatcgctttgctttgagcatgcatatgaggtatcctgttcagactatatcctgtgagcagatactcagagtcgattccacgtgtcaccatcatgtgaggccacgtcagagtgcaaaaattgggataacattttccccccaagtctttacgggactttcgaagttgcgtgtagacttcatccgacctatctttgcgtttgaatgggtgacacgtgtcaagcgcgtctgttcgcgactggatgtgaggctga

SEQ ID NO: 286834 - DNA, 593 bp, Cannabis indica
ttactttgtaaacaagtagttagctcatgattttccattatatcttcctttgtccacatgggagctttgaacttggtacaaacttcaaaagaggagaacgttgagaaggttgcatgacgagaatgagcatgttcttcagttctgccttgtcgactactgctagttccaggtgtagtgcgattttcactacgaggttgtcgttctcgctgtgtaccttggttactcggtacacactctaacctcaacgaaggtcccgctacggcttcatcgactgccaaatcatgttcatcgtccatattcaaatctacaataggatcgttattgtagaaggttgtatcgaactcttcaaactgatgaaatcctgtcgcttcttgttcttgctctacattggtcggaacctctacattggtcggaacctcctcattcacaccaatcccaacatctgtttcgggaacgcaagaccctaccacactccgagggagaggattagtaggcggcgtaggctccgaattcccaacttttctcaccttggtcacgaataatggcataaactctgtatttgacattgttgccctcatctctaagaacgttct

SEQ ID NO: 286835 - DNA, 567 bp, Cannabis indica
attccctttaccttgacacgtgtcctccagccgaatttcgagtataacaattatattagtctaacctaattaaaattaaattagcaacataattagttttaaaatatatgaaatttattttcattagattattttaaaattaattttagaaaaacacttagtttaatgagatatattctagatagttatttctagtagctaattatattttctaataattaattaattagaaaaatatatttaagttaaaaattaattattttaattaattttagatcaacttaaattagaatatttttcttagatattaaattagaataaataattaactttattttattcaaaatacttaattattgtttcttatatttaatacatttaattaaatagaaaatttgatatttaagtatattttatctagacactcaaatattatttatttttaggatatttaattagatagaaaattatatttaagttgtaaatttcaatttcaaaataacttaaattagaataattttaaaaatatattttattttattttattttattaatcatttctcacta

SEQ ID NO: 286836 - DNA, 467 bp, Cannabis indica
aaatgggatcccaaaatattttgtatgtaatattataagtatttaattaaatgagcaaaattttaattaatcacgatttttattaacctcgttgattaacaacgagctgcacagtacgtttaaaatcacgttaacacgcctatgctagttagggtgttacatatacatattaatttatattttattataaattattgtacttattagattttttttatgaaccaaacagttgtattgctcaaaaactgattttattataaagaaaacaaatctaaaaaatacataaaatataatttttagaaaataaaatttaaaaagaatcatcaacaagcttattaaaataaataatttttgaaagtaacatattaaaaaaatatctttagaagaatataaaaaagatataaaaaaaatactaattaagtaattaaagtgtacttaaaaataagataaaataactattaaattta

SEQ ID NO: 286837 - DNA, 722 bp, Cannabis indica
gcgagatactgcgagtatgacctaagtctgatcgcataactataactcgtattatgcgagataggagaatggatctaactcgcatatatcaggatatgtgcgagtatcctctctatattcctgcgtaagcatagaggatcgattctttataatgcgagttggtcaacagccttgataagccgatatagactcgcatgtctaggttctatcagctcgtcatacgatgtccaaagaggcgactaaatgagaacgcagacatcctaaacgcaattaagtgttaggcccgcgagcttaccattagaatatgaacagtcaactcgcatgttagagggcgcatacgttgctgaatttagtaactgctattcatttattgatgtttacgttattcagtttagttattgtaattcaatgtgtaaacggattgacaatgaatgcaatctttgtataactaattggacacctgctttgtatataaagtggtgatccgccgtgtaatgggacctacgaaaatcttgctacagtggactaagcagacactgatctgattgaaccactataatcctctgtcttcttgttatttccagttttctagttaagcactcatatttactagttcgagtactcgccattataggttgaatactcgcagttgttcttcaagaaatttcttcttgtcataaatattattacatatattttgtgttgctaattttgctcgacaa

SEQ ID NO: 286838 - DNA, 760 bp, Cannabis indica
tggccaaagtcgtataaggcggcctataggtcatcgtagcctggaaatgtgtgaggaataactcgacgaaggtttcccatgtcgatattgatgcctcaggcaattgggtaaaccactcgtgggcgttctcctcgagtgttgccgcaagaatgcggcattttgcaagctgcggtacctgatccacctccattatagtattgaatttttcaagataatctatagggttagaagtacctttatactttagggattcggatagacgaaaccccttgggaagttgggcttgtcgcacttctgtagtgaagggcgaggtaccatgcaacttgtatgtgggctttcgttgctgctcgagcattttcaaagcttgcagaagcatgctttggtaattccctccagtcgcaggagtcggggttgctgcgactgcgggagttgcaactacagcagcgagatttgctgggacagtgatcccagtggtcgctatcggcgcggtaggcgggttattgtaagtgttgacaccttgatcgtccgcatggggatcacggagtgtctctgcattatgaggggcgcaagaacgcgctctaagaactgcgttgaggtgatcacgcagatcaccttgatgtaccttgtaatgtcctccctgttgcgtctgtacagagccggaccttgtatatctacttggtgtacgaccatgcgatgacgaagaggctgattctgcgtcgttgtctcttgatggtcgactgcgaggattgcgtcgttcagg

SEQ ID NO: 286839 - DNA, 545 bp, Cannabis indica
cacaaaacccaacaaactcccaacttgcactaatataaaacaaaaagtgcatttcaaataatctcaacaccttgatatccagatcaagtgtagtatgtagtatactctctcgtaataggatctgacaggttgtattcaatacaacctttcctccaccattacatttccttaatcacaaaatacgttgaaatagtggaattacctctctatatgttggaacaaaatgccaaaaatgtatagaactttccttagactgaataagtatatttcctgcaactttcacattcagtgtttctggtagacttagagacttcagataggcttttacacttctccaaaatcactattccacccccacgagtaatcaccatctcattagcagactttctagcactaaggcaagtctagaaatctgatttggtttagtccaagagtattaaatacacccttattgactaacatatatttcctcttcttaatcttaaaacagcaggtgtctggtctaaggcatactaaagcatatctgagacctctcactgttgatt

SEQ ID NO: 286840 - DNA, 721 bp, Cannabis indica
atatcatttttgtttaatccccatttaggtatgagatgagatttaacatgaaaactggtgtagcttcacaaagacaactttcagcatcagcggtagattttcctaaggtgaatgagagctatattggcaggtataaatatatatttatacgtatatatgtatatttgtatttaatatatttatattttattaggaaagttattggacctaactttagaaaaaaaaaaaatcgggataagttgaaaaatatctcttttttgtatccatcaatcaaaaatacacatattatattttattaaaatataccattttttagagtgaattacccaatatactatcactctctacttaagtctagcatataatttacattaacttaaggggtctaatgggaacatcatctataatagtaggtatatcttaaagaatatgaaaataaagataaaaattaaaacaaataaaataaagtgggtatacaatgtaattttcttcaaaaaactcatcctttaaaagaaatttttgcataatagacaaaaaattacaaaaaaaaaataaaaaatacattagtgtggagaaaattttcatttttacagtttgaacttttttatttacaaaagtacggatttagtaaattgttgtcgtgaggttgattttctcgttgttcttagttattttatagtttatttatatttgttgttgaggttgatttctcgttattttt

SEQ ID NO: 286841 - DNA, 686 bp, Cannabis indica
aaagatggtttttatggattccgggcccaccctgccaatgatggggtggtcccttataataggcaaactcatgttaaggagtatcgccaccgtttcttcttctcctccgggttccgagcagtggagcacccggagcttctcacggagtgggtcaggattcctccctatgagcggaccgcgcctactcaggtctttctccagagggcccaggtctttgcaacttatgaccgggcggaacttgacgtcgggggcctggtcacgacggagaattgccggaaggccaagctcatcttgccgcaccaatcagtggaggactctaacctttctaaggttatttgcccgaatgtgagggtgcctgccgcggagaagaccttccgggacgaaatcatcgccactgccgagaagaagtaccaggaatatctctaccggaaggctcaggagaaagcttactccaaggctcaagcagcttccgggaggccacttcgcgtggggagcccagtcgagaggagaagccaggcgatcgctgggaagccccttcgcattggggactcggctgagagaagggcttccaggccaaagccttcggctcaggagccgaacactggggctcctggcgccagcacttccggctccggtaagtctcctttagcagtacattacgttccttctgttggcgaatatgccag

SEQ ID NO: 286842 - DNA, 450 bp, Cannabis indica
gatcctcgtaaaataatttccaacactaattaggtactatggaaggttttgttgcatttggtggagaattgagcaaagaatgaaaggttttgggaaaactagccggtttgcaaagcctctaaaaccagctagctggttttggcagggttccccaggcctttcattttcctaattttcatctttgcagtgccttggttgggtgtttccccgtttccagagttagaataacctatagaaagtataacagaacctagggttaagattttgcgtttcctgggattagggttttaatcatgtaacttacccggtttcataatgtgattagggcatccatctagcacgagactttccgttcaggtcggtcagcacacttgaattcggaaagaaggtaagaactgtatataatgtgtgatatgaatatctgaatgtatgtatatgttatgtgtacat

SEQ ID NO: 286843 - DNA, 603 bp, Cannabis indica
tatactctggaatttgaccgattatccaaatttgctggtgatttggtgcctaccgattttaccagaaaacaaaagtatgttcgaggactgaatgctacaatcagtcgagacttgaaaattaccacatcccatgacaccctgtataagagggtggtagatttggccttaattgctgaagaggctgagcagcaagtgatgaaagagcaggctgtaaaggatgccgccatggcatcaaaccctcctgctggtggtaatttcagtaaggggatcgacagtagcaaccctgagcacaagcggaaggctgaagcttccggagcttcaggaggtaatagaaagtttcggggaaacagaggtggccgtcaaggccgcgggtcctcattccggtcataccctgagtgccctaaatgtaagaagcatcatcctggtgagtgccgagccaaggcatgtttccagtgtggcgtggtgggccactttatcagggattgtccccaagctaagaaagaagagcctaagaagaatgttgctcagaacccggggcgacttttcactataactcaggcagatgctgatgctagtcagtcagttgtgacaggtcagttatct

SEQ ID NO: 286844 - DNA, 736 bp, Cannabis indica
gtcagatgcctattattgcaatctgggcttactaaaggattttggggagaagctgtgttaacagcagcctacctggtgaacagaagtccatccagtgccattgaattcaagacaccagaggagatctggtcaggtaagcctcctgatctctcaaacttaagagtatttggatgtgcagcctatgcacatcagagtgtaggtaagttagagcctagagctctaaaatgtgtgttcctaggctatcctgaaggtactaaaggctacagattatgggtaagagagaaacaaggttttaaaaccataaacagtagggatgttgtttttaaggaagatttattcccttgtattactaataataatgcaatatctagtcctattttagacactaaccctgcaggcacatctgtggacatgcaaacaaggaacactcaacctaatactgttcaggtggaaccagaacaggtggaaaatactcagggagatgaaaacttggtaggaaatgaccaagttcaggatgacaacattcaggtggaacctattactgaagaaggacaagaaaatgaggaaatccaagactaccaactgaccagagatagaactagaagggttcctagacctacacagagattcagcttcacagcttgggaagaagtgctagcctatgcattcttttgtgctatgggagtggaaatgacagaacctaagtcctatgaagaagctatgactgataaagatg

SEQ ID NO: 286845 - DNA, 535 bp, Cannabis indica
gggttgtggtcaggggtatgggcgtctgatcataacctgggatttatgtatgattatgatttatgcttttcttactgagtctgtcgactcacagtatgtttatgtttaggtaagggtaaggccaaggctgaggaaccatgaggacgagtcgatggtgattgtacatgtcagggcggttaggcctggagcgtacgatcctcgagacaacaacactttttgtaattagtcgtttggcgacaattattttgtaatagacagtaaactttttgtaaagtattttgtaaatgggatcccaaagtattttgtatgaaaatattatataagtttaattaaaagcaaaaattttaattaatcacgatttcaataaacctcgttgattagcaacgagctgcacagtacgtttaaaaatcacttaacatgcctatgctagttagggtgttacaatttggtatcagagccgccaggttgtctttcgaagatcgtcacgacatgtacaatcatcatcaacaattagctcgttctacggttcagtaag

SEQ ID NO: 286846 - DNA, 454 bp, Cannabis indica
aaaatagactgtttgaacattgttttctatattgtaaattattcgaaatttctcaaaattttgtaagttatcttaaatagttataacgtacgtaaatataaaaaagaattagactaaaaaaattttctgaatgccgaaataaattaaaagtgtattagtacatctctttttaggagtacattgtataatcacccaaaatatagaaatttttacaccaaaaatacaaattacacactttattacatataaacctacacacggtcaaatcaacttttttaccttttctcaatattttattacacatataccacatacacatcacatctatgcaccagtcacgtcaactcacctatcaaccatcatgcatccctcaatcacttccctctctctttttcttttgttttcctttgatttttttatttcatttcaattttttttttgaaataacaaataa

SEQ ID NO: 286847 - DNA, 817 bp, Cannabis indica
tttagttcatcgttttagaagttcaatattacgttgttaaatcaacatacttgtgagtagatctaagttcctggtaaaatatatttccaacaaatacatggtatggcaccacagtggtaaatcaaaagatgagggtgtgatgcgacaccctgtggatggtgcagcgtggaaggactttgatgccaaacaccctgattttgctagtgaacctcgaaatgttcgtctcggtttagctgctgatggctttaatccatttggcaatatgagccaagcttacagtatgtggcctgtagttttggcgaactataatcttccaccttggttatgtatgaaagataataattttatgttgaccattctaattcctggagataaatcacccggaatggacatagacatatttttaagacccttggtggatgagttgaaggagttgtgggttaacggagtagatacgagagattgtcgaaccaacactgtcttcaagttgcgtgcagctcttttgtggacagtgaatgattttcctgctcgtagttatttgtctggttggagtggtcagggatataaagcttgtcctacttgcaatgaagatacatcttctattcgagtaattggtaagacatcttacgtgggtcatagaagatttctgccaaataaccatcgaatgagaagggatactcaatttgacggacaaattgagagaagacctcctccaagacgttttacttgtgaagaagtattagaacaagtaaacaaactcccaccccacctccctggaaatcatgagctctttggtggtgtgaagcgtaggcgagtt

SEQ ID NO: 286848 - DNA, 446 bp, Cannabis indica
ccaactcatggcgaacagctgcagtctccgccctggccttctcagcttccttcttggccaagtctgcctccgccctcaaggtgtcggacagagccgtactcttggaagcagcagatttagcccgggagtaagcataacccagcttgaaaccagcctgcacaaaggagaaggtcagtgtatgaagctaagtatgaaaagctaaaagggaagtgtcaaaaagaaaagactaaccctggtaagctcttgtaagactccgcccaccaacacatccagagatgagtggtccgcaccagccagctgctcaccgacctcaggaaccagccggttcatgtgatgagccatcacctccttgcccttcttgacctcaggcaggatgggcatgggtagagttggtgcctgcacccgttcaggaatcctcctgaccagttcgtgttgggttttatgcc

SEQ ID NO: 286849 - DNA, 933 bp, Cannabis indica
gatcctggtactccgggttgttgatactcgcctctacctcaacccgcaaaaccctcctaagggcttccacctcggcatacccccgggagtactcgtccatggcatagttatgcttggctatccgaagctcttgcctcacctcatccccagggaccggagtaagcacgatgttgggaggagcaggattttcttccatgggggagaccccgccgtcaagaccatgggcaggagtgtcggctctccgaggcttcttgggctcgtcctgggcaatcatcttgcccttgcgcttacgaatcagagccacctcaggctcctcttcgccttcttcagcctcctccggaagggcccggagctctcccgcaccctcggcgacttcctcagaaaagccccattgctttccttggccttctcccggaagcacctcctcgtcgtccactaaatcaatagtgtcagggggagcgctagaagagaccttcagggaaggggctatgggggaagaggtaaaggccggaggagccacgggagtgtgaactccggcaagctgttccaagatggcatccatggagacacctgtttcacaaaaataagcaagtgttagatatccgtgggaaaccacttacacaagatacagcaaataagctactcctacccggacttcctaattcggccctagcaaagtcctgaactttaatgctggcagcatcatctccgagatagctgtccgaaggccggaaccagctggacgtaatgtaagctgaaggacctaagggaataggttccggagggccagagcccatccgggaccgacctgaaaaaaaccccctaagtttgaaaagtaaaattccttcaaacgatccccccgaccgggtagatggcatcctaaacctatgaagacgctcgtcgaatcctacaggcctacgactggcgtattcg

SEQ ID NO: 286850 - DNA, 480 bp, Cannabis indica
atttcaaatccagaggttaagcgtactctggcaactttacgtaaggcagagtttggttttttgggggtgatagtggaaaagttgacagataagccacccttactgccactctacagaaccgtacatgagattttcatctcatacggctcctcgttcaattcttttgaagtcattggatctttttcctcgttcgagaacctctcccttcttccacttcgttccgaagagtaactaggaccaattcagtcacgttttcattcattttgaatctgggctcttctacttcatttttatttactttaactttttttattttttttccctctcttttctttttttatttcttttttgatatttctttcttttcctatcattcctttaagttgccataggtttgatcctgtagaatctgactcattttctcattgtagcgaaaggtacgaaataaatcagattgatttttcgaatcaaaaaaaagta

SEQ ID NO: 286851 - DNA, 529 bp, Cannabis indica
ttaaggcgtcacatgtaaattgcaatacatgatagtaattatgtaacctttaaagaagaggcaattgtcgatcaagtaaatttttaaggcaacaataaccaacttaattgtttcaaatgggaagcagcaacatattccaaaagagtaagtatgaggcaacaatctatctagtaaatttttaaggtaacaaaaaccaacttaattatttaaaatagaaaccaacaacaaattctgaaagagtaactatggattctttaaagaggaggcaattatctttcaagtaaattttaaagtcatgaaaagttaattttaatacttcaaaaagcaaccgtcggtggatccaaaaccgtttggacaaacaatataaactctcacacagtggctaaaggcaacattcaaatatctttaaaattttggatcatctaagggaacattaacaaaagttaattttaacttttgaaaaagcaaccagcaacaaatttccaaacaataattattctttgtccttcgaaattgtttaaaaataaaa

SEQ ID NO: 286852 - DNA, 654 bp, Cannabis indica
aatcacattcctctgtgttgacaatactgtaattgtgaatgaatatatgttattgccttaactgattttgtgcatatattaaatatatatattaaaccataagcatgaaaaatacatgttaacgtaaaccacttcaaatctcttaaattgataactaatcaaattagattgtaatgagttttatttagggcacaaaaacccaacatgtcagtcatactttaaccataccgatgtgatactgtaaagtagtacggtactatcaaccataatatcagcctatactcgatacgctagtcatactctagtcgtactgatgtgatactgtcagatagtacaaaagccaacatacatatctaatgtaatctaacaggcttcctaacatgcacgctaaatatgtaaatacatatgcatactgttatactaatcttagctcgattccagattcaggtgtgtaggtaaacctcagtggaacaaactactcggcaaattacaggatcctatatcacatccatcacaacactgataagcgacacgctaaatcacttcccagggacttaaacttgaaaataaaagtttccatatcgatgaataacatggcaataccctaaattacataaaaattagaaaaactagggttcccaaattcgccccaac

SEQ ID NO: 286853 - DNA, 604 bp, Cannabis indica
ggtccccaagtcgaggatccacatcttcatcctcgccttgggaagtttcctacttgggaatatttattcccttgtccgggctctggctggaggatacttccttcttagccttggccactgcaaggttgtaacattcccgagcagattgctggttccctctaagacaccctaccccgtttttggttggaaacttcaggcacgagtggaatattgatgtgacagcttttaagtcatacaaggctggtcggcctagcattacgttaaaggctgaaggaacatccaatatcaggaattgtgccatgatagttatgctcgttggagcttgtccaactgtgaggggtaggcggatttgtcccagaggcgcaactccttggccggagaaaccatagacgggctgaaggcatggagttaaatccttgagctggagccccatcttctcgtaagcagtcttaaacaaaatatttgaagaagccccattatcgatcatggttctggacaccattttgtttgctatctggacttccacgactagcgggtcgttgtgcggaaatcttatctggacagcatcttcgtcgttgaatgttatggttggctctcctgctcg

SEQ ID NO: 286854 - DNA, 539 bp, Cannabis indica
acaacaacagagatactctttttttaattcctcaaactcaagtcgggagacattctcatgagcagatgatgaagaagcacccatcaagccaggttgaccaacagacttggaaccacctttaactttgaatttaacaacatccggagtagtgtcaccagagaaaaaatcattaaggctcaaactcactctctcaacagaagttggagagatgtttcataattttaactgcaacaacaacaaccaaataattatgcacatgaaactgaaaatataaaataacaacaaaaattgaaacatcaaatataacaaatgtatacaaaacaacattaaaacaacaatagaaatagtgtaaaaaacaacagaagtacctctttcaaagaccaattgaagacgagggtgttcatgacatcctttttcacctgaccctccttatccttaggtagtttaggccaattcagaatccttggaatgccaacatttgagtacaaagaaagtttcccaataacgtaaggacaacactcgaaaaaccagaattgaat

SEQ ID NO: 286855 - DNA, 445 bp, Cannabis indica
atcctggtttgggttcaagtttgggtgcaggtctaggtctagctttgtgtctgattctaggtgtgggtgtttgagttcgggtccaagtctgtgttcgggtttttgtccaggtctggaccccgatttgggtctaagttttggtccaggttcaagttcgggtcctgagtgcgggtccaagtttgggtctggttcaggatctcggtcctcatctaggtccagcatttcgatcccagactgggtctttgtccaagtccaggttcgtatccggatgcctatctaggtcaaagtctgtgtttgggatcgggtaccagatttaggtccaagtccgggtctcagttccggtctgggtacacgaccttgtctgggccggagttccagtctctgtttgggtctgaggctaggtctttgtttggttctacgtctgggtccgggtcctggtagcggt

SEQ ID NO: 286856 - DNA, 757 bp, Cannabis indica
ttcaagtttccaaatcaaaatgagcaaccatagccatgatgattcgcaaagaatctttggtagagacaggtgagaatgtttctttgtaatcaataccttctctctggctatatcctttagcaacaagtctagccttatactttactggttgcccacttgaatcatatttgatcttgtaaacccatttgcacccaatgggtctgcaacctttcggtagaacaactaagttccatactttgtttcgcgacatggaacttgactcatctgtcattgcattcaaccataacttagattgaggacttctcatggcttcttgataagtaactggttcagaagcgtctcccacaacataatcatgttcttgcaaatagacaaggtagtcatcatgaatagcaggtttgcgagctctctcagatcttctcaatacaacttcaccaccctcaatatcaggattttcatcttgcatatgattctgaggttcatcatgagcttctattggaatttgttcaatcacgggatcaatagtaggagcggaagcggaagcaacaggtacagggacataaatacgttcttccctgaacacaatttctcttgacccttgacttgaactaaattcatcttcaaaaaagacagctctatctgattctatcaccctggtggtgtgagaaggacaatagaatctagaacccctcgaaccaatagtgtagcctacaaaatagccactgatagtcttcggatcaagcttcttagattgtgg

SEQ ID NO: 286857 - DNA, 714 bp, Cannabis indica
aattggctttcgccttgataatatcctcaagaaaattgcgaccctacttccaggctcacagcattgaagttttgacgaacttccccttaagacaagttctagcgaaaccagaagcatcggggagattgttaaaatgggcgatggagttgagtcagttcgacatcaagtataaaccgagaactgcgatcaaggggcaagccttggcagattttatacttgaattccccagcaccgaggtggcagtcgtagaggacagaagtgacattgctatagcaggcagagaaacatggacattgtacgtcgatggagcctcaaatagcgaaggttctggtagtgggatcttgttaatcagtcccaataatttcaaggtacacgctgctttacgttttgagttttctgcatctaacaatgaagccgagtatgaggctttaatcgcaggattgaaacttgccctcgagatgaaagtcgagtatcttcaggcttttagcgactcccaaatcgtggtatgccaggtgaatggagaatacctagcaagaggcgggagattggttaaatacttagccattgttcgcgaaataatgcagaagttcaaaaatgtagtcgtgtctcgagtaccgcgtgctcaaaatgcccacgcagacgcattggcccgtttggcctcaactagagaagccgaattgctcgatgtgattccggtagacgtattggctcacc

SEQ ID NO: 286858 - DNA, 448 bp, Cannabis indica
cccatagtcattagataagaaagtgtttgtttaaacaaatacgattttcctaagaaaaatgactaagtctgaaaacaaagtagcaaataaaggagatattattttcttgattccaaaagtgttctatcatcttattcaacatatgatgatcccactgcctctgttgttgttgacacaaccaaaaaggacaataccatttagattcttagacaaaagtcactgtactttgtcgtagtgggagggtttcaaggaactcaccctgttatgacttggaagacacttgtgataaaaatccattgtgagtttaaacaggtaatggatcgtcagaataagaaactaagaagtaaagccaaaagaactatggttaaaaccattgaggtggaacaaccaaaagttttctattacaaggaaaagaaaggaaattcggttagtaagtctattcaatgga

SEQ ID NO: 286859 - DNA, 628 bp, Cannabis indica
gtaaagggttttatttagggcacaaaacccaacaatacctagcagtaacggagcatgccataagcgccgtactaatcagagaagaagatggcgtacaacatccagtctattacatcagtaaaagacccatcgaagccgaaggctgatacccgttgatagaaaagctcgcttactgcctcatcttagcaacaagaaagctaagaccttattttcaagctcatcctgttcgggtgtacaccgaccaaccactacggcaaatgctgcaaaagccagatgcctctgggagattactcaagtgggcagtggaattggggcagtacgaaatcaacttccaaccccgaacaactatcaaaggccaagccttggccgactttgtggtggaatgcacaggaaaaactgaaagcatcccagaagcctaatctcgagccaacaccacagccgaacagcacttagaacaagccgacctggaagcttcatgtggatggatcagccatagatcagctatccaacgcaggagttgcccttgtcacacctggggggcaacacctgtatgcagcagtcaaattcggattcaaagcctccaacaatgaggcctaatcgaagcgctaatcgctggactcaaactagc

SEQ ID NO: 286860 - DNA, 730 bp, Cannabis indica
aagcaactgcccaccgagaccttgaaaaactatataaagaggttccgagaggaggcctcaaaaactaagaaagttgatgacggacaacagcttgcgcttctccaagcaggcatccgtacagggactcccttctggaatgaactacaacaagagggggctgctagccttcaggacttccagaagagagtccaaaaatatatcaacctcgaagaagcccaaatagtggcctatggaggatactatcccaccgggatagcagggtacatgcccggagtaccgccctcgggtactgccccgaccgcggctccaccgataagcggcatacagttctctgccacccccgggtatagtcagggccaggccttggcgccagcatcatcccattttggaaacccctcagggatgaatggacaagctccttcgcactccgctccgaccgctagcctggcaggcccttcccagggttcgaggagtaaaagatcctccaaaggcagcacccggacgggggagaagcgccagaaaagggggtacactccccagtacacccagtacacggagctgacggactcccaagagcgtgtgtactttgctactaggcaaaatacgcactaccggagaccgcacccgttgtacaaagatagctcccggagagatccgagcaaaagatgcgagtaccacaacgacattggtcatagcaccaatgaatgcaagaatctcaaggacgagattg

SEQ ID NO: 286861 - DNA, 680 bp, Cannabis indica
ggtcagattcctatggccaacaccacttgtaaagttttgtttgattctggtgcaactcattcctttattgccatcacaattgttaatcatataaatgcactgagtgaattatttactgtggggtttgggaccatgttaccatctggggaggttgtaatctctagaaattggcttaggggtatacctatcaggatagatggtagagaattatttgtagacctgattgtattagattatttgattttgatgtaatcttgggcatggatttccttaccaaatatggagcatcaattgactgcaagcaaaagaaagttgatttcacaccagaagatggagagacattcgagttcagggggtagggaagaaattccgcacccctattattttggcaatgaaggttgggcaactattgcagcgtgggtgcttagggtatctagttaatgtggttgatgacactaagaaaattgaaagaaagccggaggaaacacgggtagtcgctgagtttcttgatgtatttccagaggagttacccgggttaccaccacacagagaaatcgaatttgtgatagaattagtgcccgggacggcaccagtttcccgtgcaccatatagaatggcaccatctgaattgaaagaactcaaaatacagttggaagaattgcttaaagttgggttatcag

SEQ ID NO: 286862 - DNA, 801 bp, Cannabis indica
gggctagttgtagtattttttaggtcttgaagttgcaagatcaaataaagggattttttgtgttcccagagaccatatgacttttacaatttaaattaattttaaatttttttaaaaaatttactaaaatatttcaaattactatttacaaaatataaatatactttttaaaggtaaatgttttaaataattattttacaaaatatcttaaattactatatatattgtcatatggccataaacccgtaataaattttaataattagataaatgatattttgttgttaaaataaaacaaatagagattaaaactatatgttcataagaaatgctaagcattgtaaaaggtgatatattgtaattcgtgcatttcattattgagtctcacacattttgatttaataaataataaaaaaaaaagacagctaagtaattataaagagctacattgttgttgtctcagcccttttcttcaagcattattagcacacattgggtgaagaatttgataagccccgagatcttccgatcaagaactcaacaaaacaatagcaataataggagtagaacaatagccaaaacagtagaaaatgtgtattgaatgtatgaaaaactcaattacaaagtaagggagcccttaggcccctttgaagcaattagagatttactcaaaacattgcataaccccccaactactcctaagtattctatatatattattgtaatctcactcaacactcttcttaatacaatgacccaattacccttttatttaaatatatgttagaacaccacactaat

SEQ ID NO: 286863 - DNA, 553 bp, Cannabis indica
tgaatagaaataatttgcaagcatatattataatttaagtataaacttgatcaacaatttaaagaaaattagtaaaattaatttaatttttttttgtattaattattataataatataattatttatcatatataacttaatatacaagataattatttataatataaataataaaaatattatttttgatatatattttgttttaattttataagtataattcacgtgcttactagtactacaaaacagtaaaaatagttcaaataaaaattctgagttcgtttgtaattatatcactacttgtttgagttattctaagtggttagacagtaatttttttaagactttcaggttgtttaattttaaagctcataatattactagccaagctgaaactttaaagggtaaatatcattttagaccctctgttttacaaaatttatcaattggaccctgtgttttgttaaatgacaaaatggatcctgtattttttaaaatactacaaataggaccctgaattgattttttgtcaaaataaagtttaattataat

SEQ ID NO: 286864 - DNA, 959 bp, Cannabis indica
aggtccttagaggaattgcaccaggcagacttggagtccagggttaacttagccgtggagatgaaggagctcaaatacttcagagatcaagccttaaagaaggctaaaagagatgagctcatctcccctgtttcctgcaagcgttgtatcaagcgctttgatgatggcgcctacatggcctggtcgacaaatggccagaacatcaagcttgacttctaccccaaacctgcggagatgattgccaaatttcgggagaagaagaagaaacttaacgccatgctcgaggcacgtattggtcctcgccttcctcctcgcattgattaggccgtttgaatccagctcacttcatcaagctttttcttatattttttttatttacagctatttttcttttatttaagacaatctttatcttaatagctgccttattttctaaggggagaaatgattaaggcctgtccccgggctctttgtatttatattttttttgacctgtcctcagggccaggatttttatatacatggtcttttttcgatgcatatttttcctttcggacctgccctttgggtcaggatattttactttcggcttgtttttcatctgtctgtgtggtatgctttaatacccccctaagtggcatgaaaactttatttttaaggcactcagttttatttaaaattcagaagttgcatacacttagacgatacaaatcctttaaacaaagcgtaagttacatatttggactattggtaatattttccagaggtgatcagcgttccaggcccttagcacaatggttccatccatcctttttagtcctgtaggttccggagctgatttcgtcctcgatttcatatggccttcccaatttggcccaagtaccccactccgggttctggtggctgggagactcgttcttaggaccgactatccccaagtacgtgaattttttgttttt

SEQ ID NO: 286865 - DNA, 735 bp, Cannabis indica
tcttttccgcttgagataatgcatcacctcaaacgaaatcataatattatcagttataagacgcccgggaatgaaagcactctgattctctgaaatgactgcaggaagaacatgcttcaaccgattagctagaaccttggagcaaaccttgtagaggacattacaaagagcaatcgggcgcatgtcacccatagtagtggcatttttcttcttaggaatcaacactaaattagtatgattaagaccagtaggcaactgtccaaataagaaaaagagcggacctgtttgatgacgtcattacccacaattgcccaacacttttgataaaaacctggagtcatgccatcgggtccaggggatttatctgggtgcatctgaaatagagcatctttcacctcctcatcagtcaaaggttgcaagagagagtcttctgagttgaagtcacagtagcagaaatcccatcaagaacatcatccatagtacagttggaactagtaaacagctggaagtaagaacacatgacatctgatagacccgattcccagtcaacccaacttccatcttcgcattggagtttatcaatagcattcatacggcgccgagagaagccgttgcatggaaaaatttgctatttttatccccctcctgaagccacaattgtttcgatcgttgacgccaaaacacctccttctgagtaagaacttcaaaaagttctgtctcagcttccttatattt

SEQ ID NO: 286866 - DNA, 568 bp, Cannabis indica
tctgataagaaaaacaacccgcacctgcagaagtatgtcaagaccaaccaaggtcaaaacaaccaggatctgctacctccaccagtagatggacacttgcaagtcattattggaggcccgcacatcgctggagatacgggcaaagctcgagagagatatgcccgaacagctcagtatgagcaagaagaagtcatcctggccgtggaagaaaggaagcccaaagttccacgagcagaagagccaaccataactttcaacgatgaagatgctgtcaagatcagatttccacacaacgacccgctggtcgtggaagtccagatagcaaacaaaatggtggctagaaccatgatcgataatggagcttcttcaaacattctgttcaagactgcttacgagaagatggggctccaactcaaggatctaactccatgcctccagcctgtctatggtttctccggtcaaggagttgcacctctaggccaaatccggctacccctcactgttggacaaactccaacgagcataactatcatggcacagttcctaatattggatgttccttcagctt

SEQ ID NO: 286867 - DNA, 531 bp, Cannabis indica
gtagagttaatttttttttaaaaaaaaatatatatcattgtttatatttaatgttaattctttaattttttttatatatataataatttattaaaaatactattattcttttggtcacatctctcatcttcttttctctttctctaaaagttcttaaaaaggatacaaaacggtaaactaaaagttttttgatattttttttaaaagaaaaatagaggttgaaatttaaaatttctctaatggaaaagtcgaagaacaatgcaaaagcttttttggtggatataacctgagaggagagaccgatgtacaaaagcttttttacattgttctttgacttcgccatgaaaaaaattatgagtctcaacatctgtttttttgtttaaaaaaaataaaatattaaaaaaaaactttttgagaagcaacttttaaaaacttttagagagagagagaggaagaagaagagagaagtgacgaaaagagataatgtttttgacaaataattataattaaaaaaataaataaagaaaataa

SEQ ID NO: 286868 - DNA, 515 bp, Cannabis indica
gggaattcctgaaccccatccggaattctggttgcacatctagaaatccggttcctcgcaggaaccactcaaaaattcataattccctcaaatcaaaaccaatttaaaccaaaccttccaaaccaattctaaataccccaaagaacatttctaaagcatcaacacagcccaaaaaacacagaatcgaaaatcaccattaaagctccaagctttgagttcaaaactcaaacttggttaaatctaactaacatgcattcaaaccagctcaaatcttcctaaatatgcatatcatcatctcagaaaacatcagcaagcaacaacaacaagtgcagtaacagattcttcaatttctttgaaaaacatagttttgagtaaaaatttcatatcttgataaaaccaactaatcaccaacacaatcatgcttgaatcaacattctagaatcatgctctaactacagaaatcaacaacaacatacaacagcaagaacaactacaaaactaagcatgcaaccaat

SEQ ID NO: 286869 - DNA, 761 bp, Cannabis indica
  modified_base (711)..(711): a, c, t, g, unknown or other
tgtgccatggggcaacacgccacattctcccccacttaattgttcggcgtcctcgaagaacctgctgcatgatcttcagtcttctgtataaactgctgcaagtcctccgccttttcccagctgatctcgtcatcagcaaggcccttccatttgaccaggtactctcttctcttctttttcttcacacgaacagttctttcgtcaaggatttcttctggttctctgctgctgcgtcgttgaatgctgatgtcgtccctggtagacttgttgcgcgctggatcttctggatcttcatgatacggcttgaggttgctgacgtgcagggccgggtgtatcttcatccatgaaggtagttcgactttgtaggatgctaggccaattttggagatgactggaacagggccctcgtatttgcgtacgagtctgatgtccttgtcccctcggaatctcaattgttctggccgcagtttggccaacactaagtcacctgtcttgaactccagcggtcggcatttctgatttgcccacttcttcatttttcgtgaagctttctctaaatatgcttgggcaatctctgtgttcatcttccagtcttttgtaaaattaaaggcatgcgaattccgtccgtggtattcatccactgtgtgggggtaacagtggttgctgtccgttcacaacttcagaagggctctgttgatgagaactctctgngagttgaaacaaaattgagctcatctagagtttgcggccaattcttctgg

SEQ ID NO: 286870 - DNA, 703 bp, Cannabis indica
accaattagggtatattcaacatattccagccagtatttcaacagaaaaaactcaaatgaagcaaattatgccattaaagacctaaacttgagtttcaaagctcaagcttgctcaactccacctccatagctcaaattcaataaccagaacttaaaatcaacttaaaattaacataaaatcagaaccctaagcatctctaaccctaacagcccctacttagcaaaatcactactcaaccaacactaaaattcaagaactagaagataaggatgctaaggcttaccttgggctgatttcccttgaaactccttgctaaaaacaccaagaatcaacaaccaattccttggttgagggttagttcgaaaaagagaagaaggaagagaggttatgttgatttttggcttaattttcttattttacttaatttctttctaaatgtaataagatggatttcccacataaatccttggctgaaactacatgctaggtgtcaccatacaagacagccacataactctaccctttggcattttactaaaatgccctttctccttaaaactagggtaattctaaagctaagggtaaaatggtcaaattccataaccccgcttaatcccgatattttatttcctctaaaatattttccactaagaaataaggttctaaacttacccatgtgatcaaactagccatccatcgcat

SEQ ID NO: 286871 - DNA, 525 bp, Cannabis indica
ctaggtccaatttcagttatgattcaaagtccaagtcctagttcgagtcccgagttaacttcttgttttggttccaatttagggtcacagggtacgggttcgggtcaacttttgggtttgggactgggttcaggtccgggtgtgggttctagtcctcttcagggtctgggtcttgggctgggtcccaaatccagacaccgactacaggttttgtccaagctctgggtccagatccggatcccaatctcgggtccgagtctgattcaatttctggtgccgtgtcacgagctgggtcctaggttcaagttcgggtctttgtctggtaataggtccatgtccttgttctgtttcccaggtccctatcctgattctcggtccaggtctccgttattgtgtgggttttggtcccggtctaggttcgggttccagtcctagtctcggttttggtttaggtctctgtctttgttttgatatgggctcgggttcgggtttagatcctggtcatggtcctaggcctagtcctag

SEQ ID NO: 286872 - DNA, 768 bp, Cannabis indica
atacctggtggaggtctgcatgttgacaatattgagcgccgttatgaattcggtggtgctggtggtggttgccgccgtcgcaagccttctcttgtcattgatctaatgggtgttcttatttgttgtcttcatcatttcccaactatacacagtaattgcagagaaactgagagagagaagaagaggaagagataaatatttgaaaggaaacttccagaaatatcaaaagaggattaatatattcaccttcaaaatattaggagaaagaattaaatagaatataatattagaaaataggaacacgtgagctgtgaatataatctaatattgactcttacactttttttaccttgaaaatcttaattgaaaatcttaatatttatttatattaaaagcattacattaaccaaaacgtgagctgtcaattgagtgttacactttttgagcttcaaaatatattggaaattatcaaaacatgagctgtcaattaaaagcattacattaaccaaaacgtgagctgtcaattgactgttacactttttgagcttaaaatggaagatatttaatatattaaaagcattacattaaccaaaacgtgagctgtcaattgactgttacactttttgagcttcaaaatatattggaaattaccaaaacatgagctgtcaattaagacagagaatcaaatagaggtgaaaaggcaaaattgttaatattgaatttcttaaagggtattcacatttacagggttcaacgagcaatcgatat

SEQ ID NO: 286873 - DNA, 787 bp, Cannabis indica
ataaaaagcatggcaataccccgaataacataaaaacgagaaaatccagggttcctgaaaatttcccaaccgacagaccggttgcacaaccggaattccggttctgggaaatcctgaaccctcatccggaattccggatgcacaaccggaattccggttcctcgcaggaaagattcaaaaattcataacttgctcaaatccaatccaattcaaacaaaaccttccagacctgttctatataccctaaagaacaagtctaaagcaacaaaaccatccagaaaccacagataccaaaaatgccatgtgagctccaagctttgagttcaaaactcaaacttggctaaagctcacctacaagcatttaaacttgatttaaactacataaacatgcatatagaaactgcagaaaacattctcaaactcatgcaacaatcacagcaaccaatttctcaacttttcatagaaattataatttttgaactaaaaagatccaaacttggttaaaccatctagcatgcttcaaacctactcaaatccatttaattcaagcatatacaatcacagaaaacaacctagaactacagcagcaacaacatctcaaagctaagcatgcaacctataaacatttctcaaaacttcaaaaaaacttaaagaaaagctaaggaaaacataccaacaacttgatcactaaaaccttgatgaatttagctagaatcaccaagaaaaagccaaagatccttgctgcacaaggaggccgaaagagagagagaggctagagaggaaatgg

SEQ ID NO: 286874 - DNA, 574 bp, Cannabis indica
ttactcataacgataatgaccatatcttttactcgataataatggagtcacaacgataataatcggttcatatcattaccctcgattataatcgagtcacaacgataattatcggttcatatcattaccctcgattataatcgagtctcaacgatgataatcgtttcttattatttctctcgatcataatcgagtcacgaccaatacataacgttaacctcgattaagattaaatcacaacaacatataccaagatttcaatcttaattgatattgtaacaatcataatattaaccttatacagtatttaatacttttcttaccttagttcagaactcaagcgtacgggccgacttgagtggaaaataagctaggcaatcccggtcctatgtcacaacaaccaaaactcaataaaaaccttaatcaaatttctgatactcgactcaaattctcacgatcaaatacaccctactttcccctggatcaaactagcttaaccatctctaaaacaccctgaatttcactccgaaagacaccccgaatcagatcgaacttgaggagaaaaatccaaaat

SEQ ID NO: 286875 - DNA, 515 bp, Cannabis indica
tatagtggcacttttggtgtgtcactataactctaaaaatattaataaaaaagaaaaaaaaaagaaaaataggatatagtgacactctttgtgtgtggctgttacctttttagtctggcaaaacctgacactatatccctacagtgacgcgcaaaaaacgagtgcaataggtttcagtgacacgtgtggagtgtcactaaaaactgcctttccagtcagcctcattagtgacacgcgttgaagtgtcactaaaagatttcagtgacacgtgtggagtgtcactaaaacccaattttatcttctcaaattgagaatccaaatgtttacttgaaaaaagactcaatagatttgaagagttaaataatctcttcgtttttcatggttgagaattcttacagtgaatctctcactataatttttcttaatgagagcactaatgatagagtagctattgtggacaatgtcccacatggaataaatggtagagaattgagctatatataagaacatgggct

SEQ ID NO: 286876 - DNA, 694 bp, Cannabis indica
catgacctagaacttgccgcagtagtgtttgctttaaagatttggcgacattatctctatggagagagatgtgaaatttacactgaccataagagtctcaaatatttctttactcagaaagatttgaatatgagacagaggcgttggttagagttggttaaggattatgattgtgaaattctttaccatcctgggaaagccaatgtagtggctgatgcactaagtagaaagggtcttgggcaagtagctagcatggttcaaatttcatcacagttagcagaagatatggtcagatcaagcatcgagtttgttgtaggcaaacttcataacatagcgctgtaatctgatctgttagaacgtattaaagctgctcagctaactgatccagagctagtaaaagtcagagaagaggttttagctggtcaagccaaagactttaccagatagtgggatgttgttgtttaagaccagagtctgtgttcctaatagtgtggaacttagaaatgaaattctcgaaaaggctcataccactccgtattccctgtatcctggcaccaccaagatgtatcaagatcttaaaccttacttctggtggagcagaatgaagaagaatgtggtagaattcgtatcgagatccttaacctgtcagcagatcaaggctaaatatcagagaccggcagggttgttgcagcct

SEQ ID NO: 286877 - DNA, 676 bp, Cannabis indica
ttgttgtcattgtttttcttttgttcttattgttttgttctttctgttttttcattactcgaggacgagcaatactctaagtttggggtgtgataactttatggtatagagttattttttatgctttaaagctgaaaatattgtgaggagagtagttaaaaatgtgtttggttgcttaattttaaagagtttttagtttaatttctagttaggaagctaacgtttgagtcttgtaataattattgtgttaagtgtgtttttttaatttaatgttgcttatttgttctgggaaagaagaattaacttgcgaggaaaaaggaaatgatgcaaaggaagaagtggaactaaagctgaaaactggacagaaatgctgaagaaatgctataacattctgggcagtttgggaagtgacgtggaaaaagtctaaaaaacgactttcagttatccacatcagaaaattcgtcccagtcactcaaaatgcaccagatgggagtgtggaaggaaagagactaaacctagtgggccaaagtggaaaaaaattgggcttctattttagggtgtgaattttgtaccctagaacccaacaactaaaagaggagaaaagaaagtacaccatcatcatcttcaccataacgtgagcagctgccatttttttttttttgtaaggaaggtatta

SEQ ID NO: 286878 - DNA, 563 bp, Cannabis indica
tttttcgattccgtaagtttgtacacctcacattttattttataaaactgctggaaaaagaatttttcaatttcgttgcataaaactcatttttggtacggttctagttttcttggcaattttcgaaaaacttaccgtaaatcgtcatttttcattatttttcagattttcttgtttgagcaattttgttttatcatattaaaggtattagaattggtttggggtcatttgggtcaaaattggattttttagcacattttttagaaactttttttttgtctggtcctgtaccaaccggaattccggttgtaccatccggaattccggatggcacaggatcagcaaagggggcatttttgtcattttcatgcgattttttccctttttaaaccctacctaccgaattttttcttcccccatttcagttttttcaaccctaatacagcagccactcatctcttttctctctaaaattctctctttcaaagcctcactctcatcttccaataattaaaaaaaaaaaaaagaagtgtgttcttcaatggcttcctcatcaagagctc

SEQ ID NO: 286879 - DNA, 112 bp, Cannabis indica
ccctaaaaactctttctttacaatttcgcccttacttagtgaaaaaggacatcatccttaacttaatattcgccagatagaagctatagattccatatttatgatagcgctc

SEQ ID NO: 286880 - DNA, 730 bp, Cannabis indica
gtttgggacggtttattagacattgggaatgtcgggaatggccgggaatttagaatttcccaaaaatacccctttagtgttatttatgtgttttagtgtggaggggcaaaatggtctttttgccccaatgatattttgtctttttgtgacttattaattgaaaaataaatgttatttgattttaaatattggctgaaataaagagtaagatgttgcatgtaattcattttcatttcaaaattctaagtttagaaaatagaaatttcaaaaccctctcaagctctctcttttcctctctctctctcggctggttgcatggaattctagggctggttttcattgattttcaagctagcttcaacctaaatttgtgaactcttgttgtggtatgttctctctagcttttctccttttgttttcttgaaaaaaatggtgaaaatatgagttatgcatggattatttggatgttgttgctgctgtgttttgttgttaaattctgtaatttaagcatgtttaattgaagttaaatgagctgtttgtgaagcatgatagttaggttaagtaaagctaaagttttcttatgcaaaagtttggttttcaacatgaaaattgtatgttctgttgctgtgatgttgttgatgtttgtagttgtttccagaggctatattatgcatgtttaagtagatttggactggtttgattgcatgttagctaggtttactcaagtttg

SEQ ID NO: 286881 - DNA, 592 bp, Cannabis indica
atgataatgatggtaccgaggggtcgcccaatattctataccggtgtgagctgaacccggtggcaaaaacatggctgtactttgtgagtgctcggttagtgcccaacaagcatttttccgatgtccaaatggatcgccttaaatatgtgtacgccataatgaaggggtacaacattaacattggacaagtcataaggcaaagcattgaccaaatcgtgcaaggagccacgggaggtggtttcggtttggcaggagttatcacagaactctgcggggcatatgaagttccccagttagagtttgacaacacggtgttgccacttcgtaagatggacatcgcctttgtcaacaggctgaaagagccacacccctatgggcagccaccacctgatgcaccgcaagggcgtaggcggcaacgtgagcctagtgttgaagaagaagaagaggagcaaccactacaattgcctgggcccatcgatcctacaacacaatacactcatgcacagctgagttacataattcagcagaacaaccacatgcaacaatacatggtgcagaggagtatctatgatgagggacaagttcagcaact

SEQ ID NO: 286882 - DNA, 771 bp, Cannabis indica
agatcctggtaaaataaattccaacaaacataacctgcccaatttttatattgggcaggttgaaaataatactaacccgcccaatcaacccgaactatcccaaccaacccatttaagagggttttttttatatatatatatatttatataattttatgatatacatttatatatcatataatttatatgactatttaaaaaaatataaagttaaaactaatatggtttttatggtggttgatttgaactttaaattcaatctatatatatttgtctcattattacaattaactaaaatataacaattgaatgtaaaaataaaaaaattaaaaaaaaaataaatagtgtttaataataaaattttattaatattttattttatataaaatttatttatttaactgtattaaattttttaattttttttctcaatttatatttttaaaaagacttaagtttttttaattttttttttccaatttatatttttaaaatatttatttatatatttttgaaaaataattctagtgaaaattcttttttttttaattttaattaaaaattaaaaagtgttagtagttaatatttgaataaaaaaaatataattttttttttaatataattacttttaaaaaatattcagtaatattatttttttattgttttttttaaatttggtcatattgtttctttggatttttttttctagtgtaacacatcatcctcacacctctgaaaaggaataaacaagctatggataagagttggatt

SEQ ID NO: 286883 - DNA, 560 bp, Cannabis indica
gtgggctctccattggctcggaaaaagcagcagctccctttggccctctctccctcttcacgcgcgcgtgaggcacacggcctcaccctagccgtgcgtgcgcctcacgccatgccccagcggctggccttcgtttggtccgagctccatcagccaaaagccacttttcacgtggctttctctcctctcgccacgtgtcagttgcacaccaaagccaccaatccgagcttgacacgtggcactccgaaattaactttttgtatttacaattttacccacatgcaatttgtaataagtttaattgcgtattagtccttttacccttctataaatagaagcttaggtttttagaattcagttacagtttcagtttcagacagaaaaatccagagaaaacgctcagagcgctcagtgttagtttaccgctttcttagttaattttcttatgggtttctaagttcccttattattaaggaggacgatgaaacctagtgtatttaattaagtatttatttttattttgattctcagtacaatatatgcttatgattttcgcttct

SEQ ID NO: 286884 - DNA, 572 bp, Cannabis indica
agtcccagtttttccagtgtatttttcttgtgccttgagatccccaccagaatttagcaatcaaactttggattttagaacaaatggatttgggaattttaaaacttgacattgcgaaagaggggatagcttggactaccgctttaataagagtctctttaccagctttagagaagaatttttcgttccaagaattaagttttgaagaaactttttgaagcaggtaatgaaacattgaatttgataccctgccaacacaatggggagcaccaagatacttgctaatgaagccttctcccataagatgaagatcttgacgaaaaagatcttgggccagagcagtggtgttgggggagaagagaatggaggatttctctctgttcaccaattggccagtagctttatggtaaagatcaagaatactattgagggaattactagcttgaggatggacaggagaaaagaccatgctatcatcagcaaacaggagatgggacaaagggggagctcccccgcaaatccgaataccagaaattggtcctgagtttctgtaaccgaattgcagcagagag

SEQ ID NO: 286885 - DNA, 783 bp, Cannabis indica
atcactgagcggttcagttttaggggcccttagctggtgactccgggctcgtttccctctcgacgatgaagcttactcccccaccgtctcactggccgaccttgacccctgttattttgaggtcatatctagtattcagagtttgcctcgatttggtaccgctctcgcggcccgcaccgaaacagtgctttacccctagatgtccagtcaactgctgcgcctcaacgcatttcggggagaaccagctagctctgggttcgagtggcatttcacccctaaccacaactcatccgctgattcttcaacatcagtcggttcggacctccacttagtttcacccaagcttcatcctggtcatggatagatcacccaggttcgggtccataagcagtgacaattgccctatgaagactcgctttcgctacggctccggtgggttcccttaaccaagccactgcctatgagtcgccggctcattcttcaacaggcacgcggtcagagccctgggctcctcccactgcttgggagcttacggtttcatgttctatttcactccccgatgggggttcttttcacccttccctcacggtactacttcactatcggtcacccaggagtatttagccttgcaaggtggtccttgctgattcacacgggattccacgtgtcccatgctactcgggtcagagcataagctagtgatactttcggctactggactctcgccatctagggtgcagcactccaccgcttcgcctagcagcacgacgcttgtattgctct

SEQ ID NO: 286886 - DNA, 1281 bp, Cannabis indica
agaagagaaacttaatataacaaatatgaaaataaaaaacaaagagaatcaatatattagaaaaataaaaattgtattaacttacacttgagtcttaccaaaaaaatttagcctagaaaagaaattgtctttacaccaaaattaataaagtaaaataaagaagaaggaaagaaaaagacaaaattttggtatgataaccactaagtaaaatctgatagataacacaaaattaaaattaattaaataattttacaattaaaaccataaaaatatttaattaaattaattttgtacacataattaaaagcttaaaatatataaatttgagcctcaatcaatcattttcaccagataaaaaaattatatttttcacatattaaaatgatcaccttaaagagtagaatataatggtacaattttttaaaccaaataattagtagtgtagccaaaaatattttaaacttttaaaaatacctgaatgagagagagcgcggggtcagccacagatgtttattaaacaaaaaagggaaatttgcgacaaagctcctcaaaaagttcgtgttgatgcatattagtccccaaccttcaaaaatagcggcaataatccttaaggtcgacttttgtgtaagtccattaatcctaaacttaactgatctgttaacttattcaaaattgccacgtattaaaatattattggtccaaataataatttaattaaaaataattttaaattaaaaaatatatatattttaaaatcttttttttttcataccttcagctacgctacccacccccacatcatcttcttcctccagccacaccacccccaccttcattttctttcctctagccataacaaatccctacttcatcttcttcctccaaccacaccctgacccgcacccacacccacatccccactgatcaccgaagtttcaccgcgcacggtggccatctatcatcaacgatgaagcttgcagaaaccatcaacaagatctgaaagatctttgcaagtagatcatatttttaaaagttcattacacttaatgaatctccaacacgatttgattggcccaaaagtttctaagccgacaactcttaatggtaactgaacgataaagggagcttcaggaaacttgaagctcgtggtttgaaactcgatgaaggccacggtagccttgactccagaacgatggagagtctcatggtgtcctccattttttgatggcgagacttcgtggtgtcaagaaacatccaaccgagatagagatttgggactta

SEQ ID NO: 286887 - DNA, 856 bp, Cannabis indica
ttttatgttatatgatatataagttttattgtatagtatatcattttattttagataatgcatgtttagtttttattttagtatacataaaggtgatatataattttgttaatatgatatatataattttttttaataatattatattattttgttttattttttattgtaggtatattatttttattgtctataatatattatttatatttaatatgatatttagtttctattttattgtatataaattttttggtatgtatttatattttaatggtgatatatataattttgttagcatgatatatatattttttgagtattaatttagtattgttataatttctttgtggtatataattttataactacggtatattaattttcagtactacgatatatctaatactgctgtatatatttaaatgatctaatatatttatttatttttgttacaatataataatatgcaatactaaaaaaattatgtaacttaattttattattatatatattttgtgataaatctattatttataatttttattagctaatttattagatttaaccattttcttaattttttttaaaagtgaacatttactaacttagttaccaaatttagggtcattttacatctcaacccaatttaatatttaattggaacaacatcaaaccgaataatatttaattgccaatgctatcaactttaaacccaggatttcgtcattcgattccagtactcttatggcacgtttactatacagtaatcagaatcggaataaattaatggagaaatgtaacggaataaatgaaaaataatcggaatcaatatttgtaatatgttgtttactaa

SEQ ID NO: 286888 - DNA, 574 bp, Cannabis indica
attttttaggaggtattggtttagggttgagaaaagaagtgtttttgaaattatgtgatgtttggagtatacctcaccgcgacgagataagggtctaaaaatgtgtttctgcccagaagatatggccacggcggtggtccttctcgctgcggcgagatcgcctcaaaaattgtcctctctgtccagctactatagccgcagcgacactccttttagctgcagcgagatagcctcgaaaaataggctctctatccttcaccttatggccgcgaccacaacacttctagccgcggctactgggccgaaccccgaaaatttttttcttctctttttttttttatatatatatacagtacaaaaattgaaagaacagaaaaagaacagaaaaaataaaaacaactaaaaacaaaataagtaaagttcaacgaaaaaaaactaaagaaatttttttagggtttagcctcccaaactagcgttgtccttatcgtcgcacagctacacattgactgagttcttcagagtggtgccagaatcatggcggacttggcttggtcaaatagacctcccaagtaga

SEQ ID NO: 286889 - DNA, 764 bp, Cannabis indica
taaatttttctattaggatactatatcaatggctcgtacaacataatcgccaacaattgtttcaatttgttaatccgaatgaagtagccactcgttttacatcgcttgatgcacgtgtctcttctttgtatagacgtatcaaaaaaatgtcaaataatcagcagtacatggtcactccttggattgatgggtaaatttaaatttagttttatgtatgataaataaaattgtgatctaatactcaatctaattaatttttttttttttggattacatagtgagcattggatgttgatattattggtgcccgactcttattggttatgtttcatggatcctaaaaactcacacttgagtaatcgacctgatattagagaaacggtcacattggcatttcaaacttactacagggtgataaggaaagaaattccaccgaagctaaaagttcgacgcccaactgtacgtattctttattttaaatttcaattatattttattaagatctttattaatttaaagaaaaatctttagtgtccacatcaaccggaagacaccgaatgtggatattatgtaatgaagatgatgaaagatttaattcaagcttcgaatcggaaacactttttggtcgaggtacataacatacaaactatataaacatgtcatacattattagtattattattattattaagaatgcatatgatgataaatttaattaatataataattatcttaaattttgtacttaagtgatgcaaagtata

SEQ ID NO: 286890 - DNA, 510 bp, Cannabis indica
tttgtccaataaaaatgataattttgggcctttatgaatctataacctacattgactttttatgaaacatctttcatataattttttttttaaattttgataactagaccaaaatatacaattaagctcttacaaaaataaacaaatattgagaataatatttttaaaatgggaaactaaataaaattgataaaatattacaaaaattaaccaaaactaaattataaatactaaaactaatatttatgtaaaagtagtaaaaccaaataaaagtcactaaaataaactaaaaatacttgagaacaaaactaatttaatgcgcaaaaagatataaataactctattttcatagagttatcatgtatgttgcccaggtgtgtactgtccctgcttcaagcctccattgggccttccccgtggatttatggctcttatacacgagtacgtcactatggctgcttcttggactgacgactggccctacaaaccaacacgagtgtttccagcatg

SEQ ID NO: 286891 - DNA, 524 bp, Cannabis indica
ggtccaggaataagtagagccaacatgaaattattgtctttcatgcacatccaaggtggaatattatagttcgctaacacaacaggccacatactgtaagctaggctcatgttgccaaatggattaaaaccatcagcagctaaacctaagcgaacatttctaggttcactggcaaaattaggatgtttagcatcaaagtccttccaagctaatccatcaaccggatgacgcatcactcgttcatccttagattttccagtatgatgccataccatatattttgctgtatgtcttgaaccatataatcttttcaaccttggtgtcaacggaaaatagcgcaacactttacgaggcactttttttccattagtttttgttgaagtaatccatcgactacttccacaaattggacaagcatctttggttgcatgctctttataaaataagcagcaatcatgctcacacacatcaattgactcataccccaaccctagttttttcagtctctttttagcctcgtagta

SEQ ID NO: 286892 - DNA, 583 bp, Cannabis indica
cctagtctcggttcgggtttaggtctcagtcttggttttgatttgggctcaggtttggatttagatccatgtcctggtgctggtcctagtcctagtttggttctagttccattttgattctgtgttcgagtttgggtttgagttcggtcagggttctgttctgagtttgggttcgggtctggatttcagtctaggtccagatcaagctccgggtgtgggttcacgtcttgggtgttggtctaggttgggtccgagtcccaagttccaatcccgatctgagtgcggattcagttctgggtctaagtccttggttctgatcctagtctgggttcgagtttgtgtccggtttcgaggctagctttgggtcttattctaggtatgggtttgtgtccatgtctggaccccaatctgggtctaggatcgggtctcgagtgcgggtcaacatctcggtccagatctaggtccaacatttcgatcccattttgggccttcgtccgagtccaggttcatatccggatccctatgtagctccaagtctgtgtttgggatcaggtcccaaatttaggtccaagtctaggttcac

SEQ ID NO: 286893 - DNA, 615 bp, Cannabis indica
aagcaatacttttacctttatcagcaatggatttgggtttgtccttttgtttaatttgttgatttaattcaaaagtacgcaaggaacccattaattcttctaccttcattgtgctaaagtctttagcttcctccattgccaaaagcttagtatcgaacctctctggaagaactctaacaatttttctcacaagaacagaatcatcaagtttttcaccaagagcaaaatattcattagcaatatcagataatttttcatagaattcagttaaggtttcattgtctgacatcctaagctcatcaaatttagtttgaagcataataaatctagagcgcttaacatcagaagttccctcaaactgagtttgaaggatctcccaagcttccttggcagaaacacaagatgatataagtttaatataaccttcacctacaccattaaatatagcatgcaaagctttgctattgtaggcagaaagtttatcatcttcaatagaccattccagttcagattttatagtagaattacctgaggaatctgtctcaactggaagagaccaacctgatagaaccatcctccaagctttctcatcttgagatttgatgaaagccctca

SEQ ID NO: 286894 - DNA, 537 bp, Cannabis indica
actgagtaagaaaagcatataacatatcatataatttcgacttgtatctaggcgcccatacacctatttacaaggcttaaaaaatgagtaagaacgttctaactggttgtgctattgaccatgttatcacccactaccagcactatgatcgtaatgcaggacaacactatgttcgtgccgctatgatagcatcaataacatccaaaagtacaattggccatgatatcactcttaaccagtatgatgcctatactgctgaaccgacacaatgtttgtgtcgctatgatagccccaattcatactttctggggtgaatatcactcttaactagtacgatacctgtactgctgaaccgacacaatgattgtgtcgctatgatatcacccaaagatatacaatcatgcacacagcatgcatatatatatcatacacatatacattcgcataaatatcacatattatacacagttcttaccttctttcaagattcaagtgtgctggccgacctgaacgaaagtcttgcgctagatggatgcc

SEQ ID NO: 286895 - DNA, 516 bp, Cannabis indica
aacattaaatgttatttctgatctatattaataggtaaatctgattatattgaaatgagttttatttagggcataaaacccaacaacacagacctagcctaaaactcaaactgagactggaactcgggccgggacaaggtcgtgtacccagaccggaattgagacccggacctggacctaaatctgggacacgatcccaaacacataccttgccctagatagggatctggataggaacctggactcggaccaagacccagactgggatcgaaatgctttacatagatctggacagagatcctgacccagacccaaacttagacccgcacttgggacccgaacttggacgtggaccccaacctagacccagaccagggtccagacctagacacaaacctggacacagactccgatccaaactcaaaaacccacacctagaatcagacataaagatagaccccgacccggacccaaactcgaaccccgactaggatcagaaccaaggacttagaccca

SEQ ID NO: 286896 - DNA, 523 bp, Cannabis indica
gatgcttcagggttttggaggacttgccggagcgggtggttggttagtaccttgatcggatgtgcttggaagtatggcctcaattttctcgaggccatcaggaggcaaaagaccaacttttcgatgatggggtacctcgtttctgctcctatcatgcgcttgctaacatagtacacgggatgttgagttttctcttcttcccggactagggcagcgctgaccgcgtgctcggagacagccaagtatagaaataggtcctctccgagaacaggttttgacaggatagggggcttggccatatgttcttttagtttcttgaatgcctcctcgcattcgtccgaccactcaaacttttgacacttctttagtatgttgaagaaggggatgcatttgtctgtagaccgtgagatgaaacggctcagggcagcaacctttccggttaggctctgcacatctttatgctttttgggggatggcatgctcaggagtgcttggattttttccgggtttgcctcaattcccc

SEQ ID NO: 286897 - DNA, 770 bp, Cannabis indica
gggatagaatcgagaaggttgagagcgagatcggagtgaagctgaagcttagagatttgtcatctggatttgggggaaagtacgtatctcggagatggtagagatcatcggctgctgtggtggctttggccagtggatcttctctcttcggttcgccgctcatggctctacacttccaagtttcggacacacaccaccacgagtgaagtggggagcagtaatgtaacgcaatgggccaatagctatgttagagttagactagtgtctcttgtcactttctcaactcctcgagggcattcaaggattagtttggtcccttttttcatataataggtgtatgtgtgaatattaatatgaagttttatatgtagttatttatatttatatatttttaatgatcaattaattattttatttatatatttaaaaaatatttttgtaaaattaaatattaaaattattttctaaatcaaacatattaaatgagaaaagatgttttatattagtttaagcaaacaaaaattttcaaaaaaaaatcaaacagacgttttttaaaaaagttttgattagtttaagagtacttataaaaattaaaaaatttacagtataaatacctgatttattgagtttgttgctaataaatactcaaatttaaaaaatgccacaaaaatacttttttttttttgaggaaaaaaactgttattataaatcaaatcatagagtcatttacaataaccgaatttataggcggaggaatacaatccgaccaa

SEQ ID NO: 286898 - DNA, 1005 bp, Cannabis indica
gttttacatattaaactggatttatcgctactttacggaggaccactatgtccattggataagtatgattctttcccttcttgcctactcacatgagtttattttgttctcacttttttattattattataaatgtaagctcatgctcatctgtataacattttatgtcatggttctgccttttcagcttggatagccgggcttatccagacgatgctttatggcgatttcttctattattacttccagaggtaaaattctatgtcacaaaaatattattttcaaataaaaatgtttataattgcgtaaaatggtgtaagacctgtctcacactttatgcagttggaagaacaatgttaaactcgagctaccggcttgagatctgctgaatcgtgactgtgagttatatagcacgatcggtgctttggattcagtttcttagttagtgttctcccccaattgtaccatagcaggctagtttattaaagaaaagaaaaagggtttgtgattctcaatgtagaattaaccagttacatatacccttgtatccacattcaacagaagattttataacatctttttatcacatgtagctacaaaataccttacaaaatgaatgattttccggaaattatacttattgtaccatatgttaaatagttatttaggattattttagtcttttatattagttgaatgcttttttaattagttatattcttttacttttaactttacaaatgaatgaaatcttaatttctctccatttctttctttttatttgttatttttctctttacaaataattatttttctaacttttttattttggtcacatatcattactatcaattaaggtagggggaattttgatttatatgcttaaaattaaaaatttataattaaccaaaattaacctaaaaactatactttttttctaaaccccaaaatacccctcacaattctctctctctctccatctcaccccaaccgcccaccctcacc

SEQ ID NO: 286899 - DNA, 555 bp, Cannabis indica
tctacaataattagtgtaaaaacattttactttttactgcaacaactctaatatttaacactaaatttctaccaaatatatattatatccgcgttttttaaataaagactgtggaattccatgactaaataaattttacgttctaggcccactaacaggcccaaataagatattaagtcgagtttaaaggcaaagttagtccttccaaatgatgagtagacaattcgtccaggcgatatttatccaacatgcgtctagaagacattagacaaagcgttcgagaaaactaattagcaagcattggacgtatagtaccgtttcccacttattaattactacatccatcaatatatattgagaattaactcccgataatcttgttcgaatatcatatcttcttaaatatggaaagatagtaattggcaatcaagtatttatggtatgtttactttgttggaaaggaaatgaggtgtaagagagtttcccattgaattgtttactttcacttttagtaatggaaaaacttggcgagtcctacctaaattaaggagaaaa

SEQ ID NO: 286900 - DNA, 244 bp, Cannabis indica
agtatgttagtagttcgggacggtttagtagacattgggaattttagtgctctttatgctattttagttgtgaaggggcaaaatggtcattttgccccatttatgttttgtcttttagtgggcattatgtgatgagattattaattttaatattaattgttgggtgaagtgaataaaaattagaaaagaaaagcaaaactttttctctcaactctctctctctatttcggccctcttggagcag

SEQ ID NO: 286901 - DNA, 506 bp, Cannabis indica
tgtgaaatttatacagatcataagagtcttaaatactttttcacccagaaagatctgaatatgaggcagagaaggtggttggagttggttaaagactatgattgtgaaatactgtatcaccccgggaaagccaatgttgtggccgatgctttaagcagaaaaggtcccggccaagtttgtactacggttatgatagctcctcaactagcctcggaaatggttagtgcaggaattgagttcgtggtcgggaaattacataatttaacactccaatctgatctgttggagagaatcagaaaggcacagctggaagatcctgagctagttaaggttcgagacgaagtaatggctggtcggcctagaggcttttcagtctcgaacagtggaatgttattatacaaagctcgagtttgtgttcctagtgttgatgagcttaagaaagaaatactggatgaagctcacaccacgccttattcgttgcatccgggaaccaccaaaatgtatca

SEQ ID NO: 286902 - DNA, 157 bp, Cannabis indica
catttcacataagctgaaatatcagttatacggggttaagtgttttaaggataaaatacattatagggtgtaacggtaatctaatccctttacagtgtaaatcatctatatagagaatggataactaatgatgtgtatatatggtggaacatataga

SEQ ID NO: 286903 - DNA, 800 bp, Cannabis indica
gggtcgaaatcaggaaagttcctaggccttcatcgtcagccagagagggactgaggcaaacccagagaaaattcaagctctcctgagcatcccatcccccagaagcacaaagacgtgcagagcgtaaccggaaaggttgctaccctgagccattttatctcccgatctacagacaaatgcattcccttcttcaacattttgaagaagtgccagaagtttgaatggtcagacgagtgcgaggaggcattcaaaaaattgaaggagcacatggccaagccttcaatcctatcaaaacctgttcttggagaggacctgttcctatacttggccatctccaagcacgcggtcagcgctgccttagtccaggaagaagagaaaactcaacatcccgtgtactacgtcagcaagcgcatgataggggcggagacgcggtaccccatcatcgaaaaactagttttctacctcctaatggcctcaagaaaattaaggtcgtatttccaagcgcacccaatcaaggtgttgaccaatcacccactccggcaagtcctgcaaaagccagaggcatccggaaggctcctcaaatgggcgatggagttaagtcaattcgacttacactacataccccgtatctccataaagggacaagcgttggcggacttcatcaccgaatgtaatgaagctgagggaaccgtgaacgcatcggtaccatcggtccccacatagaaagtgtttgtggacggggcctccaatgaaaatggatccagagcgggggttgcaatgatatccccgagcggacttcg

SEQ ID NO: 286904 - DNA, 539 bp, Cannabis indica
tcgggaatttctagatgtttttccagatgaaattccgggtttaccacctcatagagaaattgattttgtcattgatttggcacctggagtagaacccgtttctaaggctccttagaaaatggctccagcagaatttaaagaattgaaaattcaactccaggggttgcttgacatagggtttacgcgacctagtgtgtcaccctggggaactccggtatgtttgttaaaaagaaagatgggcctctgcgaatgtgcattgactaccgggaattgaataagctaacaatcaagaataaatatcctttacctaggatcgatgatctttttgatgaacttctggggtaagacagtcttttcaaagattgatctttgatcgggctatcattagttgagaatctgagaggaagacaccccaaagatggcttttcgtactaggtatggacattatgaatttttggttatgtcgtttggactacaaatgctcccgtagctttcatggatctgatgaatagggtattcaaggatttcctcgatatctg

SEQ ID NO: 286905 - DNA, 193 bp, Cannabis indica
caaacacaaagacagagaaaaagaacaaaaaaacaccaaagaatgaacacccaaacacgaagaagacaaacaaacaccgaattacaacctagaacagatgcgagtgggcttagaagaacccagtgaagaatcggcaacagaacgccgtcgaaggcgccgtcacacgcgcctccacgcgccggcgcgtgagccc

SEQ ID NO: 286906 - DNA, 870 bp, Cannabis indica
tctcttttcctctctttctttcttctctttcggtccgttgagcagctagagttgggggggattctttgtgtgttttcaagctgattgttagcaagattcttgtgatctcaactcttggtaggtctcttgtttttgttcttgatttcttgaagtttaagaaaaaatgagttaatgcatgcttgttggattgtggttgtagctgctattaattgttgttgttgttttctgtggtttaaaaatatttaattaagtgagataagataggttttgatgcatgctagttatccctgttcaagtttgtgaatttttactcaaaatcttgattttaatggtgaattgatgagtttagttgctgtggttgttgattatgttagagtttgttttctggggttacattatgttgatatatggtgaattgagcaggttttagtgcttgtaagtgagttttaaccaagcttgagttttgaactcaaagcttggagctcgcatggtgatttgtgtatttttgcatgaagctcagttttgatgttttgaaaatgtttagtggggtatttagaataggtctggagagttttgcatggtttgggatcgaattgaatgagatatgaaaattttgtttgcttcctacactaaaattggaaattccggttcagtgaaagcctgcagcatccggtctaccggatgggggcttccagggaattccccagaacccggaattcccgggttgtagaaccggttcaccggtttggggaaaaattggggaacccctagtttttcccatttttatgttttttagggttatgttcatgtttttattcgatagggaacttttagttctgttaaagtccccggagtgatttagcgtgtcac

SEQ ID NO: 286907 - DNA, 499 bp, Cannabis indica
ggagtatgtgattggtaccttgatcgtacgtcaaccttctgtgggaaggtgttttgagtacgaaggacagcatagcttcataaccataagccattgagaatggtgtctgaccggttgctattttttccgttgtacggtatgaacatagaacttcggggagttcttccggccaatttcctttggcatcttcaagcttcttctttagtgtgtccttcagggtcttgttgactgcttcaacttgaccatttgcttgtggatgtgccactgcggagaagcttttgatgatgccatggttagcgcaaaaatcaatgaaagattgactgtcgaactgcttgccgttgaccgaaactattttgtacggtagtccgaaccggcatatgatgttcttcactataaagtcttgaaccttctttcatgtgatagttgcgagtaattcggcttcagtccactttgtaaagtagttgactgctaccaccgcgtactgcactccgcctttacc

SEQ ID NO: 286908 - DNA, 676 bp, Cannabis indica
gactaagatgtcacacattcacgctgcccacccaatagcgcattacatccgaggtatgcgcattccctgttccaagccttggtatgaagccgatcatgtgttattcatcatcaatttaagaagggaaagtcattgggtgtttgggcgtcttgacttgaatgaagggattttgtttctgtataattctttgaggactgcgaagatgaatgctgcagctaggaatgccatgaaggcttattctgtgttgctgcctttgtttttcgatttacttggtttctggaagaataggtcacaagctcctgcctcaggttctgaccctacagctcccttaagaatcgtggagattagtggtcttccgtctcagcagaaaaagtgagtgtttcttttaagtttattttatgttgttttttagtttctaaactgtttactttttcttctgtttttatagtgattgcggagcatatgttgctgcatttgctgaattctttatccacggaaaggatgtccctgcggactttgacatcgaagtttatcgtacccgacttgctgcacttttcttctcatacggccaaaggaaaattgatgaaagcattgatagcgaggatgagaagcaaagcaagtcttctaaggcatctaaattgaaaaaataggatcttttaatttggtgactcttttc

SEQ ID NO: 286909 - DNA, 655 bp, Cannabis indica
tcttcaaaatgaagatgaaccttgtgtttaccaactcaaggataaccaaatggtagtattcctggtcctttatgttgatgacatttttatattggtaacaatatcaagaaaatgacttacatcaaggaatggcttgaccctcaattcgaaatgaaagatttgggtgatgctacttatgttcttggtattcagatcatcagaaaccggaagatcagatcccttgctctctctaaaacaacttacatagataaggttttagagagactctcaatgacaaacaccaaaggggcacaaatgccttctcgatttggtatccgtctatctaaggaacagtgtcccactgatcctcaagaggtagaagacttgagaagggttccttatgcttcaacagttgggagtctaatgtatgcaatactatgcactagatctgacatctgttatgaagtaggaattgtgagcaggtatcagaaaaatccaggacaggaacattggaatgctgttaagcatatcctgaagtacttgaaaagtacaaggcaattcatgttagactacaagggtggtgcttcaaataccgtaggctatagcaactcagatttccaggcttgtcttaatgacaaaaagtctacatctgggatggtgtttactcttgggggtg

SEQ ID NO: 286910 - DNA, 599 bp, Cannabis indica
atcgctatctatttataggtaaccactaggtttaggttactaattatttggcattaaaataatgaaaataataattggaaaaagcctctccaagtgtcaagccatggtgttaaatggccccacttggtattttgcaattttgacaattttcatttctattttctcaaaaacgtcaattttccaattctaaccatttaaatgccaaactaattatttaatagctaaaataaattattaaataatattgtcatttaatataattattaattagacatatagagtctcttaattaataaataaaacctaaaatctattttcttcacaatttcgcacttgcttagtgaaaattcataaactacacatagtctaatccaagaattataattgattaattaaaacaaataacctgagtcttacaagcagtatggtcccaactagaatggggaccatggacttatattgcaacaccctaactaacataggcgtattacgtgattatacttgtcacctagcgactaattacaaaaataaccttgctgtcccgaggatcgtacgctccaggccaaccgccccgacatgtacaatcttcataggctcgt

SEQ ID NO: 286911 - DNA, 824 bp, Cannabis indica
caaaagatactaatttcttgtacagaaaaatatgattcaatagtttctgtgatagaggaaactaaagatttagaaactctatcaccaactgaactaatgggctctcttgaagcatatgaaagtagacgagaaaggcataaggaaagtgaagttgaaaatgcctttcagtctaaaatcaattcgcggtctcaaaaaccaaaagctgatgggaaaaagacacaagaaaaacaaaaagaaaataacgacaagtatcctccatgtggcatttgtaaaagaaaaagtcacttggagaaagactgctggttcaaaggaaaaccacagtgccaaaattgtaaaaaatttggccacactgaaaaaacttgtcgtttaaagaaatcccatcaagctaatttttccgaagagaaaaatgatgaaaataatctcttctatgtctgccaagctgcaacagaagaaggaaaagatacttggtatcttgacagtggttgcagtaaccacatgacgaaaaatgaaagcatcttttgtagtcttgatagatccaagactaaagtcaaaatcggtaatggtgacttcatggaagcagtcggcaaaggcaccattgccattgacactaaaaaaggcaagagatacatcaatgatgtactcttagtacccaacattgatcaaaacctacttagcgtaggtcaaatgattgaaaaagggtactctttgcattttgaaggagattcttgcacaatatatgataagcaagataaatcctttcaaattgcaaaggtaaaaatgaaagaaaatagatgctttcccatacaatggagatatgcaagcaa

SEQ ID NO: 286912 - DNA, 642 bp, Cannabis indica
tggtggatgcaataaggaattaataagttagggaatttacttggtaaattctagttctgcttattggaagctcggttgtataggcccatggtccccatactagttgagaccatactggttgtaagactcagataattgattttaattaatcaattataattctaaaattagactatgtctagtttgtgaatttttcactaagcaagggttcaattgtgaagaaaagagattctaggtcttatttattaattgagagattttattatgtctaattaataaatatattaaatggcaatttatttgataattaattttaattattaaataaatagtttttgcatttaagtggttagaattggaaaaatgatatttttgagaaaattaggaaaaatttgtcaaaagtagaaaaattccaaagtgcggcccattacaatggtcgaccacttatatgggattttccacttaatttttccattattttaatgcctaataaattctaacctaaacttaggtggttgcctataaatagatagtgatggctcacacttaaatgatgatgaaatttcttgccttcagtaaaatttcctgagccatccttccttctatttttggaacctagcccctctcttccttcttcatatt

SEQ ID NO: 286913 - DNA, 326 bp, Cannabis indica
agattaagaagaggaactatattgtaatgcccgtattttatatttactaaactcaaaagataactttaatatattgtatctttataaccatatgggtcgggatctcgagtatcaaaatacaatttaaaagtattttactaatatgtacatataatattattttctttttacaaaaactcgctagtatgcaacctcataatacagactccaaaatagtaaaagaccgaaaccctccaggttgcactgccgcgatatgtacaatcactgccgagccctatctcactgttcctccagcttggcttttcctttacctacacaaggtagca

SEQ ID NO: 286914 - DNA, 616 bp, Cannabis indica
tttattctaataacgtatttctacgtatgtctttccaaccctaaaaaaaattttcaacagccacagaaataaattatatgaaaatatgtttggaacgtatttcaatgtacgtcagaagctggatctcccatatctcaataagttcaagtttgaaaataacgtacatcaatatatgtgcacagtacttcacatcgtaaatacagtatggtgcaattatgtttactcaatatttgaatttaatgagataattagaattttttgtcaaatgtaaactataatttcggacatatttattcgtacaatacttattttaatacagtttaaaccatttcctatttaggagttgtactaaatttggactactacccattcttaatagtccacgttcttatgttgttgggaattatttaaaaattgtccaaatattgtaatcttcttaaccaagtatggactatttcctctaattttaatttgtacatactcactaaaaaaaccaattgttgtcttatcaatatttaattttctgtgtacgtcccacagtgtactcactgacgttaaatggagtatttcctatactttaaataacgtacgtcagcgatttcacagtgtaacgtca

SEQ ID NO: 286915 - DNA, 658 bp, Cannabis indica
tctgagacaaaagaatacctttagttctatcccaaatgatctatatcccaagtacatacgaagcctcaccaaggtctttcatatcaaaatgatcagataacaattgctttgtctcagacaacaaatttttatcattagaagcaagcaaaatatcatcaacatacagtactaagaaaatgaagttgttcccactaaccttcatatatatacattgatcaactttattctcgatgaaaccatttgcaatgacaactgcatcaaacttgaaataccactgtcttaatgcttgtttaagtccataaatagacttattgagcttgcaaaccatatgctccttgccaagctcctcaaaaccaacaggttaagtcatgtagacatcttcatacaaatctccatttagaaaagcaattttcacatccatttgttcaagttccaaatcaaaatgagcaaccatagccatgatgattcacaaagaatctttggtagagacaggtgagaatgtttctttgaaatcaacaccttctctctggctatatcctttagcaacaagtctggccttatactttacaggctgcccacttgagtcacatttgatcttgtaaacccatttgcacccaatgggtctgcaacctttcggtaggacaactaaattccatac

SEQ ID NO: 286916 - DNA, 617 bp, Cannabis indica
aaaataattacaaaaataacttacaaatttcaattacaataatgtcttgtcacgtcattaaaaaataccttaattctaacataatatgcctgaaataaaactaatcctcacattcttttctttttaatttttctgcatttcaaaagtaacattttaattacttatgaagttaataataaaccaaaaaataactttttaaaaatatcacttttataatatataatttgatatataatttgtttacctttaaaacttatatgcatgcactttaataattaattaatatttagattatattaatatatttgagtaacttttaaatttatttttaaaaataataaatggtcatccagtaacctactattttagtaaattgtattttaaaaaatatatatcataaatgtttaagtcacccatatttttttaaccaaatagatcttcaccttctggctgaaaactcaccattttccgcttacagtcaatactagccaaatacttggataggaaatccatcccaagtatgatgtcaaattctattaattccaattctacaaggtcatcactcaattccctatcctcgatcctaactggcatagacctaatgcgcctattagaga

SEQ ID NO: 286917 - DNA, 524 bp, Cannabis indica
tgagtctggattcagttctgggtctaagtcctatgttctgatcctggtctgggttcgagtttgggtccgggtctgagtctagcattgggtctgattataggtgtgggtgtttgagttcgggtccgagtctgtgtccgggtttgtgtccaggtatggaccctgatctgggtctaggttcgggtccgggtccaggtccaagttcggggcccgagtgcgggtccaagtttgggtcttggtcaggatctcggtccagatctaagtccagcatttcgatcccagtctgggtcttggtccgagtcaaggttcgtatccgtatctaggtccaagtctgtgtttgggatcgggtcccaaatttaagtccaggtccgcgtctcatttcttgtctgggtacacgaccgtgtgcgggcccgagttccattctcagtttgggattgaggctaggtttgtgttcggttcttcgtctgggtccgggtcctggtcatgttcctagtcttgttttagggtcctggttcggcgattcttgt

SEQ ID NO: 286918 - DNA, 486 bp, Cannabis indica
aggttttatttgttaattaagaaactttattaagtctaattaataaatatattaaataaaaattttatttgataattaattttaattattaaataaatagttttggcatttaagttgttagaattggaaaaatgatatttttgagaaaataaggaaagattgttataaaatgaaaaattccaagtggggcctaaacatcatatggccggccactagggaaggaattcccatttaatttcttcattattttaatgcctaataattcctaacctaaacctaggtggtttcctataaatagatagtgatggctcacacttaaagatgatgaaaagtcaccctcagaataaaatttcttgagccttcttcttcaattattttcgaaccagcccctctttttctctcttcatattttcataccttgagtgatagagtgagtgcccacacacatcaagtggtctcaatcatagtgtgtaagactgtgaagaa

SEQ ID NO: 286919 - DNA, 679 bp, Cannabis indica
acatttccaggtgacggttcaattcgttcgtggaaatcgatccgaggctggagtcaaatatgttcaacaaccaatgatccagatctacctctagtgccacccaatgctttgctccatcgaagtagagggccatatatattctctccttgttcttccaactggccaagaattgactttcatcccctcgaatcaaatctaatatgctctcgtcccactgatagttagcctgctcatcacccgcagcttcccaccgagcaataactcctgctgggaaaatacacggcattatgacacatctatttgggtaggcctcgggataaaagtgttgccgcctcctcatcaaatggaatgccgcatccaaatgctaaaacatgaaaattaaatatgtcagagattaaataaaaaagagttagataaagtctttaaaagcaaaagcagtaaaaaagtcttaaaaacttacatcgttcccaagccaaaacttcggagtatgcagttcgaggaaccaagacgaatggtatcgaccggtgaagcactctctcgggtaattgttcccaatctggccgagtacccaattgtgaaaagtcttgagcagcttccgatcaaccactctaagtgggtccgcattcacgagtgtcgaagtagccctagccttcttcttcatttcagtgtactcagcgaa

SEQ ID NO: 286920 - DNA, 657 bp, Cannabis indica
atattggtagatttttaaaatcaatacaaatcacatccatgattcacataataattgtatggtatatttttcaaaatcaatacatatataatcatgatttttttattaaaatatgtccaatatgccctatatattatcagaattgaaatgatattatgttgtttagataaaaatatttagtatgtttatttttgtaaaagattattctaaatatttaattaattttatgaaattgtttattttttttaataaacatgtgatttattaaataataaagatatatattggtaaaaaaaatatagattaattataaatataaaatatatttataactagtaaaaatatacgttttttttttctacttaattttaaataaacatagatataaattattaatacattattgtttattatttttattaaatattttgttaaaataaacatatatttataataaattatagtaaaatggataataaacatttatactatacaaaaaaatagtatatttattatattaaactgtttattatttatttaattttattttttgaacatgtttatttatttttcataaaacaacttatatatataataaatcgtatattttataataaatacactataaataaacataaatatataataaatcacact

SEQ ID NO: 286921 - DNA, 859 bp, Cannabis indica
agttgtattaactacgaaagtaaaatattatggtatttttacagagtaagtaatcgtttaattaaagcccaatatgaaggtccattagggttttataatatatttagtgagtttaattaattaatgttaaaaattcgtaggtttggataaattcgcaggattaaaaactgttttactaaaatgatcatatctggagttctagagctcggattgaggtgatttcagtggcgttggaaagataatttaaagatctataaattttgtagaaataactatatcagaattcgtaatttttctaggtcaaaactaagccctaaagttacgagattgagagcttacaatttaaatttaaaagttagatatttgtttatttaataatttatcatattattattgttattatgttaatattattattattcataaaactaaagctaataagagtcagaatagtataggtttcattaaccctaaaattatatcgttctattcttcccacctatctgagcaagactaaccctaaaaattttcaagtcatctttccattacatccttagccaaatctataccactcttcactctcatctttgatcaccatcatcttatgtctatcgatccaagtagcttgatgtatttgaggtaagaaactctacatttacttatttattgatcacaataggagaattttcgtaggtctccttttcttatttttcagaatgaaacatgtctcagtaaaactgtcatatctctttaaatactcatctgattctcgcaatcttggtgtctatagaaagcttattaaatttcctataattcttatgaagaaaggttttactgaatcgaaatttatctatgtcaa

SEQ ID NO: 286922 - DNA, 507 bp, Cannabis indica
tccaagtccaagtcctagttccagtcctagtcaacttccggtttttgtttcaattttgggtcacaaggtacaagttcgggtccacttttgggtttgggactgggttcaggtccgggtgtgtgttcgggtccttgtcagggttcgggtccagggctgtgtcccaaatccagacaccgactatggaattttttcaaagcccttggtccagatcggatcccaatttcacgtcccagtcaggttccatttctagtgccaggtcacgagctgggtcctaggttcaagttcgggtctaggtcgggttctaggtcccggtccttgttctgtatccgaggtccctatcctgattcttagtccaggtcccggttattgtgtgggtttgggtctcgatctaggttcaggttcgagtcctagtctcggttcgagtttaggtctctgtctgggtttcgatctgggttctggttttgctttaggtccttgtcctggtcctagtcctagttcggttctagt

SEQ ID NO: 286923 - DNA, 555 bp, Cannabis indica
cacactttgacccttgtggaaaataaagcttataaatgatccttttatttatattacaaaatactaatttaaaagatatggattaactcctatattaataagaaaatattagtaataaaatcaggaccactcatcaatataaaagaacagtaatatccccacagttatgtaatcaccaaatagatagatttaataagtcaataaaataccaaaataatacctagcatccatcatttctcatttctaactagtacatagctaatttaagtcatccagaccatccatttgttcttaaatacaaaatcagtctcattagaaggtgaaagagtaaaatatgactaaactaataacgacattcctttcccaacggtaccatcctcatccactagcatcaaactgagttcctggaatgggagaaaatagggggtgagcttataaagcccagtaggaaaacaactaatatcaaaggacccttggtttaataaaattcctgcatggttagctttataaaaataaaatgtctcatcaacagtatcaatatgtacaaataaaata

SEQ ID NO: 286924 - DNA, 1206 bp, Cannabis indica
gatgacggacacagcttgcccttctccaggcaggcatccgtacagggactccattctggaacgaactacaacaggaaggagctgcaaaccttcaggatttccagaagagagtccaaaaatacatcaatcttgaagatgcccaaatagtggcctacggaggaaattatcccaccggaatatcagggtatgtgcccggagcccagccgtcgggcactgtcccgacagcaactccaccaatgagcggcatacaattctccgctactcccggatatagccagggccaggccttggcccccgcgtcgtcccattttggaaatccctcggggataaatggacaagccccctcgcactccgctccaactgccagcttggccggtccttcccaaggctcgaggagtaaaaggtcctccaaaggcagcacccggacggaggaaaagcgacaaaaaagggggtacactccccaatatacccagtacacggagttgacggactcccaagaacgtgtgtactttgctactaggcaaaatacacactaccggagaccacctcctctgtacaaggatagttcccggagggaccccaacaagagatgcgagtaccataacgacattgggcacaacaccaatgaatgcaaaaatctcaaagacgagatcgaaaacttaatccgattgggacacctctacgagtggatcaagaatcggttgcctcatctcaacccgggtcaggcggctggagctttgccacagggaacaccagggggtgcgacaggagtattggctccagttgcttcccccggagatgcccagcatatccccggtctgccacccagacctaatgggagagtggccatgatctcgggaggaccccatatcggaggaactacccgcaaagagctgaagcggtatgcaggggccgtgaaacacaatgaggtttgggaagttactcaactcccagctcaaaggccccggctgatggatcaacccatcacattcacgaaagatgacgctaagacggtgcgttttccccaccatgacccgttggtcatagggactcccatcgccaataaagtggtggccagggtcctgatcgacaacggaagttccgtgaatttacttttcaaggaggccttcactgcaataggcctgacggaccaagacctctcacccagtggttcccaactcacagggtttaatggaacaacactta

SEQ ID NO: 286925 - DNA, 584 bp, Cannabis indica
tcgatcagtcactacccaagggtaaaatgcaaatttcagtttacctttggtaaagatagcaagaaaaataaaagagtcattactctcaataaaacatcctccacttctgtaactccaaaaacttcaaaacaacgaagaaaaatgttcatttcaagaagcaaaaaggagtcacaatccatcaaaatagtgattgtttaaaagcttcttttgaaccagatgagttaacagaggaggaacaaaaaatgtttcacagcgacgatgttcctacaccttccccgcgggtctcagtatttgatagacttgaaccaagcacatccaccccacgagtgtcagcattcgaaaggcttgttttcccaagtgctccacagtcaaagggaactaaaaagcaaaaacagtggatgccaaaacagaagaaatctttgagaattactattcgggggcatgaaacacaagaagatggagaaaattttgctcaagtcaattacctctctttcgaagaaagcttgaccgtagaagatgaaggctcaagctcaaacccttcggaagattttatagacatctttcaaccagcacctcaggaattc

SEQ ID NO: 286926 - DNA, 587 bp, Cannabis indica
ttttttctattctcttcatttttttctcaaatttttattcattttctaattattttaattaattatctgttaattcatatttacattaatatttacattgattttatgataaataaagcttttggcattcttcaaaagaaaaaaaactattcaataaattcatgttataattacaaaatttattttaagagacctttggttatacctcctcatatttccatataatatatatagatgagttgaagatataaaaatacaaacactttgacacatatatgaagatgggaagggaaaagaattttaagaagaggattaaaaagattggaacaaattgccatggatgatcatatatgctaaaaaaaatagcattttatatgaggtttctttctaattatttgttttctctatttttttttatatttattcaattttttttatttattttcatcatcattttataatgtcaagtattcatacctttcacttctctatgtaaatattttaacaatatatttgtgtttttttttatcattttttactccattttttatacacatgtataaatattacatatatatatagtgtaa

SEQ ID NO: 286927 - DNA, 504 bp, Cannabis indica
gtaagggcaaggataaggctgagcagccgtgtgagcgagaaaatggagattgtacatgttggcacggttaggcttggagcgtacgatctttgggacatcagggcttattttgtatagtcgctaagcgacagacttttgtacatgtatagttaaacttttgtaaatgcttttgtaaacgggatcccgaaattttaaatgtatgttattttatgttttttaattaaataatcaaaattttaattaatcacgatttttgataacctcgttgattagcaacgagctgcacagtaagttcaaaatcacgctaacatgcttaaaatagttagggtgttacatagtagtcccatgatccgtaaggggaaatatcgggtaagttgttcaatcccacattgcctggggaaggtcatgtgtgatgattctgagactgtgtaggtatgggactacatagtttaagagggttaaatggattgattggtactacctatattgtaaagaccgcttagt

SEQ ID NO: 286928 - DNA, 455 bp, Cannabis indica
gaacatttattagcaatttaacgccgtagaatctcgaaagataagtattatttgtaagtgttttattcttagtattgatcactctaatggtggcgactattagtaagacttacaaaagtatgaaataatggtagaagctcataagatagaatgaccttgactctcgcctaaacgggacaacgctagattgtcatcttgatcgaataaacggtttctagaatgttttttttttcattttagatgagttgacaactctattcaatggatggtatcttttgactctcgcctaaacgggacactgatatcagtttgttggaaaccttagaaattatttaggattgtatattttagtattttcgcttgtcattcctacttgctaagtgctaataatttctgaatatgattttgtgttaaaccttattttgattttttatttattgttattttgtagtatc

SEQ ID NO: 286929 - DNA, 672 bp, Cannabis indica
tgtagtgttcggcttactctccctgttgaccattctcgaaaagcgatgcgacctcctcactgcatactcgttgcccagatgtaatatggcctcgtatgcccaatactgcaacgctgcagcatagacgtaggctgagtattttgcctccttctgagtgactcccttctcaatctttttcaacatcttattcttcacatccaagtaatccttgttacaagtttccatcagcttggtgtaagaaatctttccccaggggtactcgtagaagaatggaaggttatcaaccattcttatcacaaaaggaggaacgacagtcttctcctccttaccagtgaggacgcccataacaaacaaggccatccccaacttgtagacatcatcagcttctgtgcaactctcaaaaactctgcgcagttggccaaagctgatcgaagcactaccgttgaaatattccagaatcaaccggtcagagcttccattttgtttgatgtcttcctcagtagggccgggcaacaagtttaacccggtgaccaagccgaactccaccctaccaaatctacatctcttccttcccacatagaaatgcacctcgtccggcttgtcagaatttattttatgaagcatcaactgatgaaaaaatgctcctgaaaattggatgggcgctctctcgaa

SEQ ID NO: 286930 - DNA, 600 bp, Cannabis indica
ttctattctttttttttattttatttttaatttattttttggatagtatagtctttgattctttgtgcagcctcttgattcttataccactctattgtctctttattaataatctcacctttgttgcctaatcttctgttattactttcaatcaagcttaaccttgacattgttttccataatgttttttttttcttttcatgcatttgaattgacaacttgttgttccagtggtcaagcttattactgtagcactaatagaagtgtgtcgtcatatgcagtgagtatttcttccttcataccagtcttcccaggtgacacaatatttcatacttatgataccatcgattgctccaaccatatttgtgtattgtatcttgattctcttcaattgaaacataattgaaagcctctttaatttgcaaaaattctcgctttctgaattgccctgccaatacctccaaatctttggaacaaacttatattccagtgctgattatctacttatgactataccatatatgtattaaaacatagaaagcgcactaatattccctttaaaataagttcaacctttgcatgggttatcgtagctcaatt

SEQ ID NO: 286931 - DNA, 502 bp, Cannabis indica
ccagatattgttaacattaataattattaggtgtataatttagtagtaaattatatataattctatatcatatctttatatattaaaagtaattatttaacaacaattcttagtttaacaaatttttttaacgttatttttttttaagaaaaataaacaaaagtttaacgttaccgttaaccttcaataagaaacaaaaaaggccataacaaagcgcgatcggcaaaattttagtgaggttattgaaaaaaataataaaaaataaaataaatcttagtctctgaacttcagtttcggtgtcaatattggtaagagctcttctttcgtaatagaatttgaaattttatttcttttcttttagaaaaaaaaaaacaattcttcatcattgattttcatgaaatttgtatatgattttctgcattaacatcgtcaatttttaaacaaatataatagaagtccaagctctcttgatgtcccatgagtcaagacttgaaagacactc

SEQ ID NO: 286932 - DNA, 884 bp, Cannabis indica
gaggtcatgaaaggaccggttgcccaagaaaactatacttctcgcgccaacggcgggaggcggatgagctccattgtactttggtttgcgctcatcagctcgagaagattgtgacggtggtaggcatcaagccgtctgcgtccggggttgtgcaccacttgcctcgggacgaagagacgcccaaccataactacggggggttcggagcttggagccaaacccacctcatgtttggggccatgctccctcttcaagattacttttttaattttcttgtttttgttggcctcgagccttatcaactcatcccacaagcttaccccctgctctcaggcttatttattttttacgttgccagaggctgggctgcacctagcccggccaaaattttgatttttatgaacttgtttctgtccccaagaagcgggacaaatttaaggacgattttttcaccctctaggcccaccccttgaatgagggcccggttcctattaatcaccaaaagaacgtcaaggagtaccgccatcattttttcttttcttccggcttccaggccatggaccgcccggagctcctcacggagtgggttaggattccacctctcctccgcacggctccgacctggctgtttctccaacatgccaagaccttctccacttacgacaagaacgatctcaacgtgggggacttggtcacgcagagaactactggaaggctaaactaatctctgggagccagtcagtggatgactttaaccttttgaaggttctttgcccaaacattcgcaccccgaccgcggagaaagcactccgggtagagattatagcctcagcagaggaccggtaccagaagtacctcttcaggagggaacaggagttggccta

SEQ ID NO: 286933 - DNA, 238 bp, Cannabis indica
tcataattctgataagttatatctatccacatgaatagttagatttgcttttcagtagtgttcttaagttcctatcacaagtgtcaacctaatgaaggtagtatgatattttatcaaagaactttattggtatcattatttactacaacagtaaaactaaactggaatatattatcaagatcaaggatttattttaaagaaaatgtgtgttacatagggaattgtggaatagactcca

SEQ ID NO: 286934 - DNA, 642 bp, Cannabis indica
acatgaagttgtagtttggactttttcttcatatggataaggatattggctataactagaagttactactctagaatggtagtattttgatcgggtgttcttagattcccaatcctaaaaaaaacaaaagaaaacacttataaaaaaacactacaacaacaccaaaaaattaaagaataacaaaaacaagcataaaaaaaatagaacaaaaataacgaaaatcacacacctctacaacccttttcttgattgcacaatctttactggggatttaccctttccctaaaatttaacaaaacaaaaccaaaacaacaacaatactcaccatcaaacaaaacataaaataaatgaaacaacaaaaggaacatgcaaaatgaaaaaaaaaataacagagaaactaacaatacgataaaactaaaaaaaaaaccctaaaacaacacaaaatcaatacgaaaatactttatcagatttgggagactttacaaactctggctccgactcaaaatcagagtcggagttctccaccataggtcgaggggcgttttgctcgttcttcgaagtttcagcacctagtttcctttttcgtcagcaactaaagaagtaaggttaggaggattatctttcaaattcttcttacccatt

SEQ ID NO: 286935 - DNA, 645 bp, Cannabis indica
ttcttgaattataacaaaagagatatatcaataaagtattcaaaaattttgacatgaaagatactataccaagtgataggcttgtagctaaaggaaaaataagttgtactaaattattgccttaaaagcaaccttagaattcaagaaatatagaagattcttaatttacattggaatctaatatatgctcaagtatagtatgtaattgtacttatacatattaagaatgttggatagatattgaagtaagcatataaggaacttttaatatgcagccaaatgggctctaaggaatttaaggagaacaaaatattctatgttgacttatcataaatacaaaaaaaaacagaaaattttggagatcattaagatttctgattctgatcttctaaagcttttagttatgtagattttttttgtctacatatagctgcaaaattaggaatggtattaaaagctattaaagatatatgttgtgacaataaattaatcaggttgcatttttagtaacaacatgaaactctataaggtcaaaaggcacattgactttgagctaattgttgttaaaaatgaagtctagagtaataaggtgtctatagaacatactaagaacaaactccatattttgtgtgatccggatcatta

SEQ ID NO: 286936 - DNA, 592 bp, Cannabis indica
ttctagttccatttgcgattctgagttcgagtttggttttgagttcgggtcgaagttcgagtcctggtctgagtttgggtttgggtccggatttcaatctaggtccagatcaggctccgggtgtggtttcgcgtcctgggtcttggtctaggttgggtacgagtcccaagttccaatcccattctgagtctggattcagttcaaggtctaagtccgagtcttaagttccgatcccgatctgtgtctggattaagttcttggtttccttggttatgatcatggtctaggttcgagtttgggtccgggtccgagtctggctttgggtctgattctaggtgtgggtgtttgagttcgggtccgagtctgtgtccgggtttgtgtccagatctggactccgatctgggtctaggttcgggtccaggtccaagtttaagtcccgagtgcggttccaagtttgggtctgggtcaggatctcggtcgagatctaggtccagcatttcgatcacagtctgggtcttggtccgagtccaggttcgtatccggatccctatcaaggtccatttctgtgtttgggatcgggtcccagatttag

SEQ ID NO: 286937 - DNA, 487 bp, Cannabis indica
cactcttgtatccccatcaccaagagaaaaattacagataaaggttttgatgcaaattggaagatcataccaatcaagatcattacaaaatcgattctatggattctggtatgcttccgctattctttaatcttattgtttgattctcttgaattaattagggctaaattaagttttacagtattcctaacattcttatcacaaatatatatcatgaatcacatactcaacatatataatatatacaactcatatcatgttatatattatgtatatctcacatatatattatcatataacatattcaaatatcatattatatgtcactatattaatatgacatatacactgatatatataactcatatatacatctcacatataataacataaaaaattcatatctcaacataggaaaatatgttaatatatgttttatataaaaaaaatagtaaatcacaaaatatcacaattcttacccttgtat

SEQ ID NO: 286938 - DNA, 592 bp, Cannabis indica
ttttcataatttaacgaagaacactcaacaaatttttagtgtgggatggttaaatggtttgttggactgtatagtatgattttattttcaaagttgtcattacacattttatatagaatgtattatattgcattgattactttcttgaacaaaataatttgattttatatatttattaactaatttgtttagttacatgtaccagtagaagaaagaaacatatctctagtggatcgtataaaatatcagttagttttttttttatatactaaatatttatatatattttatgatgggttatattgttttatatattattctctttgttaatctaagatgggttgggtgttaatgttttgataggaggaagttttgtattttgttttgtttgataatacactgtaatgtaatatcataaattattatagtgttatattcttcttctttttttttttttttcttttcctagtctgtgtcccacacacatgattatattaaacaattcatatgttttggctagaaacattaaacaaatcttgaaagtttgataataagcaattttttaatcattatgctgttttagtattttttt

SEQ ID NO: 286939 - DNA, 814 bp, Cannabis indica
ctttgagggaaggcaggccgctctgctaagaggacaaacagcgattatggatcagttgaagaccataatgacgctcctgcaagatcctggaaggccggcagcagattcacagccacagccacagccacaaccagaagaggaggctcagtcaccggaagatgacttcattctcccaaatgattacaaaccggatgatgatgacatgttctgtacacctgagaagacgaatatcaccagcatcggggatactcaggattctgaggtgcaggtgttagagacagctccagaactcatggagaaccggaggaagagaaggcggcctaggtggttcgctgagtacactgaaatgaagaagaagtctagggctacttcgacactcgtgaatgcggacccacttagagtggttgatcggaagctgctcaggacttttcacagttgggtactcggccagattgggaacaagtacccgagagagtgcttcaccggtcgatacgattcgtcttggttcctcgaactacatactccgaggatatggcttgggaacgatgtaagtttttaagacttttttacttcttttgcttttaaagactttatctaactcttttttatttaatctctgacatatttaattttcatgttttagcatttggatgcggcattccatttgatgaggaggcgacaacacttttatccagaggtctacccaaatagatgtgtcatcatgccgtgtattttcccagcaagagttattgctcggtgggaagctgcgggtgatgaccaggctaactatcagtgggatgagggcatatcagat

SEQ ID NO: 286940 - DNA, 638 bp, Cannabis indica
aaaaatacaagaatacaaaaggtttttctttttttttttaataaaaaaatacaaatagtttttgtataataaaattaatgtgaaaaaatcaacctatagaggaagaataaagatattaattgtacattaattatatttgggttgatttttgattttcttgatgtttcttttaagattgttaagcggtctactaataagggtgcgcatgctttagcgcgatcttctctttctgaggctgaccgtcattttagtagggatactctacctcttgtaattgcatccttgatttttgatgatttgatttattaaagattaatcattattcaaaaaaaaaaaaaatatatttgggtcatgtataataattaaattggttaatatatatttttttaactaagttaatatatatttctttaaaaataaaaagaaaaaaaaaacttaattagtatattttagactaataattataccatatatacagatctagatgataatagatatcatcaaattgatacaaaatagtataaactctcttcgatctttgttaaaatagatatgagattggttatatatattataattgtatctaactaatatatatatatatatatatatatttgtgtgtgcatattacataatgt

SEQ ID NO: 286941 - DNA, 581 bp, Cannabis indica
tgtaagagttattgaatctgggatccattagatcgagctactcacctttgggtgctccggtattattgtgaagaagaaagacgggactctgcggatgtgtattgattaccgggagttgaataagcttaccatcaagaacaagtatcctttacctcgaatagatgatctatttgatcaactgaaggggaaaacggtcttttccaagatcgatcttcgctcaggctatcatcagctgagaattcgagaggaatatatcccaaaaactgtgtttcgtactcggtatggacattatgaattccttgtgatgtcctttggactcaccaatgccctggcagaattcatggatcttatgaatcaggtgttcaaggattacctggatagatgtgtgatcatgtttgttgatgacattttggtgtatcctgagtcagaagaggagcatgagttgcatctcagagcagttttgcaatggttgcgggatcataagctctatgctaaattcaaaaagtgtgaattctggttatctcgtgtctcatttttggggcacatagtggataaagatgggatcatggtggatccggcaa

SEQ ID NO: 286942 - DNA, 745 bp, Cannabis indica
ataatcacatggctatgtggggtaatgctataattgtggtacttgttttaagagttttctttcttttgaacaaaataatagaaaaagtagaaagcctttaattttgatggaaaggaagcttttaagaagtggcttaacttttgccccttgtataaatgtctattttttcttgggagggcatgtggaaaaaattatgttaggagaagctatagatgaaagtttttgatataatttacattctacttgtaacaaactatctcaccaagtttttaatttttaattgttgaataatttacgatattgaaattaacatttaaacaatatattttacacgtataaaaatattaagaatatgtgcttgttaaacatatattttcggtcacaatattttttttttaaaatttagtaagttatttactaaaactataatatactccttattcttttacaaacactctcaaaatatgattttaattctataagttaaaagaaacgctttaaaagtcaaatcttctgtcacaaatttctctgtctctttatcccaatccaattaaaatgctccacctcaattaaatgtatatttcctaataaaacacttaataaattagattttattattaagatgtaacactaatatattattattattattaaatcagattataccctaatatattattattattattaagatgtaacactaataccattttttaaaaaaaaaagttttttaaatttttactaa

SEQ ID NO: 286943 - DNA, 246 bp, Cannabis indica
ccttgtatcatttctgtcgcagagtatcaccaagatctgactccgaatgcccttctcttcagtttggattcttctcaatcttccagactatgattgagataccacttgatgtgtatgggcacttactctatcactcaaggtttcaaaaaattgaagaagcaaagagggagagagaggttcagctatagaaggatagtgaatggctcaatttttctgaaggaaattttttttgattttcaatctctt

SEQ ID NO: 286944 - DNA, 837 bp, Cannabis indica
agatatttttatggaaaaattattaaaataacagtaaatattaatttataaatttatgttctaataaaatattaaaaatgagagaattaaagagaaaaaagaaaaatagccttggagagattttagagtgccatgttgtaacgtccccgcttcaagcctccattgggtctttacacccacggaatgatggctcttatacacgagtacgccactctgactgcttcatggactgacgactgaccctacagaccaacacgagttttccagcgtgctttgtcctcactcgcacgcttcctgggaaaacttcccaggaggtcacccatcctgaaattgccccaagtcaagcacgcttaactgtggagttctttcgtgatgggctaccgaaaaacaagatgcaccttgttgatataggtagtaccaatcaatccatttaagctctcttcaactgtgtagtcccatacctacacagtctcagaatcatcccacttgaccttccccaggcgatgtgggattgcacagcttacccggtatttccccttacggatcacgggactactgactgtcacacatgtcaccacttcattcttttatatatattgatgatgatgattgatgatagtaaatattaatttgtaaatttatgtttttaataaaatattaaaaatgagagaattaggaaaaaaagaaaaaaaaagactttgaagagattttatagtgtcatgtcaccgctttattcttctcatttatatatattgatgattgatgattgatacgtatatatataaaacaatttaataattatttaatttaatattattaatttagtttatatttatt

SEQ ID NO: 286945 - DNA, 571 bp, Cannabis indica
aggtaacaagtcttggttattgtcattcctctgattttgatcggtcttaacatacatctgtaaatgcgggttgttttccttatcaagaattcaatttcccgcttcagattgttgcattcattagtgtcgtggccgtagtctccgtggaatcgacaaaactttggcatgtctctcttactgacatctttcttcatgggcccgggcttcttatacggggctagcgactgagtggccatgtaaacactttctatatcctcagtcaagatggtaaatgcagtgtactttgcttgattctcccgaggagcctgctcgattttattggtgaactttcccttcttcccattcccttacatgttgttgttgttggagcgtttaccatttgagcttgaattatttgggtaatgggggagttgggtgaacgttccagtggaaggagcttttgtcttgccaggcttttgctcgccttctgctcggtgaataacttcttgaagtttaatgaaaccttcaacccgggccgttctttcttatgtccttccaaagttcaccgaggacttcaatgcccccccaatat

SEQ ID NO: 286946 - DNA, 798 bp, Cannabis indica
gtgtcggttcgggtccttgtcacggttcgggtcgagggctgggtcccaaatccaaacaccgactacgggttttgtccaagccctgggtccagatccggatcccaatctcgggtcccagtttggttcattttctggtgccgggtcacgagctgggtcctaggttcaagttcaggtctaggtcgggtactaggtcctggtcctagttctttttcccaggtccctatcttgattctgaatccaggtcccggttattgtgtgggtttaagtcccggtctaggttcaggttcgagtcccagtctcagttcgggtttaggtctctatcaaggttttgatctaggttcgggtttgggtttaggtcctggtcctggtcctagtcctagttcggttctagttccatttgtgattttgagttcgagtttgggtttgtgttcgggtcggagttcgagtccttgtctgagtttaggttcgggtctggatttcagtctaggtccagatcaggctccgggtgtgggttcgcgtcctgggtcttggtcttggttgggtcaaagtctcaagttccaatcccgatctgagtctcgattcagtactgggtctaagtccttggttctgatcctggtctgggttcgagtttgggtctgggtccgggtctagctttgggtctgattctaggtgtgggtttgagttcgggtcggagtctgtgtccgtgtttgtgtccacgtctggaccccgatctgggtctggttcgggtccaagtcctagttgggaaactgagtggggatccaagtttgtgtctgggtc

SEQ ID NO: 286947 - DNA, 542 bp, Cannabis indica
acccggactccaaataagacctagacccaaattgggagccgggcccggatcccaacccaaacctggacttgggacccgaacccgaacctgaactcagacccaaacatggaacaagactagggacacagaacaagggttgggacctagaaccgcaccccagtctcgatccgaaacccaaactcaaaactgggacctgggacttgaaccagaacatgaccaagactcgtcacagtgatctagatcttgactcgggattctggtaacggggcctggaagagaccagtactcggtttctagatctacaactcagactaggaccaaaacccaaacaaaaaaccaaacccgaacccaaacctagacctggaacccaaaattagatcctgaagaagaatcgccgaaccaggaccctagaacaagagttgggccatgacaaagacctggacccagaccttgaaccgaacacagacctagcctcagacccaaactgagactggaactcgagcccggacacggtcgtgttccgagatcagaactgagaccca

SEQ ID NO: 286948 - DNA, 162 bp, Cannabis indica
ctctcttctttttcttctttcaaatttcgaaatagccttgagtgaaagagtagtgcccacacacatcaagtggtatctcaatcatagtgtggaagattgtgtagaatccaatcaagaaggagaatcaacatcaaaggaaggagagaaagagatccaggttca

SEQ ID NO: 286949 - DNA, 530 bp, Cannabis indica
gactcggaccaagacccagactgggatcaaaatgctggacctagatctggaccgagatcctgacccagacccaaactttgacccgcactcgggaccggaacttggacctggacccgatcctagacccagatcggggtctagacttggacccaaacacgaacacagactctgacccgaactcaaacacccacacctagaatcagaccaaaagcgagaccccgactcggacccaactcgaacccagaccaggatcagaaccaaggacttagacctagaactgaatcaagactcagatcgggaatggaacttgggactcggacccaacctagaccaagacccaggacgcgaacccacacccggagcctgatctagacctagactgaaataaggacccgaacccaaactcagaccagaactggaacttgaacgtaggaccagcctcgtggcccggcaagagaaatggaaccagacttggacccgagattgggatccagatcgtgaccgagggcttggacaaaacccgtagtcgg

SEQ ID NO: 286950 - DNA, 608 bp, Cannabis indica
taagtggttaaattgaaaaaatggcgtgtttgagaaaatgggatggaaaaatgacaaaatggcaaaattgtaatgtggggcccaatccaatacccatggccggccacttagtgtaggttttaccatttatttttttattattttaatgccaaataaatctaacctaaaccttggtggttccctataaatagatagtgatggctcaaacttaacagattcatgaaatttcactttttcagaaatttttcctgagtcttctttctattaggccaaaactaccttctcttcttttcttcttaaaattttcataccttgagtgatagagtgagtgcccacacacatcaagtggtatctcaatcatagtgtgtaatactgtgaagaatccaatcaacaagaaggagaatcgggctcaagaaagagagaaagagatccaggttcagatcttgataatgctctgctacagaaaggaatcaagggctagagatctgaacggaatgagtcatttaattccgctacacccactgtaaggttggttaaactttatatgtcttatttctattgttttagaaacttcatattaggtatgttaatgtaacaaacttgttagt

SEQ ID NO: 286951 - DNA, 607 bp, Cannabis indica
tatatttttatatgtcattttcgggttaaataagtcaactgaaaaataacccatttaatatacgaattagttgtgtcaatccaaaaataatcaaaactcatttattttatgggagttttgagtcgtgttatagtgtctgactcaaattgttactcttatgcactatgtttcaaactataaaaatttaactgacactttaaatttataagggtaaatattattttgaaccatgtgttttgtaaaagttatcaatttgaccctctgttttgttaaatgacaaaataaatactgtattttctaaaattgtaaaaatatgatcctgaattgatttttttgtcaaaataaaacttaataataatctaatttagagattttataataaaactggttacatttttttgtatatgttcgtgttagaaattgtcttaaagtttgttatattaaaaaaaaaaattattgaaaattgagctcaatgtcttattttcattattttagaaaatataaaatttattttatcatttaataaaacagaaggtccaatttgtaacttttacaaaatacagagtccaaaatagtatttatctaatttacaaataaaaataaaatt

SEQ ID NO: 286952 - DNA, 1102 bp, Cannabis indica
atggattaacttttttaaaataattttctattcaaaaataataatttttttttattaagatgtattttaatattaatttttaaataaattaatattacttttaaattttaatcgggtttatgagaaatttatgggtaacttttttttaaaataattttctattcaaaaataataattttttttatgaagatgtattttaatattaatttttaaataaattaatattacttttaaattttaatcgtataaacctaaccggaaacacaatctctgaaaattctcaataaaataactaaccccaagaggatgagcaaccaatcgtgattatttaggataatcatttataatttctttttctaaatctcaaaccctcaaaccctatattgctattgaattattgcctcatctattctctttgatctttcagcttctatgctgtgattcatggcctctctgttgcgattcctcactttttgttgatttgggtgtaatattcagtgttctattagcgagttatcctttgttgctcaagtaattatttatttgagtaagtcttctattcccttgctatattgctttacttttaaacagctttgggatatgcgaaatataatgtcatccgttagagagtttgttgggcacaccaaaagtaacaagatatcattttcaatttataatccttgaatttttgatgatgctcattttgaaaggctaggtgtaattgtaatgtcggagtagctagatttttcccagaagataaaactcacatcagcaccgccattgctggcacccattctaacgaatactattcttctaagctcatatctaacacacaatcctatgggaacaacataaagttgggttgaaccaagatgagataaacatttttaagtgtaataccttttaatataatagaaaatacctagcataaaatttagtatacgtgcctcgcacgtaactttttactagtatagatatatagatatatagataggttagttattagataaatatttaattttaaaaaactaaaaaaataagaagaaaaaaaagacaatacgtaatgagatttttttaaaaaaaaaaaaaaacgtaactaaaa

SEQ ID NO: 286953 - DNA, 558 bp, Cannabis indica
aattacaatttatatttttgttaagaagtactcaacattggttacaaatgtcccacattgtttataaatgatgtaggcatcatccatgtaggttataaatattattctttttatgtcatattaattcatccaaaagtatttttgtttatgggtggttgattaatttcttaccctatgagtttttattatcttatttttaatgtcttatagttttttatctttcatttaatatacatttcataatttatatttttaaaagtaattatctaataaatatttattttataagttttttatatttgatgtaatatataataataatatacaatttattatgagttaattttatttcaagattatatatataattctatatttttaatagcccaaaaaatattcaaactaaattatttaaaatgaaactaaacgttattttttttctcaatatataaagaaaaatataaatcaaatgagatgtcatcttatgaacattttttttactatttatctattaatattttatttattttataatatgtacagtaatatatatatata

SEQ ID NO: 286954 - DNA, 532 bp, Cannabis indica
tcatattctcacgctgggtcaggtgagcaaactctttcctcttgccgcttctgaccgcctcattataatacattgcgttgaagagttcctggaacctttcccaggtcatagtagtgatgtcatggatctgagacaccatgtcccaccagaccagagcgtcttcctggaactggaaagtggcacacaccactctgtcgttcccggtgacacccataaagttcaggattttggtgatcaccgttagccactgttcggccttcatcacatctggacctcccagaaagaccggaggtgcttgcttccggaaccgttcatacaaaggttccaatctgttggccgccacaactacttcggcctgagcagcaggggcgggtgccactggaactactggcacaggcactgcaggagcaccctgctgcctcaacctctgaatctcgaagtcttgctcctctatccgggcttgcatttcagaagagctttctaatgccgcttaatttggaaattaaaaacgaaacatgcgcctattctacta

SEQ ID NO: 286955 - DNA, 513 bp, Cannabis indica
atttgttgggtgttttgactattttttgtgacaatactagtgccataaatatttccaaaaatcctgttcaacactctagaacaaagcacattgatataagacaccactttattagggaacttgttgaaaataaatcattgcaattagaatatgttgatactgaaaaacaattagctgatattttcacaaaggccctagatgcaagtcgctttgactccctcagaaagtctttgggagtttgcattgtttaattttatctgttcatcattcgtgtacaatagtgttgtgtgattcttctctagctcttaatcttctatcattgtttttgacaaatcatgtttatgcttttggaatataattagttaggatctctgtctgatcatactttgtgatgttgtgttaaaagattcatgttactctttatttgtgtctgggattaaataatgttcttatacagagttgagcaatttttgtttcatgcttgtcaggccccttgctggaatagagctaccc

SEQ ID NO: 286956 - DNA, 547 bp, Cannabis indica
tttctcatgttttctttgcggactacctaattctggtaggtcgagcaagtttagtagaggtgaatggattctggagatgtctagagagtttttgttcgtggtctggccaacaggtgaataagctcaaaacatctattttctttagtaaaaacacaccgttaagcttacggggtgaaatcaaggaggtgttgggaattgattaccctgaaggatgcattaaatatctggggctgcccctctttagatcgaggcggaaagatgttgattttaacttcattcttgataacctcatgacaaaacttcagggttggaaagcaaaaaccttatctaaagcgggccgagctactctcattaaatctgtaggtttggctatgcctatgtatgctatgcaaaccacgaaactctctacccgaatggtaaataagattgatggcttggtaagagatttttggtgggggtttgagaaaggaaaccatgggattcatctaaaggcttgggataaactttgtcttcctaaatctctgggtggtcttggtttccggaaaac

SEQ ID NO: 286957 - DNA, 476 bp, Cannabis indica
cttttactgggtcagaaatattgtgtattaaacacgtctttaattgttgaatctggagatgtctcaaaagaaactagacttaagtgattccaatggcgagctggaaccattcttctttccgaggtcaacaagatatgttttacgtcgattgtgggtatatggaaatattctgacttgccagggttatgagcctcgctcctgttagttggattaaactagaggaagtttcctcatagcgagatggtcatctcgcattcttgttcttcgagccgatctgacttttacacttggtttgattattgtaagctaaggtatgtgttactcttcctcggtgcctcgctattctcctttagcggcatatggtttctcgttaatacactaagcaccaattcatacattgattcctcgtctaagaccttacagtcagcggattacaaacatactctgatacttacgcaattaatgagttattccat

SEQ ID NO: 286958 - DNA, 615 bp, Cannabis indica
gatcttgggttaattgttaatttatctaacatgtggtatcagattgcctattgtatatgatttagaacctataattagtataattaatttgtatatgttaattatccataatttcatattaatttcgttattattttatgtgcaattttttgtttttaaatcttaaaactttaggggttttgtttatcattaaattctcgttctattgatatattatatgcatgaaatcattgtgtatattaagagaattttaaatttaaagttttagggtttatatgattataatgtgaaattataattgtgtattttgattttattgtttttaatctaaaattgattatagatatctcattattaattgtttatgaatgttcttaaatgattaattttgtattttgattaagattgatattccaaatcaattttttttatgttctttatttttggatagcttttctttagatctattgttttttagcaattaatagccgaaattagacacttagattgattagaaatcgaatcccgaacaaaacccatcaagaatcccgtgttttcgtcgattttttggccggaaaacgcgacagacccgactggggccgaaccgggtcgtct

SEQ ID NO: 286959 - DNA, 529 bp, Cannabis indica
ttttacccattagcacatcgcagataaggccaatgcctcgcttaggcaccactccaatttaatcggacaaaacaaacccaaaaggtttgctggctaacatcgcagaaaaatgaaagaattgaaccctactgaaaaggttcgggcgatgaatttattaccaaaggcaaaagacttttttgtcttattttagggctcgatggcccacttggtaaataccaccctcttatatatcgaatatataaaagtaaagaggcactgtacatcagaggaacgagaagaatcaatcaatgctcagacgctatatgtgcgaatagcccaacacctacaatttaccaggtgcactttctcctttattttaatcaagtccaatactttggtcaaaataatcattttatatttgatacattattattcgttcacttctaagagaaatagaaatatatctgaatgcatggtgaatctatgattttacatgtgctcattttatttgcaaaatagagtgaaacatgacacttatttcttgcataat

SEQ ID NO: 286960 - DNA, 816 bp, Cannabis indica
ggaagtctgatgtatgctatgctatgcactagaccagacatttgccatgcagtgggaattgtgagcaggtattagtaaaacctaagaaaggaacattggatggcagttaagcatattttgaaatacttgaagaggacaaggaattatgtgttagtctaaaagggtggtgttttgaatcccttaggctataccgactcaaatttccaagcttgtcttgatgacaagaagtctacatttgggatggtattcactcttgagagaggagcagttgtttgaagaagtgtcaagcaatccataatatttgactctaccatggaggccgaatacatagctactgctgagggtgctaaggaactcgtctggctaagaaagttcttcataaagcttgttgtcattccaggcatggaagaaccactggtgtaactttgtgacaacactagtgctattgccaatgataaagagcctcgaagctagaagaggagtagacacattgagagaaaataccacatcatcagagaatatgtggcaagaagagacgtgctggtagaaaaggttgatctgaaatcaaacctagctgacccaattactaagacattaatagaaactgcatttgaaaagcacaaagagaatttttgattagttgaaatatactgattatttcattacttgtttaatataatgcttggttcatatttttgttttcatttgtttgatatataaattcttttaaaatccttatcactattattttttcattgatttattgtgttgtctacacagtggagaataatcaagattatgtgattaaactattag

SEQ ID NO: 286961 - DNA, 607 bp, Cannabis indica
tggaataaaattcagttcatttcttatagtctaccattatatatgtcaataaacttagtagattctatttgttggaacaacaatttttttttttcaatacatagtaaactataatcaaacatacgtcaataaacttattagtttattttgatgtcgaagttgacgtacttcttcttcctcgaagcaacgatctctggtttttgttttttgttttttgttctgatcaactgataggtttattggtcgattgaattgtagatcaatttagagagatgatgatttgcttgttgtatacaacaacgtatttgagagatatgatgatcgattctccaattttcagatttgtcgaggtctccgtcaatggttgttttttcgtctttccgttttaatcaggttaaccacgcgcagggatggccgagaaaagtggagttgtgggcgcgtctccttcatcgccggtggttccaaaataatcccggctaataacggtatggtgatgacgtgtcacggtatatggatggattgtttttatataacgttgtttttgtaatattaatgtatataatgtatatatataaaaatttccctatattaaaataaatgatactaa

SEQ ID NO: 286962 - DNA, 512 bp, Cannabis indica
gaggatgtggcctcaagagcaaacgtgggctctcaggaaggagaaggaacccacgacgaccaatatgaaggaaacttcgataagtacgatgcctacgacgaaagcagctatacagaactagtactcttgagacaaaaggctgctgatcacgaagctgaaatcacggcccaaaaagaacaaaacaaaaagatgtaagaggtgatgctggccatgcaataagccatggaggcagcaggaatccacgtgcatcataaagtcatccctgctggacttggagaaacaccaggagaatcctcgccaagtgcccaaaagcagaaatctagggaacctagccctataaggtatccctctgaagggaaccagcagaaaaaccctactttcactcctgggaaaaagaaaaaggtgcaggatccgtgaaaagtccgctcagatttcccgaaagggaaaggtccgcaaaggggcaaacttcaaaaagggagtcttggcccctaggatcgagaggaccgaaagag

SEQ ID NO: 286963 - DNA, 507 bp, Cannabis indica
tagatcaatcaagatggacagcaacatatcgaaagagtggttactccacctattcaaaaccttgcagtgcataagctttaccagtgcattgagggctgattttttgcaacctggatataactcagcctccatctccttaaacaagtcatcaaacttgttgttgtcgttgatagggggttcattgaaagaatcagtagtgttagcagattcgtcaaacccagggtcccctcttaacatgtccgccaacacatctgccatttcctcttcgtcattttcaggaagttcaactgcgggctgagagaaagtctccccgtggaaataccaggggttgtacgaaggttggatcccgctgagaaataaatgaacccttatagttgcaggtgtgtggaaattcacattcaaacaccgcatgcatgggcatcgagctaatccgtcagcgttcacgtggttcgttgctaccgcaacgaactcgtcaacgccacttcgaaactctgcagagcgccggtg

SEQ ID NO: 286964 - DNA, 758 bp, Cannabis indica
tcaagaaagcagtaatactcttgccccgccaatctgtctagcatttgatcaatgaagggcaaaggaaagtgatcttttcgggttgctttgttgagtttcctgtaatcgatgcaaatcctccaaccagtgactgttctcgtaggaatcaactcattcttttcattcttgatcacagtcattccacctttctttggaaccacttgcaccgggctaacccacttactatctgaaatgggataagcaactccagcatccaaccacttgactacttcttttctgacaacttccttcatgggtggattgagtcttcgttgagcgtcgattgtcggtttggcattgtcttccattagaattcggtgcatcaccgttgaaggactgattcctttgacatcacctagtgtccaagcgatggccttgttgtgagctcggagtaccctcagtagtctatcagtttccacatcagaaagagaagctgacacaataactggcagctttttatctttacccaaaaactcatacctcaagtgactaggaagcaccttcaattcaagttctggaggcttttcagtagatggcatcagctcttttggaactgctcccaattcctcataataccttctgttcaagggcccataggaatcaagccacttcacataacccatgacctcttgtccctcttgctccgtcaattcatcttcagttaaactcagttcgagaggatcatctagcagctttttctcactcacaatttcatcaat

SEQ ID NO: 286965 - DNA, 666 bp, Cannabis indica
tttttgccaacttgccgtaaaatagatccctccaattttgttgtcttgcccaagtgctaacagagcatgacaacccaagattttcatgctatttaaacaaaaatcataaccattattattgttatgcagatatcaagtaatggaatattcaagagcttagaatgcagagtagtgacaaactccgagaagaagcagatttcttttgttttattctatatcaaaagataacatattttggtaaaaaaataataaaacactttggtatataaaacaaatgacaggaaaaaagcattccttaagtgttttagacataaataagtaaagggtataaataaaaactaatgtagaattgtataaacataaatgatcaacaacacaaaacccccttagcttagtttcatactagagttctattaaaacttggaactagggtaaaaatcttccacttgaacgaggccaggaagctaaatcaattaaaatgcttttactgaatataggtttactcacggaatgaagaaaaacagcacaacaatgaaacaaatatatgagaaatagtatccaactcaaattttaaagaacaaaattatgggatttaatttctagaaagtttgaacttctttccatgcttcaatagctaaaaccaatccaatatttgggaataaaact

SEQ ID NO: 286966 - DNA, 790 bp, Cannabis indica
atatatattattttgtgtatgttttggttattaatttagatgtatttatattacttaaataaaatctgaatgtctttatataatttgtaatttaaattgataattatactcatttaaattcttaatatattaaataaaataaaaatatttttttttagaaaaatatttgatatagtggcactttttgtgtgtcactatatctccaaaaaaattaataaaaaaagaaaaaaaagatatagtgacacttcatgtatgtggctgttaccttttcagtctgacaaaatctgactttatacgcctatagtgacacgcagaaaatgaatgcaaaagatttttgtgacacgtgtgaagtgtcactaaaaattgtatttccagtcaccttcattagtgacgcgcattgaagtgtcactatacacttttagagttactcaatgtgtgtcactaaaatccaattttctagtagtgtgttcaaggttaatttacccaagcttggtaaagaaagtgttggtaagtgtgaaccatgtcaacttggtaagcaattaaaaatcactcacaaacctgtgtctgatatcaatacctcaaaagtattggaattgcttcacatggatcttatgggtccaattcaagttgaaagtttaaatggtaaacgatatatttttgtttgtgttgatgatttctctcgtttcacttgggtagattttttaagagaaaagtctgacacttttgatgcctttaaaactctttgtttgagattaagagttgaaaaaggttgtaatattgggaaaattgt

SEQ ID NO: 286967 - DNA, 586 bp, Cannabis indica
acctcttgttctgactcgagccaccggatgcaatggatgttctcctcttttgatccatggccgaaccactacctcccctgctaaagacctgatgcaggaggggtagggagccccgccactcactggagtactaactgactccaacatatatccaactgtgcctccagctcgcagtgctttcttccacgatctcagcataggtggtcttgacgtcggtggtgatcataaggtcatacttgaccttcacattaaataccatcaagatatttttctttcttactgaaatcggtgggcatgattcccgaggccaacctcgtcaaccgatcaaactgagttgtgcactcggtcacactcataaaattcaatatccccgtaataactgttagccactgctcggcttccatgacgtccggacctcccagaaaaactggaggtgtctgctcgtggaacctttcatactggggttctattctgtttgccgctattactatctcggcctgagcagcaggggccggtgccacaggaacttctaacacagacactgtaggagcaccctgctgtctcaatctcagaatctcattatctt

SEQ ID NO: 286968 - DNA, 617 bp, Cannabis indica
cctagtaagctccttcaagactctgccctacaaccacatccagagatgagtcgtcagcaccagccagttgctcaccgacctcaggaaccagccggttcatgtagtgagccatcacctccttgcccttcttggcctcaggcagcacgggcatgggtggagttggtgcctgcacccgctcagggatcctcctgaccagtttggacccagatgttggtggcccagactccttagacttggcagatttgggagtggaaggatttgcagtagtcagctcctcagaaaggtcaataacctctccagaaggcctcttctctgaagacccctctccgcccttagacttcttggccggaggggaggcgctagagcttccgctcatcctcttccttaaagcgtcgatcatctgccgagacatgtctgcacagaacaaaaacagcgtggttagcaaaaaccagcagaaaatacaaagcatgaaagtcaagaagctgaaaaagaagtaaagcgcagagtgactgcccgcccagaaagtcagaagtccatcatcacctgatatctcagacataacagccttcccttttccagcatagggatgagagtgccgaacaggtgaaacgggctcc

SEQ ID NO: 286969 - DNA, 635 bp, Cannabis indica
agcaaaatcaaaattaatgtgtacaagtattcctaagaagctaccactgtcagcctaccagaagtcatgaattttaacaatgctaactgaaatctcatctgctcattataaagccaccgtcactcaaaatagcacaacaaaagtaacaaagaagtattaaaggtgtaatttttacaaaaagcaatgagaattaacaactgatgattgcattctgacctttagcttggacactcttgtaaaataacagaactgcaatcgatgagaaagaaatatgaaatctgagagagagaggcttttgttgtgtttgcctgtatgggtgatgaatgggttaatcgtaaagattgtttaatttttttctgtatgggtgatgaatgggttaatcgtaaagattgtttaattttttttttggtttaattattgggtttatttttgaaatttgaatgaataaaaaaattcaaaaattgtagtttgtttagagagatatgtaagttaatcgtaaatattatttaattttatgggtttaattattggattattttttgaaattggaatgaagccgtgtaatttgttagagagatatttcaatgaataaaaaaatttcaaaaattgtaagtttgttagagagtatatataag

SEQ ID NO: 286970 - DNA, 521 bp, Cannabis indica
tcgggaatttctagatgtttttcccgacgaacttctgggtttaccacctcagagagaaattgatttgttattgacttggcacttggagcagaaccggtttccaaggctccttacaagatgactctagcagaacttaaagaattgaaaattcaactccaggggttgctagatcgaatgtgcattgactaccgggaactgaataaactaacaatcaagaataaatatcctttacctaggaccgacgatctttttgattaacttcagggggaaactatcttttcaaagattgatctccgatcgggctatcatcagttgagaaattaagaggaggatatcccaaagacagctttccgcactaggtatggacattatgaatttctggttatgtcttttggactgaccaacgctcctgcagcttttatggatttgatgaatagggtattcaaggatttcctcgatatttgtgttattgtatttatcgatgacattcttgtgtactctcagtcagaagaggagcatga

SEQ ID NO: 286971 - DNA, 161 bp, Cannabis indica
ctttgtctttcctttatcattattcttttttacgcacacatataaaggaatcacttctttaactttgtacaactccttcaatagatcctccacatcagaatcaccacaaatcttacttggtgccatcttgttgaatgtttcacctgccaccttatgagtta

SEQ ID NO: 286972 - DNA, 502 bp, Cannabis indica
actagaaacaaagagtgaaaactaaccgaaatatgacccgaatcttagactaattttagcctaacaaattcccccaaactagattcttactcgccctcgagtaagataaatactactaactactaatctactaactacgctatcagataatcataatactactgcctcatgtgttgttctcttccattgcgcaaactagaatttcaattctaccaactctaacaattaatttagatgctcagtttataacactatgtacaactgcaaaaatttattcaaatgtgaaacattgttataaaagttttactctttccaacagttccacagcccgataactcataagcttgcatgcttacctttctccactaatgttgacagtattctttggaatcattaggtcttttcaaggctttaggtaatatggctcagatattcagggataggcaaaagacaattttggctcaagatatcataagcacacaaacagaacccacaagcttct

SEQ ID NO: 286973 - DNA, 490 bp, Cannabis indica
caccgcctttatggcagattgatctgatccgttgatttttgggaattcgaatcgtgcatctcccccaccgtgcgattggtaggtgatgacgcctgttcctcatgcgttttttcctataaaagccaccacctttccttcatttcggttactttccatttcttgccatttttgctcgaatttctcagagagaaaaattcttcagagtagcacgaactgacttagcacttagacgtttctttcagttttccagtgtttgccttcgccagttcttctcaactttcactcgtccacattcagtacccccagttcaacgatttactgtaagtttcttgcatccttagataataacatgctttcatttacttcgttcgttttctgggttcgtactttgagacttctgggtgcgtgagtgttttaagttcttcgagtgttttgctttatgtctactgctttagttgtaggatcgccattatcatgcctctgttataat

SEQ ID NO: 286974 - DNA, 535 bp, Cannabis indica
ggacgacaaccaccatgaacgggaccagaagcaaacgagaatcactgtatcgcatacctactagagagttccagagagagaaaagtaaaatatgaaatataatataattataatataatattatgcaaaaatgtaaattcaatataccaacatacgctgagtatgtaataattatacttgtgtttatcaaccaattctttaggcaatggttgccatgactaaaggggaaaaattacactacttaaaattgcattttccataatcagttttgacaaggtgttgagtttatagttttctaaactctaaaaattacaatgtgaagtgaggactttagtttcaaataataattagaaaaaagtgctaaaaataatatgttttttcagaggtcgaagagtatatagtaagatgcgtgacaataaaaggagtaactcatacaattttatatatagtattaagatctcacacattactaatgagagattcaataacatcccacatgttggttatttttagcacactaattttggacagatcg

SEQ ID NO: 286975 - DNA, 643 bp, Cannabis indica
tttcgaaattcctttgagtgatgagtagtgcccacacacatcaggtggtacctcaatcatagtatgtaagactatgaaaaatctgcatcaaagaaggagaaaagaagatccaggttcagatcttggcgatgctctgctacagaaaggaatcaagggctagagatctgaacggacggagtcataatattctgctgcacccactgtaaggttttgtaaactttatatgtgtttattttcattgttttagaattcatattagggtgttaatcaaaaatacttgttagtaaatctagatcctggtaaaataatttccaacaggtttaacgaacgacctttaagagaccacaggaccggacgtgacatttgaaagaattccacaaggccaaatatcgagaaatttgtgggtgtacacgtcgagaaatttgtagattttgaaataggtcaaagaccccaacattggaaattggcacacaattgaggttaaatgggagacagtagaagtatctgattggaccggcaacatttttgctcacaacgaggtggcaaattgggctcacaagtagctctgataccatgttagaatttgggaataaggtgaatgaggttccatctcaaaaccaattggcaatgggaggagtagccc

SEQ ID NO: 286976 - DNA, 505 bp, Cannabis indica
cgcgacgtttgtcgacttactgttttttgcaattatttcgcgataagtagcgataggttcgcgatattttgcgacatattggttttttataatttgtggtcattttggtttgcagattcaaatgtgtttgtagttgtactatatgatggggcttgggcagttgaaggtttcaactggatattcaataatccaaaaagtaagatgttaatgtttgaggttgacactactttagaaaagatgaatgatattttgtatgaagagttggatatagaccctattgtgtatgaactgaaaatagaggtgtgttatatgtacatgaaaggcaatatgataccgccagaagttttagtgaaagatagtcaagtaagattgttcttaagaatgaaggcaaaaatgagtgtggagaacttgctgccactgtttgtgactaaggttaaaaggcatgcgcttttggggcctactccgccaactgtcctcccaagaagtgttgttgggagttttgtcc

SEQ ID NO: 286977 - DNA, 625 bp, Cannabis indica
catgcatcacaagcaccttaattcaactcaaataaacatgtataaatctctgcaaacaacaacaaaatcacagccaccaataacaacctaaactaagcatgcattacaccattttcatcaaaattcaacaaactttaagaagaaatgattagaagctaacctagcttgatttgaacaccaaaaagagttgaaatcacaaggaaaaatccaaagttccttgctgcacaaagaggccaaaagagagagagaagctagagaggaaatggcttttcctttgaattttttctaactttctaaattttaaaactttggaaaatgaaaataaatgcacataaaccattcacttcagccaacaaaaacataatcaaacacatattattccacttactaagtccactaaaggacaaaatatcattggggcaaaaagaccatttgcccctccacactaaaataacataaataacactaaagaggtattttgggaaattctaaattccccgccattcccgacattcccaatgtctgataaaccgtcccaatctactaacatactaagttgtgattttactgagccaaccaccggaaatgcaaacttatgaaaactactaaatgacataaaaatgca

SEQ ID NO: 286978 - DNA, 587 bp, Cannabis indica
gaatttagaattatgaaggaccttggtgaagccaagagaatacttgggattgacatcaaaagaaccagacctgaaagactttcactatctcaaaagagttacattcagaaattgatagacaagttctgtatgaatgaggctaaatctgttagcactcctctggctcagcatttcaaattgactcaaaatcagtcacctaaaacagaggaggacaagatgtacatggattccatgccctatgcatcttgtgttggaagtttaatgtactgcatggtgtgcactaggcctgacctagcctatgcactcagcatggttagtagattcatagcagatcctggaaaggaacattggtctgctgtgaaatggatactcagatacctaaaagggtctatggacattggtcttgtctatgataacaagtttcaagatggaattgaagtaaatggatatgttgactctgattatgcaggaagtatagacacaagaaggtctataactggttatgctttcactgttctaggtggatgcatcagttggaaatcgaatctacaaaaggttgtagctctgtcatcaactgaagcagaata

SEQ ID NO: 286979 - DNA, 654 bp, Cannabis indica
gatgcattagttggaaatcgaatttgcaaaaggttgtggctttgtcttcaactgaagcagaatacatggctgctactgaagccattaaggaagcaatttggctcaaaggattcacacatgaactggggttcaaatctgaaagcataacagtgcactgtgacaaccaaagtgcactgcatttgatgaaaaaccccatgttccatgaaagatcaaaacacatagatatcaagctgcatttcatcagagatatcattgctgaaaaggaggttaatgtgaagaaaattggaacaaaggagaaccctgctgatatgatgacaaagtatgtcagtttagccaagtttaggctttgcctagacttgctaaacattctcaattgctgagagaggattcaagaccagttcagtccctaagcatcatcaaatctttctttctattaatgaccaaggtggataattgttgtgttggtcactaatagagaatgacacatcacctaattctaaatcctactcaactaaacataactgttttacctaactgtctgttatgacagttaggatcgagccttgtgggataaggctatatatagccatttgttgcagctttgagatgatgtttttttttgggaaaattcagagagagctagttcagtgtatc

SEQ ID NO: 286980 - DNA, 499 bp, Cannabis indica
tgttaaagacattaaaaaaaattataatttaagcatttagaatttattaattgatgattatattagaatgaataacttaaagttctaaacttacgcctttatcatctgagcaatgtctgacgggattttagatttaagcgggtttaagaatacaactcttcccgatgtcattgctataatcaacatccaatgcttgctgaaaaaagtaacaatgttatattaatataaaaataaatatcatagggaaagtgaaagagatgtgtgattcttaccctatgttccatggtataaaataatattgtcctacatgagtcatagtgtttaaccaaattgataattgattgatggctatcaccttgtcctgctcattgttataactaagaagctcgacatcataaaacttgtataactctttttgtctttgatttaaattttcccaaatgcatctgtttaaaaaagaaaaaaaaaaatcaaatagagtcctaaaaaaatgggcaga

SEQ ID NO: 286981 - DNA, 542 bp, Cannabis indica
gttgaaaattcgtggatgaaccaaaaagaagagggaaaaacgtgataaattatgggtggttaatggaggttacttgaattcaaatgaacttagaaaacagaaatgaagaatcgaaaatgaaatgaaaagaaaatgaaaaaagagagggaagagagtatgatttgattgatgatgcatggggagagcacacgtgtatgcatggtatgatgagtaagtggtaaatgtgtaataaaaataactttgtaagtaaaaatgtagtaataggcgtgtgtgggtaattttgtaataaagtgtgcaaaatggatttttcatgtaaaaatttcttattttaaagcacttttaatgaattaatattttggctgattttgaaatttataagaatatattttaggatttattttaaattttttgttaatattgtatataaatttaataagataattttgaattcttcttattacttctttcttctctagtttgcttagagtcataggtgatctttattattagtttaggtggcgtttggtaacaattttattttt

SEQ ID NO: 286982 - DNA, 694 bp, Cannabis indica
aactcttctttatttatttttaaacttcctcacacatatttgagaattttgtgcttaaacatgttttgggaaactaaatatattttcttttcttttcttttcatttcgcttgcttgattttgaattttttttttgtaggcatatgtgctttggtttggtgattttccacattctaatacatgattgatagtgtgcatagcttgttgaaaaatgtaaatattgtttgagcttgtgactaattcttgtgctagtttcattttgattgagatatggctaattttgagcacgaatgccttgatcattttattgtgtgtgatttggtgaaagtttgtgtaaatatatgattttgtgatctcacaagtcttagaattttgtttgattctctcttgaggcgaaatcctagacaatgcttaaccaaagacatgatttaggccatttttggaccgtttgagcctttcgagccaaccatagtattatttcatccctagtcaccccctttgagcataattgatccctttatatttttttttaccatatgtaagcctagctaaatacaaatcttctcaccatataccctttgagcaccttattattccaagattttgtttgttgtgtcatgaaggggatgggaggggtgcaatttttgtagcgtggtaattgggtgagtgttttcattgtggtactttattattct

SEQ ID NO: 286983 - DNA, 565 bp, Cannabis indica
gagcttcctcggcatatcgaaaaaaactttgaaaggtgttcttttggcatggggactttacgattcagagccacggtcgagctatccaaacctctgttctctggtttctttcttcggagaacagggattaaggacttatggcttcaatatcaatatgagaaactcccaagaatatgctacaagtgtggcctaatgacacatgaacacaaattttgcttcaagactccggcagtgattaaaaacaccaaaggcgaattctttccaatgtttggaaactggatggccgaagatgctattgaacggtctcccttcactttacctctgccaaaactggttcagtgagtggattgtgaaccaaaaggcggcaaaggatgaaaagacgagacaattgttaaagaatcagagacttagtttgcagatcgaatgcgcggattcaagggagcttcgaacgcaatacccagggaagagaagacaagtggagacggtggtggagacaagagttagctccggtgaactagtcatgaaccgatacccagcggtcactttgccggggattggagaagtt

SEQ ID NO: 286984 - DNA, 530 bp, Cannabis indica
acagatagcaatataaacaaaaagctgcatcctttgatacactatattcaagccaatcctgatagtctgcataccaagcaacattgaaggcccttgattgaggtccaaccttttctgatggaaatggcttgagatgaggttgacaagggcctttttgcatatatgctcgtcgaacttgatcacgaacttttgaaggatggtctaaaattggtattctcaacccggggtcactttcaagttcttcaagatatgtgttaacatccacacgacttgattttacagttccatcactctttcccatagaagttgaagactcttgtatacttttaaaatacctcttcatatctgtttgtagcaaatatgtgaaagattaatattatgatttataattataattatgaattaaaaaatcctacttggattatgaaatataaaataatgatagcaaacaaataaaaaagaatcaaccaaatataaaacacacaagatatactcaatagacaataaatattattaaaagttgttatttc

SEQ ID NO: 286985 - DNA, 859 bp, Cannabis indica
agatttctctcacctagaaactcgagaccagacccctctttgaaggacacgtgtatccagacttccagtgaaggctgaaatgtccaggagaggcttctcgaagtttagacctcgcccaggataaaaccagcgaggtatcgcggatgcgacttaattcacaccgcataaccgtaatcctcatcatacagggtagacccaactcgcatatgtcagaacatgtgcgagtgcctccctctatacctccgcggcaagtatagaggccaatgccctatgatgcagttttggtcccaatgacccaatagccctaacggaccaatgtaagttcgcatgtccagatgctaccaacttcagcatgcgacgtctgtaacgagcgatcacctaaggacgcagacgttccaaacgtacgtgcgaccctacgaactcaacagacggaacacgaacggtcaactcgcagatgcgaaggacgcatacgttgatgagttcagtaactgtcatatatttattaatgttaacgttgtctgagtttaatcatgacaatttaatgtgtaaataatggattaacaataaatgtgatcctcatgtaaccgattgggcacctgctttgtatataaaggggtgatccaccgtgaaaatgcacctacgaatcccttgctacagtggactaagcagaacaaaatctgactgaaccactatatttcattgtcttctgtattttttccagctttgttgtctgttctcgcattcctatttgagtactcgccgttttaggttgaatactcgcatttatcatctctcaaataattctatcttttaccagctaaattacacttcttggtgttgtgaaattctagtaacaaca

SEQ ID NO: 286986 - DNA, 647 bp, Cannabis indica
gggagatcattaggggaatgaactcatcaaacttaagcgtgaagctaagttgaaagaaggtgcaagggccaaacagtatgctcatgagcctctgaatcctgaagatgaggctgaggaagagcaggtgactccgctcaaaaggaggaagaaacttccagcccagcctaggcccgttgaacatgccattcgaattagggagcctagtttcccggctcggtcaccctctctcgtactaggaaaaggaaaggccgtcatggctgagataaaagacttgtcaggtgatgatgaaccttcaagtcttgctcggacaagcgcttcctgaaatacttagtcttgtttttaaacttcttgattatcatgcttttatatttctaatgccttttttcttctaaccatgttgcttttatcccgtgcagacatgtctcagaagatgctcgatgctctgaagaagagagttggaggaagctcaagctcatctcctccagccaagaaatctaggggcggtgaggcgaccccatccaaggaaaaggcaccggccggggaggttattgacctttctgagaagctaactatggcagacccttctactccgaaaactgctaagtccaaagatctcgaggaggaagctcggacaggcctgaacagtc

SEQ ID NO: 286987 - DNA, 610 bp, Cannabis indica
aaattaaaatatataaaatctaagtaacttagttatactaataagatatatgaaacccataccccttttaacatttcttaattaaaatacctccaaccattagaaaatgggagaaagaaaaactagttgaagattgtgtttaatctcaactttatcttatgaaaaaaagccgcaattggtacagtgggaccattgctataataatattcttaagaggtaagaactaaataaacacatagcgtggtacgtaacaggacaaacccaaaaacatcaagttggacccttcttctaggaaaggcccccaatatgggtgacaataaacgtgtgatgtaggtagaggaaggaggtatctaatctttatacatacatgtgctatatatttttggggtcaatttctaatgagggtctaacaacagctgactatgtctctctatctttatatatttattaatacgtatatgtatatgtgttatatttatccatatatgttaatgattttaaaaaatatatgtggtagtaattataatgatgataatttggccaggtatatatatatatgatcttccagtaacaacccgattaagtggatcatggtcggcagcaaatgctc

SEQ ID NO: 286988 - DNA, 244 bp, Cannabis indica
actattgtcacatatgcggccattctttcaccgcgcgtctgatactctactgatatctggttcaagaccagttgggagtcgctgtagacctctactccccatttgaggagccttctggacacttcaggcttttgcaggacttgccggagtgggtgattggtcaacaccttgattgggtgagcttggaaataaggcctccactttcttaaggccattaggaggcaaaaaaccagttttctaatga

SEQ ID NO: 286989 - DNA, 324 bp, Cannabis indica
caccaaagacagcacgtcaggcgtactaggacccaactaggaaggaccatatcaggtagtcgaagttctcgactctggagcatacaaactgggtaagtatgacgaaaaaatgcaactcattctagtaccacgatactggaatggagaacatttaaggaaatactaccaatgagtactcaggtcgggtagaccacttcaaagtactcaggtcaaatagaccatttcaagtactcaggtcgggtagaccacattaaattactattgaacattcgcttgtaagtgaatggcctcttgggcggaatacgcgcaaaggacttcagaaac

SEQ ID NO: 286990 - DNA, 625 bp, Cannabis indica
tgattttgagttagagattgaactactgtaatttgaagcttgggatatgttatatttatgttattatactgttttggaaagtttggttaggtttggtggagttttggatcgaatttgaaggagagaacccaaggaaacctggtctgccagaaccggtcgatcggtttgttctggtgcactagaaccggtcgatcagttgccttgcaggggaaatttctaggttttcttcagatttagtttttggcccgagaagttgtgtatcatctgttttaggttgtatatgggatgcttgacctattttgaagttgttgggagttgggttatgcttggttttgagttagggtttttatttcagaattttaaattaaggtattcattgagtttcaattgtagtgacataggaccgggatcgcctagcttgttttccactcaggtcggcccgtacgcttgagttctaaactaaggtaagaaaagtggtaaccaccgtatgtggctaaatattaatggttgaatggttatggccttgattattatcaagactttgattaaatatttgttgagcctaggttatgacctagggtgggaaacggttagtactgttatgagtaattactcttgaaaccgc

SEQ ID NO: 286991 - DNA, 590 bp, Cannabis indica
aaaaattagaaaattagaaaatagagttatctcttgaactctctctctctttctttcggctgggacaaagcaagggcatggaccagtttttctcttccatttctctgggatttagcaagaattcaaggaggaattaatcaagggcattcatctagcacgtgaatttctgttcaggtcggccagaacacttgaattcgggaatcaggtaagaactgaatataatgtgtgatatggttatctgaatgtatgtatatatgtgaatatatgcatgcttagattgttatttgcactaccaacacttgtatggttatgatacagagtgcattggtatagtgagtgttgtttgtgagtacaatacagtgataccaacacgagtacgggaaagtgctgaggtgtgtggtatatcactcagtggtactcagggtacgaaataaaccctaccaacactcgtacagtgaggtacgttgtgtatgtggtatagtggttgtaccctagtattgaacgttcatgctcatctgttaagccctgtaaataggtgtatgggcgcctaactacaggtcggaaattatgtgatatgttatatgcatttc

SEQ ID NO: 286992 - DNA, 454 bp, Cannabis indica
agttagtttttagtaggaagtgaaccaaaaatgatatggaagaaaagagaaaataaatatataatttagagtgatgtagagttcgaaccagatccaattaatgtcactctctctattctctatctctttcctctctggacggtggatggaaagcaccaggtgaagccataccaccgcgaccgaagcccgaccgacgctccaacctccgtcaacctgtaaagaaaagaaagacaaatcacagttgggggtttgggtgtctcagcgttggggataataatagtgtagcccgattaggccgatgattgtcggtggtagagctggggaaggctgccgcacaaaaaggagggctagggttttggtggatatgggttgtcgaagatgaatgggtttcaggagaaaaagagaaaataaaaagaaaaaagaaaagaaaagaaaaataaaataaaatattttt

SEQ ID NO: 286993 - DNA, 676 bp, Cannabis indica
taatatcccaataagcttaataattaataattagggtttatatttatattatgagttaaccaggtaatgagtgggattatgatcctactaatctagttcaacataaaattttaaatttgctatacatggataaataagcgtaatttttaaattacggagatttatatagcacatgtgaatgtaatatgaattatatgtgaaataaaaatattttcaggtttggcgatcttggagactcgatcgggggccagaaatgtcataacaggcttaattgataaaattaatgggaatattgtgataagttgataatttaagtattaggggtaattaggagtatgtgagatttaatgtaatgtcctagaagtagaagtttcttagtagctaagaaataataattattaataataaagttttattattattattattattattattattattattattttaataataataatctgattatatatatatatatatatatgataaacataaaaggataacaaaacctaaacatttctttctctctctcgtacatagccaaacccactgtaagtctcatcatcatcatcatcattcattcttacttattttctaaaagttttaccattaatttatgtttggaaattgagaatttagagctagcgtagaatatttgggtaagtcttct

SEQ ID NO: 286994 - DNA, 638 bp, Cannabis indica
taaagaggaatagagaaagaaactgttggtggatgaattctggatcttcactttgaatcactctgctcttcctgccgctctctgctgtgttttagggttccaaatcgcttcctctgacttccaatcgcagttttctatttataactaatttttagggttcgatggacaaaaatacccctgggtcgtacgggatctcgccgcggccaagtgtggtctcgccgcggccagataagtgctcaaaaatacagttctgtaacttccatatggccgcggcgagggtgtatctcgccgcggcgactgtagcctcaaaaacatgcttccctgcttcgtgatctagccgcgaccaagctgtatctagtcgcggctagatatacatctttcctcaaaaagtgtttttcttggctcagctcgtcttttattggactttttcatctcgagacctctattattccaaagaacctgaaaacatagaaaacaagcgtaattctgtcccaacacagtgaaaaacgcacataaaatagatccaaaatatagactaaaaatagcctaacaaactcccccaagctgaatctttactcgcccccaagtaaaactaagactcaaactagaaacaagcaacgcaatagataaccaaactt

SEQ ID NO: 286995 - DNA, 581 bp, Cannabis indica
tttgagcttgagtactggaagtcaaagtccttacgacataatcttgatgtaatgcacattgagaaaaatgtgtgtgatagcttagtaggtactcttctaagtatcgacgggaagtcaaaggataccgacaaggcgagaatggatttgcaagacttgcaaatacgacgagagttgtggttgtatgaagaccggaatgggaagtggaagaagcctccagctagttacacacttagtgttcaagaacggattgaatttgcagacttcataaagtctgtacgatttcctgacggttttgcagcaaacttagacaaaaatgtcaatttggatacgggcaagatttccgggctcaaatcacatgattgtcatgtgttgttacaacgtttactaccggcaggtatccgtaagttcttgaaaaaagaaatccgggacacaatcattgagctgtgtgtgtatttcaaacaattatgctcaagaacacttcatgtttcggatttagaaaaaatgcaaacaaatattctaactattttgtgcaagttagaaacaatttttccaccggccttcttcgacataatggttcacgt

SEQ ID NO: 286996 - DNA, 626 bp, Cannabis indica
ccagtggatagaaggtaattgctgagtttcgagtaccattgtctagaggcttgtttcaagccatagagacttttggttaacttacaaacagcatttgggggaatttgtcccttgggtttatacccttttggtagtgtcatatagacagtttcatttaaatcgccatgaagaaaggcattgtttatatcaagttggtacagagaccaattgttaatggccgcaatggcaagcataagttttaaggtattaaactttgcaacaggagcaaaggtgtgaagataatcaataccttgtttttggttgaagcctttggcaactaatcgagctttacatcgatcaacagagccatcagcattgtattttattttgtatacccatttacagccaatagcatagtgaccatcaggaagagtcacaactatccaagtgtcattggcttctagagcatcagtttcagtgtccatagcttttcgccatataggatcttttgctgccattttgtagctggtgggttctacaattgtatgagcagcgagaacagcggctcgaaagggctgtgtcaacctattgtaagacaaatgtttattaatagggtgagcagtagaagaagcagtagtagtattgca

SEQ ID NO: 286997 - DNA, 154 bp, Cannabis indica
gacggagacccacagtcgcgtacgacccaggtcgtcaccccctcaccatcgcgtacgacccgaccgccccctctgaaagttttctgggcttctaaggggtcaggtccgatggggcatttttcggggttttgaagtcgggtccgatgggcccgat

SEQ ID NO: 286998 - DNA, 558 bp, Cannabis indica
ttttatttatttttaatattaagagtatgtttaattttaatatttttaaattttatatttattttctttaaattttcaaactttaaatatttataaaattaaatgatttccattaatttataaaattttaaaaatacttatgaaaaaaaacaaaaattaaaaatctattctatgtaaagtgtgtctatataacagaattcttaacttttgagaaattcatgggtgactttttatttatattaaaaataaaatagtttattattaaaaataaaatgctttatgagaaattcatggatcactttctatttatatataataaaataaatctcattaaatccaaaaaaaaatatgattgggtttttgctgttgtacatctacgattggtttttctttaattatttattgtattccttttcctattacaatttagacattcctatagaatcacacataatatttcaatccgcacttctcttttttcttcttcacaacttattaacaaaatatataagtaataataataataaaaaagaagcgtgacttttatcaaagttcaca

SEQ ID NO: 286999 - DNA, 567 bp, Cannabis indica
taaacaacaacaggattctcctccctatcatctcatcttgcttaaactttaactgtgttttacgttttctgaattactttacttttcttaaatcataattgttttcgatttgccaaatagaattataagtatagtttagtggtatttaatccaattccctgtgggatcgacctcacctgtgtgagttttactacttgattgcgtatacttgcgtagtgtttataaattatagcaacaagtttttggcgccgttgccggggaattgtttaaagattaatattacataaaattatactaacttctactttggtatattttctcttgctaagtttctaacctttttcttgcaatattttcgtgattcatttcaggattcctaagtgtatgcgccgtcaaggacaagcagtcatattaccagttgactgaaatcgagaaaacttgcaggaggaaccgaaagaacaaaaggcaagaaagagtttcagcaactgctgaaacatcagaaatcatggctgccaatgtgaacaataatgctggaaacaatgggggtaataacggtaataatggtgg

SEQ ID NO: 287000 - DNA, 523 bp, Cannabis indica
aattataattataaaattagatcatgtctagtttatgaattttcactaagcaagggctaaattgtagaagaaaagagattctaggtcttatttattaattgaaagactttattgagtctaattaataaatatattaaatgacaattattatttaataattaatttttagttattaaataattggatttgggatttaaatggttaaattagaaaattgacgtttttgagaaaatgggatggaaagatgacaaaatggccaaattgcaaagtggggcccaatcagatacccatggctggccacttagtgtaagttttaccatttaatttttttgttattttaatgccaaataaatgtaacctaaacctagtggttacccataaatagatagtgatggctcacacttgattgattgatgaaatttcttgtctttagaaaaattgagccacctattcgatagacatagttgaaccttcttccctctcttttctttttcaaattttcgtaccttgagtgatagagtga

SEQ ID NO: 287001 - DNA, 491 bp, Cannabis indica
aaatgtaaccatgatgtttacaataaaaatgtaaacattgaaaccttttccatatatatatatatatatatatatttctatataccatgaattcctaaaattagctacgaaacagagcaaacttaattgtgctaggccaacaataatagaaaaacaaccaattagacaaaaaaaaaaaaggctaataggatttttgcccaacttaattttaaggtcgtcaaaaatgcctcctgaactattgcgattgttagatttaaggacttttgtctaatttcattcaattttactacttcagtgattgtttatatactaaatcatgctctccagactttgatatctaccaaatcatgccccacgaactttgacatgtactaaattatggcccctggactttcatccatgttagacttttttatttttttttgtaaaaaagtccttaaatccaacaatctaaatagttcaggggcattttcaacgaccttaaaagttca

SEQ ID NO: 287002 - DNA, 480 bp, Cannabis indica
aaaaatgctaaagctaaatatgctcttttatgttgtttggatagagacatatttaaaaatattgaacaagcctctaccgcttatgatatgtggaaaatgcttgaagttactcatcaaggaactagtgctatgaaggaaactaaaattcaaatttattccactcaatatgagaactttaagatgaaagcggatgaaaccattgctaacatgtatactcgcttcactacaattactaatggtttgaattctcttggcaaggtacttactcaaaaggatatggtgaccaagattttgagaagtctcaccaaggcttatcaaggaaaggaggttgccattcaagaagccaaggatctctcaacacatcccttggaagaattaattggctcactcatgaaccatgaaattttcatgagtgctcaagaagaagaggaagttgagaagaaaaagaagactatgacattcaagtcttcctcctcccat

SEQ ID NO: 287003 - DNA, 670 bp, Cannabis indica
tcacctgattaggtgattgcgattactcctggcgacgtgtagatacgccatcagtgatatgaagaatttctaggttatggcatagaatgaaaacaattgtagggcttctcctggcgacgtgtagataccggcgtcagtgacatatggataaggtaccgggcgtaggtacaagttcgtctaagttaggacgatgcgacatattcggtgaccaagttgtggcacgggctcacctgattagccgatgcaattatatgatatagtgggtgcaggtttttagcacaggctcacctaataggtgatgaagttatgtgatatatgggtgtcaagctatggcacgggcttgcctgattaggcaatgttatgtaatgaagattgctaatttatgaggtaacacatatatatatatatatataatttatatgattaaatgaatatgaattctattattggtataatggttttgtattaccaaatatttgtataatgatgtttattcgtggtagatgccagtagtgatttggatttcatcttatgaacaatgcgtgatggtttgattctgattgtgtataaatgacagtattcgaataataaactatatgattattattattacttttattgctgagtccttgtgactcacgagtgctatgtggtgcaggtaaatgcaaat

SEQ ID NO: 287004 - DNA, 591 bp, Cannabis indica
gaagccaacagaagttgtttgctgctcagaagaagatcactaagctgactaaggatctcgaggttgttgaccgttttgaggagaccatcaagaccttatctgttgaggtaaacagtcttcaggatgagaggacttcccttcgggcagttcttcatcggatgaaggaggagaaggaagccaaggaggaggagctttcggccgaggtggccaggttgaaggagaaggtcaatgccttggagacagccggtcttgagctcttctttgatttttggaaggctaatcctcaggccaattttgactacttgggtgatgctaaggacatgtaccttgagctctgcgcgtcccaagtggcctatggcgaaactgaggcggctgcttcaacctccagtcagactgctgatgtacctcctattcaagcaacagatcctcctgctctgattggcccagaagaaccgaaccaagagcctgggactccagctgcttaaacacttctctttttatctctttattttatatatcttattcggcctcagggccttttctaagacataatgaccggccaagcggtctttaaacttggaattatttttc

SEQ ID NO: 287005 - DNA, 639 bp, Cannabis indica
aatggctgaggtcctggacctggaagatggagttcagggaagcgcaagtggcaaaccgcttaggcgcgcaacgggtgagctgagaagcgaactcgccggtcatctccgcggcaaaaggagccaaggtaggccctaggaagcgacggaaccagtccgataaggggtccagattaaggtcccacggatcctggtattccgggtggttgatgctcgcctcaacctcagctcgcagaatcctcctaagggcctccacttcggcatacccccgggagtactcatccatagcatagttgtgtttggctatgcgaagctcctgcctcacctcgtcccccggaatcggggtaagctcgatgttgggaggagcaggattttcctccatcggggagaccccgccgtccagaccatgagcaggagtgtcggctctccgaggcctcttcggctcatcctgggcaatcatcttgcccttgcgcttacgaatcagagccacttcaggctcctcctcgccctcctctgcttcctccggaagggctcgaggctctcccgcaccctcagcggcttcctccgagaagtcccatcctttcccttggccttctcccggaagcacctcctcgtcatccactaagtcaatagtgtcggggg

SEQ ID NO: 287006 - DNA, 596 bp, Cannabis indica
tgttgaaatgtcttgaaattttgaaactgtgtgcttaattcttttaactctttggattagtttggatgcttgtaaagcctgtgtatgaatgcaatttgacgatctgtgaaatatgttataattgttttactgtggtttgtggtaagattgattgaatagcttagaacttgcatgtcttattctcttgaggcgaaatccttgacaacatttaataggaacatgatttaggcagtttgtttggatagtttgagcctttcaagcctaccataaaatgaatatcctttgtgaacccttttgagcctaaacttatttcgtttcttcacccattgaactaaaagatgtatccacactgttgtttttgtcctcattacattttgaatggtatcataagccttacaataagtttgggggagtgaaatatttagtgtgtggaagtattgaagaaaagaaaaaaatcttgcgtgattgagaaacatgttgaaaaaaaaaaaaagaaagaattgtaactcgacatcacttgaaaaaaaaatcagaaataaaagaaaatttcagtgatgtctggtgattgaaaaaaaaaatagaaaaatctcaatcat

SEQ ID NO: 287007 - DNA, 1091 bp, Cannabis indica
ttactaaagaaactgaacctttagatttgatacattctgatatatgtgaacttgatggaacgctaaccagaaatggtaaacgttattttattactttcatagatgactgttctgactttacttatgtgtacttgatgaaaaataaaaatgatgcacttgacatgtttaaattattcgtagctgaaattgagaatcaatataataagaaaataaaaatgcttcgtagtgatagaggaactgaatatgaatcaaactcgtttattgaattttataattcacatggtatgatacacgaaaggactgcaccatattcacctgaaatgaacggtaaagctgaaagaaaaaatagaacatttactgaattagttgtggctattttgttgaattctggtgctgcatctcactggtggggtgaaattttattaactgtttgttatgttctgaatagagttcctaaaactaagagtaaaatttcaccttatgagatcttgaaaaataggcaaccaaatgtgtcttattttagaacctggggttgtttagcttatgttaggattcctgatcctaagagaataaaactagctagtagagcctatgaatgtgtatttattggatatgcggtgaatagcaaagcatatagattctatgatctgaatgcacatgttatagtggaatctaatgatgctgaattttatgaacatagatttccttttaaattaagaaatagtgggggtacatctactagcaatgttcctaccattagggataatgagcacactgagagtaatgaaatagaacctagaagaagcaagagagctagagtagaaaaaacttttggttcagatttttgtgcttacaccttagaggaggatcctgccaacctccaagaagctttgtcttccatagatgctgacctgtggcaagaggccgttgatgatgaaatggactcacttattaagaataaaacctggcattatacaaacttaccacctgggtgcaaaactataggttgtaagtggattctgaaaaagaaattgaaacctgatggaactgttgacaaatacaaagctcgcttagtagcaaagggttttaga

SEQ ID NO: 287008 - DNA, 231 bp, Cannabis indica
taaaataatttccaacaagggctgggttcagtatgtcgtgcccactgctatgacccctatctctcacacaacgcccaaaagagaagaatttaaccttaaaatgaacatctgttattaattgaatagtatttgggcctaaataaaatctatcaaaagtgatcattttatttagcaacctatatgcatctaagcccaaagcaaacatataggctcacacaggcacactgattt

SEQ ID NO: 287009 - DNA, 552 bp, Cannabis indica
tttgtgattgagttagcgccaggacagcccaatctagggctccataccgcatggctcccaatgaattgaaggaattgaaggctcaactacaagatcttttagacaaggggttcattagaccaagttactcaccttggggtgcgccagtgttgttcgtcaagaagaaggacggtagtatgcggatgtgtatagactatcgagagctgaacaaagtgactataaagaacaagtatcccttgcctcgcatcgatgatttgtttgatcagttacaaggggcgatcgtcttttcaaagatcgacttgagatctgggtaccaccaattgaaagtccgagaggaagatatagcaaagacggcatttcgaacacggtatgggcattatgaatttctagtgatgtcatttgggttaaccaatgccccagcagccttcatggatttaatgaatagagtattcaaggaatatcttgacaagtttgtggtggtattcattgatgacatactcatttattcaaggacaatggaagagcacgaggagcacttaaggctaactctaa

SEQ ID NO: 287010 - DNA, 613 bp, Cannabis indica
tgtgctcactatataatgcattagtaagttaagaattttttagatgaagtcgactattgtgtgtttgtgtttatggaatttatacttacttgatatacggttcaacctctgtgcaattgttcaaaatgtaccactccgccttacgcttgctttgcatgggtaaggtgtcgactgtcctcataccgaggggtcggccaacatgcttgaatacagaaaattgtcgagttggcatgttttggacaatgtcattgttccggtcaggacggttgaatcgagtttccacttctcgaaagtacattgagcaaaaggttaatgcctcattaaccacaaaagattcagcaatagagccttccggacgggcacgattcctgacatattgcttgtacacagacattgagcgctcaatgggatacatccacctgtactgcactggtccacctagtatagcttctttagggagatgcataactacgtgaaccattatgtcgaagaaagccggtggaaaaattgtttctaacttgcacaaaatagttagaatatttgtttgcattttttctaaatccgaaacatgaagtgttcttgagcaaattgtttgaaatacacacacagctca

SEQ ID NO: 287011 - DNA, 504 bp, Cannabis indica
tgtttggacttctagtagtagagcaaatcctggtcgtcgattcttcggatgtccacactatgtaagagttttgtctttttagattcaaaagtacttctcatttatgtttcctgtacttaggcagccatgataaactaatagggttattttcaactcaggagaacgatgaaagtcgaggatgtgattacttttgttggatcgataaatcacatgttaagagaagtacagatgctacacctggattgcgaaaccaaatcaagattttggaagaagataagaaacgcaatgagaatgttattagaaaattaatttttatcatttttatttgccttttcatcattgtccaacttatattgcgttaaagatatgggttgtcgcaaaatgagtatgttttgtatatcttatgttctcaaaactaatgtttaacttaattgtgtagaacttaatagatacgtgtggatgatgacgaaaattacatttggtatgaagtacccactacgttct

SEQ ID NO: 287012 - DNA, 258 bp, Cannabis indica
aacaacatgtcaattagaattccttgaataggtgtgttaatgcgaagaagaaagccaaacttatcatgtggtacttcattatatcgtatatataagaattacacgatagatagaagattcatctgtatagatatcatcatctacatccaaaaagtcgtatgctttggaagaagcttatacagtttgggaaggggttttgattgatcaaaaataagaatctacttcaactgatatgcccttaggcacgaccatgcataa

SEQ ID NO: 287013 - DNA, 603 bp, Cannabis indica
tgaactgcctccgagtccatcacagcgtccctccagtcaaccaagtagcccttgcaacactgaccctgaagctaccacatcctctgattgcagctcactcgccaatcgtccaatgcatactccttttgacacggattaagtatggtgcacccctcggggtgaggttcgcaaaccaaccgttcccaacggcacctacaaaacacgcttccactgaagctaagtccctctggacaagtccctctggaaacttcacatgccaactctatggcgcaccatcctcctgatggcaatcgagcaagacactctcatcgcaggataaagtttggtgcgtcccacctggacgaggctcgcaagccaactgcacccaatgcagcaccaagtgcactcttgcacccaatttcttcgcgaagttgacaacattggccctccggcccaaccgcatacccacggcttcatgcaaaggtcccactgacccactgcatactggctcctctgagctcctgcttgtgtcggctcccaaaactgtgtcacaagtttgtatccccaaaatcaaccctgcatcctctgatgactcgctaactttcgacaaacttgctgacaccc

SEQ ID NO: 287014 - DNA, 613 bp, Cannabis indica
gtaaaaaaataaattttattgtaaatattataattaaatggcttaattattaaaataattcaagtaaggatttaaatataaatattaattgctgaaagaggtcttgttaaatatttaattaattatttaagaaaatagttaattataattaaataattctaaaaaaagaatgtctatttaattaattattttaagaaaatagttaattataattaattaaatctaaaaaaggaaagtctacctattagtgacctgctattataggttaaagaaaaatataaccatatggttacaataaaaatgtaaccattgaatagtcacccatatatatatatatattgagacggttattaaaaacatatgcaaataactccccataaatacataacattatttagttttttttttttttctaataaatattttggttgatttcactagtatatataaaacatgcaaatatatagaaaaaatatattcatgtcaaaataataataataataataataataatactaataatataagctgcgatgttaattaccatctttgagctttccatttatatggaaaaccacaaaatataaaaaagtaataatactaaaatgaaaag

SEQ ID NO: 287015 - DNA, 227 bp, Cannabis indica
atttcgtactggcccaactctactgcccacttgggtagccgtccagaagcatctggtttttgcagtatttggcgtagtgacatgttccgtgactgctaagtatattcccaattcctcgtcgtccagaggttttgagagtacgggaggttttgcaagttgtgcctttagctcttggaaagctttttcacactcctctgtccactcgaactgcttgtttcctcgcagga

SEQ ID NO: 287016 - DNA, 646 bp, Cannabis indica
acttacaagaacgtgtaagaagacgttgtaccaaaatatctactaatgaaataatcaaataagcaatagatcatactataagtataaaacaagcccaaactatccatgcggacaaacagtcctggataatttggagaagcgtatttaagagtccttactgactcagcctctccaaacgggtctaaggtatttcgtgcatgtgtaaaattgaaaaaaaattaaattatcactatgtgataatacaaatacaattgttctatcctatctttggtgtataaccaaagagatgaagaaaagataaaaacaatttaattttatgctattttaatatcttatgctcatttgtacttactttatagttacacttactttatgataacttgattaaattctaaatataattactttaaaattttattttattttatttttagattataagtataaaagttttaaaattttaaaaatatcacttgattaaattttaatttttattataaaagttaattcataattttttattttatttatttaaattacaaattacaaactttttaatcttcaaaatatcatttgcttacattttcaatttaacaataaatattcatttataattttctatttttttttttaacttaaaaattta

SEQ ID NO: 287017 - DNA, 705 bp, Cannabis indica
gtcgttggtgggtgaggagttgcattccatacttggggagatctgtgaaggccattcattcaacattgtccaagcaaccattcaaagaagaggagtcaaattatgtgatcaaagacattcgcttactttactccaaccctgaagaagtttttgagagatgtcctccccaacataatgaatttactggcgccaactatgctgatactgagtcagacattggatcagaaaatgtccattccttagtcccacatttcaaacaaaagaaacgtgcgaagcatgacgagtctagtcgtattgaagatgtcttcttcccactaactcagagttcaaaaatgccaccatctgatacttgcttcggagcttctagctctagggatgaacaacttatcgactttgatgggtctgatgattatgttaacaaaggatttgacagtgaggcattgcctgcagagccaaccattccaccagaaccgattgtctcagcaaagacgggtactccatcatcacttgttccttcagatttgcttattcctcgaccgaacccggtgttgacagtgtcagcttcagcaatcaccaactcagacttgaatgagcataccaaaaagtttgtgattgaatgcatgaaagacattcttcatttgtcatcttctcctctgaccacatcagacatttcaaaacatcgtgctgacgtgagtatgcaactcg

SEQ ID NO: 287018 - DNA, 490 bp, Cannabis indica
tggccgtagtctccatggaaaacgcaaaattttgtcatgtctcttttgctagtaatctttcttcatgggcccgagcttcttgtacggaattagcgactgagtcgctatgtacacactttctatatcttcagttaagatagtgaatgcagtgtgtttggcgcgatcacggggagtctgtccgggtttttcggcgaactttcccttcttcccgttcccttgcttgtggttgttgcctgaacgcttgccacttgaattgctggaatattggggaagctgggcggacgttccagtagaaggagccttcattttgttcggcttttgctcaccttctgctcactgaatggcttcttcgagcttgatgaaaccttcggcccggtcaaggaaatcactcattgagtcgaccggtccgtttttccttatgtccttccatagttcgccaaggacttcaatgcccccaagtatcgcgaataactttccatcctcggttacc

SEQ ID NO: 287019 - DNA, 502 bp, Cannabis indica
ggacgaagccaacatacatatctaatgtaatttataggcttccttacatgcacactaaacatgtaatacatatgcatactgttatactaatcttacctcaattccgaattcaggtgtgccggtcaacctgagtggaacgaactacacggcgatttacaggctcctaaaccttaacaatcacaacacttaggtgcttcactaaatcacaacggggacaaaggttttaaaaccaaacttaacctactacaacttaatacaaaaataccccaaactagcaggaaacaaactgcctgaaaacctgaaactagcacgaaacgacaagttgagaaaaaccggtttcacaccctactgcaaaatccgggtaaccggttttacaagcagtgtaaaaccggttagccgattttacccagaaaaccaacaaaaatcaattctccaaccaaaacttttccaaactcaaccaaactttccagacttgcgaattagaccctaataaacattttcc

SEQ ID NO: 287020 - DNA, 657 bp, Cannabis indica
ccaattacaaatgaactctctccacagaattctctatcaaaaagccttaatttgtaatgctcccatataagcaaattttaacagaaataactaacaattagtgaaagagcctaactaaaaatcactaactcaagactactcacatcatcagtcagcacaagtgtcacgaatcagtcaccccacaaaaatcattctccttttctgtcaaataaattaatcttgtttgaagagaaggtgtcaattaattgtcatatattaataatgttctaacttggggtgtgttctattcatctatattctccttttaagtatattgtttgattgatttgaatatatatagttgtgatgactaatagattttggactattaattattatttatttgatttgtaaatgcagtattctaaatctgaaccatttgacgcttggattccgtacctagctgcaaatattttcaatctctatgtctgtagagaaaaggtacttcattaactaaataataccatgatgtagctacctactcgttgcttctcaagtcatgttaagtctattgtgttgagttaatgctggatgtaattggtttctattttgttgagctatattcaaaaaccaaacaacgagttacacttagcagctacattagaatacttgttttac

SEQ ID NO: 287021 - DNA, 890 bp, Cannabis indica
acatggtatcagagcgaccaaggtttaagatcctgaagactggtttgatatgtacattggctgcgaagactcgttcgactcatgggttagtatgtattgattgttaatttagtggattatttattaattgattgaagtgtttgcttattgaaatgtgtaagctgttaaagaagcatgataagttatgataaaattgttaaatatgtttatgcatatgtggtaatgcttattagcattaactctagtttgaaagattttaatgatggaaagaaatggtcgtgagtgtactggaaaatgtacctggggcgatctagtaagtataattgtgagcttacaaggcttggagttggtagcatgagtatgaatcttctactaccacagagtgaaaatgaatgtatgataaagtaagggattaattgagtggtaaagtagtaaaacatacatgattaatcccgggcagtgtggtgatggggaatgacactaaactgaactgattggtaaggttctattttgaggaagcgactattaaggccgctagagagcctaatctagttgaaggtgggaaaagtatatcgctttaaatgtggatatagttgtttagtaactaggggtatcctagttctatactcaggtggttaatttaacatcttatgctaagagagtgtaaagttgagatgtaagagacactagcaaagtgaatgccaaggggtgatgacattttagattttgtttgggtgtttgtttgacctagactgagactggagctagtcttttccaccgtgataagttgaatttctatggaccatactttgttaatcgttttaattgattttggtacaatgtaatcttatatttcaagaaggatgattggaagattgaaaagttttact

SEQ ID NO: 287022 - DNA, 577 bp, Cannabis indica
tgtatgtaagttattttcttcagttctcatatgctctaatatatgttcagttttcctctgttgttctactgttgttttttagttgttctgtttcttttcatttttgttgtcttctcttgtatgttcttttgttgtaccccagctccctacatttgctgcatttattatgttgtttcttttcccatccagcttcaatccttttttttggtcttctagatttcacaactttaatagaaggtaagactattactgtccatgattatttcattctggttacctcaaataaatattcagtaattagtttaacttgtgtaatttaaaaccaatatttgttaaacatacaaaacaatagtggaacaacccaaaaacaacattaaaaaaccatgacaaccccaatattaatggttttaatgtttttgcttcatctaaacgaatttaatggttgttttctgcctgttctggtgttgttgtagtagttttgtctgcgggtgtggaaaaagaagacctcattttttatttttgatgtttacagtataaaagaaaaaaaaaagtctcaaggcagtataaaagttatttt

SEQ ID NO: 287023 - DNA, 798 bp, Cannabis indica
ttgattccctgctagtttagggtattgccatattatgttacagtagataggttgttggtttaaaacctaagtcccaactgtgaattagcgagtcacttatgcgtgttgttatcgatgtgatttaggagcctataatttgccgagcagttgttccactcaggttgatcgacacacttgaactcggaattgaggtaagattagtataatatcatgcatatattattgcatgtttagtgtacatgttgttatttcctgttagattacattgataacagtaatagtatacatagagttgtgctgattactgataaatgtatgttggctaaaatactgattgatgctgtcacatcaatatggctagagtacgactagcatattgagtatacgctgacattatggttgatagtattgtcttatgaacgttctaaactcagtaccgtgtgggacacggggattagggttatgatcgggtgtatgggcgcaaggttatgacccgggttatttgtatgtttatgttatgcttttctaactgagtttttcgactcacggtgctatctttatgtgtaggtaagggcaaggtttaagctgaggggccgtgagtacgagcaagtgaagattgtacatgtcggggtggttaggcctgtagtgtacgatctttgggacatcgaggcttttgctgcatagtcgctgggcgcaaaacttttgtttatgtgtatatcgaactttttaaaaaagatttttgtaggatcctagaattttatatatgtaatactttaagtttctaattaaataaggaaa

SEQ ID NO: 287024 - DNA, 750 bp, Cannabis indica
aagagatttttttaagagattatacacttctgagaagacaagaaggagaagaattgaaggaattgagtggttaaaaattttggatttcttggagggacaactagaaaggccttttgaagaagatgaagttaaaagtacgatctttagttgtgaaggtagtaaggctctaggtcctgatggttttagtattacagtctttcaaactagctgggaagttaaagaggatttaacggatgtcttcaaatcttttgagaaagatggaacgattcaccataaccattaatgcaacaacttggttatatggaacaatggaatggatacggaagtatggaggattgatcagaatatgcaaaagtatgcactgtaatggctttcattgtccgaatggacatgcaaggttctctaagaattcgctagccctactaggtagtggtatccttaaaacccactggttttggatatataaatcgtttaggtgttgatagttgttgagcacaacataaggtgttcatgctcaccttaacaaagcatggatgattgatcacaatatgcgaaagtactagattgatctactacgagatcaccttatccattgaggcaacaacttggaatggacacggaagtatggaggattgttcagaatacgcaaaagtatgcactgtaggggctttcattgtctgaatggacatggaaggttttttaagaattcgttggccctactacctagtggaaggaatctatccttaacac

SEQ ID NO: 287025 - DNA, 497 bp, Cannabis indica
agccccatccggtagaccggatgctgcaggcttcactgaacaggaattccggttcagtgcaggaagcaatcaaaatttcataactcactcaaatcaaacccaattcataccaaaccttccagacctgttctaaataccccaatagacatttccaaagcatcaaaacaacccagaaatcacagaatcaaaaatcaccatgtcagctccaagctttcagttcaaaactcaaacttggctaaagctcatctacaagcattaaaacctaatttaaactacttaatcaagcatattataacctcagaaaacaacagaaaacataatcaacaaccacagcaactaaactcatcaattcaccattaaaatcaagattttgagtaaaaatttcaaacttgattaacaccctaaatatgaattaacatgcatcataaccagctctaatctactttggaatttattttaccaggttcttagtattggaatttattttaccaggatct

SEQ ID NO: 287026 - DNA, 672 bp, Cannabis indica
ttgattttccttgtttcaggttcccggtgcgttagagttcaaattcagtcaattgacgaaaagacgggacaaactggtgaaaaatcggccaaagctgctcaatgggaatcagtagtcgcgaccagcctatagcctagtcgcaacccttttatttggtcgcgactatggtcgcgacttgaggttttggcagaaacccagtttttcgagttttgcctgtggtcgcgaccagcctttaagtgggtcgcgaccaggcacggaaaacgggatttttgacctaattctgatttttttccaattagaggcacacctctcattcctatataagggatacgattcaaaaggccaagaaaaatcagaaattggcccgaaaagtgaatgaaggaggagaggaagcaatcttgaagacccggagcgatatcaccatctagtttctttcttttactctctatttctcttttatgtctatttttgtttcagaattaatcatggatgtttatattatttttatgagctaaattcccatttagggaggatgatgaatcttgtttaaagttttacctagttaatgaataattgtcattccttcaatcttgattcgtgaaattatctatatttgtgtttaattccttgtgtaagcttgatcaccttttacatgttttatgatctcaattc

SEQ ID NO: 287027 - DNA, 731 bp, Cannabis indica
gtatttttacgtggttggggcattaatgagccttagtccacgagtctgtgtatttatgagagtatttattacagagaatgttcttggtagtttttctctttagttcttatggaacccagaattctcgacccttgccttaatgagtttggggggtatttatagtgtttttctggggtgatccccagaactgaggtatatgtctttctgtattattcagtaaaggcacacattcccaacgagtacatcataggaaatgcatggtctaatccctaggctttttaggggttagatggatataatccattattctttcttgactgatgtgatttctcataaagtagccgtcactaggctcattaatcatagcatagtagctgcagaaggggggttacactgtcagactttaatacttatggcagtttcaatacgccttctcccatgcggcattaaatgcgaggtgactgttcagataggatttgatacctctcggaggtgcttcgtctagccttgctcccgggagtatatgaaatcttcatgccttctccgagaggcatgttaaatgctgatccttttgattaaggagacttagtcgaattatctcaaagtcttgcttcttctatccacgtgtcacagtcaggttggtccacgtattttggacaaaattaggggcaacatttacccccaagccttgtttggtaaaaagtaaacaaggcttgcttaggtgcctccgg

SEQ ID NO: 287028 - DNA, 553 bp, Cannabis indica
gaaagttcttatttaggatgttaataaacatcgatttgtggaaggcctgaaaccaatggttgctcgagatgtggaaattgtgtcaaggggtcaattctgttatgctcaagttgtcgaaatggctcttacggctgagcggagtgaaaacaaaatttggaaggaaaatgctgccaggagagaatctaagaaaggtggagccaattctaatgaccacaagaaacggggacaggaccagtccgggcagccaagtcaagacaagaggtacaaaagtgataacgaccaacgatttaatggcagcagtgggcgaaacattccagaatgccctaaatgtaccaaacgtcatctcggcgagtgtcgcgcaaaagcatgctacaaatgtggaaaagaaggacacatcaaacgcaattgcccactgtggggacagactgggaacagagcagaacccaagaaagatgacaagtatgttccagccagagtttttgccatcactcaagcagaagctgaggccagtccttcggttgtatcaggtcagattcctatggccaacaccact

SEQ ID NO: 287029 - DNA, 578 bp, Cannabis indica
ggataaagattattcttagttggggaaaagcatacatcaattttgtccacattaataagggataatttcataaatacagaaaaacaatcaaaaaaaaaattataatatacagtcgtatagattttaaatatttttatagtttttaagattttattaacaaaaaatataattttttgatgtatttttatgttgtacttttattattttgttttttatttttcttatttatatatctaattttttatgttattttgatgttatttttctattactttcattagattttctttttgttttctttgtgtttttattagaataccgtaaaaatactccacaatgtaaagtagctggtattagcgccaaatagtaaaaagtaaaagaaaaaatcaaacaaatgattaatcctcaacaaatgatatggaggtacataatcaaactggcttataatagtcttgttcctaagcaaaattcgatgcagtggtatggtgaagtttagggtcagtttattactctaaagtaggcatgtcaaaaagatctatttagttggagcgggttggagctccaatccgacggatcac

SEQ ID NO: 287030 - DNA, 652 bp, Cannabis indica
ttcgcttcatatttatttttttttaaaaaataaaacaaataaaactatagtgatcgccgaagttgtcactcgtgccagaaaagtcaccgaaatttactgtcggcaccggaaaagtcgtcggagtagccaccggtgccggaaaattcgctggagttgcttccggcgccgaaaaagtcgtcagaattagcattgtcgctggaaaaatcaccaagaaaccggtttcttgatgaaactgatttttctggtaattttaccggtgagaatgccaagtccgacgactattctggagtttgatgtcagtgcctaaaaagtcaccggagtagttgccggtgtcgaaaaaatcgctggagttattgtcggtgtcaaaaaagtcgttagaattgccattgtcagtgcctaaaaggtcgctggagtagttgcctgtctccagcaaaatactagaaaatcaccaagaaagtggttttttcatcaagaaaccggtttcttcaccaaaaaagtggtttcttcatcaaggaactaattttgttacacaacaataataaagattatgaaaacaaaacaaaaatgatatacactgaaaataattgaaactagtttcatcaatcaaccaaatagagaaaaaaatacaaaaaaaattaccaagaaactggtt

SEQ ID NO: 287031 - DNA, 600 bp, Cannabis indica
agttgcctcttctactttactgttcctccacagtactttcaccagtgccactgtcttgcttctcaagactttttctcttctatcaagtatctgcactggttgttcctcgtatgacaagtccggctgaagttccaatgcttcataactcagaacatgggacgagtctgagacatatttccgaagcattgaaacatgaaacacattatgtacagctgccagcgctgggggcatagccaacctgtacgctacttgccctatcctctcaaggatttcaaaaggtccaatgaacctcgggctaagctttcctttcttcccaaagcgttttatgcctttcatcggagatattcggagaaataccatgtccccgacctgaaaatcaatatctcgacgctttggatcggcataactcttttgcctactctgagccgcgagcattcgcgctctaatcttatcaactgcctcacttgttttctgaacagcttcgggacccaagaactttctttcacccacttcatcccagtgaatgggcgatctacattttcttccatataaaagttcataaggagccatcccgattgttgcctgatagctgttattata

SEQ ID NO: 287032 - DNA, 509 bp, Cannabis indica
tgattttcattatttcaggttcccggagtgttaaagttcaaactcagccaaatggcgaaaaactgggataaactggaaaaaaattggaaaattcggttccagaagctacagtagtcgcgacttcatgagagccaggtcgcgaccctttttccaggtcgcgactctggtcgcgacttcgagatttggcagaacctctgattttcgaggattgcctgtagtcgcgaccagcttaagggctagtcgcgacttggtacggacgtcgtggttttgacctaattttgatttttctctcaattggaggcacactactcatccctatataaggaatacgacactgaaggtcagaattaagcagaaatagacctaaatagtggaggcaagtggagagaaagctatcttgaagacccggagcgatatcaccttctagtttctttcttttacccttaaattcttctttatgtttgtttttgtttctgaattaatcatggatgtttttagagttattatga

SEQ ID NO: 287033 - DNA, 519 bp, Cannabis indica
tccgtggccctttgccatttgggtaatttacctaatcgggcagttacctaaaggtaaaggcggagtgcagtactcagtggtagcagtcgactactttacaaaagtggactgaagccgaaacacttgcaaccatcacatcaaagaaggttcaagactttatagtgaagaacattatatgttggttcggattaccgtaaaaaatagtctcggacaatggcaagtagtttgacagccaatctttcactaatttctgtgcgaaccatggtatcatcaaaagtttctccgcagtggcacatcctcaagcaaacggtcaagttgaagcagtcaacaaaaccttacaacggaaactggccagaagaactccccaaagttctatgtcataccgtacaacggaaaaaacagcaaccggtcagacaccatttgcgatggcgtacggttatgaagctatgctgcccgtcgaactcgagccaccttcccatagaagattgacgtacgatcaaggtaccaatcacatactcc

SEQ ID NO: 287034 - DNA, 672 bp, Cannabis indica
ttcgtgaagctctcagctggattaagagaaggcttggcacggggtagttgtggagtcggattgtctctcggtgattcaagcaattcgtagtaaccttcctttattatcttattttggaagtgttatatctgattgcaaattgttattggaacaaattggtgatgtttctatttattttattaagcggtctgctaatagcgttgctcactcctttgcgagggcttcctattttgttgctgatcgtactctcttaagcaatgacgtttctactgatttgcttcatgtaatcatgaatgattgcaattaataaagttgattactttcttcaaaaaaaaagaatgacgacgagaaaaaaaaaaaaaaaaaaaaaaaggacaagttttagattttttggaaacccaaaatcaaatttggtaactataaagatttgatattgaatatataagttgggtatatcttcataagatattatatatattattgcaaatattaataaaaataatatatttctggggatatgattttgtcccgttattgtactttcacggattgtaatccgtgatgtacgacagccgtcagatgagggaattatttgatctgacggctgagattgatctaggtgtaattagggttaaaaagtaaaaacgtactctgacactcatttaatgtacc

SEQ ID NO: 287035 - DNA, 454 bp, Cannabis indica
gctaagttttggattgaaaattgaagaaaatagatataaggggagaaggttttatcgaaggagggagaacgagggtttcgttcgtcgttcgttctgttctgtttcactgataacttaatatatatatatatataaaagttaacttacgttaactttatatatataaataatattataataatataataataataataataatataataatatattaataataataatataataatattaataaaattttattattaatagttatcttataatttcttagccattaagaaatttctatttctaaggtatttagccaacttcgagtactctaaaataccccgatatttctaaaatcaacttatcccaataatctcatcaatatttctaactaaaactgttgtgacattttttggcctccaatcggggtctccagggtcgccaaacttgaaaatatt

SEQ ID NO: 287036 - DNA, 771 bp, Cannabis indica
tataatcttgagtctgtattcaagtctacaaagaagaaaaacaacaatgctaccctcgggagaagattttataaagctttcgggagattgctattcatgtcttacatcgggaggaagcaagcactcttcaaggagatcaaagggagttcgagcacttgaagtttcagcaagaatcgattaaaagatagaatacgtcaagctttcgacatataattagagggagtctatttatgcataagtcaattactttgtatctttgagatctatctaatgaatcttatctctgggcgtggccccgtggactagtaacaattaatctgagttgtctacactgtttgtttttctcttttggagttacagagttgtcttctgtagctacaaaaaaactgttttagtaccagttttattattccgtatttaattaagaattaatttaattaaataataaaactgagaatatgaaaatacgaaattgacacaaagtgctttttctgctaagccgaagaagagactttgcagtatttgatctttgattgccccttctcgtcaaactgcttaaggaaaataaagattggctttcttggaggatgacttccaattctttgcattgaatgtaaggtggatcgaaaaagcgaaggttagcgaggttaaaaatactacaaaaaactgccactactacaaatttaccttttagtgacactatttagtgacacacacaaaaagtgtgggtcactaaaaggttaggggtaagttttagtgacacgcacaaaa

SEQ ID NO: 287037 - DNA, 562 bp, Cannabis indica
aaggctttttaggaatgtatgctagtgggtgttcatgaggttatgtgtgaaactgggtaacatccatagaataggacctataaactgacataaccgcacacaattcataggtattgtttcacatctcgaatactcgtggatattcggatgaacaatttgaatgttcgcgggtattcagatgaacagcttgaataatcgcatatttccaagacttacttccattagactattagctagatcttttaagatttttatatgtcgtgggccgagttgtgagagtattaattgccattccaaatggtgggtgtgtcacagtattctaatggccatatatgcgattatatgccccttgagatactgtgatacacccagccatttgttgacgtgcgttaatactcgaatgatcgcactctttggttgataggtagtctcggaacggtgggggtctcccagtaacttcagggttatgctcgaaaatgcatacctcttgagtcactgggaaactcccagccgtttctggaggtataccatttaaccgaggatgcgtgaattacttgcccaa

SEQ ID NO: 287038 - DNA, 507 bp, Cannabis indica
cctagtatacaaaaatgtaattttatttttttgagtaataataaactttcatgatcaagttggactaagatggtaggctcacccaactcaaggacccttaaattttcctcttttttaaattatacatttttttaataatttttgaaactatgcatcacatatcttttaagtaaaggcctatttatttaatttttttctaggactcatataatttcaaagcggaccttgtttcattcagattttaaagtacaaagacatcatgaaaaattaattgaaagacaatacatacatcaattccaacatttccctcatcctgttaaataattaattaggattatttaagtcttttctatcagtttaatcttttacgtgagtttcctatataagacttgtttattagttgtattatttatttttttgggatgacccgaacccagttcatacccaaaaatttgtcactattttttgtatctttttggaagattctcttatttcttagaagagcaa

SEQ ID NO: 287039 - DNA, 708 bp, Cannabis indica
agatagggggccatttagtagtgggtacgattttactgaacccagccctccgccatttagtccaatagctcgagtttatttgccaaagtcggactcgggcgtaatcattattatgtgatttagcttagaacctagttattagtgactagtgatataattaagtttatattttgctatctgtctaaatatgtgcatgtgcattttagttaggatttacttttatttatgtgactacctgacacacatttccttactgagtttagtagctcacccttatcaaattaccatgtgcagaccaaggtaactgaaagtctagaatgccggtggcgagtggaactttggacgcttgtgtgtgtgaactcgctgaggaccatataactgcgggcggtctagggcgctctatttatttatttacgctattaaatttatgtcgcaattattttagttattatttattatgtcttttgtacgaaaactggccagttgtgaacattttcaagtattaaataaaaatgcgacattatgattttccgcgtttaacgcttgtaaataaaattaatatttttataaaagtacgggcgttacagtttggtatcagagccacagttatatcggtcccgaacgttctcacgagttacacacatcagccaaaaagtttctgcttgccaccaagtaagtccattatatatgcttgcattttatgtgtat

SEQ ID NO: 287040 - DNA, 595 bp, Cannabis indica
ggtcccaaatccaaacaccgactacgggttttgtcaaagccctgggtccaaatccggatccaatctcgggtcccagtctggttcgatttctggtgatgggtcacgagctgtgtcctaggttaaagtttgggtctgggtcgggaactaggtcccagtactagttcggcttcccaggtccctatcttgattctgggtccaggtgccggttattgtgtgggtttgggtcccagtctaggttcggtttcgagtccctgtctcggttcgggtttaggtctttgtccttgttttgatctgggttcgggtttggattttggtccttgtcctagttcttggttcgggtttgggtttaggtcctggtcctggtcctggtcctagtccttgttcggttctagttccatttgcgattctgagttcgattttcgatttgagttcgggtcggaggtcgagtccttgtctgagtttgggttccagtctggatttcagtctaggtccagataaggctccgggtgtaggttcgcgtcctgggtcttggtcttggttgggtccgagtcccaaggtccaatcccgatctgagtctagattaagttctgggtct

SEQ ID NO: 287041 - DNA, 395 bp, Cannabis indica
ttagtttaattaataaatataataaatgaaaatattatttaataattaattatagttattaaatagttagatttgacatttatttggttgaataagtgaattggcagtttttgagaaaatgggaaactataaatgatataataggaaagttgcaaaagtgaaaggcttgtttccataatgccatggccggccacttaacttggcttttctcatttaatttttcatttttttaatgccatgtaattcaaccctaaccctgtgtggtattctataaatagaaggtaaaggcttcaggaatcacacacaacacaattgcattattttccttcaaagaaaatttcctcagccgccactctctctttctttcttctttatttcaaaattcctctaagtga

SEQ ID NO: 287042 - DNA, 704 bp, Cannabis indica
gctgacatggccgaaatcaccgggatccgagatccccgaactgaaccaacaaacacaaatggttcttcactttccggttggaagatcaccatcttccttttgcaatcaatactcgccgaatatttagataggaaatccattcctaaaataatatcgaactctactaggctcatctctatcaagtcagcacttaactctctaccatctatcctgatcggcatagacctaatccaccttttggagataactaactctccgccaggtaatagggttccaaaccctgattcatatctatcatacggtctatccaatttactaaagactctggctgccacataagaatgtgtagccccagaatcaaacagtactgagtaaagcgagttattaacagaaagctgacctgttacaactgatgggctggcatctgcatcagcctgagtgatggcgaacaccctagctggagtgggtatcgccggagccctcggtgcctctgagcggagctggggacaatccctcttgaagtgtccgggcatgccacagtgaaagcatccctgacctttgcattcaccccgatggtgccttttgcagctggggcactcgggataggagaaccgggtctctgcaccactaggacgactacctctattctggttcccccggaacctcttgttctgactcgagcctccggatgcagtggatgctct

SEQ ID NO: 287043 - DNA, 649 bp, Cannabis indica
atccaacgagcagggttcgggtgcaggggtgatattaatatcgccggaaggctttaagtttcactatgctctgagattccaatttgacgcatctaataacgagactgagtataaagccttgatcgctggcttaaagatggcagagaccttgaaagttaaaaatctcatctgtcatagtgattcgcaacttatcgtaaaccaggtcctcggggaatatcaggccaaaggcttgaaaatggcgcagtatttagagaaaatttagaagaacttggaaagattcgattactttaaaatcgaacaaattctaagagaacataactccaacgctgatgccttagcaaactggcctcccagaatgatctggacgaactaatctagttccgatagaatgctgagcgagccaagtatatgtgaaatagaagacgtcgagatgataggtagctctccaacatggatgacgcatattattaattatttactcgacatgcaacttccaaatgacaaaaatgaggtgccaaaacttttgtatatagtgcctcgctacacaatgatcaaaggcaaactatatagaagagggtattcaatgcccctacttcggcgtgttcttcccgtagaagcaacaaaatcattagagaaattcatgaaggct

SEQ ID NO: 287044 - DNA, 949 bp, Cannabis indica
cctagacaatggaacttgaaattcgatgaatacatgagtaagattggctactgtaagagcaactatgatccttgtgtatattttgctaacaaaatctacttgcttttgtatgttgatgatatactggttgttgggaaggaaaggacagaaattgacaagttaaagcacctgctatgtgaagagttcgagatgaaggatctgggaacagcaaagaggatactgggaattgatataaaaagagaaagacctcacaagattactctatctcaaagcaattacctcaagaaggttcttgacaagtttggaatgcaagattccaaagctgtatcaacaccactagcacagcatttcaaattatctgctactcaatctccaacaactgatgctgaaagaaaacacatgagcagtgttccctatgctagttgtgtaggaagtctaatgtactcaatggtgtgtacaagaccagacattgcacatgccatgagtgtcacaagcagatatttggcaaatcctggaatgaaacattggtctgcactcaagtggacaatgagatacattaaaggtactctgaacactggtttggtatttgacagtagaaatcaaatacatggtgatgtaactggctatgtagattcggattatgcagggaacattgatactagaaggtcattaacaggatatgtgtttactgtttatggaggatgtgttagctggaaatcgaacttgcaaaaagtggttgctttgtcatccactgaagctgaatatatggctgctacagaagccatcaaggaagcaatttggctcaagggaatgtcatctgaaatggaaataaactctgatgatatcactgttttctgtgataatcaaagtgctttgcatctcatgaaaaatcccatgtttcatgagagatcaaagcacattgacataaaactacacttcattcgagaca

SEQ ID NO: 287045 - DNA, 948 bp, Cannabis indica
cacggcccctgcgtaccgctttagttctttgcgggttgttcctccgatatggggtcctcctgagatcatggccactctcccattaggtctgggtggcagaccggggatatgctgggcatctccggtgggagcaactggagccaatactcctgtcgcaccccctggtgttccctgtggcaaagctccagtcgcctgacctgggttgagatgaggcaaccgattcttgatccactcgtagaggtgtcccaatcggattaagttttcgatctcatctttgagattcttgcattcattggtgctgtgcccaatgtcgttatgatactcgcatctcttgttggggtccctccgggaactatccttgtacaagggaggtggtctccgatagtgtgtattttgcctagtagcaaagtacacacgctcttgggagtctgtcaactccgtgtactgggtgtattggggagtgtacccccttttctgtcgtttttcctccgtccgggtgctgcctttggaggaccttttactcctcgagccctgggaaggaccggccaggctggcagtcggagcggagtgcgagggagcttgtccatttatccccgagggattcccaaaatgggacgatgcgggggccaaggcctggccctggctgtatccgggagtagcggagaattgtatgccgctcattggtggagctgcggtcgggacagtacccgacggctgggctccgggcatataccctgctatcccggtgggataatatcctccataggccactatttgggcctcttcaagattgatgtatttttggactcttttctggaagtcctgaaggtttgcagctccttcctgttgtagttcgttccagaatggagtccctgtacggatgcctgcctggagaagggcaaggtgttgtccgtcatcaactttcttggtcttcgaggcttcctctcg

SEQ ID NO: 287046 - DNA, 436 bp, Cannabis indica
gctgtcccgatgatggtacgctccaggccaaaccgccccgacagaaaagcataaatcataatcatacataaatcccgggttatgatcagacgcccatacccctgaccataaccctaactgccgtgtcccacacgatactgagtcccgaacgttcataagacggtactattgacaagtaacagcctatactcggtacactggtcatactccagctgctagtcatactctagcccgtaccgatgtgttacagtatcagcctatactcggttcactggtcatactccagctgctagtcatactctagcctaaccgatgtgatacggtcacatagcactgtaccaccaaccctagtatcagcctatactcggtatactggtcatactccagttgctagtcatactctagcctaaccgatgtgatatggtcggatggtacg

SEQ ID NO: 287047 - DNA, 534 bp, Cannabis indica
aggatagggacctgggaaacagaactaggaccgggacctagtacacgacccatacccgaacttgaacctaggaccgagcttttgacgcggcaccagaaattgaaccagactgggacccgagattgggatcccgatctggacccagggcttgtacaaaacccgtagtgagtgtttggatttaggacccagccttggacccgaaccctgacaaggacccgaacccacacccggacctgaaccagtcccaaacccagaagtggacccgaacccgtaccctgtgacccaaaattggaacaaaaactggaagttgaccgggactggaactaggacttggactttgaatcataactgaaattagacctagatcaagaaccgtaaccggaccaggacccggactccaaatcagacccagacccgaattggtagccggactcatatcccaaccgaaacatggactggggagccgaacccgaacttgaactcagacccaaagatggaaccagactagggacacagaaccagggtcgggaccta

SEQ ID NO: 287048 - DNA, 484 bp, Cannabis indica
aatcaccagccagaaccctctcacgaagcttgagtcgtatcatccagatatcatgagtaccccttttccttcgggatttgaaaacccgcatgtcttgtcatatgacggaaccactgattcagtatcgcattttaatacaataatgcgagcgagtaatgtgacatacaatttacgttgtattttgttccccacctcccattatattcacggaggaagatgagaaaaacgtgagatatcctcacgtcgatccattggtgattaccattcaactcgccaataaaaggatcaagagggtatcaatagacaacgagagttcagtaaatatcctttataaggaaactctaaggatgatggggctcaaaaaagccatattgaggccttgtatggtgaatcttcatggattcactagagacaacatcgccagtcttggtataatcgagctcgcattaaccttgggcgaggcacccctatctgccactgttat

SEQ ID NO: 287049 - DNA, 617 bp, Cannabis indica
gagaattactttatatatatatatattaatttttatttttatttttacagtttgagttactttagtagttgctctgataattttaatgtgagttgttatatttatttaagttgctccaataattattacataaattattatgtaaatttttataacaatacaaaaaattattttaaaatataaaaataaaaaagccaacaaaacaaatattacactattttactaaacaaaatatacatggaaagtagtaattaatgtttctcttctttttcttgatcttgtaaataacaatttgttgactgattaagaaaatgacgttttttttccttcaaagaaaaaaaagacggttttttttttccttaaaaaacaaatgacgtttttttttttacttcagtcttttttgtttggaaaccaataggtaatttcaataaaattttatagaatgacccaccaagttttcatatttgcagtttgacccctgaaaatataaacaaaaaaagtacgtatgggcaaaaaagctgatacctcatatgttggcacagtgagagagagagagagagagagagagagagagagagagagagagagagagagagtagtacgtacgtacgtacgta

SEQ ID NO: 287050 - DNA, 441 bp, Cannabis indica
tatgaattaaaacgatgatatataatgatttggatggtttcatgttggtctgtgtgttatatgatgattgattgatgtttgtgaaatttatgaaaaataattgaattttcgtttctagaattatttttattggatagtttggaaaaaattaagcaatttccttttttacagaactcaatttcgattttatttgaattagttatgattttttgaagttttgaaaaaatcgggagtggtgacacacccttgtgcgcgtggctggctgctggcagcaccctttgtgcgcccaagcagccccttgcgcccaagaatgtgcacctggatggtgtgctttgcagaccatccgtacaactcacaatttaattaattttagatattagtgtaatttaaatttgaaaataggtaaaaatctatttttgcttacttcttttcttatttttt

SEQ ID NO: 287051 - DNA, 638 bp, Cannabis indica
agacaaggaaacactgaagaaagtttaaagctactacgcaatcaaaaacaacttccaatacagtttttgaaaacatatttaattgggtttcagtaagaatttttttaatatcttcaataacagagtaataaccagagtttataactctggaatggtagtattccgatcgggtgtacttggattttcaatcctataaaaaaacataagaaaacactactaaaacaacacaaaaaaaataaagaacataaaaacaagcataaaaaaactctggaatggtagtattccgatcgggtgtacttggattcccaatcctataaaaaaacataagaaaacactactaaaacaaaactaaaacaacacaaaaaaaaaaataataataaagaacataaaaaacaagcataaaaaaatattaaaactaaaataatgaaatgacacacctcaacaacccttttcccaattatgtcttcaaacagatcagttgattgaacaatcttcacttggtatttaccctttccctaagagttaacaaaataaaaccaaaacaacaacaagacacagagtcaaacaaacagaaaactataaaataggactaacaaaaaaaacatgcaaaaaaaaaaaaagaaaaaagaaaaaggaaa

SEQ ID NO: 287052 - DNA, 138 bp, Cannabis indica
caagaggggatgtactggtggagaaagtggacacagaggacaacctagctgatccattcaccaaagtcttggcaggaactgcatttgaaaagcaccatcagaaattacgattaattgaaatgtgctgattgttttata

SEQ ID NO: 287053 - DNA, 503 bp, Cannabis indica
ttatgaccctgcatgagtccgactgcgtcacagagattttttaattcagtggcatctccgatattcatctgggtgttggttccaagtgaaacagtcgtattatgaatgccctggttgggtggaaccattccccacgcttgccggctgtccaacattaacagcaggtggaacccttgtgctccttgggttctgcgatgtaggatcaagcgtctgtgaatttgccggatcagtcaggcttctacgagtttacaccatcgtgttagcggttggatgttgaataaagagcgatttatgatcctcctctcaatgaaagcaacaaaatgttgagctcgcttttagccaacgacaatgagtctattttataagcgataaatgatatataataacagatatatgataaagcaataataagacacaaggattttataaaggttcagccccgatcagttcagtaattgcctaatcctcgttacttgtattgacttaagatcaaggagaaagat

SEQ ID NO: 287054 - DNA, 514 bp, Cannabis indica
catgcaaaaatgtcgatggcgcccttcagtgtctttattattttttctttttcctccgggtctaggctttttcctagccggagtaccttggtggagtcgaggtcgcacactgatatctcctcgacatcctccattggttctacaattttctcggaccccacgcggggatccaattcatcttcttcagccatttctggctcaatggtttctcggaccatcagtacgggcaggtgggttgctacgttgtaacattgccttgcctccccctgatttcctctcaccattcctatcccagcttcctgagttgggaactttgaacgtgctctggggggtgtccgggcacaaggtaactggaagtcttactttccccatcgggataagtgttgttccgttgaaccctgtgagttgggaaccacttggtgagaggtctcgatctgtcaggcctattgggggtctctatgaccaacgggtcatggtgggggaaacgcacagtcttggcgtcttcttccgtgaa

SEQ ID NO: 287055 - DNA, 533 bp, Cannabis indica
gtggattgctcacgtaaagagtgactcttttaacccctagtggtgatttcattgtttatcgagccaacatgagtgcagtgagacaaaatcctatcttaagggcatgtttaggtggaaagagaaacttagagtgttatgggaatctgtttgcgatcgatgatgagtctaggaatttagaccagttcccttggatatcagtggttagtggttttccggatgtgtttccagaggatttaccagggttaccacctgatagggagatcgagttttgcattgatttgattcccggagctcaaccagtttctattgcaccttatcgcatggcacctgcagagttggttgaattgaaaaaacaattaggggagttaatggataagggctacatcagacatagtacttctccatggggagctccagtcttgtttgccaagaaagctgatgggactttgcgactttgtgtcgactatagaaagctgaatcagatgacaattaaaaacaaatatcctctaccgaggattgatgaattatttgat

SEQ ID NO: 287056 - DNA, 603 bp, Cannabis indica
ggcgataatgtaaattccaataactttttcggcgccagtaataactccggcgatcactatagttttaattgttttttttttttttgaaaaaataaatatgaaagaaattttagtattttttttatagtaattcaatctcatcccatatatgttaagtttttattttaaatactatattttttttattaagttttccttatcatatttatctaaactagctttatttttcccatatttatgtaaatacccaattattttattattaaatagttatgattaactgtgtatccccaatttcaaacctaaaactttataatcacttttaattagtgacaattttttagtcacaacaaaaaaaaaattatgattcaatatgacttttagtcacaacaaaataattacttgtgactaaacataatatagtatttagttacaagttactactaatttagttttagtcacaacaagtattgtgattaaaaacacatttagtcacaacaaattgtgatttttgtaactaatatttttagccacagattttttagtcataatgtagaaatgacaatttataattaatcacaacttttttatttttagtcacaa

SEQ ID NO: 287057 - DNA, 556 bp, Cannabis indica
ctctctcagtttcttagttgatttcttcttgaaatcttacagtagtcatcaataagtaatatccattgaaaagtatttcatatttacatatatttcttaaatcatagtttaataattttaaaaaataatttacttatacaaatttaattaatgatacacaaattattttgaaaagttaaataatactcttttattccttaaataaagattttttttagtgttttaaaaaattattaaatatgtaaaaatatataaaataatctcaaataaataaataaagaaagtgtattatatatgattttatataaattaaaatgaaaccaatacttaaattgaaatagaattttggttcaaaataaatttttaagttaccttcgagtaaaatagattttttgtgaaagaaagataaacttacattaagataaataccactgttactagaagaactcaaaaactacgtggacaagcatctatccaaacacaatctcctaaactagtaatagaggttgccagtgtatgggcgaacaccacttcactgatggtggaatggcgctac

SEQ ID NO: 287058 - DNA, 884 bp, Cannabis indica
gttatatacaaattgattttgggatttatattaatttttataacatttgtttgtttatttatttttttatataggtaaaataagtattaaatagatcaaaatgttaacctgttgtgtaatattaatatgacctgcatatgacttgtttaaatatcgtgttaattgtgtcgtatcataagctaatttgtttataattgtgccgtattcgtgtttacaatttgtgatatgttatttaattttgtcgttcctattaagcataatcatgtcattaaaatcctataaatccgaaatacaacaagaatacgaaaatcgtaaaccctactttaagtgtaatattacatacaaatttaagttgcacatatttgttttaattttagccataaatttttatcattatcttttagattaaggttctcatctcaatgtttatgtgcagttcctttctttgttgctttttctgtgattacttagtaaagttgattagtggccactcttttcattcactatagagtacattatagatatttgtctactatgattattaagggtttgttttttaatatcaagttgagatttgtctaatctatatataaatataaaggaatgcacaaagcattctaggtggcatcttatatgaagtttctttctaattctttgctatctccatttatcacttttatttagtttttccaattacttttttcattcaattactatcataataatttattaaattagtaataataacaataataacttaattaagtttgaaaaagtagaaattatgtgtccaatttaatattcaataagtattataaaaaccaaaagtctattcaaaataatttatactaatagaatgataattaaatacaacacctattata

SEQ ID NO: 287059 - DNA, 744 bp, Cannabis indica
taagcatccatgaagcttaatatttcgtgcccggctgttgcatcgacgagctgatcgattcttggaagtgggaaacagtctttagggcacgctttgttgaggtctgtgaagtcaatacagactcgccatttcttgttcggcttaggcacgagtacggggttcgcaacccaagccgggtaaaaggcttcaatgatgaagttgttgttgcgcagcttttcaacttcgtctttcagggctactgctcgttctttatccagcaatcttcgtttttgctgaactggccggatgttaggatcgatattcaggacgtgcgaaataatagaaggatcgattccgaccatatccgcatgtgaccaggcgaaaacatctaggtttgctctcagaaattttatcaattccgattttacttcgagcaacaaaccctttccaatttttagctttctggccgggatagctggatcgatctcgatctcttctaattcttccacaggtccaacattgctgcttgggtccccaagtcgaggatccacatcttcatcctcgccttgggaagtttcctacttgggaatatttattcccttgtctgggctctggctggaggatacttccttcttagccttggccactgcaaggttgtaacattctcgagcagattgttgattacctctatgacagcttttaagtcatacaaggctggtcggcctagcattacgttaaaggctgaaggaacatccaatatcagga

SEQ ID NO: 287060 - DNA, 556 bp, Cannabis indica
gcttagatcgatctataatactatacgaatatagtcatgtatatagaattcgaaataaacaccgaaaaataaaaatgaaaaacggaaaaataaactttatgttatatatatatgcatttatgtatcatataaataaaaatgaatattatgaatgtattatacgataaagtatatatataatatacaatatatatatataaacatatatacaagtaaatatactgagaaatgaatatatatatatatacagtgtataagtatataatatatatatatataaacagtatgaataaaaatatatatatacgtatgaaaaaatatatatacttaaaattatatgaatatgagtatatatatatacacgaaccgaacgaaacaaaaaatatatatatgaatagtgtatatatgtatatatatatgtatgaaactcaaataaaatcaaggcagagataaaccgctctgataccaactgttagactataatgtagtatatgtaatataacatatacaaacgatatgaaatgcggaaaacaaactgtaatcatatcaataatat

SEQ ID NO: 287061 - DNA, 720 bp, Cannabis indica
aatttatattggtggtattcttttgtttttaggtctttttatggtatttgatatgccatgtatatgtaattatgttttcaaatcccatatttaatgtttttatttgtttaggaaattttatttattattgatgccgaaaaaatcaccggaatttgctgtcggtgctggaaaagtcgccgaagtagcggtcgatgccggaaaagtcgtcggaattgatgccggcgccagaaaattcgtcgaaattggcattgtcacgcagaaaaattactgaaaaaatcaccaagaaaccggtttcttcttcttcttcaagaaactggtttctaagtgatttttccgttgacaatgccaattctgacgactttttctgacggtagcagctactccggcgaattttccggcatcgacaacaaacttcagaaaagtcatcagaattggcatagtcgtcgaaaaaattactaagaaactggtttctggtttcttgatgaaaaaatcaggttttggtgatttttctgacgacaatggcaattctgacgatttttctggcattggtagcaactctgacgattaatacacctgcagctactctggtgactttttcagtaccgacagtaaattctgggaaattcgtcagaattggcattgtcgccgaataattaccgaaaaaatcaccaagaaactggttttttttacttcatcaagaaatcaccaagaaactggttt

SEQ ID NO: 287062 - DNA, 1035 bp, Cannabis indica
aatgttcctgaaaccacgtgtgcctgatattctttctctcagaatatcttctcttcatctcatgataaagagtactcatcactttttcaggctcaggatggccatcaatatcgtacaaatactacaaacaaatagtatttgttaaaaaattatgtgttaattgaaattaattatttgaaacattaaacttgttaatgtgttttaccttcattttttgtacaatttggtctttaaagtgttgagggatttcactaaaattcaagtagtgtcctggcaacgtaattgtgacctcaacacccatttgacgtacaaaagctgaactttccttaccaaccactttgcctgtcacggcatcaagttttagtggtaatggttttcctgcatcccgccttctttgctcaacatccaagttggtagcaaggccacgtccctttcttcttggcggtggagccgtctgacaagtcggcggtaccctactagggtccggtggatcggtaccacccccgtctccaccatgataagtggatacatcagctgacattacttttttttgaaaaaaaaatatttcatttataagtaatagtaacaataatttaaaattaataaagttaacttgaaataagaaatattaacttgaaattaataattgtatgatttacaaaataaagtgattgaaaattaatcatccatatcactatcattattaactaaatgatcattcacatcatcttcacaaaagtcaactaaaatttcttcgtcagattcttcagtagcatcttcgtcgtccacgttgcggtcatcttcgttgacaggcgaacttggttcagtgccaatgtccatcggaggttgattaggtagcaaaattaactccccaagatcaactgttaacacaaaattggatgagttcgtgtcgtgtaccaaatcaatttcgacattagcatcatcatccacgatgtcccaaatttgtcggtgatttacattctcaactattttccaatttttccctctcaataaatcatcgagataaaacacttg

SEQ ID NO: 287063 - DNA, 502 bp, Cannabis indica
agggccatctcctccaacagatcataagcctcattcgcactcttcctcataaatgctccaccagctgcagcatctataagagttctagtgttacctaccagcccgttgtagaagttatgaaccagcatccacttctcaataccatgacgagggcattttctgatgagatccttaaacctctcccaagactcatggagagattcattatcttgttgacagaagttgttgatttcccctcacagcttagcagactttgctggagggaagaatttagacaaaaattttgttgctaagtctgtccatgttgcaatagaatttggtggcaaggagatcaaccaactcctggctcgctctctcagtgagaatggaaacagtctccaacggatggcatcatcacgaaccccattaactttgaaagtctgacataactccatgaagttcgatagatgtagattggggtcttcagaagggagtccaccaaactggactgaagactgcacca

SEQ ID NO: 287064 - DNA, 731 bp, Cannabis indica
aacatttcctcataagccttatttttctcatcagctgttgattcagaatcagacaatgagtcatctccctcaacttcttcagggacagattccctgaccataaatgccattacagacttatcatccttcgattcatcactagcctcttcttcttcactatcactccatgtgacagccaaggccttctttttcttaagtgtatttgcacattctgcctgtatgtgaccaaaacctgagcattcgtgacactgaatcccttttcctttcttttctggttgttgggattgtcggttaggaccagggaagttccttccagtagaattttccttattaccaggattagatttcttgaagttcttttttaagaatcgggcataattctttgccagaagggccagattcgcatctgtaaaagattcagacaaatcaacttccttagagttttcttccttatggatgaaagcaactcccatttcgatcttctccttctcagaactcttggttttcttccctttctcccatctctcaagagttaactcataattttggagtgacccaatcaattcgtctagatcaagtgcttcaatatctctgctttcttcaatagacgttactttggacatgaatctttttggaagaacacctagtagctttctcaccaatttcttgttggagtaagttttgccaagagcataggattcattggaaatgtcacacagcttagcatgaaa

SEQ ID NO: 287065 - DNA, 522 bp, Cannabis indica
atcttccaataataatcaaaaaaaaaaaaaaaaaaaaaaagggtgtgttcttcatggcttcttcatctaatccctcctcaagagctcacaagagaatggctagtgcaattcaacaaagggaaataagggcaaaagcaaggcaagagcccactctattcttcaatgatgaggatcacaacaagtttgtcaatgatttctcttctaggaagattctcaaaggtaaaatttgtgatctctctagccttgattatgttgattttagtcatcactttgataccctaggatggacatctttcattcaaattaatactccattatatcctagactagtacaaggtttttatgcttgcattaaaccttgcttagcccctttaggtgttaaaggaacccttagaggagtagcttttgaactcaatgtagcatctctcaatgacatgttaggagcaccaaatagtggcatattacttgaacccaaactttctcttaaaaatgatgccatctttaactttgatgagtgttcta

SEQ ID NO: 287066 - DNA, 547 bp, Cannabis indica
attctcaattcatcaaatctagtttgtaacatggtaaaacgtgatctttttacatcagcggtaccttcaaattcagtttgaaggatttcccacgctttctttgcagattcacaagatgatattaatttaataaagccttcgccaccaccattaaaaatagcatgtaaggccttattattataaccagacaatttttcatcttcagtagtccaactaagttcaggttttaccttagtattacctttttcatcatttttagtaggttgtgatcaccagcctgtaagtatagctctccatgccttctcatcttgcaatttgatgaatgctctcatcgggaccttccaataaggataattcgactcattcaacagaggtggtcgagagatagagcttcattctgcaaacaaagacacatctcacacaaaacaaattaaacagaataacctcaagatctcactaagaatttagtgacttgctttgataccaaataaattccgtattttaatactccccgtttaattatttaattaaatgattaattaaatgc

SEQ ID NO: 287067 - DNA, 574 bp, Cannabis indica
gctatcagacttgtctttcttctctgtgatctctatactccatcccccacttttttctttctttgaagaagtttacaacaatgggttttcgctttgctagcttagttcatgccaagcaactcattcagaagcctttctcaagtacaaaagatgttccaaaagggtacttggcagtttatgttggggagaagagaatgaagagatttgtaatccctatatcattcttgaaccatccatcatttcaagacttgctaagtcaagctgaaaaagagtttggatacgatcatccaatgggagctcttacgattccctgcaatgaagatgccttcatcgaacttgtttctcacttaagcgtttaacaatgagtagatagaaatagtagaataacagctaacaataccactgattactacaattttgtaaagcataaatgccaataccatgtacacaatttttccttggagaccaaaagtaaagtctccaagaatgatataaatgatacaacttcactttttcttccatgatttatgtgtagaatttattttttacctcatatattctcagcttgcaaagg

SEQ ID NO: 287068 - DNA, 620 bp, Cannabis indica
agttggccatatctacaccattaacaaacaaaatttaaagttagctatatataacaagtaatctatacgaaatattaaatgcataaacaaatattttgtattcagcataaacaaacacgtaagctatatatcaagttaccaattagacacgttttcttttctttttttgtttatgtttgcctgaatcacaattgacccatattccctcattgatatcgtttctaatgtattcaacatcgtcttcctcaaggttacgatcaattcccataacttgctcatgaattggttgcccaacaatgaagtcatcataacataagtcagcattctcctcatcctcttcattctctaagaacctcctttctggtgtcgataaaacaacagaccatttatcattagccggattagaaatgtaaaaaacttgaactccttggctagccaggatgaatggatcattcttgcttcctctcttacttaaatcaaccaaagtaaaaccaagctcgtcagtttttactccaacattgttgtcaacccaagaacatttaaaaagtgaatttcaaacgcaaaataattgagctcccatatttcttcaataaccccataatacgtcattgtacctaaaa

SEQ ID NO: 287069 - DNA, 536 bp, Cannabis indica
ctacatgacataaaaatgcatctctgaattcaataataacagtaaaataaattatttaaatagctataaataatttcataattaaacgtgattatctgctaatttccaaattaaactaagcagtctttacaccacggctagtaacggttggagagaattgagtccaagttgtccccgtaaccaaggtgaaagcccttggagggcttccgacgggagtgatggttatccgtcgcaggctccgatggatttggagcaaaggtttgcaaaaatggaagttgtggttcaacgacatgaagaagagattcagaggttgaaacatcaaaggtctcctgtcgtatctttaccacatatgccaattatttttgattcggtattactagcaaagcatggaatgtctggtaatcaagaggaaccattgcatggaaagatttggatgcatgaaccttcagtctttcaaggagattcaaatataaagaacgctttttgtgctgaaagccctgagaaaattattccgagacctcaggagattatggcag

SEQ ID NO: 287070 - DNA, 619 bp, Cannabis indica
ccgtgtgtggtatctactcatccggcactggccaactgtaaagtgtctcagctcatgaagccagacagtagacaatgggatttggagcttattgaggacttctttgattcccgtgatgttgagctcatcaaacaggtgtctttgagtgttagtcttaggagtgatagttggtattggaactaggatccaattgggtttttcacggtcaaaagctcctataatcacttacagacggtcaatgttagttggaactcatccatggaggatgatgtctggaaaatgatgtggaagattaaagctcctcctaaggttttacattttgcttggaaagctctttcgggttgtttgcctacgcgtactcaacttcatagtaaacatgttcctgtggctttacactgtgtgttgtgtaactatggggaagagtcaattttctatgttttggttcaatgctcctttgcttattcatgttggctccgatcggcgttaggtgttggtgtttctgcagcaaccaatttttttgactagtttatggaggtgttggcagtaggcaataaggggttggttgaagaagctgtcatggttggatgggcattttggaaggctcgaaatgatatgcttt

SEQ ID NO: 287071 - DNA, 765 bp, Cannabis indica
ttttgcagaggtcgattcgtttcacgcccattgattgatacggcgcattaatggtgtcagacggatactcaaacgtttccaccgccttaattacgaatcaatccaaccgttgatctttgggattcgaatcgtgcgtctccccaaccgttcgattggtaggtgatagtgcctgttcctcatgcatttttgcctataaaagccaccacctttccttcatttcggttacttcccatttcttgccaactttgctcgagtttcctagagagaaaaaatcctcagaccaagagaacacctttgaacactctgcaaatttcccagtccaccttcgttcactactgtcaatctaccttatctttgtttgatctgtagcagaacccccagtctcaacacttcactgtaagtttctcgcatcccttgccttactgttaatgtacatggcatgctttacttatctgtttgttgtttttttgggtttggtatttgaagtttctgggaatgcattcttttgggtttttcacgtaacaggtctagattcaccatttctagtgttagagctactcttgtcacgtatttgttattattttttgcaaaggaccatacgttcttagtatactggtcgtctagggcatagaggagactttgttctttttctcgactttctaccctttctttttcttttatgcgcagtgttgtcttctgcgagtttattgcacccaacttttgtccaggaaatccttctagggttttctgtttgacagatgtccg

SEQ ID NO: 287072 - DNA, 659 bp, Cannabis indica
gtttgattgatagcagcagtgcctgggggaatgaactgtaaagcttgcttggttcggattagatcagttgtgagtttgtagatctcattctccacttgctctagggagttctttagggcacgaatctgtttagtcatgtactcccattgtgcaaacatttcttcataagcatgttgacgacctgtgctgtctgcttctgatgaggtggagactgcatcatcttcagattcaactggattacagctttgggccatgaatgccagtacctgcttttcctcatctgatccttcactggctgtggagttcttttcctcatcactatcactccaagttgctgcaagggcctttttcttttttagtgtgttggcacactcagcctgaatgtgaccatatccatcacattctctgcacttaatccctcgccccttttgatcagttgaggcttgtcctggtttgaaatttactcctttgtttctcttgagaagattttctttgtcagctggtgaatttttcctgtagttctttttcaagaactttgcatagtttcttgttaacaaggcaactgtttcatctgtaatgccattcaaatcttccagaacaggtttcttgttttcttggtgaataagtgcaatgccagcatctgacttttctttcaccac

SEQ ID NO: 287073 - DNA, 555 bp, Cannabis indica
aaagattgtccaatattgtgaaaaattcaagcacaagtttcattccaattttgattactccaagtgtgtgtgtgaaatgccttttatcaaaatattacttgcaatttagatcaatttatgtaaatatgaattaagcacaaaatctctaaagtgacaaagtctcataggtttgtttttcatctctctctccactaatgtagacaaacacaaaccaaagatcaaaaggactttttcaagcttgtaatgtaaggcttaggtgaaggtggttaagagaagtcatttttggctcaaatcacctaaaagcaccttaatttttctaagaccaaaatgagacctcacacttacttcctcaaagaatatcccacaaaaaatttgagtattaatattgccattatttattgccccaaaattttccaaaataatgtgctcccaggagttatagcaatgctttagcatagcatttttttctgtgtctctgctccagaatgctgaagcaatgctataacacctgggacttcaagcttctaaaaaaaatcttgcttttttttttttttt

SEQ ID NO: 287074 - DNA, 757 bp, Cannabis indica
ggtaaaaatcggtgtaccaaaaacgttgccgaaaataggggtagtgtatatcaaaacgaccacctcgacgagtagatcacacccatgccaaccgtttgtcaaaacggtatacgatgtcgccagaaagtcaccggaaaggggcagagctacaaaaatgtcaccagaaaaagtagcgaaccgggaaaaatagtttagtgtaggttgttctcctcaacgagttgagtttagtggtgaaaacgtctcgtcaaacggatgtcgaaggtgaccggaaaatccattcaaagtttgaaaccccaaactttgacttgcgatcccgagctaacggcggcgaaaggagcggcgtcgcttggggggtgaggtcgtcgacacttgggcttccgatttgtccggggcgtgaggtcgggcggtggccagaggtgggttgccggagtgtggtggttatggagctttgtgggttttcttttgtgtttgtgtttaaagagagagaaaaagagattgagtgaagaagaggacgggtgagtgaaggaaaaaggtctgactatttacttctttttttttatacatatatatatgtctcttttttgattttgactcagtcaaaccgagatctcacagttataatcccaataatcaatgatcctctatagacgatttacattctatagggattaatttacagttacacccttcaatgtattttatccttaaaacacttagccacctataaatgatatttcagtgaactaacataatcact

SEQ ID NO: 287075 - DNA, 548 bp, Cannabis indica
gggaaaagtcaagtcgacttagtcttcttactatgaaaagatccattcctgaacatctattgagtggtttgccagacactacaaatgccaaagagtttcggatggattaagatgtgataactctatggtatagagttaatttttatgcttttaaactaaagtattgtgaggagagtaatgaaaatgtgtttattttgcttaactttaattagttttagtgttattttctatttagtaatctaacctttgagttttgtaaatattgatattggtgggtgtgtttttccaattaactgtgcttattttgttggaaaaggaggaattaaattgacaggtaaaagagaaagaagcaaggaagaaaaaagaatacaagctggaactgggttgattgctgaagcgatttcagcatcctggcagtgacgtggaatcacgaatttcacttatccacctcatcaattccggtccaatcactcaaattgcatcagcttgctgacatggaagaaaggagtctcaccctagtgggccaaagtggaaaagtttgggcttct

SEQ ID NO: 287076 - DNA, 440 bp, Cannabis indica
tagctactcaactctacctacgtccttttggggatatgctattcagatggcaactgacattgtaaatgtttttccatctaaatcagtccctaagacacctttagaattatggaatggtcgtatacctagtttatgccattacagagtctgggggtgctctgctcatgtcttaagaaagaaagatggcaaactagaaaagcgaactgaggtttgcatgtttgctgaaaattctaaggagacaaggggtggactattttatagtcgcacagatgataaagtgttcgtttccacaaacgtcactgtaaagaccgcttagattaatttggaaattagcagttaatcacgtttaattatgaaaattatttatagctatttaaataattattatgctgttattattgaattcagagatgcatttctatgtcattcagtagttttca

SEQ ID NO: 287077 - DNA, 784 bp, Cannabis indica
tagagtagctatttcatcttctttgtcgttgtgagttgtgatgttacagcttgaaatagaagagccttgtaggtagtaaagtccaccattttttatgcttttcatgattgttagtgctcctctactaagcttcatatgacctgcctctattttactcacaacacccaaatcatcaagcacactaatagaaattagatttctagagagattaggcacatacctcactgctgttagggttcttactatcccatcatacattttaaatctgatcgatcctgaccctttaatctcacaagtctgattgttccctaggaccacttttcctcctttagattccttgtaatcaaacatataacttttgtcattagtcatatgaaaagtacaacctgaatctaaaatccaatcatctttaaaagatgatgtagcaatgtatacttccccactaccagcactttcatagccatcaccataattggcttggttatttttagaagaattaggtctagatagaattttctccctatcctttatattttttggtttgcctttgtttagaaaatatcaatctctcttgaaatgccctggcttgccacagttgtagcatcatgtaggatcaggtggttctttttgagttttgatcttcccttgttgtgactctttcctttgtggtgatctctgatgtgacttttattttgtagtgtccaggttttctttgaatttggtcttcctctactgaagtttacttctttattagaacctccatgcttctcattctttgatctcc

SEQ ID NO: 287078 - DNA, 1061 bp, Cannabis indica
cattatattgacaatttcaaaaaactattcatactatgatcatagtatcatggcggtcgggcaagtatgcccccatcgtctagcggtttaggacatctctctttcaaggaggcagcggggattcgacttcccctgggggtagggtactacgaaaggaagttgatcgtggattatcactaagcctggattgattcttcccgggtcgatgcccgagcggttaatggggacggactgtaaattcgttggcaatatgtctacgctggttcaaatccagctcggcccaataattcgccgatctgccatgaaatgataaatcatttgttcttctccataaatgctcgataccaatcgaaaaaatcaaatagaaaattttactattctgatatatcttatccttaccgttatcgctattatttactctattttatttacttctatttctttatttcttttttttctttacaacgtttagttatcttacttcttcgttcgtaacttaactttcgtcgtaacttaagtagtacttacgtaagttacctttaccttactaacgaaagttaaaaaattaaaaattaattaatttaaaataaaaataaaaaattatttttctttaaaaaattaaaattaaaattaaaagtactttagaaaaaaataataaaataaaaattacaaaataaaaaaataaaaaaaattatatatatattttttttcattttcccttcttatttttttcttcttcttcttcacttttttttttctctgtaaaccgagagccatcatcaccatatcaacacccacatcactcaccaccataaccccatttcttccccatactctctcacttaacagaccccaaaaatgactaaaaccccaaaaatgaatataatcacatttggaaaaataaccccaaaaatgactaaaaccccatttcttccccatactctctcactaaacagaccccaaaaataacagaccccaaaaatgggaatcgtgaatgattcaaacggcaagatccaatgcccagatcacgacaccaccaccacctccttccgagacctccc

SEQ ID NO: 287079 - DNA, 601 bp, Cannabis indica
tcaaaaataggttgccccaccttaatccgggccaggagaccgtgggtatgcctcagggaacaccggggggtacagcaggggcattagctccagctgctcccacgggcgacgcccagcacatccccggtctgccgcccaggcctaatgggagggtagccatgatctccggaggtccccatatcggaggaactactcgcaaggagcttaaacgatacgcaggggccgcgaaacacaatgaggaacaactccgtgaacttactcttcaaggaagccttcaccgcaataggcttgacggaccaggacctctcgcctagtgggtcccagctcacagggtttaacgggacgacacttatcccaatgggaaaagtaaggctcccagtcaccttgtgcccggacaccccccagagcacatttaaatactgcactttcgtagtggtggactgtccgacagcttacaacgcgatcctcggccgaccgaccttggtagactttggcgcagtcacatcgattcggcacctatgcctgaagttccccacccgggaagccgggatcggaacggtgaggggaaaccaggggaagcaagacaatgttacaatgtcgc

SEQ ID NO: 287080 - DNA, 595 bp, Cannabis indica
attttgttgttgtttgcagaggtttaagcatgattatttgagtagattaaagctagtttgatgcatgttagttgccttgattcaaacttagaatttttatactcaaaactatggtttttctaaatgaaaatgtgaaaatagctgctgtaaagtttgattgtgtttgagttcagtttctgcagtttttatatgcatgaatatgtaattttaatcaaggtttgatgcatgatagggttgtttaaccaagtttgagttttgaactcaaagcttggagctttaatggcattttttgtatctgtgtgttctggactgttttgatgctttggtattgttccttagggtctaattagtaggtctggaaggttttgtttgaattggattagatttgagcaagttatgaatttttgagagtttcctgcgaggaaccggaattccggttgtgcatccggaattccggttgtgcatccagaattccggatggggttcaggaatttccagaactggaattccggttgtgcaaccggtctgccgattgggaaattttcaagaaccctagatttcctcgttttttttgttatttggggtattgtcatgc

SEQ ID NO: 287081 - DNA, 632 bp, Cannabis indica
atcttcacatgatgatcaatactgattggtggagactgttgtggtggtgcagggctatcagtagccttcttttcctttggtgcctgtgtctgtgcctgttgatcctgaaccccatcttcaactggttgcttgccactaggtccttcataactctttccactcctcaaggaaattgctttacattgctcttttccttttgcctcactagtgctaggtgaattttcttgagcttgttttgccacttgagtagccaattgttccatctgagtttctagagttttaatagaggctctagtctccatcatgaattggagcaataaatcagcttggatattggagcctccactaggactttgttgttggttttgttggggctgatttctctgctggtagaacccctgttggttgtgcccataattattattttgggagtagttcccaatggcttttgcttgatccattggcaaattatccacatctacttgacactctgaaaagtgatggttgcctccacatatctcacaaataacttgggcttgtttagcttgccctgcaatcagctttgtcaaggcctcaacctgagctgtcaactttgtgatggcatcaacctctagcacaccagctactttctt

SEQ ID NO: 287082 - DNA, 514 bp, Cannabis indica
aaccaaaccctaaagttttaaaaaaaggaatgggggtcccctaaccgctggaaagaggccccttccggatgtttgccaaaagtggaaaccaaaaggactttccttagcaaacatcgggtgcaaaaatcccaaaggcagcgaaagtggacggaaaatgaaaaacccagaatgtgggagcgaaaatcgtcccatgccctaaacagtccttcgagcagaagggtcgattctaaagaataatgggggaaaataacaaaaacacaaataaagaagattccacacattacacgacagactcagtcaaagttatttcccagaaatccaacactcaaccaagaagttcgatcctaacatgcaaacagacgataaaaagcatgaagtgtccagagaacttacatgaaagttgagagctgggggttggcgtcggtcgacgatatagggtggactgacaacggcgaaggaagagcaacaagaaatctattgtgtatgaaatttttttctctcaaatgggctcttg

SEQ ID NO: 287083 - DNA, 567 bp, Cannabis indica
ataatccttgcgtacacccttgccttgatttcctcggaaccgcttgttccgttttaaacccaccactgacgacgtaggtttactcttctgctcaaccatggagcccctaccacctctgccataactagaaatatggcaagcggtatcccgatttcgtggcataacctcttgaggtcctaaaatacattctttagggctcccagtccagagagcattcttcatatctgaatctccctgaaggactgtaggttcatttatccaaattttctcatgcaatgatcccacttggttatcagccatactatgctctgctggtaataccgaattgagaatgcctggcatacgaggtaaaggtagtacaggaaacctttgttgtttcaacctctgaatctcctcatcgtgtcgttgaatcatagcttccatttctgcgaatctttgctccaactcccacggagcctgtgacgaacgaccatcactcccatcagaagccatccaaaggctttcaccttggttgcggggagaactcaaactccatctctccaaccgttactagccctgaccacacta

SEQ ID NO: 287084 - DNA, 834 bp, Cannabis indica
tgcaactgttattaatgtattgtatagatatttgtattcatcgatctgtttcttttttttttttttttttttgatgttttgcttgaatacttgtggtctttaagtgggagttggttacaatatctatgtcatcttttggttgttgatcttatgtttaatagtatgttattatgggtggtattgtgagtgtaatattttaatctacgagttttctttggttttggatgcagttgggcaggcacctagttatgtttggcggagcataatttggggaaggtctctgttaattaaaggattgcgtaagcgagttggaacgggtgacacgatactagtttttaaggacccttggctaccacggccagccacttttaggccttattgttctactctagataatccaaatttgttggttcgtgatttgattaacgagtcaaggagtggttggaatatgcaaatggtgagggagttgtttaatgtggctgatcaacagagtatttgttctttaccaattagtaaatttccgaaagcggattcttggatgtggcactatacagctgacgggacttattcagtgaaaagtggatactttgtggcgtcgcagttggatcaatttgatccttccccttctaagagttggttcgcagtatggtggaaagggttttggaaaacttctttgcctaagaaagttttaatatttgcttggcgtgggtttcatgatgctctccctacgtatgtggggcttcagaaaaggaaagtggttgatcatctaatttgtccaatatgtggttttcagtgtggattcaaaacagtcatgctgtgttcctatgtcgtggt

SEQ ID NO: 287085 - DNA, 307 bp, Cannabis indica
attactaacctaaacctagtagttgcctataaatagaaagtgatggctcacaccaaaataagcaattattcagtaattcaggaaactgcctttttcagaaaattgagccatcttcttttctctctatagccgaccctcctctccttcttctcttcaacacaatttcgagataccctagtgaaagagtagtgcccacacacagcaagtggtacctcaatcatagtttggaagatcgtgaagaatccaaatcaaagagaaggacattcggactcagatcttgataatactctgcgacagaaaggataca

SEQ ID NO: 287086 - DNA, 758 bp, Cannabis indica
agtttatcttagtacaaatataattagtacctaaaattcaagagttagttgacttttaacaaatttcaacctatccgtaaggtcgatttcaagatgcttctcaaggatgtatgccaactgttgcaaatcattttcttctaaagcaggcacaatgatgttttttgtcattttgttcttgaagtcttacatgaacttcccagcaaggatcatgcaattatgtttgaaatcatatcacactataaaacccgtttagttttaaggaaaacaaacatgactggagttaacatctgacttaatcaagcacagataaaaattcttacaaataaccgcttacctgtatatcttttgaaatcttatttttttagtgtaggcttgacttgcttccaattttcataggacaaccctatcgtctgatggtatctaactcctaaaatcgatactgggttggcatagtttttgccataatactctcctttatcattgacttggagaggaagtctttttccttggtccattagcttcgatacttctttcatctgagtagctcctcatttaggtatctctctgggatactctattagtgggtctgaatctgagcctgaacctaagttagccgtatctacaccattaaaaaaaaaactataaagttagctttaacagagtaactacatacataaaaaaaagtatcacaagtaatctataaaaataattaactacataaacaaacattatcacaagtaagctatcacaagtaagtt

SEQ ID NO: 287087 - DNA, 169 bp, Cannabis indica
catccatctgcaaatgagatgaacttactttcactaaatataggcatattaactctttgcagagaacgatcttatcaaaaccactatgaacaagatacaaatgtcatagatttaaaatatgtggttgttgttggaaattttaccacgatctttgatctactcacaagta

SEQ ID NO: 287088 - DNA, 790 bp, Cannabis indica
tctgtacagacacaacagggaggacgttatcaggtacaccgaggtgatctgcgtgatcatctcaacgcagttttcagggcacgctcacgcgtcccacataatactgagacactccgtgatccccatgcggacgatcagggtgccaatacttataataacccgcctaccgcgccgatcgcgaccactgggattaatgtcccagcaaatcttgccgcagtagttgcgagtcccgcagttgtagcagccccggctcctgcggctggagggattgaccaaagcatgcttctgcaggctttgaaaatgctcgagcagcaacgaaagcctatatataagttgcatggtacctcgcctttcactacagaagtgcgacaggctcaacttccaaaagggtttcgtctatccgaatccctcaaatataaaggtacttctaacccgatagattatcttgaaaaatttaataccataatggaagtggatcaggtaccgcagctcgcaaagtgccgcattcttgcggcaacactcgaggaaaatgcccatgattggttcacccaattacccgaggcatcgatatcgacgtgggaaaccttcgtcgacttattcctcacacatttccaggccacaatgacgtaaggccaccttatacgactttggccaacatcaaacaagaacctggtgagtctttacaagactattttaaacgctttaatgcagaagtaacaaaggtcgagaaggctcccgagtcttcgcttgtttgcatgctgataacaggtatcttgccgaggaccgactt

SEQ ID NO: 287089 - DNA, 503 bp, Cannabis indica
aattccggttctgggaatttcaaaacccccatccagaattccggatgcacaaccggattccggttcctcgcaggaaaccatcaaaaattcacaactcaatcaattcaaacccaattcaaacaaaaccttccaggcctgctatttagaccctaaggaacatttctaaagcataaaaaccgagcttcatgcaaacaaaccaaaatcaccattaaagcatcaagctttgagttccaaactcaaacttgattaaacaacactatcatgcattcaaatcagtcccaacctacttaatcatgcataatataacctctgaaaactacaacaaacatcaacaaaacaacagcaacagatttcaacaacttctctttgaaaaccatagttttgagccaaatttcatatctagataaaaccaagtaatcaccaaccctatcatgcttgaatcaacattttaaatcataaataaacctctaaaattgtaacgccctaatgctaaggcacgctac

SEQ ID NO: 287090 - DNA, 697 bp, Cannabis indica
tgagtcccagatctagacaccgactactgttctgttccatgcccggctacccgaatcccgagtcaagatctagatcagtgtcacgggtcttggtctggttctcgttcatgtcctaggtcccatttctgagtttcggtttgggatccagactggggtgcggttctcggtcacgaccctggttctttgtccctagtctggttccatgtttgggtctgagttcaggttcaggttcgggtccgagtccaggtttgggtggggatccgggtccgggtcccaatttgggtctaggtcttatttggagtctgggtcctggtccgtttacggttctggatctatgtccaatttaagttatgattccaagtccaagtcctagttccagtccccgtcaacttcccattttggttccaattttgaatcacagggtacggattcgagtccacttttgaatttgggactgggttcaggtctggttgtgggttcgggtccttgtcagggtttgggtccagggctgggtcccaaatccaaacaccgactgcaggttttgtctaagccctgggtccagatccagatcccagtctcgggttacagtctggttccatttctggtgccaggtcacaagctagttacaaggttcaagttcgggtcttggtagtgtactaggtcccgatcctagttctgtttcccaggtccctatcct

SEQ ID NO: 287091 - DNA, 851 bp, Cannabis indica
aaaggatatgaggaaaaaggcaagaagagttgcaaatgattagtccctgtatggacttaaacagtcaccaagacaatggaacaaaaggtttgatgagttcatgatcaagaaagggttctctaggagctattatgacacctgtctatactacaaaggcactaagattgatgaagtcatctacttactgctgtatgtagatgacatgctcattgtgagcaaggaaaggaccaggattgacctaatgaaaggttggctaagggaagagtttgagatgaaggacttaggcaaggctgctaagatcctaggcattaacatctctagggacagggaacatgggacactaaggctacatcagaaaaactacattaagaaagtcttagagaatttctctatgactaatgcaaagcaaactaagcaacctatgactaatcagtactacctaagcaaagagcaatgtcctaaaactacagctgagaaagaatctatgagtgaagtgccttattctagtgcagtgggatcagtgatgtacctaatggtcagtaccagacctgatttagcctatgccattagtgtactaagtaagtacatggctaacccaggtaaacaacactgggaggctatgaaatggttactaagatacttactgggatctacagaagtgggattaaactacaagagaagggacaacagcagaatgatcactgggtacagtgatgcagactatgcaggtgacagagatagtagaaaatctacctctgcctatttctttacactatggggaaattgtatcagctggaaagtacaactgcagcctgttgtagcattatctacaacagaatctgagtatgtag

SEQ ID NO: 287092 - DNA, 810 bp, Cannabis indica
ggtccaatctgtaacttttgcaaaacacagggtctaaaatggtatttacccatagtttttttactataaattatgtatcttaaatgaaaaaattgtattacaacttcttcaaatgctgaaaatattgatgttatactagagaaaagtgatactctctactataatctttgtaattctcctaaaattgcactttttgtgtatttatttcagtctcatgatctaggcttgaaacatgttcttggatgtaaaaaatgcagtttccaaccggatttaggtttaggttgcttggtctaattttaggaaaataaatttaaatagtctcactgagcttgatggtgaagaaaaaataacatgtcgtttctaaatagtaaatttaatttttttttttttctaataagttttaagaattttatgattctcttaatttttatgttaattgagatgatgaaatatatttgtagcttctttttttttaatcttaattaaatatatatttttggttatattatatcttatttagaaattaattaaatgtgcaaaaaaaaacttaggttgtattaattgcatggtatattttgtattgggaggtaattttaattaattagtactattttaagtaatataattgttttgttaattaagtttgtgcagttattatattaaatcacgaaaatgatgatttattatcttatttagtcatatatatttttaattttttcaattaagcttataaggaataaatatagatgattgtgttaatttcataagcttataggaataatatagatgattgtgttaatttataatttt

SEQ ID NO: 287093 - DNA, 662 bp, Cannabis indica
gacccggatcgtgtccccgacccagccccgaatatggacttggactcagatcgagacccggacccagactcaaacttgaacccatactgggacctagactcagacccaaactttggagccaaactcgaacctgaacttggaccttgaccgggacttaggatccggacctagatgggggacctgggccccaaacctgaacctggacccagttctggaccaaggatcaagacctagatgaggcacttggacctgaaactaggccctaaaaccgggacagagacccaaaacttgaccctagactcgagacacgggacctgaccttggacccaaaactgaggacctgactacagggacacaaccccgaacctagacccaaacccaaattaaggacccagccgaagacctgggattgggactggaacaagaccgagatccaagctgagatctgaatttggacctaaggctttgacgtaacccgcagtcagtgtttgaatctaggactcggacctggatccgtacatatacctggacccagacccagaccgggatccagacctagactcaaactcagaccaggatccatacccgatctcggacccagaattggaatcagaccaggtctggactagaacccagacatgagacagtaacaggacccaaac

SEQ ID NO: 287094 - DNA, 734 bp, Cannabis indica
gtttgggtctgggtcaagatctcggtcaagatctaggtccagcatttcgatcccattctgggtcttggtccgagtccaggttcgtatctggatccttatctaggtccaagtctgtgttagggatcaggtcccagatttaggtctaggtctgggtctcgattccggtctgggtacacgaccgtgtccgggcccgagttccagtctcagtttcggtctgaggctacgtctctgttccgttctaggtttgggtccgggtccaggtcacggtcctagatctttttctagaatcctggtttggcgattcttgttcaggttctaatttttggtcccaggtctaggtttgggtttggatttggttcttcgtttgggttcttgtcctagtctgagtcccagatctagacaccgactattggtctgttccaagcctcgttacccgaatcccgagtcaagatctagatcactgtcacgggtttcggtctggttctggttcaggtcccaggtcccatttcggagtttgggtttgggatcgagattggggtgcggttctaggtcccgacccaggttctctgtcccaagtctagttccatgcaggtctgagtttaggttcgggttcgggtcccgagtccaggtttgggtggggatccgggtccggctcccaattcggttctaggtctgatttggagtccgggtcctagtccggttacggttctggatctaggtccaatttcagttat

SEQ ID NO: 287095 - DNA, 523 bp, Cannabis indica
aatgagacttgctgatgaacatagtacttatcttggcctcccttgtgtcatgggaagaaataaggatactattttagggtttttgaaagacaagatgcgcattcaaagttgggagagtcgtttcttgtctactgttgggcgtgaagtcctataaaactgtagcgcaagctttggcaagttttgctatgtctgtgttcttattgcctctgaaaacttgttcacatttggaaagccttatgtctaagtattggtggagttcgagtagtaggaaaggtgtgagctggtttagttggaggaaactttgcaacaataagagctctggttggagtttgtgtgagtataatctgtctttgttgggaaagcaaggttggcagttacttctgcaccaggattcccttgtgggtcggatatataaggctcgatactttcctaactgttctttcttagaggccgagttgggtggcaatccgagctttatttggcgtagtgtctttgagtcacaaacgctgcttagagatggtgc

SEQ ID NO: 287096 - DNA, 311 bp, Cannabis indica
tccttatttgattacatctcagatggctcccactcagcagtaggtgtctggttaaattatacatttaacctcttactatggttttgagcgatacctagctgtgacatattatcttagtctgaaacttctagactaagtcatcaacatagcaatcaaattgagataccataaaattttatgaggattagaaatctttgctcaagtcattcgaatagtatcaatttctattatagcagtaaatataaactggaacatataatcaagatcaagaatttattctgataatacctaattcattatattacttccat

SEQ ID NO: 287097 - DNA, 590 bp, Cannabis indica
gtaaaataatttccaacagtagacacagtatacacgtgacacaatattattggtacacgtaaatatatattttttaaaaaataaataaaaaaaatcattgaaaaataaaattattttttccgtaacatatcatatttttcatacaaaattttttttttcagttttcattcttcttcttcttccttcttctactttcagtcacaaattgtcactaccaccaccatccatagccaccaaaaccaccacccacaacttctaaaatcaccaccatctaccgccactaaaaccaccaccacaacctattttcaaatacaaatcacacaaaaaaaaagttaaaccaaatttaaacaaatccaaacctaaaatctaaacacacatatatatatacgaaaatttattcttcttcatcttctactttagtcatactctcaccaccgccaccatccatatttacggtaaacaccacccaccactaccgaaacgaccaccacaacttattttttaaatctaaatcacaaaaaaaaaaaataacaaaataaaattcaaaccaatttgaataaatttaaatccaacaaataaataaacacaca

SEQ ID NO: 287098 - DNA, 546 bp, Cannabis indica
ttaacatcttaaaaaaatttaagtaatttaaaatcacgaaactcattatctataacacaaaaccgacaaagtcataataaaatatgaactaataattgtctaatcttgaagaaaactattaaaaaggttctaatttttaataatcttcactcattatcttcatcgtcgatttgctctccatatatgatcagcaatttcatcacggacattagccatttcacgaagttgatctcttgaaatgctaaactcaacactatcattcaaaatttcgtgggtgctttgtatagtagcatcttgtacttcaggaatgtcttcatctccatcaaaatatatgtctttttctgcatttcacaatgtacttttgtactttcagatcataggaaggtatttactttaaaataggaaagcaagccttcaatacgccaaagcatcgctcaatgacatttctcaaagacgaatgtcgataatttcttcatgtttttcaggccaaacagaagcttcgctattatcaataataaccacatcactatctgttcctgccatcta

SEQ ID NO: 287099 - DNA, 535 bp, Cannabis indica
tagaaccctattttatagtggggaatattttagaaaaaattaattatcgggattgagcggggttatggattttgaccattttacccctagctttagaaataccctagttttaagtctaagggcattttggtcttttgtttatggatgagtgaggtggctgcccaagtaattgacacctagcactttaattttcagccaaggattaatcaatccttttcccaatttggaaaatcaaagaaaagaaaagaaattagaagaaaacatttcctcttgaactctctctctctctttctattcggctgaggcaaatcaaggatcaaaccagaatttttccttctatttctttgaatctaagctaggattcaaagtggtttcatctaaggtaagccctagaactcttgcttatgtatttttgagctttttacttagtttgaacatgtgattttgggagtaagtggctgttagattttaaagtgtttaaggttcgaattttagggtttagttgagttgattctaagtcctagctgctggtttt

SEQ ID NO: 287100 - DNA, 1512 bp, Cannabis indica
atccttagtttcaattttaaatctccaataagtattttagcgtgtctctcattgagttttgaacgttatggtttagggccctgtaaagcgtcgagctgcgtttccactcaggctgaccgacacacttgagcacggaacgaggtaagatagcataaatattacatatatgtgtgtggatgcttgttgtggatgtttgcactactaacattaatgattttaagggtgttagtatagtgtaggatatcagtgtggttacggtgttaccaacacgagtaccaggggtacatcatgcatgtggtacaacacttagtaactcccaagagtacaataattgctctaccaacacgagtacagggttggtaatttagtgcatttggtatagtggtcgtacttcccttaagaacgttcttaaccatttggtgagcacggttgttgagctcagggcggcttaagcataaagccggactagcattgcttatatatatgtattgcatatcttactgagtctgttgactcatcagtttgctaccttctgtaggtaaagaaaaagctaagctggaggaacagtgagatggagctcggcagtgattgtacatatcgcggcagtgcaacctggagggtttcggtctttcaatattttgagttatattttagttgcctattgtttaacaaaaaaaatatatatacaagtagactttgtaatagtaaaagtactttaaaccgtgttttgaaattcgagatcccgacccatatgattataaagttataatactataaaattaacttttcattttagtaaatttcaaatacgggcgttacacccaagcaccaggtcaacctgggtgctgggtcctagttttgcccaccagatgctttcttttgattccaaaaaatactcgtatcttaattgttgacaaaaaatgaagattatgcctagaaggcttcttggaaaaaatatttggaaatgtcaacttgggtgttgggtcctagttttgcccaccaaatgtttctatttaattcccgaaaatactcgtatcttaattgttgacgaaaatagagagtatgcccagaagacttcttggaaaaactatttggaaatggcctaagctgacaatatttcaacttgggtgctaggtcccagttctaactctcaaatggctccgtttgtttctcaaaacactacaaaaaatgtaacttttactagaacatttgaccaaatttgccgacaaaagtttctggcaaaaggaggagcataagagacctaaacttttcagctaaaacttttaccagcgcaaatacgcgccggtgaaactgacctatgctagcgcaattcatgattaattacgccagtaaaaattgccaagtttaatcgccttttggcataaacactaatttaaggattttttttatctttaccaacgtaaatatgcaccggtaaaaggtctcctattttggcaggaaactctcgcgtgctaatttgttttagcgagataagtgaacttttaccgacgt

SEQ ID NO: 287101 - DNA, 749 bp, Cannabis indica
tatacattcactatcttaactgaagatatagaaagtgtgtacatagcaactcaatcgttaattccgtacaagaagcccgggcccatgaaaaaagataccagcaaaagggacatgacaaaattttgtcggttccatggagactacggccacgacaccaacgaatgctacaacttgaagcgggaaatagaacttctgatcaagaaaaacaacccgcacttacagaagtacgtcaaggccaaccaaggtcagaataaccaggatctgatgcctccgccaatagatggacacttgcaagtcatcattggaggcccgcacatcgctggagacacgggcaaagctcgagaaagatatgcccgaacagctcaatacgagcaagaagaagtcatcctggccgtggaagagaggaagcccaaagttccacgcgcaggagagccaaccataacattcaacgacgaagatgctgtccagataagatttccgcacaacgacccgctggtcgtggaagtccagatagcaaacaaaatggtggccagaaccatgatcgataatggggcttcttcaaacattttgtttaagactgcttacgagaagatggggctccagctcaaggatttaactccatgccttcagcccgtctatggtttctctggcaaaggagttacacctctaggacaaaatccggctaccactcacaagttggacaagctccgacgagcataactatcatggcacaattcctgatattggat

SEQ ID NO: 287102 - DNA, 747 bp, Cannabis indica
ctaactaaactccccataaatgcatataaataggaccatgggtcacatgtaaagggatttttctttttctctctcattggtactatgatgggatgatcttcagtattgtgatgggatggagcgttggcttaaaccacagtttgacagcatcaagatcaatgtggatgcagctatctttgaaggacagaatcagtttgggggtgcttttgtagtaatagaccataacgatttactcactgaaggccatactaagttgcacatgggcaatattgctccgactgttgctgaagctttgagctttcgggaagctctaagttggatcaaaaaccaaccgcctagttctgtttgggtggagagcgattgtcttctggtcatccaaactttaagaagttcgactagtctgtcttcttattttggttgtgtgattcaggaatgcaaagccatgttggctaatttaagcaatttttatttttgttttattaagcggtcagctaatgagtcgctcatgagtttgcaagggcgtctttattttatcctgattgtattttcagtatggaaaatattccaactgagttgttgcctatgttggtgacagaatttgaaggttaataaagtttgattttcctttcaaaaaaaaataaagaatagtagttatttggtaagatatatatttcaaacaaaaaattattattgaatatttaatgttaaaaaaataaataaaaaataaataaaaagtcaattacatat

SEQ ID NO: 287103 - DNA, 530 bp, Cannabis indica
ctcaccgctcaaatggcctcaataatcaacattttgaagaatatgaatatgggaggaagtgtacaaccagtcgctgccattcaaagggcagaaatctcttgtgtgtattgtggtgatgggcatacttttaaaaattgcccttcaaatccagcttcagtttgctatgtgggtaataaaaacttcaaccgcaacaacaatccatactcaaactcctacaatccggcatggaagcatcatccaaacttttcatggggaggttaaggcgcaagttcaagtggagcacaagcacaaggaaagcaatcatttccaccgggtttttctcaacaacctcatcaacctcaaggctctcaaactagttctttggagagcttaatgagagattatatggccaataatgacgctgtaattcaaagcctggcagcttctcttcggaatcttgaagttcaattggggcaattggccaatgatttgaagaatagacaacaaggcactttgcctagtgacaccaaaaacccaagaagagatggcaa

SEQ ID NO: 287104 - DNA, 624 bp, Cannabis indica
attttcattgttttaggaatttatgtttatggtgttagattatagaatataatcaacatacatatgttagtaaatctagatcccggtaaaataacttccaacagttgacagatctaatgatctaaattaatcatagtccaattgtcaatagatcaaataaaaatttataatagataattttataattttttttatctgtgataaacctagtaacgtgataggcccatccaattcagtgtatatataggagcttatatgtttgcttagatgcatacaagaagtacatttattttggatatttaaatggactagaattctaataacaaaatatcactatgatagttttatttaggcctaattagtattgagcttattcaattaataataattatttaattaaatgttaaaattcctctcttttgggccttgtgtgagagttagggggctaatagtagtaaatacgacatacggaacgcaatcttccctcacataagctaccctaactgtaaagacctagttgccttactcaaataattgtattaagctaatatctaattatattagcttaacctaattaaaaattaattagcaacataattaattttaaaataaataaaattaatt

SEQ ID NO: 287105 - DNA, 725 bp, Cannabis indica
tataattctaaaattgactatgtctagtttatgaatttttcactaagcaagggcaacattgtaaagaaagagtttctagggtacatttgttgattaagaaactttagttagtctaatcaataaatatattaaatgacaatatttactaattaattttagttattaaatagttgaaattgacatttaaatggttgaatttaaaaattggcatttttgagaaaatgagatgtagaaatgataaaatagcaaaattgcaaaagtggggcccaatatccaaagcccatgtcggcaactattttaggcttttatcatttattttttcattattttaatgccaaataattctaacctaaccctaggtggcatactataaataggtagtgatggctttagaaaaagatgatgcatcttaattccttcaaagaaaaacctgagtgccttctacctaaacctagccgccacccttcctccctcttcttcactattgaaccgaactccttgagtgatagagtgagttgccacacacatcaagtggtacctcaatcatagtgtggaagattgtgaagaatccaaattcaacagaaggacattcggactcaaatcttggtgacactcttcgacagtacctctgggttcaggtcccgggtttgagtccaagtctggtctgtctagggtccctggtctgatcctgtatctgggttcgggtctcgggtcctaggtgtagg

SEQ ID NO: 287106 - DNA, 665 bp, Cannabis indica
atcattcacatcatcttcacacaagtcaactaaaatttcttcgtcagattcttcagtagcatcttcgtcgtccatgttgcggtcatcttcgttgacatgcaaacttggttcagtgccaatgtccatcggaggttgattaggtagcaaaattaactccccaagatcaactgttaacacaaaattggatgagttggtgtcgtgtaccaaatcagtttcgacattagcatcatcatccacgatgtcccaaatttgtcggtgatttacattctcaactattttccaatttttccctctcaataaatcatcgagataaaacacttgctttgcttgactagcaagtatgtatgggtcatctttataccatacaccactgacattaatactagtgataaggttctcgacgattgttttcttccgtcttggatttgtattgtaccacttgcacttaaataatgtgacagagtaaacaccagtgaaggttaactttagcacttcagtgagtgtgccgtaataattaaaaccttctgttcctgccacaaacactccactattttgtgtgctcctcttctcatctcgtttggtagccataaatcgaactccattcacaatacaaccttcatagtaagtacctaagtgatcagacccggatgctaaagctagcaact

SEQ ID NO: 287107 - DNA, 571 bp, Cannabis indica
gttacaattttggtatcagagccgccaggtttgtctaccgaagcttgctaagacatgtacaatcttcatcagagaaagctcggttcacggttcagtaagcccgtacttgtttagtattttaaataattgtgaatgtgaaagcatgttaggaagcatattagattataattatttatgttaagtgcattgccttaaaatccgtaagtgcggtagtaagtatgtaaataggccgttgcctgaccagactgacttactaactgacaggttagtcttataaaatggacacctggtgcaatatggagagtcagagtaaagtggccagggctagtaacggttggagagaatggagtccaagttgtccccgtaaccaaggtgaaagcccttggagggcttccgacgggagtgatggttatccgtcacaggctccgttggatttggagcaaaggtttgcaaaaatggaagctgtgattcaacgacatgaagaagagattcagaggttgaaacaacaaaggtctcctgtagtatctttaccacatatgccaatcatttttgattcggtattaccagcaaa

SEQ ID NO: 287108 - DNA, 509 bp, Cannabis indica
tatataaccgagctttcaacaagtagatctagaatttaccaagtaaattccgtctatataaccgagtttacaacttattaatttcgccttgcgccactatagatttggaattgaataacactctcaattatatagaacgatctatatgtaccacaatatagatacattatgattattcattgttacaatcctaatagtcaaagatcctctatagatgatctacactgaatagggtcaaatttaccattctacccttcaatgtattttatccttaaaacacttagcaacccataaatgatacttcagtaaactaatataattactaaaatataaggcctcaattatttatctctattcagccaagcttgaaggaaatcatcatctcacttctaaatacttatagaagctataaattccaaatctatgtttagcgctcccactcaattgaactaccatttttccaagatgtaaatatccgtcagaaccataggttagcatccacgaacaac

SEQ ID NO: 287109 - DNA, 536 bp, Cannabis indica
gaatttgagtgtttcaccatcaaattccattctaagtatccatgcttttgtatccaacttctcactcgcagtgagtaagaagggtctcccaaatagagttgatgtaggattgggatcaccctcatcttccatctcaattatgtaggaatcacctggaatgacaagtccataagcctgcacaaaaatatctttaactatccctaaaggataagcattagtttgatctgtcaattgaataaaaacctgagtttttcttgatggaccaagatttaaagaagcaaaattagaataagacatattattaataatttctcctaaatctatcatgcaatgatcaaacctggttttactaattgtgcatggaattgtactatgcttagctccttcttccaagagaattctatgcatacatgtagcaggactgattcctttgatgtcagcaacggaccatgcaatggcagttttgtgagctcgtagaaccctcatcagctttttttcttgcacttggtcgagatttgtagcaattatgactggta

SEQ ID NO: 287110 - DNA, 614 bp, Cannabis indica
agtcgcaaatatatatagaaaacgcgagtacccatgtactgcgaaaatgttaaaggataattatccccgcgaggatataaatttgtccaaaataaaaggaaatttgtctaagtacaaaagcgcgagtacccctgtaccgcatataaagaaaaagagagaagtaaaattaaaaagcataacatagaggaaaattaaacatctggagcagcaggagcagtctcatccgcgactttgctgatgacctcgttctcgacttcttcagcatccgcaccctcgacctcatcaggaaggttccctccaccaccttgggtctgagtaggcgacatggcacgaaaagcctcggccatctcagcggcttctgctccgaggagagagaagtcgaagtctggaactttggaaagagtggtataaatataatcagacactgcctgatcatactgcttcttcccattctctctctcagtctccaaatcgcgggtcatctcctcgatcgtcgcccgcgagttcttgacctcaagctccgcctgctccttagccttgctaagctcttcgagctccttctccttcctagccacttcttgcttcagcctttttatgttctcctgaaactgggc

SEQ ID NO: 287111 - DNA, 686 bp, Cannabis indica
acaactaacgaggattaggctattaccgaactgcttggggctgaacctctataaaatttttgtgtcttattattgctttaatacatattcttattacgacatatcatttatcgcttatgaaaaagactcattgtcgttggctaaaagcgaagtcaacaataggcaagtcatgaaaagaggtaattgtctcaaaggaacctcggacgccttagcttcccaccttaaaaacgaatatgggaaatcaaaagtaatcgagtgcaaccgtcagtcgtggagagagaaaatcggatttcgaaatattaattgtcaaaccatttattagccgaaaatcgaagggacgcccagtcagtctcacatcgagtcttggacggtcgcgctcgacacgtgtccccatccaaaggcagaatgatctcggataaagtccacacgcaacttcgaaagtcccgtacagacggggggcaaatgttatcccaatttttgcactctgacgtggcatcacgagaatggtgacacgcagagtccacttggaacatctgctcgggaagataggccgagcaggatgcctcgctggcatatccggagcaagatattcagcgatccgcgtagagcaaccaacacttagcagattcagctttcgcatcatgagtcatcagcacaatccctataactcagggatcaatttacgt

SEQ ID NO: 287112 - DNA, 550 bp, Cannabis indica
taaatatgaatttcttaaaaaaaatataatttaaagacatataaagtttgagaaaccttacattgggtgcagcggaattaaatgtctccttccgctcagatttctaacccttgtatcctttctgtagcagagtatcaccaagatctgagcccgattctccttctcttgtacttggattcttcgcagccttacacactatgattgtttactacttgatgtgtgtgggcacttactctatcactataggattcaaaattatgaagagagaaagagagaggaagggttcgaataaggtagaatagatggctcaaaatttttgactgaaggcaagtttattcaccatcttttaatttgaggccatcactatctatttataagaatccaactaggtttatgtttaaattatttgtcattaaaaaatgataattaaatggaaaaataagccataagtggccgaccatggatgtgggcccccactttgtaattttgccattttttcaactatttatcttattttctcaaaaatgcaattttttttaattcaaccatt

SEQ ID NO: 287113 - DNA, 645 bp, Cannabis indica
tagcgactggttcgcttggttggtaggtggaatggctccattattttgcttggatccatcaagcatgagtcctcctgatgaattcccggacaaggtctatttgcctacctcttcgcccacgagtggaactcgtgaccggggattagatggctgaccgttggttgtctgggaagcattcactgtcgggtcatccttggtttctccaaggggaatgacgcttggcgcctgctggcctacaattttataggctcttcgtatcagcacagtggcttgccgactacgatcttcgatttctgcatggtgagcccttaatgcctccatctctttatccctccattcggcaaacatacgcctctattcgtcaaacgcgaggtttatgcggcacgtaattcttcctgatcgtgatgtagggtattgttgtgacgttgcatgagtccaagcgcagcgcggaggttttgcaattcggttgcgtctccgatggtcgtctgggcgttgatgcctggtgggacaagcaaagtaggaatgtcctggctgtgtgcggaaccgttgttttcggtttcttgcacaccaggcacagtttcagtaacaggagttgtcccatcattcaccacgcttcccgtctgtccaggattgacagcgggtgga

SEQ ID NO: 287114 - DNA, 816 bp, Cannabis indica
atttgatcttcaataatttcatcattgaggatggatgtttcttcattcaccaaattgagttcatcatttgttgagcaagcatccaatgtatccaaattttcaaccacttcaaaggattctttctcttcaattctaggctcagtctcttctatgtattcatctgatggtgcttctactatattcaaacaactctcataactttcgttatttgagttattatccttaaaactctctgaatcatgcgccattaaattatcacatagagcttttaccatgtccgccaagcgattaatctcttttggaagtgatagtatatcctcctcttcttcaattggttggggtgagtttggacaataaggagggtattggtgactccaaccttgaagtgatggattccaatgccaatcgtaatcaaaatctgccatatcattcaacagatttattgcttcatggcctctccttaacaaaggctctccagtaacctctgctccataatccacccaactttttgtttcatcatcaagtccattataaaagagccacgtaaaacatccacttgagaaagtgggataacatctctctccaagctctttaaatctcctccaagcagaatagaatggttcattgtgttgttgggcaaaatcctcaagatatagcatctggatttaccttgcaggtcaaactcataagtaaaacattagtaaaattaaaaaaaaaaaaaccaaattagaatagaattcaactatattgatattaactaaaacagtccccggcaacggcgccaaaaacttgttgtgataaatccaacacgcaagt

SEQ ID NO: 287115 - DNA, 648 bp, Cannabis indica
aattcaaacctaaccctagtggaatgctataaatagatacactacaagaatttggattaataccggcggtattattcccggcggaacagacccgcctctaataatgggggtattaccggcggaattagtaatccaccggtaataattatttaataaataacgttttaaataaataaataatattttattttaaattgattaataccggcggatgggaattaataccggcggaatcccgccttgaaaaaagagggcgggaattttgccgcccaaagttttgaaaacattaatgccggtggattaataccggcgggtcccgccggtattaaatggggattctggccgtttggattaataccggcggaacccaattaataccggcgggtcccgccggtattaaaaatctataaaaatccctccccatttcagaaaaccatttttaccatttccctattccaccttcccccattcaacctttcccccttccccgttttcaaacacagtccgccccttctccagccttttttccccggcaccgccagtgcgtcgcccgtccaccaccagtgcagcgcttgtaagctccagtgcaccggtaatatatttcgtttttcttttttatcttttttacacattgttattttatttttc

SEQ ID NO: 287116 - DNA, 527 bp, Cannabis indica
aaaaatgacattgctgagtatgttgcaaagtgccttacgtgtcaacaagtgaaggttgaacatcagcgacctgcagggttgctgcagccattaaacataccagagtggaaatgggaagacattgccatggacgtgataggtatgcctagaaccacgggacagtttgactctgtgtgggtcatagtggacaggtttacaaaatcaacccactttctacctattcagacgaatttttccattgaccagtatgctgaattatatgtcagagaaattgttcgtcttcatggtgtcccaaagtccattgtttcggatagagatctgaagtttacatggagattctgggagagtctacatcgagctatgggaactcagttaaagttcagcacgacatttaatcctcagacggatgggcaatccgagaggacgatacatattttagaagacatgctacgggcatgtgtgctcgactttgagggatcatgggtaaagtaccttcccttgatcgagttttcttataataacagcta

SEQ ID NO: 287117 - DNA, 711 bp, Cannabis indica
aaaaacttatttgtgtacaattaatatttgtgaggctgtaacttcacactttcagtttgttgctttttctatttgcaggttcaacaagccttttcagacctggaaaggttattttagtgcttttctgttaggaatcttgtaaacatgcttatgtattttttctttaatgggtgtttaaataagctcaaatattgtactaatttaataataaaaatggctgttttaagaagtcatttgcagctaacatctttgatttgctcttacattgtagcagtaacactctttggctataaaagcagtttctcaaactcttgattctttgctgatgttgttgtttacagggatcgtggttatcttgttactgatgaagtgtttgaggtaattcctaacttagttttttactgctttcaatgagcgccaagttgtacttgtatggtgacagttgactagtgatctgtggcacttatttctctactacttgtagttgtagctactgctattggtattggtatttagttctttcctttgccattgtctaaactcttgagaaattgagactgtcactctctgtcttgattttcttgttgttgattgttgctaatattggtcattcgttcaggcattggtgaaaatcggattctcactggactctcctgctttttacactgtctgtgaggtaatcatgtacttgcattccatggatggtttttt

SEQ ID NO: 287118 - DNA, 603 bp, Cannabis indica
tccaacatccaatggatgttggataggatcggttctatctgttggatgtatttcatatatacttattgatttaatttaaaattattcaatattttagactagtatttttggatcggatcagatctatctaatattttaggtccaataagtattggatcatactggatccatccaatccaagaaaaaaagagtaaaattttaatgttaatttttatgtatacatatatattttacgtataacattataaaatctaattactcattcaaaccaaataaaaatactaattagtttaattgaatgttggatgtattggctttttagactctccatccaacatccgatccgatccaattggattttcaaaaataacatccaatccaatccgatcacaattggatgtccaatgtttggcagttggttgtgattggatcggtcggttgtcattggattagatcgatttatgcacacccctaatcagtacagactctattattgtcttaaacaacaggacacatataagacctataatttagattatttggtctggacaaaaaatatgtagtatcagttattagaatattttatttatggaaattattttc

SEQ ID NO: 287119 - DNA, 565 bp, Cannabis indica
agtgaaaaaattcataaactagacatagtctaatttttagaaattataaattgattaatcaaaaatcaattaagtgagtcttacaagtagtgttgtctcaactagtgtagggaccatggggcctatatatccaagcttccaataagcaaaccaagaacttacaaagtaaattcactgacttattatgaatttatggtgatttatttgaattcataatgcattttatatatatagaaatttcataattttgtattttcagttctcggcaacattgaaacgtggtgtttggctattagaatcctatcgtggtatttttagtatagcacggtgataaagttagacattgggaatgtcgggattagtcgtgagttagaaatgattattttacccttagatctttttgttaattaatcaagtggggaagggtattttagtcatttaccctttgttttgtggttgaattttaaggtggcagctggccacaatttgttaaaatagcctaagtgtaatgttgatcctttttggagaattaagaaaatagaaaaaaaaaaaagtgaatttgaga

SEQ ID NO: 287120 - DNA, 722 bp, Cannabis indica
tgtcttatgtgaattgattatttgaatttaaatagttattttatgtgttttagtggctgaaataaaatagttaagtggctttattcttttattttctctcatttcaacacttagcaaaaattagaaaaaactttgaaaaagaaaagctctctcttttcctctcattttcggctgaagcattgagcagcaaggagtgggttttctccattgatttttacttgttgattcatctcatcttaagatcctttgcaagctaggttagctcatcttctcccttccttaatttcttgagtttttgatgaaaaatatgagtaaatgcatgttaatttggatgttgttgctgctgcttgtgattgttgttgtttttatgttcaaaatgttggattaattatgtttagttaggttgaaatgcatgctagttgtgttgttcaaggtttggaatttttaagcttaaatatgtgattttggtgaaaatattgtgaatctgttgctgggttgttgtgtatgattttacttgatttcagaggcttatttatgcatgatttagtagattctagcttgtttgaatgcatgattgtgggaattgctcaagtttgagtttagaactcaaagcttgagctttaatggcaagttgtgtatctgtgaattctgggttagtttgatgccttagatttgttctttggggtatttagagcaggtctggaaggtttggaaccaattgg

SEQ ID NO: 287121 - DNA, 564 bp, Cannabis indica
tttgtaaggaataaaatattgattaattactaatataaaattcctcataatttaaatttaaattcaactaagtcaaatatcctaaactaacttccccattcttctctcactctcacgtgtccctctctctattcatctattactatagcctttacaaatatatatatatatattattattatcaagcttatacaaaatatatatatatatatatatattcctattataaataccactagtcttatttatttaataaacctatacgtataaaatagtatactaattttatctatattcctattacatgtataacaaatcttatcacttaatcatacaactatttactaataacttattctctaatataattaatattaattaatacttaatctaattaactatataattgtacttagcaaataccaataatattcatattttattggattaattgcacaatacaacgacaattgtaaaatatttgtaaaattatcttcatcactttaattaattgaaataccgctatcatttcaattagcttgcacgtataccgaaatgaaaata

SEQ ID NO: 287122 - DNA, 576 bp, Cannabis indica
gatcctggtactccgggttgttgatactttcctgtacctcaacccgcaaaaccctcctaagggcttccacctcggcatacccccgggagtattcgtccatggcatagttatgcttggctatccggagctcttgcctcacctcatccccaggaactggagtcagcacaatgttgggaggagcaggatgttcttccatgggggagaccccaccgtcaagaccatgggcaggagtgtcagctctccgaggccgcttgggctcgtcctgggcaaccatcttgcccttgcgcttgcgaatcagagcaatttcaggctcttcttcaccttcttcagcttcctcaggaagagcccggagctctcccgcaccctctgcgacttcctcagaaaagccccattgcttttcttgaccttctcccggtagcacctcctcgtcatccactaaatcaatagtgtcagggggagcgctggaagagacctttagggcaggggctattggggaagaagtaaaggccggaggagcctcgggagtgtgaactccggcaagctggtccaagatggcgtccatggagatacctgttt

SEQ ID NO: 287123 - DNA, 201 bp, Cannabis indica
tattgggatggctttgaacaactcccataacctccaaatcatccttttaatctcatttacacccacttaagaaatggtaacagccatggggtgtgtgatgtttgaatttcaaagtttgtgatcctaaacactataaatagaggtcttggttcatcctttgagacacactcttctcttctatctttcaaacacaaagctaga

SEQ ID NO: 287124 - DNA, 520 bp, Cannabis indica
ggaccatcccatagtcattagataagaaattatttgtttcaacaaataccactttctaagaaaatgactaaatctagaaaacaaagtagcaaagtagaggagtattttttttttcttgattccataagtgttctatcatcttattctatacaagatgatcccacttcctctgttgtcttgagataaccgattaggacaataccacttatgttctttgacaaaagtcacgctaccttgtcgttgtgggagggtttcaaggaactcaccctgttatgatttggaagacacttgtgacaaaatccattgttagtttaaacaagtaatggattgtcataataagaaactaagcagtaaagccaagaaaactatggttgaaaccattcatatggtgaaccaaaagttttctattacaaggacaagaaaggaaatttttgaaaataagtcttttcaatggacttatcaaagcttcctattccttgtattataggtttgagattatctaaacctatggcttgtggta

SEQ ID NO: 287125 - DNA, 898 bp, Cannabis indica
gagatgctcttagaccatctctaatggatgttgtaaattttattttaaatttggctcaaaaattgagttgatattatattcagcccattcttataattgtactccaatgcactagtggtaaactaaactttttttttaatagaatggtttaaaaaagttaacaaaaacattaaaatttaattaaaagtttataaaaactatatcaactatataaataaaaacgtaaaaagttattaattacattaataattggtaaaaaaataaataaaaaagtgatatttattgtggtgtaaaatttcgaccatgctatatttgtgctaaatttggtatagctttagtatttgtcaaatttagaccacattatgcatcactattagaatttaattttattaacatgagctacaaaaaacatatataaactatagtagacattacacaatatatgaaaaaattatagggataattttacaaagacacaaaaataacaaaaaattaacaaaatacggtttcatagaattttaaatattcttacgaatttttttatttatttacagaaagtacggtctttttatgttgtactcttgctaatttattgttgatattttgttatttttttttggttgttttgatgttattttcatgttacttttatataattttcttgttgttttcgtgttgtatttatgaaaaatcgtaaaaatgtaaaaaaaaatatctttaaacataaaaatataattttttttactataaaaatggtgcctcatcactacaacatataccctcattagtaacggactactccgccgctaataacccctgattcagccgcaataggctattagcggcaaaggtcccccgctaaaagtccgcagctaatactattattagcggcggaatt

SEQ ID NO: 287126 - DNA, 530 bp, Cannabis indica
aatcattagtaacaaataataatcaaatatttgttaatcatcaaaataaggagacctaaatgtttgagttaacatataactctatgtatatagataccactattccaatgtaatctaacaggcaatcataaacatgcacgctaagcatgtaattacatatgtatattattatactaattttacttcgattataaattcaagtgtcccggtcaacctgagttgaactgttgctcgacagtttacaggcccctaagtaacaatatacgcaaaactaataagtgatatgctaaatcacttttcggggactttaaactcgaacctaaaagtttctctattgttgtgtaaaaattagatacgcaagtgtacgcagtcacaaacaagtaatatagttataagtaatgagtatcgtctccacaaggactgtaaaaataaaatttctattgcaaaagttaataaacaagcaaaaatgcctaaaaagcaaaatgaaatgagtaatgaatcaactaaataaacgagaaaacaagtaaatt

SEQ ID NO: 287127 - DNA, 605 bp, Cannabis indica
atcagataattcagctgatcatgagtgtactgcatggctgggtcaagaggcccggcaagacgtggtggttcaatgtcgtcatgctcctcttgttctgttgcgggacgatctccccgagctggtggttgaccatgagggtgaggaggtttgagtcgcataacagtggataagttaatactgcgttgtggcgctaccttggtatcataagagtactgtggtactccatgtttctcacacagatcagtgataatgccagcaagcccaagtccaccaccacaagacccctcaaccattatatcaaatgtcactcgaatgatgtcccccacattcaaattataacctttcataattccatacacccacttaagcctgtccatctgagcatctgaaaaatgtttgttcgggagcatccttgcactaacaaagtatagccacgccttggctacctggttgagttcacaccgaaacaattgatatggttctccatcatatgtatgaaacctaagtcccggataccctagagtttcggctatatccacataatccaaactttttgcccgaatttgttgcttcaaaggttgctgttctacagtaaaggttgggag

SEQ ID NO: 287128 - DNA, 678 bp, Cannabis indica
agagcaaccttatttaagttgcttccaaggcaagaaagcaagcaaaacacataacttcaagctcttcttcttcttcctctcttgccgatccttgaagcagctggaaaccaaggaaaactcatttcttttcttcaatttcttgagctaatcctaaccctagaagctagctaagtggaggtatgatccttctactcttcccttaattaatttccttgagtttagttaggttttggtaaggttttcattaaatcctgagctggggtataaactgaggttagggtaggttcttagggttgatttgaaacttgtttgaatgaagattgagtgagattaagggctgttcaattaaataggtgttgaaagtgatgtttaaatgcaaattgtcaagtaagatgttgattttgagttaaatggtgaattgtgattaaatgatgtgttgaatatgttatatttggtatattgaactgttctggaagtgcaaattaggtctgaaatggttttggttcgagctgggggagaaaaaccagaatttttctggtctggcagcaaccggtcgaccggttggttctgctgtatcagaaccggtcgaccggttacagcaggggaaaatttctcgggtttttctctgaaccgtgtttagctcggggttgaacctagtacctgcctttgaataatttt

SEQ ID NO: 287129 - DNA, 559 bp, Cannabis indica
gtgattttagaatgtcatatcattgcttcatacttctcctttatattatatatatggggatatgattttgtcccgttattgtactttcacggattgtaatccgtgatgtacggcagccgtcagatgagggagttatttgatctgacggttgagattgatctaggggtaattagagttaaaaagtagaaacgtaccctgacactcttttaatgtaccatgagatccatctaatgtaccacggaatacattccgtagaagtacatcacgcgacaaaatcatacccctatatatatatatattgattatttaagatcacacttatttcataaacctaaatctctaaattcaaaactgtatttgaatcataaaatctaaaatcatttcaaacctctctatctatcttctgcaatttttattttattttttctaacaaaataaaatattcttacttataaaaaataatgtggcaaacctctaaatttaggagcaccaagtatactaaaaataacaaaataatttttctaagttattatttattatattaataaatttttatttt

SEQ ID NO: 287130 - DNA, 542 bp, Cannabis indica
ccgaacctgaactcagacccaaacatagaaccagactagggacacagaacctgggtggggacctagaaccgccccccagtctcgatcccgaacccaaactgaccttaaccagaaccagaccgagacccgtgactgggatccagatcttgactcaggattcgggtaacggggcctggaacaaaccagtagtcggtgtctagatcttggaatcagactaggaccagaacccaaacaaagaaccaaacccgaacccagacctagacctgggacccaaaattagaacatgaacaggaatcgccgaactaggaccctagaacaagactaggactgtgacgaggacctggacccagacctagaaccgaacacgaaccaagccttagaccaaaacttagactagaacttgggcccgaacacggtcgtgtactcagaccagaactgagacgcggacctggacctaaatctgggacccgatcccaaacacaaactttgacctagatagggatccgaatacgaaccaggactcggaccaagacccagactgg

SEQ ID NO: 287131 - DNA, 159 bp, Cannabis indica
ttaccttaaccaatgccctggaaaggacatagcacttatccaaggtgctagtaaactatgttgtagattatcatatcagttaaacccaatgtaccgataaatctaggaatatacatttaatcacacaatcttgattactttccactgtgatgacgacac

SEQ ID NO: 287132 - DNA, 551 bp, Cannabis indica
ttgtgttcgggtccaagtctgtgtccgagtttgtgtccaagtctgaaccacgattgggtctaggttcgggtcgaggtccaagttggggtcccgagtgcaagtttgggtctgggtcaggatctcggtctaaatctaggtccaacattttgatcccagtcttggtcttggtcctagtcaaggttcgtatccggatccctatttaggtccaagtctgtgtttgggatcgggtgccagatttaggtccagatccgggtctcagttccgttctgggtacacgaccgtgtcgggcccgagttccaatctcagtttgggtctgaggctaggcctgtgttcggttttaggtcttggtccgggtcctggtcgcggtcctagtcttgttctagggtcttggttcggcgattcttgctcttgttctaatttagggtcccaggtctaggtctgggttcgggttatgttcttcatctgggttctggtcctagtttgagtcccagatctagacaccgactactggtctattccacgccccgttacccgaatctcgagtcaagatc

SEQ ID NO: 287133 - DNA, 399 bp, Cannabis indica
aatttacgaagtatgaaacaacggtggaagctcataaaataagataaccttgactatcgcctaccaggacaacgttggattcttattttgatcgaataaaaggttgctagaatggtttccattttagatgagctgacaactctattcaatgaatgatactttgactctcgcctaccgggacactatatcagtttgttgaaaaaaccttggaaattatttaagatgtgcctgttttgtattttcacatgtctttgttatttgctaaatgcttgataatttttgaattctgtgtgaatttatattgaaccatgttgtttttctattattagttgtagtttaatttcgaatcttcattgttggtctaactaagcctgttgtttaaatgggacaaatccctaa

SEQ ID NO: 287134 - DNA, 804 bp, Cannabis indica
ggggtactagtaatggaccctccgcaatcatccagaccacagggcgagcaagtagagcccggggctacccgaaccgatccaccagcaccgcctccacctccgcaaaatccgggggataatgcggaggctgttaatgctaatcctcctgctgattggcagcagatgtttcatgaaatgcggagtgttatacttcgtcaagaagaagagttgcaacgtttgaggcaacaagctgtcccagctaatcaagggttaccaccagctcctgtgccagtggtgggtaaccaagggtttgttatgccgcatcgggactctgtgttcgagcggtttgtgaagctgcaacctccggtttttctgggaggtatcgacattattaaggccgatcagtggatgagcactgttacccggatcctcgataatatgggggtgacgggaactgagagggtaaattgtgcggcctttatgtttcaagatcatgcccgcgtctggtgggacatagtgaatcaaacccgggatgtcagtgtgatgacatgggatgagtttaagaaactttttgaggaaaagttctataatgtggctgtacggacttcacaccaggaagactttgtgaagttgactcaagggaagatgtcggtggctgaatatactctggaatttgaccggttatctaatttgctggtgatttggtgcctccgattttaccagaaaacaaaagtatgttcgaggactgaatgctacaatcagtcgagacttgaaaattaccacatcccatgacactctgtataagagagtggtagacttggcctt

SEQ ID NO: 287135 - DNA, 806 bp, Cannabis indica
tactttataatacgtcagcgatttcacagtgtaacatcaaatcaaactgactacattatgacatgcagatctcatgggattccctgatttgagttaattaagatactatttgaaaacacgaaacctaccagtaattacttaaggagatttaatatttgttgggctctaatatactaatatgacatttttcttattaaaatttggacaaatcaattaggtcagatttaataaattatgatagtagtaccaacaacgattatgatgtcaaattttaataaattattcactactgaaatgagtggatgtcatatcacatttttaatttcaccatttaaaccatgtacttattatttaaagatggtgatgtgacatttttatacggctgtaataaatcaattcacatcattcattatgtcttccatctgtactaatacttaaaagcattttatttttactttaattctggaaattattatttaaatcataaaaccgtacgtaaatttgtttttaatataaacatgtcacatcacttagtactttcccgatattgcttagattttgtttgtgggatttgattcaccttctccttctattaaaattggttaactaataaatgggtaaatattaccattgtcaaaatttattaactatgaaatggttaaattcggaaaaagaaaaccaatattattacatcaacccaatcacgtgtacatcaacccaccaacccactatataagtaaaggttatgtctatttactaagcatttttatcaaaccccgttttactgttacctacatcaaatggac

SEQ ID NO: 287136 - DNA, 392 bp, Cannabis indica
aaattttctgcatttaaaaaaaaatagcaatttcgaatgactaataaaataaaataaaatatattttgaaaattattcaaattttagttgttttgaaataagatttcaaacttaaaataattttctatttaattaaatatcatgaaaataataatatttaagtatcaagaatggaattaacttaaatattcaattttccatttaattaaatgtattaaatacaagaattaaataatcaagtatataagaaacataattattaattctaatttaagactagggaaaatattttgtaattaagttggtccaaaattaattaaaataaataataattttaatttaaaataattttcctaattaaatattagaaaatataactagtactaaaaaaa

SEQ ID NO: 287137 - DNA, 261 bp, Cannabis indica
ttttgtatttaagaaccaatggatggtctggatgacttaatttagctatgtactagttagaaagagaaaatgatggatgctaggtattattttggtattttattgacttattaaatctatctatttggtgattacataactgtgggaatattactgttcttttatattgatgagtggtcctgattttattactaatatatttttattaatataggagttaatccattctttcaaattagtatcttgtaatataaataaaag

SEQ ID NO: 287138 - DNA, 737 bp, Cannabis indica
gttgaaacatctctacgtagggaacctgccccaatttcaactggtaccatggcctcgcacccgtaggaaagcgagaagggtgtttcgccagtcgtggatcgaggagttgtgttgtaagaccaaagaacttgcgagagctcgtctggccaaatccccttgcgttcttctagtttccctttaatggtgtgttttattattttgttaacagcttcagtctgtccgttgctttgcgggtaagcaactgcggagaatgccttcttaattcccagatcgtcacatagttgtcgcatctctttacaatcgaactgttttccattgtctgagatgagtttgtatggaataccaaatcgacaaattatggagttatagacaaactcgcgcaatttagttgctgtgatggttgctagtgctttggcttcggcccatttcgtaaaatagtctactgcgactaccacatatttgactccacctttccctttaggtagctcgcctattaaatcaatcccccacactacaaagggccatggacttgtgatagaatgtaggttactcggaggttggtgggtatatgtggctattaactgacacctgtcgcatttcttcgcaaaagcgagagcatcctatcgcaaggtttgccagtaatacccttgtcgcatgatttttaacgcaagggagttaccccctgtatgattgccgcaaattcccccatgtacctcacgaagtatgtaaccgcaatc

SEQ ID NO: 287139 - DNA, 861 bp, Cannabis indica
ctagaaactaaaagtttctctatcgataaaaagcatgacaataccctaaacaacacaaaaatgggaagaactagggttcccaaaaatgtcccaaccggtagaccggttctacaaccggaattctggttctggaaaattcctggaagccccaaccggtcgaccgttgctgatggcttccctgaaccggaattccggttcagtgcaggaaatttttgaaaattcatatctcattcaaatcaaacccaaaccctatcaaaccttccagacctgttctaaataccccaaataacaattccaaagcattaaaacaaagcttcatgcactaaaacaaaaaccaccatgtgagctccaagctttgagttcaaaactcaagcttggttaaatctaataaacatgcatcacaacctgcttaaatcaacttaaatatgcataactaagcttctgcaaacaacagaaaacaaccaccacaaacacagcaacaaaattcctcattttaccataaaaaccaagttttgagtctaaaactccataatagattaaatccaactaacaaccataaaaacctgcttgaatcatcattctaaaacataactaaacttcagaaatcaaaagcaaacacaaacaataaccacagccccaaaattcactaacatgcaaaaactctcaaatcttaaagttccaagaaagcaaagaggagcttgatcaacaattacctcaactagaataacaccaaaacttgctgaaatcttgctgaattgaagaacacaattaaccctagtagccccctaggttttcgagagagaggaagagagagcttgagaggaaaatgacttgcttctttttttcttaattttgtaaaat

SEQ ID NO: 287140 - DNA, 196 bp, Cannabis indica
ccagaaacgactgaccctcaagttggggacgcatccacgccaccagcaaccatgcattttccccccgtcactccgtcggtagtatccgagggaatgatccagctcaccactgatcaatatgctgcgattcaggatcaactgcgtgcactacaggccgaagtagatggacaaaactgggcccgacgccccctcgagt

SEQ ID NO: 287141 - DNA, 1009 bp, Cannabis indica
ttattatatatatttttattatttgatttttggaagacttgttagtaatgtgatcatgtttatgtagccaagtgcttttagttaaataaaaaagtgtgttgtttccttcatcaatttctttgtttcaatttttcttaaattttgggttttgtataaatttggaagaaaaaaatgacatttagccgatgaaaatttaatcaaaactaataataggataaatataatgctatcatatataactaattaattaatatatatatatattagtagtttttttaaaaaaaaaaaaaataatacacacccagttaaaaattattgacacactagctttgaggtcatataaaaaaatatttaaaaaaaatatttacgaaaataaaataaatcaaaaaatacaaaattattaataattaaaactaaataacaaattatcttatttatttcaggaattttttttttcaaatatattattttactttttttttttgaaaacaagcgtaggataatatattattttacttaaaattgtattaaagttgctattatttaattattaatttaaatattaataataaaaatcgaacctaattaatttcaattatatttttaaatatataaattttatttagttttaatttttttataaaataatatatttaattaattttattaaacaattaaataagcaaataagtttagatattttaaacaaaataactaataaatttgttataaagtataattaattaattaaattaatgtctaattcaaatttatatttattaatgtcgcttatagtataggacacggtttaaaactgtcagaaatgttaaaaaaaaaaaaaaacagatttttctgccattaatggctgaaaaatttatattttcccctatttttttcctgcattagttttataattttacctaaattaaaataaagcaacaaattaattttattacaataacaactaactttaaaacacattaaatttatataataacaaaataaatat

SEQ ID NO: 287142 - DNA, 599 bp, Cannabis indica
ggtctaggtctgatttggagtccgggtcctagtccggttacggttctggatctaggtcaaatttcagttatgattccaagtccaagtcctagttccagtcccggtcaacttccagttttggttccaattttgtgtcacagggtacgggttcgggtccacttatgggttttggactgggttcaggtccgggtgtgggttcgggtcctcgtcagggttcgggtccagggctgggtcccaaaaccagaccgactacggggttttatccaagcccttgttcttgatccggatcccaatctcgggtcccaatctggttaaatttcttgtgccgggtcacgagctgggtcctaggttcaagttcgggtctgggtcgggtactaggtcctgatcctagttctgtttcccaggtccctatcctaattctgggtccacgtcccagttattgtgtgtgtttgggtcccggtctaggttcaggttcgagtcctagtgtcggttcaggtttaagtctctgtctcgattttgatctgggcgcgggtttgggtttagtttctagtcctggtcctagtcctagttcgcttctagttccatttgcgattctgagt

SEQ ID NO: 287143 - DNA, 486 bp, Cannabis indica
cacagaggttgagccgtatatcaagtaagtatgaattccataaacacaaacacacaatagtcaacttcatctaaaaagtgcattttattatatagtgagcgcaaggagttgcttcaagcaaggggtgtaggcaatattaaaaaagtgcaagagactgagttccttgaatggttcaaaactcgagtaagccttgttgcctctcaatactcttaatcttgttctcaataactgttcaacttttcttaatttaatatttttcctgatatgtagattaatgaactacggttgagcaaccagggtgcagtgtcagatgagttgtatgctatagctaacccagcgaatgcagcaaattatttttatccagggtgcatagtgaacggtagtaaatttttggtcaaggaaagggatgataaccgcaaaacacaaaatagcggtgttatggtccccggtgaagatggacaaaatttttacggcacacttgaaaaa

SEQ ID NO: 287144 - DNA, 729 bp, Cannabis indica
ctccttctcctaagatctttgctcctggatcttgaagattctactcaacccaagctgaaggagattgaagtgcaaatatatagtagtaggttctttcttttcttagttagttacagaaattagttagatataggatcgatgacctgtcacgatccattctaactaatttttgttagggattaagcttgtaataaggcctaaagccactgtagtaattttgtataagtatttccttgtaatgacttaatgaaaaaaatatcagtattaagtggaggtttatccaacaggaacaataggagaaaatgaacaattttgatttttgggttaatgtaaactaccgtaaaaataaaatagcataaatttttacccaattaataaataattttggtttaaatagttttagatatttaatttataaaataataattaattatattaatattatttaaataaatatcataaaggattttgttatagatattttattcaaatttatcatttcaataaatatcattaactaaatgagagaatctttcaactaccttgatgaaatatctaacatcttggagagtatatctaaagtaacttgagagaatattttaaccataaaaataatcaataacaatatttaaatttaaatttaaaataaaataatttaaaattaattaaaattacaaaattacactagaccgtcgccaacacagtgactgatgcatgcaatgtgcttgt

SEQ ID NO: 287145 - DNA, 726 bp, Cannabis indica
ggtcctagtcctagttcggttctagttccatttgcgattcttagttcgagtttggatttgagttcgggtcagagttccagtcttggtctgagtttgggttcgagtccggatttcattctaggtccagatcaagctccgggtgtgggttcgcgtcctgggtcttggtctaggttgggtccgagtccagagttccaatcctgatctgagttttgattcagttctggttctaagtcctttgttctgatccttgtatgggttcgagtttgggtctggatccgggtctagctttcggtctgattctaggtgtgggtttgagttcgggtctgagtctgtgtccgagtttgtgtccaggtctggtccccgatctaggtcttggttcgggtccaggtccaagttggggtcttgagtgcgggtccaagtttgggtctgggtccggatctcggtccaaatctaggtccagcatttcgatccaagtctgggtcctggtctgagtccaagttcgtattcggatccctatctaggtccaagtctgtgtttgggatcgggtcccagatttaggtctaggtccgagtcttagttccggtctgggtacacgaccatgtacgggcccgagttccagtctcagttagggtctgaggcgaggtctgtattcggttctaggtctgggtccgggtcctggtcacggtcctagtcttgttctcgggtcttggttcgacgattcttgtt

SEQ ID NO: 287146 - DNA, 437 bp, Cannabis indica
aagtggacacgaacccgtaccctgtgaccctaaattggaagttgaccgggacttgacctagcacttggactaaaaaatcataactgaaattggaccttgattcggaactataccgggaccaggaccccgactccaaatcagacatagacccgaattgggagccggacccgtatcccaacccaaacctgcactcgggacctgaacccaaaccttaactcagacccaaacaaggaaccagactatggaaacacatataggatcgggacctagaaccgcacctcagtctcgatcccgaacccaaactcagaaatgggacctgggacctaaacaaaaaccagaccaagacccgtgacagtgatccaaatcttgactcgggattctggtaacgggagctggaacagaccagtagttggtgtctagatctgggactcagacta

SEQ ID NO: 287147 - DNA, 565 bp, Cannabis indica
tcacacatttccaagccacaatgacgtataggccaccttatacgactttggccaacatcaaacaagaacctggtgagtctttacaagactattttaaacgctttaatgcagaagtaacaaaggtcgagaaggctcccgagtcttcgcttgtttgcatgctgataacaggtatcttgccgaggaccgacttttggaaggagctacaggctcgaaggcccgaatccttagttgaattcttcgccatggccgaacctcacaaaagaatcgagaattctctagcggagttagagaaggggaaggacaagcgccggtcacccataccgcggtcacgatctcgcagtccacgagggaagaactccaggggccgaagcccaagaagacgcagcccgcgaagacagcgaagtccgaagttggccaagtctcctccaaagaaggaatcctcgccgaaaaggaaaggtggacctcgcttcgtcaactatactgaactcgcagtccctcgagaccatatctacgcgatcgaggaaagaaacggagtcttcaagaagccgccccccatcaggggaaa

SEQ ID NO: 287148 - DNA, 644 bp, Cannabis indica
ttttctagcataatgtaccattattaaaggaccatttataaaaatatatataaaaaaaaattaatatataatatgtactataaattttaaggagttttttttttttttattttttacctttttttaaaatagttttttttttttaattatatttttacagaattctacatagaaatccttattacaactagcactgcaatttaaatacgcaacaaaaaaataatataacaatctacatagaaatcaccggagtaaccattttaaaaacccaaactataaatttaaaaagaaaaaaaagtaatatggagtaattctcctaaatttaattgtaataaatataatatttaaaaaaaacttaaaaatattaaataaatcatcataaataagaaaaaatattataaaaaacttaaaaaattactatataaatgaaaattaatttcttaataaaaaatactaattttttgtataaaagatctttgaggagtaatttatgtaaagattaaatttatgtacaattgacaaaacaaatcctataaaaatagtttttttttaaaaaaaaaaaaaaaattaaaccataaaaattaaatcaaacttaaagttatcaattaaagaaaacattaattaccttctctctatgtgtatat

SEQ ID NO: 287149 - DNA, 683 bp, Cannabis indica
acacatccagagatgagtcactatcaccaccaaccagttgctcactgacctcaggaaccagccggttcatatagtgggccagcatctccttgccctttttagcctctagaagcacaggcaagggtggagttggtgcctgcacccgctcaggagtactcctaaccagttcagacccaactgttggtggtctagattccttggacttggcagacttgggggtaaaagggtttgcagtagttagctcctcgaaaaggtcaatgacctctccgtaaggtctcttttccgaggacccctcaccgcccttagacttcttggccggaggagaggcgctagagcttctgtccattctcttcctcagggcatcgatcatctaccgagacacgtctgcactgaacaaaaatagtatggttagaaaacagccatcagaaagcacaaggcaggaaaatcaagaagctcaaaagtaaagtaaaatgcaaggtgaccgcccacacagagactcagaagtccatcatcacttgacatcgatcttatctcagacatgacagccttcccttttccggcaaaggggggagatggccgaacaggtgaaatgggctcccttatgcgaattgcatgttcaataggcctgggcgtggccgggagtttcttcttcctcttcagtggggtaacctgctcgtcctcgg

SEQ ID NO: 287150 - DNA, 687 bp, Cannabis indica
ttggttagaaatgtcacgaatttagattattttgagaatattccggactaggttagaaattttagaatgtcggtttaatggaattagcaaaattacaaaaatgccctaggttattttaaagtttatttttttcattgggggtaagttagtcttttgccctttttacttttctagggctgagtattaaaaaataaaaaagaagaaagctattaatagcaaacttccaaggcaaggaacattaaaaaaaaagaagagaaccaagctctcctttctcctcttccttcgagcagctgcaaccagccattggggggacttcttttcttcagcaaatcatctattttagagcagaatctaaccccaactcaacctagaatcttgaggtaagcttctcccttatgttcttggtgatttcctaggttttaagctaggtttttattagttctttatgggtgttcatggctgtaggcttagatgagttatgagcatgatttcttagttgaattaggtttgttttggagtgtgttgaagattgaattaagtggttttaatggctggttgaaatgattaagctacatagggatagaattgtgtttttcttcactttgaagtgtgattttgagtaaattgatatattgcaatgaattggttgttgggttatgtcatgtttactatattatactgttttgg

SEQ ID NO: 287151 - DNA, 675 bp, Cannabis indica
cccaagtgattgggagtttgatcattcctttgattgctatgacatctcccgagaagccatagatgcttgatgtcataggtcgcaaatccttctcttgcaatcccatttgcttgaaggcttggaaattcagcaaattcaccgaactcccattgtcgaccagtatacgatggacattgtctccaccaatattggcgactacaccagtgcatcagagtgcgggtggtggacccatctcgcatcgctctccataaagacgatgtcctcgcattctttcttgaagagcttctctggccgttcaccaagattgttcacattggttaacggcctctccttggcttctctggcatacctttcttgcgatttgcgagagtcgcctgcgatgtgcggtcctccgattatggttaagatattgcgaggtgttctcgagccactcgcgttctggctatctcctttgccatccgcttggggatgtccctcctcgcttctcttatacttgtcgaacttccctcttctgatcagttcctctatctcatcctgcaagacccaacattcaagagtagtgtgaccaatgtccttgtggtacttacagaattttttgggatctctccggtcgcgatttcccctgatggggggcggcttcttgaagacgccgttcctttcctcaatcgcatagat

SEQ ID NO: 287152 - DNA, 564 bp, Cannabis indica
gcaacaaaatgtttgaaactcgttggcataggacaagattgaggggatagtccatgttgtatgcttggtacactaggccaagtttgcctaagtgacatagtaagctgcaggaggcgcttttgttgaaaaggaagcttgttggcaggagtgtgggagtagtgcagggaccgtcagattcttgttagtcacgacagaggtcgagagttgatgaccgagatggttcaaattgagatagacatgggatgcttcagttgctacatgcgtgtgtcaagaggggcgcacatggagaccaaggcgggcagaggtcgcaatcgtcagaggatggttgtacttggaagtgttcgcatgcgagttttatttgatccatatggaagcatcgaggcagttgagttgaatgtgctagagcttgcatgaaggccagagggccgcatcattggaacttagtacttcgtgggagccagtagggcgtgatgcaagtgtgaatcagttgggtggttgagcggacattgcatgcatgtggaaatcgctggggtgctaatgagatagttgactcgagagtcacat

SEQ ID NO: 287153 - DNA, 523 bp, Cannabis indica
ggaacttcaagcaccctgatgcaagtgaggtagtggcaatggcaaagttaaattatgttgagtggtttaatgctcaaaaagttaatgtcacagatgcaagcttaaccgggacgatgacattaccagtggagcgatggacagctcccgattttcctttggtcaaagttaatgtggatggtgcacttttttctgcccaagggcagtatggattgggcttgattgcaaggtctgctgcggggttggtcttgggggccagaagtttatctagagagggctctttgcaacctcatattgtcgaagccattggtatcaaggaagctctctcttggagtaaagcgaatggatggtcatagattgttgttgagtcggattgtttaagggtcattaatgatttgcaaaagttcaaacatatggcttctccttatggccatattctttatgattgtatgactttggttgctgattttgatgttgtttcttttaattttgctaagcggtctgctaataaggttgcgcatgcctt

SEQ ID NO: 287154 - DNA, 581 bp, Cannabis indica
tttctttgattgtttgacctccatggcatgtttttagaaagaagaatatgccacataaatgacttttagattgttggaaaaattctcattacaagagagaataggaggattacaatcaaaatactcaaaatacaaataaaagtatttcatcaagattacaagaaatctagagaagaaggataacacacaaaaagcttgaccaaggctcaaggacctttgtcctaaaagtcatttcctccctcatatggacacttagggaaactctagaaatgctcttaaggatttatcaagcctcatatgctcagcctagtgtctaaggatgagcatatcctcacaaggttctaaccacaacaaatggtttcaaccacttcttatgcaagtgaacaatatgagttttcaccctcatatgaacatgaatgatcaccataaagcccttggatgttaccaatcataaattgggcatttatgttattaattgggtgatttggaagagttttggactgttacaaaggctctcaaactttcaaaaacgtgggcaataatatgctgaaaaaataagtaactagttactagttaccatt

SEQ ID NO: 287155 - DNA, 693 bp, Cannabis indica
tccaacgggaatgacgatcgacgtctgctggcctacagtctgataagctctcgtatcagcacagtggcttgccgactttgatcttcgatttctgcatggtgagcccttaatgcctccatctctttgtccctccactcggcaaacatatgcctctgttcgtcaaacgcgaggtttactgcggcacgtaattcctcctgatcgtgatgtagggtattgttgtgaccctgcatgagtccaagcacagcacagaggttttgcaattcggttgcatctccgatggtcgtctaggctttgacgcctggtggaacagtcatgttatgaacgtcctggctgtgtgcggaaccgttgtttccggtctcttgcacaccaggtgcagtttcagtaacaggagtcgttccatcattcaccacgcttcccgtctgtccaggattgacagcgggtggagccctcgaaatccctgggtcctgcaacatcgggtccagcatttgtgagtttgctgggtcggacaggcctctgcgagtttgcaccatcgtgttgaaagagcgatctgtgattctgctctcaatgaaagcaccaaaatgttgacttcacttttagccaacgcaatgagtctttttgataagcgataaacgatatgtcgtaataaggataaagcaataataataagaagacacaaaaattttatagaggttc

SEQ ID NO: 287156 - DNA, 600 bp, Cannabis indica
attacattgtatatctattttattttatttattttaatttttatcccatttttatatattttttagatatatatccacttttatagatgatatcccattagaccccttaagttaatataaattatatgctagacttaagtagagagtgagagtatattgagcaacgtacccactagaaaaagttggtatattttaataaaaaaatattataagaattttttggattaatggatacaaaaaaaaattatttttcaacttatctctgctaatactgtgtgacccaacgatgatattacttcggctatgaaatttaataagccataagaaaaaaatatttttaggcctttagttttttaaaaaatgtgatatttttcaaaattaataaaaaaatatgtacttttataagaaaaatttttggggcccttaagctaggtgagctctaagcacaaacctaacccctcaaggctagacctgaatatcacttttggaaatggggtatttacataaatatgagaaaaataaaactaagtttagataattatggtaagaaaatttaataggaaaaaatagtggtatttaaaataaaaacttaacatatat

SEQ ID NO: 287157 - DNA, 180 bp, Cannabis indica
ccaatctatgattgagttactgcttgctgtgtgtgggcactcactctttcactagggtcgaaatttagaagaagaaaagagaagagaggggttcggccaaggtatagaaaaggggaaggctcagtttttctgaagagagaaatttctgtcagaaaaggttatgaaaacttgttatttgac

SEQ ID NO: 287158 - DNA, 415 bp, Cannabis indica
tttccaggacattggtaaagtaaactggtttcgaatgtatggagtatacattagactggaccgatattgaacttagttaagatattataaacttactgttgtatctttccaagtcaatatcactagttgatcttagatcaaaagaatcgagcttagctaaatagaagtaaatggatgagctcttgtttcagtgactatttcttagatcactaaaacatcatttacaggtagctaagtgttttaaggggccaaatacattgaggggtgaaaacggtaaatttatcccatctcgatgatctttgatcacattaagataataacgatgtaaatcatctatcatggaacatatagaatgctctatataagtatgagagtgcaattccaagttctaagagtggattcaacaaggaattaa

SEQ ID NO: 287159 - DNA, 593 bp, Cannabis indica
catttcttattatctgatctgcacagtgcttgtagaggattggctcttcccaataatcatgtttcacctcagaaaagatcttcttcaattgttgacgagagaactcaggaggagttatgttggcagccaagaagttaacataatcagcataccacggtaccattagactttccctcacactaaagagttgttcatcaggaaattgctcatttatctgtaccttatttgcattctggctctcttccatctctagccttgacagatgatctgctaccagattgccagtgcccttcttatccttgatcaccatgtcgaattcttagagtagaagcatccatcgaatcaatcttggctttgcatcctttttggtcataaggtatttaattacagaatgatctgtgtagactacaaccttatttccaataagataggggcagaacttatcacgtgcaaacacaattgccaacatctccattgtggcataattcagttgagcctcattcagggttctactagcatagtagattgtgtgaaacaccctgtcaaccctttgacccagaccgctccaattgcatagtcacttgcatcacaca

SEQ ID NO: 287160 - DNA, 541 bp, Cannabis indica
caattacataatttcatcacagcggaaggtaattgtgattatatgtttcaaagcttatgtctcatgattcatcaatgcactgaatttacactaatgtgataatcagcatgcaataaaatttacttaccccttggatacttgttatgtcatttctaggacattggtaaagtatgctaatatcagatataaggagtatacattgaactgaaccgattgaacttggtaaaaatatcataaacttaccattgaatctttctaagtcaatatcacttagttgatcttagatcaatagattttaatcctgagatggttaggtttgatctcaactgcgttatttatattcttagagttgctcgttaaagctgaccaattggatcggcccaattcttacatcttgggaacatggtagtacaattgagtgggagcactaatcatagatacggagtcaataacttctatctagacatagaagtgaaatgatgatttcctttgagcttgacttaatagagataaatggaagagctcttatttcagtaattat

SEQ ID NO: 287161 - DNA, 371 bp, Cannabis indica
tctctccttcctttgatgctaattctcgttcttgattggattctacacaatcttccacactatgattgagataccacttgatgtgtgtgggaactactctatcactagggtatttcgaaaattgaagagaagaaaagagaagaagagggttgatgctatgaatagaataagaggctcaggtttttctcttaaaggaataagatgcatgtccatagtttcctgaagccatcactttctatttatagaatagccatctaggtttaggttagaattatatggcattaaaataatgaaaatataaatggtaaaatacttgcatagtggccgactatgatatggataatgggcctcactttgcaatttttccattt

SEQ ID NO: 287162 - DNA, 645 bp, Cannabis indica
atttcaatcttaactccatttacaattattgaaactttatacatctttacctcccatatagcactattcctagcttcccaaattttatacacaacagtatttattatagtcataaaaaattctcttgaactatgaatatctgcgcctttttatccactttaagctaatatttattatagtcataaaaaattctcttgaactatgaatatctacgcctttttatccactttaagctgatatttattatagtcataaaaaattctcttgaactatgaatatactactggtgcctggtttgtcaaagcccacaagagcgaatcgagttcagctttggaagctgagttcatggcgattcaccttgctctaacttgggcagtggagctagggtggcatgaagtgcatgttttatctgatgcaaaagttgtagtccagtctctaactacaaggaaaggaccacctgactggaaggtatcaagtattttcttttctattgttaatgtattgaaagtactgccggttgttcgattttcttttatcaatcgtagttttaatactttagcggatggtattgctaagaatgctagagttgctagcgatttagctattttgtatcaaggggagggtaatccccctgtgattcccatc

SEQ ID NO: 287163 - DNA, 513 bp, Cannabis indica
gctaggtgtcctttgtttatttttcattttacaacaaaaattacaaagtaaagaaaatagaattttcaaacactctctctttctttcctctcatttcggccaagccttggagcagcaaggagctggttttctccattgatttttgcttgttaattcatctcctcttaaggtccattgcaagctaggttagctcttgttcttccttctttaatttcttggaaaaaaatgatgaaaatggtgatgcatgcatgatgtttttagttgttgttgctgctgtatgttgtggatattttcagaggtttaaagcatgtttttagatgttaatgaagcttcttgtagtacttgattgttaggttatttaaggttatggtttttatgcaaaaatatgtgatttttgatggaaatgtggtgaatctgtttctgtgttgttgttattgtttttaattgttttcagaggcttagttaagcttgattaagtagaattaagctagtggaatgcatgattaggtggtt

SEQ ID NO: 287164 - DNA, 571 bp, Cannabis indica
aaacctgctattcatgatgactaccttgtctatttgcaagaacatgattatgttgtgggagacgcttctgaaccagttacttatcaagaagccatgagaagtcctcaatctaagttatggttgaatgcaatgacagatgagtcaagttccatgtcgcgaaacaaagtatggaacttagttgttctaccgaaaggttgcagacccattgggtgcaaatgggtttacaagatcaaatatgattcaagtggacaaccagtgaagtataaggctagacttgttgctaaaggatatagccagagagaaggtattgattacaaagaaacattctcacctgtctctaccaaagattctttgcgaatcatcatggctatggttgctcattttgatttggaacttgaacaaatggatgtgaaaactgcctttctaaatggagatttgtatgaagatatctacatgactcaacctgttggttttgaggagcctggcaaggagcatatggtttgcaagctcaataagtccatttatggacttaaacaagcatcaagaaagtggtatctcaagtttgatgcag

SEQ ID NO: 287165 - DNA, 608 bp, Cannabis indica
aatcataacaaatataatatgctcatcatactatttcatagatatgccattcacatatgtctgtataacacagacctgattattataccaacattcccatttatgtctacgtggcgtagtcctatgtgttgcgctcacacatctattttaatctacatgacgtagacccacgtgttgctctcactcgtctaaatacagtaagggcttagaattggttcatctcggttatggttaccaagtccaacccgattatgccttgagcgcataatccctaaatctcatttcaaataacatggcatggcattacacacatatattactagggtaataaccctaggctattaggccgttcctattagggtaataaccctaatcccggttactaaacattcatgcatatcattcatcatataagagccactgcgcatactctacatgccaatctctgtcttacctgttgtccagcaatagaaagagatttcgaatccccggtgctccagatcaggtgccggtaatcctagtcacacatatccgggatttttcacacttagggttaacccctgattccatactcatataattcaatcatggcatttaaaattcagata

SEQ ID NO: 287166 - DNA, 544 bp, Cannabis indica
aaaatcaacagacaaatgtgtcctattctttaacatcctgcgaggaaacaagcagttcgagtggacagaggagtgtgaaaaagctttccaagggctaaaggcacaacttgtaaaatctcccgtactctcaaaacctctggatggcaaggaactgggaatatacttagctgttacagaacatgtcgtgatcaccgtgctaattagagaagagaatgatatacaacacctagtctattacatcaataaaagactcattgaggccgatggccgatatccgttaatagaaaaactcgcttactgcctcattctagtaacaaggaagttgaggccttatttcaaagctcatcctgttcgagtgtataccgaccaaccaccacgccaaatactccaaaaaccagacgcttttggacggctactcaaatgggcagtagagttgggcctgtacgaaatcacttcccaaccccgaacagcaatcaaaggccaagccttggcagactttatggtagaatgcacaggaaaaaaagaaagtaaccccgagccggta

SEQ ID NO: 287167 - DNA, 218 bp, Cannabis indica
aaaagcataaatcataatcatacgtaaatcccgggttatgatcagacgcccatacccctgaccacaaccctaactgccgtgtcccacacgatactgagtcccgaacgttcgtacgacggtacttttgacaaagtaacagcctatactcggtacactggtcatactccagctgctagtcatactctagccttaccgatgtgttacagtatcagcctata

SEQ ID NO: 287168 - DNA, 519 bp, Cannabis indica
tttgaaagtgatgtttttatgcaaattgtcaagtgagatgttgattttgagttaaatggtgaattgtgattaaatgatgtgttgaatgtattgtatttggtatattgaactgttctggaagtgcaaattaggtatgaaatggttttggttcgagctggaggagaaaaaccagaatttttctggtctggcagcaaccggtcgaccggttggttctgctgtatcagaaccggtcgaccggttacagcaggggaaaaattctcgggtttttctctgatccgtgtttagctcggggttgaacctagtacctgcctttgaataattttgagttatttgaattattatattgatggtgaaggctaagtctaatcggtttagaattagggttttaatccggaatattatgttaaggtatttattgtgtttcaattgtcgtgacataggaccgggattgcctagcttgtttttccacccaggtcggccatattcttgacttctgaattaaggtaagaaaagtggtaa

SEQ ID NO: 287169 - DNA, 648 bp, Cannabis indica
agagaggtatgtcatccaaacttattgatcatgtgttagtggaatgtcgggaagtgtagaacggttgtgatatgaacgtcaaatgcgatgttttgtgtttgtatgaattgcttacttctaaattgtacatccaaattagttcttagagttagcgagttgaaattctggttattgatggcttgaagttgtgcaggtggtggtagcagttcaatcgttggaaagtttggttatctattgtgttgtttgtttttagtttgagtcttagtttactcggggcgagtaaagattcagtttgggggagtttgttaggctatttttagcctatattttggatcgattttatgtgcgtttttcactgtgttgggacagaattacgcttgttttctatgttttcaggttctttggaataatagaggtctcgggatgaaaaagtccaataaaagacgagctgagccaagaaaaacactttttgaggaaagatgcatatctggccgcggctagatacagcttggccgcggctagatcacgaagcagggaagcaggtttttgaggctacagtcgccgcggcgagatacaccctcgccgcgaccatttgaaacttacagaaaggtatttttaggtcacttatctggccgcggcgagaggaag

SEQ ID NO: 287170 - DNA, 506 bp, Cannabis indica
tattcaacatttgtagaataggttaatttttactaaaaccccactttacccctctcattccaaaaagtggctccctctctctcccttccctttctctcttcctcttgaagtctctcgaacccactgaacccaccaccacgacggaaatctccaccgaacccaccatctgagcaccactcgacccaccatctgaggacgaagacccactccacccaccacgtacccaatcgacccaccacgaagacgaacaaccatcaaggtaagatttctccctatggtatttttgaatacttttcttattgatttagggttaaaatattgtttattgatagatttagggtctgatatgtgcattttggattagatttagggttatatttgaatctgtgatttctgggttagaaaatgcattttctaggcaggcccgatgcaggtccgatgcatgcccaatgcaggcccgatgcatcatgataaaaaaaattggatctgggttgaagacaaaggcc

SEQ ID NO: 287171 - DNA, 826 bp, Cannabis indica
agaaagcataccagaaagcgatctcgagccaataccacagccaagtaatattgaagacaaaccgacctggaagctacatgtggatgggtccgcaacagatcaactatctggtgcaggaatcgcccttgtcacacctggggggcaacacctgcacgcagcggtcaaattcggattcaaagcctctaacaacgaagccgaatacgaagccctaatcgctggacttaaactagcgaaggaaatgaaggccgaacacattgagatctgcagtgattcacagctggtggtaaatcatgtatccggcgaatacgaggctcggggagaaaaaatgatagcatatctgagcaaaatacatgatctgctcgcacaattcaaaagctacagcctcagacaaattccaagagaagaaaatacaacggcagatgcgttagcccgattggcgagcagcaatataagtgacaaggcaaacctggtccctatccagttccttgaagagcctagcatcactggcacggaagaaatcgaaatgatcgacacatctccaaactggatgacgccaatagcagcctatctcaactctggggaactcccaaataaccgaaatgaagctcggaaaatgagaagaaaggcagcacggtacatcatagtagaaggggtcatgtacagaagaggattctcgatgccattactcagatgtgtcacaccagatgaagctgcacggcttctatttgaagttcacgacggattttttggaaatcatgcagccggacagagcttatcaaagaaaattctaaggcaaggctactctggccaacgatgattaaagatt

SEQ ID NO: 287172 - DNA, 936 bp, Cannabis indica
taccaaaaatacgtaagactcaagctttactaagacaaaatctaacttccttttcggcccttcacactaggagtttctcttccacgtcactacctctctctctcctctttctctctctctctctctctcactcttttttagttcttttctttagtaatcttgaattgaataaattatccattctctctctccatctctctttctctgttgaagaaactcccaatggcatttgctgacaggtataaaaattgttactttactcttgtaatcccagaaccaaatctattttcatttcaagttgttatttttattttatttttctcacctttacaaaaaaaaaaaaaaaaaccccacttcttgattgttaatagaatcatatgtcagtgaatgaatggctggaaagagcacttgggtagatttctttctttctttttatttatttattttttttattttggttctggtttatttattaagttatttgtgtcttatgatcttgaccagtacctttcttaattttcagcttcccaatatcttggagcactatatattatatgtactacaacttatttacttgtttacttactcattatttattattattaatcaaaaacaagcaaaagcttgaccttgactttctattttgaggttattgtttaagtataatctttttctgcaactgcattttgagctttcttttttgttttaatttattatgttcatcttctctttcttcttttgttgtttatgtttttatggacattcctaactaccttaaagaaatttgtcttaactgagctggtaagctacttataattaaactactgtggttgttgggttctattattgtataatctaaacttgtcattttcttcctttgttgaaaatttcacaaccataaactcaataaggaaatttttctcaattggtttgctc

SEQ ID NO: 287173 - DNA, 645 bp, Cannabis indica
gttcaactctttcttactcatcatcatcatcatattctgatgatgatgatggtactcagtcgtgttcgtgttcgtattagacactgcaaaaaaaataattaatataaattagatttttttcgatactataaattactcgagaataataaaacaaaaaaaaaaaaacgtaccgagttgatgatattgttgagtggtttggaaattgttgttaatattgttattagggtttgttggttgttgttgttgttgttgttgttgttgttgatgaagtggtcttggaattagaggacgaagttttctagctgtggtaatgttgaatgaatctttaagctctcctcctccaccatgatgatgatgatcattataacccatcatccacatttttattatagctatgtgtatatgtatatgtgtggatttttgaaaggtggggtttggagaaagagttggtttttgttgttgttgttgttgttggaaagagagaaaagatatgtgaaaaagatgagtagtgttggtttttaaaaacatgggaacgaaaaacactgatatatatatatatatatgaggttgtactagctaaattcgtaaaggaagagagagagagagagagagagtagagagaagaaaaggaagagagagagagag

SEQ ID NO: 287174 - DNA, 620 bp, Cannabis indica
ataaataaataataaaaaaaagggaacatcttagcattttttttccaaccacatttactttaataactttgtgaacaattttctaatatgtgttaaatatgtaaataattatattaatatcattaattacgggcaaaatttgcatacatgcaaccatatagggaagcaccataaagcttaagaacttaaaaaagaggtaatgcatggcagtaatgatttaaacaaaatttaatataataattaatattatacgtactaaccacacaataaatggcagttcctcaaactgagaatctcattaaagaatgacctaaaaaaataaaatcaatttcaccccatgaggaaaaagttagcaaatcaaatagaatcttaagcattcatgtggtgggtcccaaatacacctgagcttatcatcaccgttggattaaaagataatgaaacggtgaaagtagattatcaagaggggaccctagagtgtctcataattgggctggacaaacatcaaatcaaagactggatggctatgattggagtttgacagataaaacttcccactctatctcgtcaaaaactgggtcccacctcatccccttatttttattttctaaataataataata

SEQ ID NO: 287175 - DNA, 543 bp, Cannabis indica
gcctttctgattctctccaacagatcagactgaagtgtcaaattgtgcaatttcccaactatgaactcaatcccttcactaaccatttcagaagctagttgaggggctatcataaccgtggtacaaacttgcccgagacctttttctgcttaaagcattggccacaacattggctttcccgggatgatatcaaatttctcaatcatagtccttaaccaattccaaccaccttctttgcctcatattcaaattcttctgggtgaaaaagtatttaagactcttatgatcagtataaatctcgcacttttcaccgtaaagataatgtcgccatatctttagagcaaaaaccacagcagcaagctctaaatcatgagttggatagcgctgctcatattctttcagttgacaagaggcataggctatgactctgtcagcttgcatcagaacacatcccagaccctgtctggacgcatcacaataaaccacgaatttctcttgatctgatggcaaagctaacaccggagctgttatcaaacgttgctt

SEQ ID NO: 287176 - DNA, 507 bp, Cannabis indica
caaagggggagattgttaggtccttttttggcaatttagttgtcaaaatattttttaattaatgtgcattttattgagcattcaatttttttttaccaactctggaccctttttccagggggagttgtgtttagtacttgtgaactatttggtttaaaagttagcatgtttctttagttattgttggttttcgattgtgttactcagggggagtagttatttgttatggctaactttatcttgcaggtactttgtgttaaaaaatattttgttcatctaaagtgccaaagggggagattgtaaagtccttttttggcaagttagttgacaaaatattttttcttttatggtaagattcttgtgcattcataaccgatttcttaccttgtttattcggtttgtagttgctcttttccttgttaggaaagttgcacttttcagctgaactttcctttgtttggaaacttcttaaaagagaagcaattctcttttggaaagttgtctttt

SEQ ID NO: 287177 - DNA, 666 bp, Cannabis indica
tacctttaggtaactgtccgattaggtcaattccccaaatggcaaagggccacggactttgcatttgtgtcagctcgttgggcagagctattggtatctttgaaaatctctgacatttattgcacttcttgacataagctttcgaatcttcaatcatcgtcggccagaagtagccttgccttaggattttctttgataagctctgtccggctgcatgatttccgcagaatttgtcggggacttcatatagaagccgtgcagcttcattttgtgtgacgcatctaagtaatggcattgagaatcctcttctgtacatgatcccgtctacgatgatgtaccgtgctgcctttcttctcattttccaagcttcatttcggttatttgggagttccccagagttgagataggctgctattggcgtcatccagtttggagatgcgtcgatcatttcgatttcttctgtgccagtgatgctaggcttttcaaggaactggatcgagaccaggttcgccttgtcacttatattgttgttcgctaatcgggctaacgcatctactgttgtattttcttctcttggaatttgtctgaggctgtagcttttgaattgtgcgagcagatcatgtattttgctcaaatatgctatcattttttctccccgagcctcgt

SEQ ID NO: 287178 - DNA, 633 bp, Cannabis indica
aatcgtgggttaaatatttgggcacgttgttcaggcgtcaaattacccccccaagtggcacgcatagctgagaatatatctgccacagtgctcatcatttcagtagttggttggggaggcaccgttgattgagtttgagggattggtttctttcctttgcccttgagccttttacccacgcctctttgatagtcagatctttggcctagaactgtttccataacgtcaaactgataaccagtatcagattcagattcagtcccagtatcgctctgggattgtcgttcaagtcgcttcctatcaagctccttgatcagttcctcctatttaaatcaaaattattagaatatgtaattaatataaaatataaattttaataataaatcattttaatcacttacataatcttttgcagctaattcattaacgaaagttccagacggttttttcacatggatctccttccatgcttcaactacatgctctccaggaggacccccctatacaaatataaacaattaaattagtttattataagaaaaaaatattattaactattaaagaattaatacataccattccgtggcgtatggaagccaacgattttgtgccttgcgttgttggatatttcat

SEQ ID NO: 287179 - DNA, 566 bp, Cannabis indica
tctgactccctttatgtttttccttagcatgcttgtgcttttgaatgtatctttgctgtagaaagaacactgtaggaaaccctaggggttgaaacttttacgactcttcttttccatgtccttgcgtttagctttcagccgtaaggcttattttagaactacattgcgtctgttttccatcctgctttcttcaagcttcatgaaattttttgccctaactcaagaaaaactttctcacttcttgagtttagacttttcttcgaacatggttgttctttaaatctgttgggtactcctgatcggcatatttgcttgtttttttgcttgatactccgtccaacactcatcttgcgtgttgtcttttgtagatgaacccaggtgagtcttgggagcccgagcgtcaaatcgaccaggaactgcttcaacttctgcacgaagtccatcctcgtcttcgtgctaatcctccttctgattccgtacccagccatagaatgatggctcgtacgaaaaaaactacgcgtctggctaacgcttccaacccccaggtggctcagcttgccaccctg

SEQ ID NO: 287180 - DNA, 620 bp, Cannabis indica
atgaaaaactgacatggtttgtagatctagaatcaagaatccagatggatttatcattctctaaaacacatgattcgaaaactaaagcatcactgcttaatcgtttttgaattgttgttattgctggttcaatctgttgtgaagtataatctgagaaagtggaatcactttctctaatcttctcaactgagcttgaagcagtaggattgttggagctatgctttgcttttcagagtgaacaattcccagcttagctgctttctggaatttcatgttcatcatgagcaagtgtgaagtattactctgaccaggagtcttattcacatttttaagttcattcctaaaggcaatttatagatgagtgttgggatgtgggttgtacatttggcactcaaatatcaataaacagaagtaagcttttggttcaataaattcatacacaagttcagaaaataacaagtaatcaaatatgtttgcaaaaatactaaaaatctaacatatttttattttctaaggtttccaacataatgaaatacagtgtcctcgtaggcgagagtcaaagataacataagtgaaatagagtagtcagctcatctaaaatgaaaaccattttagcaacc

SEQ ID NO: 287181 - DNA, 605 bp, Cannabis indica
agaagtcgagaagcttctatagattggcattacaaaaatgctccagcatcttagtaaagtaagttgcttgcactagagtaattaattaaccaggtatgccataagccataggtttagataagtcaaaccttcaatactaggaacaagaagttttgttaagtccattatatagacttactaacaaaatttcctttcttgttcttgtaatagaaaacttttagtaactccatatgaatggttttaaccatagttctcttggctttacttcttagtttcttattctgactatccattacttgtttaaactaataatggttttcatcacaagtgtcttccaaatcataacagggtgagttccttgaaactctcccactacgacgaggtaccgtgactttctgtctaagaacactaaatggtattgtcctctttggctgtatcaagacaacagaggaagacggaccatcttatacaaaataagatgatagaacacttttggaatcaagaaaaaaaaaatatctcctctattttgctactttgttttcagacttagtcattttcttaaaaaagtactatttgttgaagcaaacactttcttatatattgac

SEQ ID NO: 287182 - DNA, 891 bp, Cannabis indica
taaaacatgatgtatatataaacgcttaaataaaaaaaaaataataataattgatattgttttaagttaaagtttaagaataattaactttcctatcatgggttgaattgccttataataatacaacaaaatacagaatatggtaattaatgattgaagtatatatattatgtacttgttcttccaagaaaaaatagggtaaaactaaaaatatgcaagttttgcctttttggaaaagaaaggccaaattttcacacaaggaaagaatgacatatctttgtcattttgtaaaagtaaaaccaatttattttgttgttcttgttaggtagggtaacaattgtgtacgtacaagggtattatggtaattcaatcaattaacaacttgtacaaaaatgtgtggtgtggggagagagaattaatcataccaaaaaaagcacgtgttattcatgttaaggaatttaataacatttggccactaattaaacctagtatattttctacattaggttttgctttgtacactctttttttccaagaaatcaaataagaaaattgtgtcttttatttaaattttactaaataataaatttgaaacaaaataacttaaatgaataaacttataataaaatctcaaacataatttataaaaatatcataaatttaattttatgtcatatgattttttttcaattacaaaatttactattatgttgttattagtaacttcaatagatataatttaaatgagtaatttgactcaattttcaaaaacacaaaaaatgaatttgataaaaattggttgtattaatctaaatttttgtaaataagattaaagatttttagtatatatatatatataattttttttttaaatttcaatcacacacatag

SEQ ID NO: 287183 - DNA, 561 bp, Cannabis indica
taaataagaatttactactatttatatattatatatatatattgctaaagaatttttctattttgttttttttttggctcgatcaggttataattgtttgcctccacatctgaatctgaatatataaaatgtggctatataaacgaattcttggtttatgagaaattattgagtgacttttttttttaaaaaaatattttctttttttatataaaatgtggctatgtaacagaattcttggtttaatgttattatttatttttctgtcaaaatgttaacagaatattctaatatttgacagaatattctgattagaaaacgttaattataattgattaattttagctaaataatcctaccaaaatttaatctaacaaatttctctctctagagcaaaaaccctagcctccaacacaacctttaccagtttataaccttagttataatttcttaagctatattttataattttaattttcattttaaaatttgaaaaatactaatgaagacaacatgctacatattatacaaaagtattgcatttatatatcccacgatgtt

SEQ ID NO: 287184 - DNA, 658 bp, Cannabis indica
gccatctaaaaaataaaaaccaaaaaaaatttaaatgtcaaaaaagttaagaaatgtcgacataacatcgacatcatgtcgatattctgtcgatattatcaaacattcagtgaccacctaattggtcgacaaaccgttgacatacaatcgacatgctatcgacattatcataagagcagtgacaaacgaccaacatcgacaacttatcgacatacagtcgacaaattgtcgacattataccaattaactaccatacgaatcaactacaacttcctatcgataaactatcgacatacagtcgacaaattatcgacattctaacaattaactaccataagaatcacctacaacttattatcgacaacctatcgacatatagtcgacaaattatcgacattttaacaattaactaccataagaatcaactacaacttattatcgacaacctatcgacatatagtcgacaaattgtcgacattacatggcaaaactacataacatcaaacaaggtaaaaacaatcgacaaattgtcgacatgatatcgacaacctgtcgacaacaatgttcaaacacacaaacagaaaactaacatatgtcgatatcctatcgatatcctatcgacatttcatcgataacgctgtaaaaacacacaaacacc

SEQ ID NO: 287185 - DNA, 538 bp, Cannabis indica
cacaaaacccaatagaattaccctacgcatgacctagaacttgccacgataatctttgtcttgaaaatttggagatgttatttatatggcttaaagtttgagttatactcagatcataagagcttaaagtatctttttactcaaaggtacttgaacttgagataaagaagatgggttgagtatatggaggactatgatttcactttgcagtagcatccaaggaaagctaatgtagtagttgatgcactaagtagaaagcctcatggtactttggcatgtttggctcttgaggactggaaaaggataatcacaatgggtgattataacttgcaatactatgaaggggaagaggtagcttgtatctctaacatagtggctacaccaatgctacttcaacaagttaagcaacgtcagtggcaagatgaaaagctaagacttatttggaaccgaatccaagatggtaagcaactagatgggtggacagttaatgatgaagggtacctataccatatgggaaggctagttgttacagatatcc

SEQ ID NO: 287186 - DNA, 590 bp, Cannabis indica
tattgcatatatcctaaagattatgcgtcctcaataaaatcttgcatatatcctcaagattctgcatcctcaataaaatcttgcatatatcctgaagattctgcaaaacgttagtattcattatatagttcatggatatataatgaaagagatgaatacatatttatatatatgttcttgtattctttgaggacaatgaaaagtaatctaataccgatatagattttgacaaatatttcccgaagtaaatgtttatatttatcgaaaaaaatgattgtattcatgtgaatacaactaaagaatcattaaaaataattattatcactacaacaatttcctctccgccggtattaatagcccagaccgtcggcaataattaataccggcgaaatctgttggtaattatccatcggtattaattggtcgctaaaagtgactattagcgacgaaaatatcttccaccggtaataatattaataccggtagattaaaaaagcagtggggtccgccggcattaatgtctgcacaaaaatacgcagatacattaatatcgacagaccacaatcagtgttccaccggtattaatattt

SEQ ID NO: 287187 - DNA, 612 bp, Cannabis indica
ggcacatctgaattcagaattgaggttaagattagtataatatcatgcatatgttattacatgtttagcatgcatgttgtttatgcctgttagattacattgatagcagtaatagtacacatagacttgtactgattactgataaatgtatgttggctaaaatactgatcgatgctgtcacatcaatatagctagagtatgactagcatattgagtataagctgacattatggtcaatagtattgttgtataaacgttctggactcagtaccgtgtgggacacagggattagggttatgatcgggtgtatgggggccaggttataacccgggataggaaaaatggagcatcaatgaattgtgtaaaccctaactaacataggcgtgttagcgtgatttttaacgtactgtggagctcgttgctaatcaacgaggttactggaaaacgtgaataattaaaatttttctttttaattaaaacataacataatatacttataaaattctgagatcccatttacaaaatacatttacaaaagtttgctattcatttacaaaatatttgtcgcctagcaactaaataacaaaagccctgatgtcccgaggatcgtac

SEQ ID NO: 287188 - DNA, 689 bp, Cannabis indica
aaattaagataatttcacaaacaagaatgaaggaatggcaattaaacattaactaggcaaaacattaaacaacaatcatcatcctccctaaatgggaaatttagttcagaaataaatccataaccattcctataacaatattcaacataaagaaattaaagaggaatagagaaagaaactgttggtggatgaattctggatcttcactttgaatcactctgctcttcctgccgctctctgctgtgttttagggttccaaatcgcttcccctgacttccaatcgcagttttctatttataactaatttttagggttcgatggacaaaaatacccctgggccgtacgggatctcgccgcggccagatatggtctcgccgcggccagatcaatgctgaaaatatgtggttctgttacgagtatttagccgcggccaagcttcctctcgccgcggcgactggagcacaccacttctttcattcgtttcgtgttctagccgcggccaagctgtgtctagccgcggccagatgtcccttattcttcaacattgtgtttttttcttggctcagctcgtcttttactgaatatttgcatcgagacctctattattccaaagaacctgaaaacatagaaaacaagcgtaattccgtcccaacacagcgaaaaaacgcacctaaaatagatccaaaaca

SEQ ID NO: 287189 - DNA, 209 bp, Cannabis indica
ttttgtttttcaaattttaaaaacagaaaacaaaagtgtgttctgtaaagttctattttttatttttattttttgattttatttaaatcgggtctaggtctggggtcggattcgggctcaagtcaaaagccgagtttagcgtcagggccgtagggagcggatttgggtccggttctggtcgtaatctaaaagattgattaagaaaaaaa

SEQ ID NO: 287190 - DNA, 732 bp, Cannabis indica
ctctctctctctctctctctctctctctctctctctctctctctctctctctctctctctatttcggccctcttggagcagcaagaagctggccattttcttgggatttcaagctagtttcaatctaaattggtgatcataagttgttggtatgttccctttagctttcttttaagttttcttgaatttttgaggaaaatggataggttgcatgcttagttttggttcattgttgctgctgtgtttatgggttattttcagaggtttaatcttgcttaattgagtggaatgaaactgttttgatgcatgttgggttgatttgaaactaatttagagttttggttcaaaaactatgcttttcaaagtgaaataatgaaatctgttgctgcagtggttgttgatgcttgctgttgttttctgaagttattatatgcatgtttaggaagatttgagctagtttggatgcatgttagttagatttaaccaagtttgagttttgaactcaaagcttggagctttaatggtgaattgagtttctgtgattgaagcttggttctcttgctttggatttgttcttaggggtaataagaacaggtctggaaggtttgatatgctttgggttcgaattgatgaagttatgaatttttgagtttagtctgcgaggaaccggaattccggttgtgcatccggaattctggatggggctctgaaattcccaaaactggaattccg

SEQ ID NO: 287191 - DNA, 604 bp, Cannabis indica
aataacataacaaaaaaaggggccaatataaattataaatcctgaataaaacagtatgaaaactgtaatacaactacaaacaaactaaaaacaaactatcaatggcaaacaactacacagaaaataacagcaaagaccttaaatcgtttggaaacataaaaaaaacagtaaacaactaaccctaaaagaaatcgaaaaatgcagtataaaaagaacaacaaaactatattaaaacaacaaacaaactaaaaaacatatacaactatagaaaaatatagagcaaagatttgaaaatcgttttgaaatctaaaatataacagcaaacaactaaacctaatgaaaatcgaaaacacatcaaaacataccagtaacaaactattaaaaaactgaaaagaaactaccgaagaatgattgaaaacaccaaaaacgaaaacaaaacacataacctgtaagcacaaaaaaacactgaaaataaagaaaacaaaacaaaattaaagaacaacacccagaccagaatcaaatgaaatgatcaaaagcaacaataaataactaaaaaatttaaaaacatgaaacaaaatgcgcaaatgaaaccctaaaatcacac

SEQ ID NO: 287192 - DNA, 544 bp, Cannabis indica
tccggtagtgcgtattttgcctagtagcaaagtacacacgctcttgggagtccgtcagctccgtgtactgggtgtactgtggagtgtaccccctcttttggcgtttctcctccgtccgggtgctgcctttggaggatcatttactccttgagccctgggaagggcctgccaggctagcagttggagcggagtgcgagggagcttgtccatttatccctgagggatttccaaaatgagacgatgcgggggccaaggcctggccctgactatatccgggagtagcagagaattgtatgccgctcattggtggagccgcggtcgggacagtacccgacgacggggctccgggcatataccctgctatcccggtgggatagtatcctccataggcaactatttgggcctattcaaggttgatgtacttttggactcttttctggaagtcctgaaggctggcagctccttcctgttgtagttcattccagaagggagtccctgtacgaatgcctgcctggagaagggcaagctgttgtccgtcatcaac

SEQ ID NO: 287193 - DNA, 583 bp, Cannabis indica
tagtctgagtcccagatctagacaccgactactggtctgttccaggccccgttacctgaatcccgagttaggatctagatcactgtcacggttctcggtctggttctagttcatgtcccaggtcccatttctgagtttgggttcgggatcgagactggggtacgattctaggtcccgaccctggttctgtgttcctagtctagttccatgtttgggtctgaattaaggttcggtcggctcccgagtcaaggttttgggtgggatccgggttgggctcccaattccggtctaggtcggattttgagtccgggtccttgtccggttacggttctagatctacgtccaatttcagttatgattccaagtccaagtccgagttccagtccagattaacttctggttttggtttcaattttgggtcacagggtacgggttcatgtccgggtgtgggttcgggtcgttgtaagggttcgagtcctgagctgggtcccaaatccagacaccgactacgggttttgtcaagttcgcgtttgggtcggttactaggtcccgatcctagttctgtttcccaggtccctatcct

SEQ ID NO: 287194 - DNA, 447 bp, Cannabis indica
actttggagttaaacaactccttgaattcttcccaggtcatcagcgtgacgtctcgagtgagggttatcaactcccaccacacgagagcgtcttcctgaaactgaaaagtggcgcaggtcacccggtcatttccaaccactcccataaaattgagaatacgatcaatcaccgaaagccactgctcggccttcatcacatcaggacctcccagaaacactggaggtgcctgtttccggaatctttcgtacaacggctccatacggttgccaacaacaggttgttctgctggcaccgcaggaactgcaacggcctgaaccacttgaggaggcacggcaggaggaccctgctgcctcaatctttggatctcttcatcttgttggcggattctatcttgcatctccgcaaatctttgctcccaatcaggaggagcttgaggtggatttaca

SEQ ID NO: 287195 - DNA, 526 bp, Cannabis indica
gctgcttctgtaacaaacttatcacggtcgcaatttgatccatgataagattcttcatctctttctgacttctcttgaagtcagccttcatctcagtctgggcagtgagaatcgcaagttgttgcgcttctaccttctccaacctcttagccaacaagaggtagtcggagtcattggctggagcagagcttgggggcacagtggcaggcgttgggggcacagtggcagatgtggaggcgtctggtgcttctttgggtggggatggtggaataattttggaccttttcacataatccgccacccgttcggcttgggtctggaatgcggtcgaatcttgcgccccgacttgcgtttcttcgacctcatccaaccccatttccaccgtggggacctcaccctcacaattgctcttccaatagtccacctcccaattcctaggatacaaaatttgaagaacaaccatctgaaaaaaaaaacgaaaaaatattaattatcgcacaaaaatcgcacacacgtcgcataaaat

SEQ ID NO: 287196 - DNA, 653 bp, Cannabis indica
ggcagttcgacacttaataaattgcatatattcagatatgggatcgagagcccttcacaactttcttaatctggtctttaagtttgcttgatgtgtccacgagttgggcgagcataagtgtgtgcaagagtttgccatgcgtcgcgggaggtggtggatcgttggattaacggaacaagagagggcgagatggaaccaacaagggcgccaaacaatagtttgtcttgtcgaatccatggtagaaaatccgggttgggagcttcaacattattggtggtaacggtgcgagaaggacatggatgactgccgtcaatatatttgtagagatcgtaaccaatgaggattgcctcaatctggagtttccaggcaagataattagtggatgtcaatttaatgatagatggttgtgagatgtttatgagttgaagattttgggttggattttctgggttgggaatggcaaccagctgaggatcattggtggtggccatgatgataaaaaaaaaagtgagaagtgttaaggatcggtagcaatctgataccatatagagatgtatatattgaataatgatgatactcatctctttcattgatattctaacatatatatatacattacaaaactgaagaaaccaatttacacctaaagaatc

SEQ ID NO: 287197 - DNA, 530 bp, Cannabis indica
agtccgaacgttaatggcatttttcatttaagggctcgattttaatttctgttacgtaaggatagtaatatttatggcatacatgcaccctgtgaagtttggagtgatttggataagttttggtagtgtttcggtgagtgcgaaaattgagattttcgtatttcatagtttttagaaatttctaagagatcagaaattgtatttttgtcataacttttgactcgggtatctgttttggacattctatatatcgtttcgaagcttgcgatgagatctacaatatggtgtatgttttagagccaaaatataagttttattttaatgtatttataccgcggggtttggtagaaaaccctagattgtcttatgtgaatattaagcagtgttttgggataaacacttattggtttaccgttgttgtgacatagggccgagatcatcgagaatagttctccacttgggttggccgaaatgtatgaacctagattaaaggtaagaaaagtatattgtactgcatagtacgttgtatg

SEQ ID NO: 287198 - DNA, 704 bp, Cannabis indica
accggcacctgatcaggagcacccaggggtttggaatctctgttattgcgggacaataggtaagacagtagtttgcacgtagagtatgcgcggtggcgcttatgttgaatatgatatatgtgagtaattgtaaccgggattagggttattaccctaatatgagcggttaatagcctagggttattaccctagtgatataagttgagtaaatgctatgccatgctaagtatataattatattgagatttaagggttatgcgtttaaggcataattgggttggactcggtaaccataatcaagatgaaccattctaaggccttattgtatttagacgtgtgagagcaacacgtaggtctatgccacgtagacataaatagacgtgtgagagtaacacgtaggtttacgtcacgtaaacataaacaggcatgtgagcccaacatgtaagtctgtgacacacagacagatttaaatggcattactgtttatattataagatgagcatattattgatatattttatactgtcttgctgggcttggcacacgggtgctctactgtgaagaaaagggtaagactgttgttgatcaaccatgagtgcaacagctggatgaagaatgtacatgttcgggccacactagaccaatgttgggttttatgccctaaataaacctcatttcaatataataagatttacttattaata

SEQ ID NO: 287199 - DNA, 724 bp, Cannabis indica
cttggcctttgatagctgttcggggttggaagttgatttcgtactgccccaattccaccgcccacttgagtaatcgcccagaggcatctggcttttgcagtatttgccgtagtggttggtcggtgtacacccgaacaggatgagcttgaaaataaggtcttagctttcttgttgctaagatgaggcagtaggcgagcttttctatcaacggatatcggccttcggcctcgatgagtcttttactgatgtaatagactggatgttgcacgccatcttcttctctgattagtacgacgcttatggcatgctccgttactgccaggtatatccccagttcctcaccgtccagaggtttagagaggacgggaggttttgcgagctgtgcctttaggtcttgaaaagctctttcacattcttctgtccattcaaactttttgtttcctcgcaggatgttgaagaatgggacacatttatccgttgattttgacacgaatctgctaagtgcggcgattcgaccagttaggctttgtacctctttggtttttgttggcgagttcatatccaggagggcttggattttttccggattggcttcaattcctcgagcgttgacgatgaagcctagaaactttcccgagctgactccgaaggagcattttaggggattcagtttcatgttgtattttctgaggactttgaaacattcgtccaggtcgtctatgtg

SEQ ID NO: 287200 - DNA, 309 bp, Cannabis indica
ctatgtcaggattaagatcatttgatctaggatcaactaggtgacattgaatagaatacatattacggtacattatcatatatgattcaaggttcaatatcagtcccttccgatgcatactccatgcatccaactcaagctttactttaaccaatgccttggaaaggacatagcacttatccaaggtgcaagtaaactatgtcgtagattgtcatatcagttaaacccttgtgtactgataaatctaggaatatatatttaatcacataatcttgattactttccactgtgctaacgacacaataaaca

SEQ ID NO: 287201 - DNA, 626 bp, Cannabis indica
cgtcaaaggataaaaagaaacagaagaagcacgataagtacgtgccagtgtatactattaatatggagcttaatgaaactcgggagaatatttacctcgcacatgagcaaaaggttgccttcggcaagcctgagcccatgaggaatgcgaggagcaaaagagatcctaacaggtattgtaaattccacaaggatattgggcacacgaccgacgaatgtcaccaattgaaagatgagatagaaagtctcatcgctcgaggccattttaaacagtacgtcaaaaggcagggccacgaatacaaccagcccagtctgcccaatgacccaaacaaccaggggttacaacctcttcccgtggaaggggaggacatcctggttatttctggagggccacatatcgcaggggaaagtaataacgcccagaaaagatatgtgaaagagataaagaatgagcagtcagtatttgccccggaaccttccaagaaggtgaactcagaggaacctccaattatattcacagaggaatacaagaaaaacgtgagatatcctcacgttgatccattggtgattatgttaggttttatgccctaaataaaatctcatttcaatgtaatctattttattcaa

SEQ ID NO: 287202 - DNA, 654 bp, Cannabis indica
tagtacatttcaatactcaattaatttcaaataaatttcagattatcattcatcaaataaaatgccaaattatcaatccaatttacatttcgggcccgaacccggttcggcccgaaattcccggttgtgactataccgcgctaacctgtcagaacacacctgaaaagacaacacaggtatactatataataatatagttccattaagcacgtaatcaaattaatttcataattttacccttctcgggtcataattactaaaatgcccctggctcaccaacggggtcttaacataataaaattcatataatttcacatatattaaattatataataatataatttcctcaattatacataattatctagttagggttttgctaatccatttcttaattccgggtattacagatgtggtgtttgatgagaaagtcatgtacaaagacctgatgaatgtacaagatggaaatgctgcagcaagaactggaaatgctacagcaaagaatagtgaagagagaactcagtttgaggtggagatggaaccagatcaggagaacacagaaggaaatgagattccaacagctgaaccaggctatgaagaaggtcaggaagagatgtcagatcatgaaccagaagctcctgactatatgttagt

SEQ ID NO: 287203 - DNA, 737 bp, Cannabis indica
acaaatttcacttacatccctttttcataccaggccaccaatacaatgcttttaggtcatggtacattttagtggtcccgggatgaactgaataaggtgtagtatgagcttctaccaatatccccttcttgagctcatcattatcgggcacataaattcgtcccttgaaccgaattaatcccgtgtctgatatttcataatctttggcgttactattcaaaatttcttgctttagttcactgagcttttgatctgtcgtctgcccctccttaattctttctaacaaagtggattgaagtgtgacctttgcaagttgccctgtaataaactctataccagctcgttccatgtcttccactaattcccttgatactccttgtaaagtggaaactagtccgggacctctacggctgagtgcatccgctaccacattggctttaccgggatggtacattatctcgcagtcgtagtctttgactagctccaaccatctcctctgcctcatgtttaactccctctgggtgaaaaagtactttaaactcttatgatcggtgtagatttcacatttcactccatagagataatgacgccaaatttttagtgcaaaaaccactgcggctaactctaggtcatgtgtcgggtatctctgttcgtattcttttaattgccttgaagcgtaagcaattaccttcccttcttgcattagaacacaacccaacccttgtttagatgcatca

SEQ ID NO: 287204 - DNA, 58 bp, Cannabis indica
atgtgaaatgagtactccaccatttatgttcgtttggtcaagctggaagtagatcatc

SEQ ID NO: 287205 - DNA, 659 bp, Cannabis indica
agtttttagtagataatatttaatatagaaagtttttagtaattacacagtgtaattacattcaattctcatggggggtcatgagaattggagagtgtaattggaactcctcaattacttccaattacatagttacagtgtaattacatggtcagacaaacatgtcaaattgtataattacctccaattacacacaaatccaattacattgtgactttccaaacgcaccctaaaaaaatatcttctaacaaaatttaaactcctaattaatttacacaattaaatactattattttcaatatcaacccaaaatactctccctttcattttccttctctctttgcctctttctcttcctcactctctcttcctctttttcgcaccaccgagaccaaataggttatcaatgacatttatcgatagtttatggacagttttgtctgtgcactgctttttttgtgtccaaacagaaatcatcaataacctatcgataacctatcgataaatgtcatcgatatactattgataacctatcaataaatgtcatcgataaactattaataacctatcgataacctattgataaatgtcaaattgacaaaactatgttacataaacataaatcatcgataaactatcaataacctatcgacaaccta

SEQ ID NO: 287206 - DNA, 762 bp, Cannabis indica
tctcttttcttttctttatttgcatgttttttttgttagtcctcctattttatagttttctgtttgtttgactctgtgttttgttgttgttttggttttattttgttaactcttagggaaagggtaaattcccagtgaagattgttcaatgaattgatctgtttgagaacataattgggaaaatggttgttgaggtgtgtgatttcattattttagttctaatatttttttatccttgttttttatattctttatttattttttttgttgttttagttttgttttagtagtgttttcttatgtttttttataggattgggaatccaagtacacccgatcgttatactacaattccagagtttttttatgcttgtttttatgttctttatttttttttgtgttgttttagtagtgttttcttatgttttttataggattgaaaattcaagtacacccgatcggaatactaccattctagagttataaacccaattactctattattgaagatattaaaaaaaaattttctgaaacccaattaaatatgttttcaaaaactgtattggaagttgtttttgattgcgtagtagctgtaaactttcttcagtgtttccttgtctttttatgcctgacttttttcaacttctggtggtgttgtctgttattagcttcccgttgttgatgtcgaattctggatctagttttttactgttgtttttaagtttttctaccattttttagcaaccagcttcgcatagtcaa

SEQ ID NO: 287207 - DNA, 524 bp, Cannabis indica
gggaggttcaacagcctaatgaattggatttttgggtatgtgtccaaggcaaatatcttaggtttagtattgaggagttttcgtgagttactaggttagactgtcagattgattctgatttttatcagtttaagcaagatgataatacattggttaaacagtgcttaaagggttacaaaaattttaccaagggtgctattcaaactgcctttattgctgacaatctcaagagtaatgtcgatcttgcagtcaagttggctgtgttatattttatgcagtgttacttgttgggtggtcctccgggtaaagttgtttcaatagaggaaatagatgttgttgatagttgtcggttcaatgaatttggttggggtaagcactgttttgatatgactattcaatctttgaagggtaagattgactctggtcttaggaaagttgttcgtagtgatgaggatggtgggtattataggttattgggttttccattggcgaattctggtattccgagtgttgtccttacgtta

SEQ ID NO: 287208 - DNA, 913 bp, Cannabis indica
ctctcggtaaatatatgaactgaatgaaaacaagagctatgagccatataatgtgcagccttgttagcctaatatttaatatcaactcaaataaattatcttaatttacataaaaaatgtcttaatttataagctcacatattaaattattaaaaatataataattaatacttttgccttttaaacttttgatattgtctaaaacatgtttcttaaaatatagagcttgtgaaaatgcattcctatcatgacccttctgttaggctccatttcttttactgctaaataacaattagtacttgtaccaaatttcacccattttattgatttttttttcctattatttctcaaaaaaaaaaaaaaagaatcattaaaaatctaataaaaatcttaattaataataaaataaataagggagaagtttcaaaaatacctttcttttatattttatttacaattttggggcctaactaaaatttttaattacaaaaatatgcttgtgaagctttaaaattacaaaaatacactttgctcaacaaaaaattaaaagaaaaaaactaaaaaacaaatgagaaatcaatctcacgacaattataaatcaactaaaaaactataaaataactaaaaacaactagaaaaactacatcatgacaactataatacaactaaaaaatttgtttattatttttactgaagatgtatttttgtaaataaaaaaattcaaagagtaaaaatgaaattttttcgtatttatgtattattgtaatttttggtctattatataattttttttcaaacgcataccttaacaaattaaacaaaattattaaaaatctaataagtatgttaaaacaacaaagatttagttgaagaaaaataattctaagcctatttatctttaaaaactcatatc

SEQ ID NO: 287209 - DNA, 531 bp, Cannabis indica
ttggttgtcccatcgagggtttcgaaaaatgacggctgtaattattaccttttattgcatttatggtgccacgtcactaaaactcctcggttttcgtgtaggcgtggccatcgttggccgttggattgggcgaccttatgtattctggttgccacgtgtcgtgatcccattaagtgagggatatgggtatttaaaccctttgatacgaatcaaattcccatttttccctcttgtttcctaacttccttcttccctcccttacagagactccaaaaccgttttcaccttttgcccagatttctaccgattttctaaagcatcctcaatctcagaagtaatcgagagcaaccgcaggaacaacttgccaaaactaaaggttagtttcgagttccattgcattttttgttttctgtgttcgagaaagagtgtttcttctgggttttggtattttggggctttttaggaatgtatgtttgtaagggatatgtatgaggttacgttttttgggtgaaaaactgggtaatcttatga

SEQ ID NO: 287210 - DNA, 726 bp, Cannabis indica
ataaaatagattacattgaaatggagttttatttagggcataaaacccaacaggtacaccttcaaggagtcctagactccgttcagcttcaatctgaggatgtgtcaactgtgctaggctcgagggtgttctgcacgagcacgaaaaactcataaggaaggcacatgttagagcaacagaagctaagcaggagtcattaaaactggcggagcacctctaccattccgcccaagcattgcaatatgccaacacttcaagagaaaaattggaaaatatcatggacgacattctcgactacaccgaggtctccataccccattacccagtctatccaaaggaagaaccatcaaacaatccaaggggaagtccttcgcaacccaagtccccgtaccgagacgttagccctccaagtcaacggaagatccctcaagttatacaacttgattgaacatccgttgagtttcatttagtggtattttatatatatatatattgtattattttagtactcatatcatatggctgttggacaactttttgttatgccatttattgatatttaacaactttgctctattttgaatttactattaggtcaatgtaaatgttattatagtagtttaatataacaagtctattttcatttttaacttagttgttatgtcgaaattatttacttaagttttgcttccaaaattaattaaaaggaaagtgactttactactt

SEQ ID NO: 287211 - DNA, 794 bp, Cannabis indica
tttattttcaaaatatgtggaatggtaatgattttgttacaaatattaaaaatagtagaattactaaagaaatagtatgtatttttataataaagtagtttttttttattttatttaaattccatgtagaatttttttttcttttctttaagcaaaaaagaaacaattataaaataatttaatcgttagatatgaacaattaaatgagaaatgtgtatcaaacaattagaaaactgaaatgaggaatttgtataaaaatattatgtagatgtgaaatttgtaccttaaattttaattacaatatttttttaaagaaaatttgaaaaataaaaaatacaatttgaattattttattacacaatattttaaattaatgtcaaattctcaaaattaaataatcaccgaatcttaacacatacttttacattacaaaaataaggcaaacataaatgtgtctcttctctcccgctctcaactatctaatgattcatataaaatactttttttatacattacattcaccctttctgcagttaaaaaaataacaaaatcattaacaattgataatgtcaaatagttttaacaatactataaaaaattatatatgtatataaaatagttgaagtaaaataaataatacaaacaaagggagaaaagtgaaataaagttccagacttacaagtttgataaataccatacaataattaatcaattcgtttagctaaaataagtcgaaagtggtagtaactaccttggactttatttcaactaagcatttgatttaatctctcaat

SEQ ID NO: 287212 - DNA, 704 bp, Cannabis indica
agactaggaccatgaccaggactaggacctagacctaaaatcgaacacagacctagcctcaaacccacactgagactggaactcaggcccggacacggtcgtgtaccctgaccggaactaagacccggaccttgacctaaatctgggacccgctcccaaacacagacttggaactagatagggatccgaatacgaacctagactcggaccaagaagcagactgggatcgaaatgctggacctagatctagacggagatccttaccctgacccaaacttaaacatgcactcgggacccgaacttggacctggacccgaacctacacccagttcggggtccagacctggatacaaacccaaacacagactcgaactcgaactgaaacccacacctagaagcatacccaaagctagacccggacccggaccaaaactctaacccagaccaggatcagaaccaaggacttagacccagaactgaatccagactcagatcgggattggaaccatggactcggacccaacctagaccaagacccaggacgtgaacccacacccggagcctgatctggacttaaaatgaaatccggacccgaacccaaactcagaccaggactcgaactcaatcccgaactcaaaagtggacccgaagccgtaccccgtgacccaaatttggaaccaaaaccggaagttgaccgggactgg

SEQ ID NO: 287213 - DNA, 684 bp, Cannabis indica
atggctggaggagctgtttcgtggaaaagtagtcaaacagacactcacagcatcctcaacaatggaggcagagtatatggcgtgttatgaggctacttgtcaggcaatatggctgcggaacttcatttcagcatttgggtattatggactctatctcgaggccgctgaaattgtattgtgataattccgcagcagtagctttctctagaaatgttagaagtacttctcgttctaaacacattgacattaagtactattttgttaaagagaaagttacagagtctcttatttccattgaatacacgcccagtactggcatgttagcagacccactaacgaaaggcttacccatatgtgtatttttagagcatgttgctcgaatgggattgttaggagcctagcttgttgagctcagtgggagttttattattatgtatcggacatgctagtatcttgtatggaatgcttatgatttatgttttgaacatgcataatgatattgtagtcacttctagttattgttgacatatgtgtgcatatatgtgttattcatcgaagtgacaggtacaaaaggagatgaatgcgcatagtctcaattttgttgtacctcatgcatgtttggtttgattgttaatgattgttattgaattaaaatgtcttcaaggtcaactcatacataatata

SEQ ID NO: 287214 - DNA, 611 bp, Cannabis indica
atcagagaccctcaggtttacttcagcctttgcctataccagaatggaagtgggacaagattaccatggactttgttactgggttgccattgacacctttgaagcatgacgctgtttgggttattgttgatcgtttgactaagtctgctcattttattccaatcaggaaggattacaagcttaccaagctagctcgactttatgtagacaatatagttcgactacatggagtgccttcaagcattgtttctgatagagatcctcgatttacatcaaggttttggaaggccttgcaacaagccttagggactgaacttcacttgagtactgcccatcatccacagacagatggacagtctgagaggaccatacagactttggaagacatgcttcgctcttgtgttttggattttggaggtagttggggagaacatttgtcactagtggaattcacatacaacaacagctaccaagccagtataggcatggctccttatgaggccttatatgggagaccatgcagatcgccattgtgttgggcagaaccagatgagcatgtcaccattggaccccagattatcactagtaccactgaaaagattaagggaatc

SEQ ID NO: 287215 - DNA, 728 bp, Cannabis indica
ccctaaaaattctcttttatatcgattaaatagtactttttggtgttgcgagattcactcgacaacattcatatttaggttgttaaatcaacatacttgtgagtagatctaagatcctggtaaaataacttccaacataatctacaatgtagtttacttgcaccttggataagtcttatgtcctttccagggcaatggttaaagtaagcttgggttggatgtatgcaatatgcaccaaaagggacagatattgaacttggattagatataataaacttaccgtaacatctattcaatttaatatcacctagttgatcttatatcaaatgatctcaatcttgtgatggttaggttatagttcaattttattatttgtgttcttcaatatggttgttaaagtcaaccaaatggatcttcttgtgacatatagattaagaaaatggtagttcaattgagtgggagcgctaatcatagatacagaatctatagcttttatctagacatagaagtgaaacgatgatttcgttagagcttggcttaatagagataaatgatagagtgctcattttagtgattatattagttcactaaaatattatttataggtagctaagtattttaaggataaaattcattcaagggtgtaacggtaattttatccctactcaatgtaaattatctatagagtatcattgattattaggattataacaaatggataactcata

SEQ ID NO: 287216 - DNA, 499 bp, Cannabis indica
ggtatactttgccaatgctctggaaaagacataacacttattcaatgtgtaacttatcgtcgattatcatgtcagtctaaatctagtataccgacaaatcatgggacttaaacttttgaacatataatcatgattatattccactgtgttgacaacactataatcatgaataaatatatgttttggacttaatagaatttatacattaagtatataatcacgtgaaccatgcaacataaataattttttatcttttattaattagtaaatttcattatattgaaatggattttatttaggacaaaaaacccaacaaactcccacttgcattaatataaaactaaaagtacatttcaattaatctcaacaccttgatatccaaatcaagtatagtatgtagtattctctttgtaataggatctgataatttgtattctatacaaactttctccaccattacatctccttagtcacaaaattcttgatattgtgaaatttc

SEQ ID NO: 287217 - DNA, 593 bp, Cannabis indica
attctgcatttatcatgcaatctttctgcttatatccattgtaacgagaagggaaatacttccgctccaagttcatagtcctataaatagtgatgcatgttcactgggcaaaggacgagagattttaccctagagatattatctaagaattcatattcagagatattgttgtaagagctataagaaaaggaacctttctccttgttcttgagtcaatacaaataacaaggattagactattacagaactgctcagggctgaatctctataaaattcttgtgtctttacattgctttaccatatatcgattgctatcaattacttatcgcttactaaataagactcactctcgttggctaaaagcgaggtcaacagcatgatttattgattgctccgcaaatctctcatttagattactatggctctaatcatagggctcttctagccagtatctactaaaccctgatcccaaatagcctggaaagcataggtctcgatttttatttgaaagaatcactactacaaaaattggtttcagtgacccatattgaatgactctaaaaccatttagtgacacttcaccgcgtgtcact

SEQ ID NO: 287218 - DNA, 544 bp, Cannabis indica
acagttttacgaaattttaaacatttttatgatttttttaattttatttacagaaaattacggtctttttatgttgttatcttgttaatttgttgtttgattctttgttatatgtatgttattttttattattattttggtgttatttaaatgttattttcatgttacttttatgtagttttcttgttgttttcatgttatttctatgaaaaaccgtaaaaatgtaaaaaaaaaaaaatctttgaacgtaaaaatgtaattttttttacaaaaaaatggtaccttgtataattatccctttatattttttatgtaaatattccataattattataaattttattcacaccataaattatttaaagggacttttcagagtaaaaaaaaaaactaatattactaaaaatacatatagacggtcttttaaacatgtatacagtccacaaactaaatatcacaataatacatcctttttctaaactttttagaccacacgaaacgaagtcaaaaaaaaaaaaacctacacctatagcaagacttcgat

SEQ ID NO: 287219 - DNA, 495 bp, Cannabis indica
gatctttatcaccaagtgggctttgtatcctttgaataataaaaattgtattggtcgctcttagaagatggtcttttttaggttcacacttcattcatctgatcattctattcatacggatattgatttagatataatttttctttagggtggatttgttttaacactaccaatatcaattttcctaatattttgaaataatgtcgaatgagccttcgtgttttatgttggtgttttatgcaattaacattctttatgcaattaacattttctctttcattttctttctccgcgtttctcttatctttgcaagaaagtaaaggcaaagaagataagaaggtgatcactcagcttttcaatcaatgtggttgagtacttcatttgggtttgttttttttttttttcctttttttcttttatcttttttatctttattagatacatagaaatcaatattttcatagagatatcaaatctggtttaatagcagtaaaa

SEQ ID NO: 287220 - DNA, 922 bp, Cannabis indica
gtattaaacttaaataaaaagtgatacttagttttttacgtatttttctttatatttttaagctaattattgaaatttaggtgtgtaattggatatccaattaaaaacccgatccaatccaattagtaattggattggattggattggattggattttgaggtctaattggattggatcggatgatgattttccaaatccaattactaattggattggatcggatgaggaaaaaaaggttggattggatcggatgcccacccctagtggccgggtttactgggtgttctttgataattggtgttgaaatccccttatattttaatttatacccttaatctctgatctttttttagttagaaaaactctcttaacttcactatttttttttttgtgcaaatttagaatcgtccagtgaaatacttacctactgtgtacacttgtgtatatatgacatatttttattgactttgaagttttactgtcacgtatacacaggtgtacaatatcagttaacatttgatagtaaaatttaattggcatcttaaattggtaaataaaaagaaattaagggggttaagtgtataaaaattaaaatataaaaggtaatttataaataaatataataaaaaaattgttattccaaataattattgcaaaattattaactaaaaatgaaaaatcataaaaataacttatcaacttaaattaatttatataaataaatttaatttagaagtaattgttacaaaaattactactaaataactaatgaaaagttaaaattttaaaataacttttcaaatttatgtatataatatataaataaaataagggactaatctttaaaaaaaatatataaactttatttgtatactacgttaagtattataaaataaattttaaacaatgtgggacttttg

SEQ ID NO: 287221 - DNA, 548 bp, Cannabis indica
tccgttaagggtacaacaatctttgaaaaaccctcaacgaaccgacgataataaccagccaaacccagaaaacttctaacctctgtagctgatttcggtgctggccaatcccgaacagcttcaattttggccggatccaccatgatcccatctttatccactatgtgccccaaaaatgagacacgagataaccagaactcacactttttaaacttggcataaagcttgtgatcccgtaacctttgtaaaaccgctctgagatgcaattcatgctcttcttccgtctcagagtacactaaaatgtcgtcaataaacacaatcacgaacctatccagataatccttaaacacccgattcatcaaatccatgaatgccgccggggcattagtgagtccaaaagacatcacaagaaattcatagtgtccataccgagtacggaacgcaattttcaggatatcttcctctcgaattctcagctgatgatagcctgagcgaagatcgatcttggaaaagaacgtcttccctttcagttgatcaaacagatcatc

SEQ ID NO: 287222 - DNA, 585 bp, Cannabis indica
ggtgagctaaaagcccagtaaggaaatgcttaacatacaatagcattcaatacactaaatatatcttaaaattcacaataatacgattctttataatattaacgtatccagtcttaacaatattatataccttagctcataattgtaacttaaataactccagatatggaaagctatatcatataccatatatttgtactaaacgaaaccattacatatatgtagggatcacaaccctgacatcatactcatagcaataacatatagtaattatttcaatcatatcatgtctttaccataatgtggcgtatcatagccactccatacacaacctgggcttaactggccctacaataacatgggacatttagccctaccattgctatggaataaggtatctctatattcaacagcattgtcgctgtatcataccttaccataataatgtcatacacaaatcggacaaatgtagggtagggtatctctacattcaacggccttatcccgtatcataccccaccataataatttcatacacgactcagaaaaatgcagggtagggtatctctacattcaacggcctta

SEQ ID NO: 287223 - DNA, 537 bp, Cannabis indica
atccagacaccgactacaggttttgtccaagctctgggtccacatccggatcccaatctcgggtccgattctggttccgtttctggtgtcgggtcacgagctgggtcctaggttcaagttcgggtctttttcgggtaataggtccatgtccttgttttgtttcccaggtcactatcattattctgggtccaggtccttgttattgtgtgggtttgggtcccgatctaggttcaggttctaggcctagtctcggttcaggttttggtctctgtctttgttttgatctgggctcgggtttgggtttagatcctggtcatagtcctagttcgatctagttccatttgtgattcagagttcaattttggctttgagttcgggtcagagttcgagtcctcgtctgagtttgcgttcgggtccttatttcagtctatgtccagatcaggctccggttgtgggttcgcgtcctgagtcttactctaagttgggtccgagtcccaagttccaatcttgatctgagtctggattcagttctgggtc

SEQ ID NO: 287224 - DNA, 516 bp, Cannabis indica
ggtggtggcttttataggcaaagctgcatgaggaacaggcgtcatcacctaccaatcgaacggtgggggaagcgcacgattcgaattctcagaaatcaacgaacaagattgatttgcaattaaggcggtggaaacgtttgagtatccgtctgacaccattaatgcgccgtatcaatcaatgggcgtgaaacgaatcgacctctgcaaaaagtgaatcgctgcattaaaggccatcattaaatacaccctcacgcgctcaaagctcgtgtcaggaaaccgaggagtcaaccggaagcacttgagcaagccttgtcttattttttcaaataagcaaggcttggggggtaaatgttgcccctgatttttcccaatatacgtggaccaaccgaataaggacacgtggatcaagcaatgtacaatccaaaatatttgctaagtctttatgctgaaaggtagcttccaggacgtagctcccggagaaggcatatggaaccccatatgctcccggaagctcga

SEQ ID NO: 287225 - DNA, 599 bp, Cannabis indica
ctaatttttttttagagttaaataatagtttaatcaatagcaaattcataatctgttagaaatttataagtaaatactaatgcctagcaccagtttttttttttttttttgtatgaaagagagggtgtgaacaccctcaaagcaaatcaattaaacaaaatagtcaaggttaaaaaaaccagtacaaactgccgaaagtaaagctacaagaaaaaagaacaacaaaaaaaccaagcaagagcatccaaacataaagcaaacaaaaataaaactacagaagtaaatcataattaggaagatgagaagcagcagattagccagcgtgcttcctccattcgatgtaatctgaaagcacagtagggtccatatccgtaggcgttgttaagcctattttccttgtctccctcgcccaagcagcaacgttgtgtgccatataattacaccttcgattcacatgaccaatgccccaccccagtaaacctgtgagcacacctgatggaagcgctttcgtatatccgtgagtttgaagttgatatccttccttgattccatggaaagatctgtggctacctccatgttgtcactctgaaagatcacat

SEQ ID NO: 287226 - DNA, 581 bp, Cannabis indica
cgcctttatggcagcttgatctgatccgttgatctttgggtattcgaatcgtgcatctcccccaccgtacgattggtaggtggtgacgcctgttcctcatgcacttttgcctataaaagccaccatctttccttcattttggttactttccattccttgccatttttgttcgaatttcccagagagaaaattcttcaaaacagcacgaaccgtcttagcacttcgccatttcttccagttttccagtgtttgctatcaccagttcttctcaactttactcggccacattcaggacccccagttcaacaatttactgtaagtttcttgcatccttggataatgacatgcttttacttgctttgtttgtttttctgggttcgtactttgagatttctgggcgtgcgagtgttgaggttcttcaggtgttctgttttgtgtctactgctttagttgtaggaccgccattatcatgcctctgttataatcgtgcatttttgttgaagagagccatatgttcttcgttcaacagttgcttagggcatagaatgggtttttttttttctgtttcttttactctgtaa

SEQ ID NO: 287227 - DNA, 421 bp, Cannabis indica
caatgtcctgaaaaggacataacgcttatccaatatgtaagtatacctttagctgattatcatgccagtctaaatccagtgaactgacaaatcagggaattaaacttttgaacatataataatgattatagtccacaatgctgacaagacaataatcatgaacaaataaatatgttctggacttaatagaatttatacattaagcataatcatgaaataaagcaggtgaaccatgcaacataaaagcgatttatgatctttattagtcagtaaacttgattatattgaaatacattgaagggttttatttagggcacaaaacccaacataaaatacattgaagggtagaccggtaaatttgtccctattaaatgtagatcatctatagaggatccttgactattaggattgtaacaatgga

SEQ ID NO: 287228 - DNA, 591 bp, Cannabis indica
attccgagctagctctgcctttgaaaggggacacatgtcgagcatgaccgtttgagactcgttgtgaagctgactgggcgtcccttcggttttcggctaattaatgctctgacaattaatattttgaaaatcagaatttctctctccacggctgacggttgcactcgattatttttatttcccatatttgctttcaaggcgggaagtcgaggcgtctaaggttcctttacgtacagttacctttttgcctataaatactcggagtactggcacattacctcatttcatcacccttcgttgttaagcaaacttcagaacaaaaagagagagttttcaggcttcctcaccctcatttcatcacacttgaatctttgagtaagtttctcatccccttttatgtttttcctttgcatgcttgtgctttgaatgtaactttgctgtagaaagaacactgtaggaaaccctagggtttgaaacttctacgactcttcttttccatgtccttgcgttagctttcagccgtaaggcttattttagaactgcattgcgtctgttttccattctgctttcttcaagcttcatgaacttttt

SEQ ID NO: 287229 - DNA, 895 bp, Cannabis indica
gcaatacctcaatcatagtgaggaagatcgtgaagaagattttcagcaaaaggagtttcagcatcaaagattagaagaaagagatccaggttcagatcttgataatactctgcgagaaaaaggattcaagggttagagatctgaacggaaggagtcatttaattccgctgcacccaatgtaaggtttcctaaactttatatgtgtttatttcatcgttttagaaagttcatatttagggtcttaatcaacatacttgtgagtagatctaagatcctggtaaaataatatccaacaacgaggcccgacaagacgtggtggttcaatgtcatcatgctcctcttgttctcttgcaggaggatctctctgagctggcggttgaccataagggtgaggtggtttgaggcgaaaaacagtggccaaggtaatactgcggtgtggccctacctttgtatcataagagtactgtggtactccatgtttctcacaaagatcagtgataatcccaacaagcccaagtccaccaccacaagacccctcaaccattatatcaaatgtcactcgaattatgtcccccacattcaaattgtaacctttcataattccataaacccacttaatcctgtcaatctgagcatcagaaaaatgtttgttcgggagcatccttgcactaacgaagtatagccatgccttggctaccgggttgagttcacaccgatacaattgatacagttctccatcaaattcatgaaacctaagtccaggataccctagagtttcggctatatccacataattcaaactttttgccctaatttgctgcttcaagggttgctgttctacagtgaaggttggtagctcataaagagcatgaattgcagctgtggaagcagacac

SEQ ID NO: 287230 - DNA, 554 bp, Cannabis indica
agagagagagaggagacagacgggaggtggtggtggttcgacatatgagacggagatgagagggacaccgacgggaggtggtggtggtttgacgtatgtgacgaagaggagagggagaccgacgggaggaggggtggatggagatcgatggacgagagagacgagaagaaagggagattgagagagggaggaagaaggcgagagaggagggcgatggtgcgaaagcgtgggtgaggttttgaagagttaagattttcatcttagggtgtggaaaatggagaaaaaataggtaggcatgtgggaaatagaaacaaagtaggtgggcacgtggaaaatgtggcgagaagtaggtgacgattttttaatggggccttatacccgacggtttaaaactgtcgagtatagtatagggtaccgtcgcctacactatactcgacggttttaaaccgtcaggtataaggctctcttaaaaattcgtattttattaaaaaatgtcgcctattttgtttactacaattttaaaccgttgggaatactaaatttttccctacagt

SEQ ID NO: 287231 - DNA, 704 bp, Cannabis indica
acaagcgaagactcgggagccttctcaacttttgttacttctgcattaaaccgtttaaaatagtcttgtaaagactcaccgggttcttgtttgatgttggccagagttgtataaggtggcctataggtcatcgtggcctgaaagtgcgtgaggaataagtcgacaaaggtttcccatgtcgatatcgaagcctcaggcaattgggtaaaccaatcatgggcgttttcctcgagcgttgccgcaagaatgcggcattttgcaagctgtggtacctgatccacttccattatagtattaaatttttcaagataatctatagggttagaggtacctttatattttagggattcggatagacgaaatcccttgggaagttgggcttgtcgcacttccgtagtgaaaggagaggtcccatgcagcttgtatatgggctttctttgctgctcgagcattttcaaagcttgcaaaagcatgctttggtcaattcctccagccacaggagtcgggactgctgcgactgcaggagtcgcgactactgcggcgaggttcgctgggatagtgatcccagtagtcgcagtcggtgcgataggcgggttattgtgagtgtttataccctgatcgcccacatggggatcacggggtgtttcctcgttatggggggcgcgagagcgcgctctgaaaactgcgttgaggtgatcacacag

SEQ ID NO: 287232 - DNA, 521 bp, Cannabis indica
attgataccaataaaagttctgtacacataatcatcgtaccttatttgagtgggagaattttaaaattctaagcccatcttcttttggatgacacttgtgataggaactttaaaatacaactgagaaagtaaatcaaaccatttatatggatagaaataaattgtcagaactttgagaataacatagtaaaatttttgcaaagtctattcgaatgacttaggcaaaaattcttaatcctcatgaaaagttttatggtatctctaatgattacttaatcttaagcaagtatttttacattaatactagattgctatgttgatgacttaatctataagataatatgtcacaacaagatatccctcaaaacaatagtaagaggttaaatgtacttctacgtatgaatttaaccacactcctactgttgagtgggaaccatctaagatctaatcaaacaaggaacattaagagacgatcaagaaaggtttctgaaagtgacctatatgttagatgatagggatgt

SEQ ID NO: 287233 - DNA, 664 bp, Cannabis indica
ggttgaactactttctaagtcagtgcaagaatttagtactatgcaagcttctgcaagtgattctattagaaaacttgccgattgttttcaacatgaaactgctaggagaatgaacatatatgaagagatcaaaaaagttgatggactcacaaattcgcagcaacttaaaattagaaaacttctagtttcaaatcaaccccacatcgattacttcttcactttagaagaagaactagggaactaagccgggtttcgcgtggtgttgtctaatttttataatccttttatgtaaatatatattatatgaatatatatatatatatatatatatttacgtattgagtaatataatctaaagtataacattaatttcgacgtgtgttttataaacaaagtaatattattataattgaaaacatgatttgttatttttaaaatacatagaaagattgtaatttgggacaaatattaaaaatgctaaccaaaacaatattaaaattaataaatccctaaataataataatctatatttatactattaaaaaataatattagtcgaattttaaaattatagatattgctatagaatgcttgagtgcgtttgatttcctcctaatgatacagtggggttttttttttttttttagtttttttaatttaaaaa

SEQ ID NO: 287234 - DNA, 943 bp, Cannabis indica
ttaaatttaggaaggagcatattaaattattagaaatacttctttatccttattattttcaaattggctcttggcaaatatattattacttttaaaaaaattaagtaattatagcaaacttcttaaaattaatcacaatagttaaaaaattattttgcaactgtatgtgttactgtctgaaaaagaattatttttcttttttgaaaagaactagattggttaactttaacttttaagcgcaagatttgaactgacacatcaattatattttagtaaaaaaaactgagattaattgttagtttttttttttttttttttgtttaaatagatagtactctatattaatccgcactcaagagtgtctatcatacttatgagataagtgtggaaaaattaataaagtgattaggaagctcctactttactataacaatccatatgctttttaaggacttacttcacaaaaatatctttttaaatatgcccaatctaaaaatatttccaatatttctgcaataaaataaaatatttgcaatttgaatatgtatcatttttgtaccgaaaagataatatataataacatatttgtttttttttattttttctgttttgaaagtgaatataacttcattaatcaagcaaaaagccaataataacaataaaataacaaataattaatcaaaggccataaacaagagggcaatcttcaccaccaaacttggattttccagagaataaagctaatcgaacaaaagagtgtgcaatggcattattgtctcgttcaagctgtggtcataattttaaaagcaagccaagcttcataaatgtctcggagaatgcggccaaatttagaaggaccaaatcttctctcaatttttctctgcctgtcctcatctaattaaaacaattaaatgtatatctccttatttaatagatttaatat

SEQ ID NO: 287235 - DNA, 683 bp, Cannabis indica
ttaaatttaaaaaaacacttagttaatgagatatattctagagagttatttctagtaactaattatattttctaatatttaattaattaggaaaatatatttaagttgaaaattaattttttaattaattttgtatcaacttaaattagaatatttttcttagtattaaattagaattaataactaagttgattttatacttaattatttgattcttttatttaacacatttaattaaatgttaaagttaattttattctagacacttaaatattagttaatttttagaatatttaatcaaatagaaaattatatttaagttggaaattttaattacagaacaacttaaattagaataattttcaaaatatattttattttattttattagtcatttacccactaaatttcaaaattgcattatttaatgcagataattttaaatgtttttttaaaaatagattaaagttgaaaattaattattttaattaattttagatcaacttaaattaattaaatttttcattaatgattaattaaaataaatagactaaaatatattatattttaattagaaaataaaaaaattagttagtaaaaatctagatagttattttctgtttggttgaagttttattaatgaattttggaccaacataaattagaataattttttaggattt

SEQ ID NO: 287236 - DNA, 709 bp, Cannabis indica
acgcatagaacttagaattacactctcagtatatagaacgctctatatattccaccatatagacacgtcattagttatccattgttataatcctaatttgatcaatgatcctctatatagataatctacactgtaaagggattaaattaccgtgacaccctatgattaaagctcaaatttgtatattttaagtatttaattgtatacataaaattaatttaattaattattttcacgattttaattgtaaaattattgtagttggaaatatttaatttaatttaatttttatgttatttttgagcaaagtggtgtaaatgaaaattgtggcaagtccaacaaaataggtcgaactccaattatttatccatgcatttatctcactccaattaaggatacattaacttggacaatagcttcaatgagcaactacaataaaatattggcccatgatttaattcaaggtacaacttctttaatcaattaatgggcctgcatttatgatgttttcagaggaaattacactctatacctactttttgtttcatattttaatttttaccttcattttactactctttaatttatacccacttttataagttatattcccattatgtacattagaaagtctaattttgataagttttgtgaggttatatttggtactttgattataaaaaaagggtatttatcaattaaaattatt

SEQ ID NO: 287237 - DNA, 502 bp, Cannabis indica
gtatttatgtgttttgggtcaatgaaactgggtaatattcatagtatagggcctgtaaattgacataaccgcatacaattcataggcactgattcacgtctcgaatgctcgcggacattcggatgaacaatttgaatgttcgcgggtgttcggatgaacaatttgaataatcgcatgtttccaagacttatttccgcttaactattagctagatcttttaggatctttacatgtcgcgggctgagtggtgagagtattaattgccattccaaatggtgggtgtgtcacagtattctaatggctatatatgcgattatatgccccttgagatactgagatacacccagccatttgttgacgtgcgttaatgctcgaatgaccgtactctttggttgataggtagtctcgaaacggtgggagtctcccagtaacttcagggttatgctcgaaaatgcatacctcttgagtcactgggatacgcccagccgtttctggaggtata

SEQ ID NO: 287238 - DNA, 589 bp, Cannabis indica
gttcggttctacgtctgggtctgggtcctggtcacggtcctagtcttgtactagggtcctggttcggcatttcttgttcaggttctaattttgggtcctaggtctaggtcttcgttctggtcctagtttgattcccaaatctagacaccgactactactctgttaaaggccccgttacccgaatcccgagttaagatctggatcactgtcacgggtctcggtcttgttctggttcaagtcccaggtcccatttctgagtttgggtttgggatcgagactggggtgaagttctaggccccgaccctagatctgtgtccttattctggttccatgtttcggtctgagttcaggttcgggtcccgagtctaggtttgggttgggatccgggtccggctcccaattcgggtctaggtccgatttggagtccgggtcctcgtccggtttcagttctggatccatgtcaaattttagttatgattccaagtcaaagtcctagttccagtcttcgtcaacttccggttttggttccaatttgggtaacagggtacgggttcgggtccactttttttttgggacttggttcaggtcc

SEQ ID NO: 287239 - DNA, 783 bp, Cannabis indica
ctttaattaattaaacgattacttactctgtaaaaataccataatattttactttcgtagttaatacaactttaactctctctagaaaattggtacaactactctaagcaataatatcaactcactaacaacacaaagaaacaagataattatcctcgctcaattaatatccaaaaaaaaaaaaattaaatactattttaatctggatattacattctaccctccttaaaagaaatttcgtcctcgaaatttaacttaccaacactcggggtgttgagtcgtcatgtctttcaccacttactgcattacctcattatctaccatatatatggacccaataaacatgcatttaacctatgtcttatcggtcaatccataacacataaaatatacacaacttaattaagtattattatttctctatacattacttaaataccaaaatgtactccatcataataacttacatatacatgctttaaatacataagttttgcaatcacatgctcgtaatatatgaaaagtttttctttctcttatgaccatccttacatgccattaagagtgaaactatttattcttctatgagcatccttacatgccatttagagtaacactatttattctctaaatgaacatccttacatgtcacttgagaacacattatacaatacaaaataacaaacacaaagagtagggtagaagaccttatgcaaacttgtctttaatcattcccattctttagttgaatgttattacctataaaaatcttacttctctact

SEQ ID NO: 287240 - DNA, 490 bp, Cannabis indica
tttagtcacataaatatgttatgactaaaaaattattttttgtagtgatttctcttgaaataaaacacgtaaacattgacacattataatattactttttcttcctatatgggagaagagagttacaaagaaatagaatgtattgaaaaagctctaagttatagatatcatatatattgtctttgtattgtgaactcttgtggtaattagctttctaaaaaagaaaacttcaatatgcatgttgtgtccgtttaaggcagcgttttgccgtttttactttgttcatctcatgattaacttaagatacatgtggtttctgtaccatttcattcatgcatgaagctctattacaattaatatatgattcataattaatggtcaagggagaggccattaaacgcgtaaagaattaatcaatctataccttagtaacacatattaaattaattaaaatatatattaattatgtaacataatatatatatatata

SEQ ID NO: 287241 - DNA, 474 bp, Cannabis indica
ctcaaggttcgaaattgaagaggaaaagagaaggaaagtggttcggcctatagataaaagaataggaggctcaaatttcatctgacaaagttgagtgtgaatgagagccatcactatctatttataggtaaccacctaggtttatgttattatttgacattaaaataatagaaaattaaatgataaaagccattaagtgtggccggccatgggctttggatattgggcctcacttatgcaattttgctgttttatcatttctgcatctcattttctcaaaaacgccaattttccaattcaaccatttaaatgccaattctaattatttaataactagatataattattaaataatattgtcatttaatatatttattaattagacatataaagtctcttatttaacaaataaaacctagaatctcttttctttacaattttgtcattgcttaatgaaaattcataaagtagaca

SEQ ID NO: 287242 - DNA, 579 bp, Cannabis indica
cctcgggatgaagcagtaccgccctagacgtttcaatccttattcaggctatcgcttcaggcgaccatatgttccaccttacttctattctccttatggatacgggtaagcttgtttctgttgtgcacactttcattaccatagaagataaaaatgaggtcgttaattttcccttaaaacatatggtacgcctgcaggaaggttccccgattcagaaggtcagcccgatacatgccctactattagaatgttcaatcttatatacgtcttgtggagttgttacccaagattgtttgcatcttaagaactagcttatacatctagtggatgtaatatttgatggtggttttatccaaggaccaaggttgatcagttgtaatacctgatattttgttttgacaattttttttttcattattgctatgatacaatgcacttggaagctataaactagtagattgagatattgaaaattaggactttgcgtgcactgcaagccaagttactccttgcgtgcgtttagtcgattattttggtttcacctaggggtgttcacaaagtatccgatccaatccaatc

SEQ ID NO: 287243 - DNA, 848 bp, Cannabis indica
gtgttctatataactgagagtattattcaattccaaatctatagtggcgcaaggcagaattaataagttagagaatttacttggtgaattctagatctacttattgaaagctcggttatataggcccatggtcctctcactggttgagataatactgtttccagactcagttaattgattttaattaatcaattataattctaaaattagactatgtcttatttataaattttcactaagcaagagcttaattgtgaagaaaagaggttttggggtcaatttgttaattaagagacttttcatggtctaattaataaattatataaatgacaattttatttagtaattaattgtaattattaaataaatagtttgggtatttataggattgaattggaaaatatggtattactgaaaagaagaataagtggttgagataaagtggcaaaaatctaactagagtttggtcctatagagtgtacgacaataaattatttttttgccaaatgttttattcttttttaatccatataatttagccctaagccttagttgaaacactataaaaggaacatgatactctcactcatccaactaatgtcaacctgactattcaaccaaactagatgagagagttccttccttagtgatttcaccctcctttattgttcttcacattcgaaacctatagtgaatgagtgacatgcccacacatagcaagtcaagtactcaatcatagtgagtaagacagtggtacccgaacccgaaggagagaaagagatccaggttcagatcttgataatgctctgcgacagaaagaaataaggagaagaatcctgttgttagtt

SEQ ID NO: 287244 - DNA, 532 bp, Cannabis indica
tctttttcctccgggtctaggttcttccctaaccggagtactttggtggagtcgacgtcgcacactgatatttcttcgatgtcctccattggttccacgattctttcagaccctacacgggggtccagctcatcctcttcagccacctctggctcagctgactcccggaccattagcacgggcaggtgggttgcgacattgtaacattgtcttgcttccccctggtttcccctcacagttccgattccggcctcccgggtagggaactttaggcatagatgccagattgaagtgactacgccaaagtctaccagggctggtcggccgaggatcgcgttgtaggctgtcggacagtccaccactacgaaggtgcagtatttgaacgtgctctgaagggtgtccgggcacaaggtgacggggagccttacttttcccgttgggataagtgtcatctcgttaaaccctgtgagctgggacccactgggtgagaggtcccggtctgtcaagcctatcgcggtgaaggcttctttga

SEQ ID NO: 287245 - DNA, 605 bp, Cannabis indica
gtaagtttttttttttttgatagaaagttaattacatgatataaacatttctctatagccaaatgtccaaacccatgttgacacctatctataaagtgtacttaattaataaataaatatatataaaaaattatatgcatagatttgcatatggcccacacgtatatcttcaccaaatcttggagtactatataaggttcaacaaataaaaaaagagaattttataagcaacaaaaaaaaaaactaaggaaatataaaagaaaatctctatatacatgtgaattttgtgttagttagggatgagatttatttatttatttattttttaaattgttcgtacaacatgattcttatttggtacgtaaattgattatcatctcagattttttgttttttttatttatgatatatagtgtttattaatgtagtcattgaagatttcctccaaatttttaaaatgttcatatatgaatattgatatctgagttcaaaaaatttatatgttagtgtaaaactaatttatttaagtttatcatacttaaaatgattattattggatctttttggctctttgccttttaataaaattatttttttcttataaa

SEQ ID NO: 287246 - DNA, 745 bp, Cannabis indica
aaacttaaattaaataaaaatatataataataaattaaaattaaaatatataataataaataaataaaaataaataattcgtagaaaaaaaaataatacatcatatataattaagaatatatcataaatatataataaaatagtaagataaaaatacttgaataatataaaattgtttatcttaaacactaatttaatataaatattaattttttaaaatatttatataaattttttagtaatttaaaaataatatataattttattgtcatatttttttcttagaatcaatttaagtaactattatttaattaataatattctaaattttaaaaacttatgtataataattcaaaattatacatttttactaattttaatgaataagtttttgataaaaaaaaatgtataaataaatgtgtgataattatttcctttaaataatagttaaatttaaaatatattaataaaattaaaattaaaaaaaacgataaataaaaaaatctcacctgcatgggattatttatcccaccctgctggatgggataaataatcccagacagatgaggttaactggattagttatccagacttctaacatacccaaacactagattggacaaattagcctgtctaatccaatccagtcctgcataccaaacgggccccaaagggattacaattaccgtaatacccaacaatgtattttatccttaaaacacttaaccctgtataaatgatattt

SEQ ID NO: 287247 - DNA, 525 bp, Cannabis indica
aatgaaaggctcggggaaccctgccaaaaccggctagccggtttttgtggcactgcaaaccggctagccggtttgcaccagtttccccaaagcttttcatttgttgctcaactctccaccaattgccatgaaaccttccagagctcctatacaatgcataagcaacaaaatccaggcagtatttcacagaacaaaccattcaaaatcaatttgccattaaagctcaaagctttgaactccatgttcaaagttacatcaaaccaaccaaataaactcaaaaccagctgctatgggctaaattcaactcaacctaaccctagaattcgaaccaaaccaacatcaaactctaacagcccttgatttacaatttcacatattcaacctaattaaaaacttgaaaactaaagaaaggtttcattggagcttaccttaggttgatttccccttgaatctttggctgaaaacacaagaaaatcacagccccttccccttgttcttgctgccttcgaagagagagagagaaga

SEQ ID NO: 287248 - DNA, 612 bp, Cannabis indica
attagggttatgatctggtgtataggcgctaggttataacccgcgttatttgcatgttttatgttatgattttcttactcagtctgtcgactaacagtgcttttgctatgtgtaggtaagggtaaagctaaagttgaggagtcgtgagagcgagcagatcaagattgtacatgtcggggcggttaggcttggagcgtacaatcttttggacatcgaggcttttattgtatagtcgctgggcgacaaacttttgattatatgtatagcaaacttttgtaaagtatttcgtaaatgggatcccggaattttaagaatgaaatattttatgttttaaataattaagcaaaattttaattattcacgattttcaataacctcattgattagcaacgagctgcacagtatgtttaaaatcacgttaatacgcctatgctagttagggtgttacataaatcgtcgcctataagggtccattaaaaaattgcattttattaaaaaacgtcgcctattttgtttactacaattttaaaccgtcaggaatctaaatttttcccgacggttttatgtagttactaatttttttagcgatggtccccgaaaaaaatcgttttt

SEQ ID NO: 287249 - DNA, 792 bp, Cannabis indica
gggcataaaacccaacaacccgaacacgaacttggacccagaacgggacctaggacctgaacatagatggaggacacagacctgggaattgggccactgaactaggaccagaaattggtctcagaactttgatcgggatcgaggacccaaccctagacccaaacctggacataggacccacgtcggaacctgggatccgggatcgatgcttggacccgaccactactcagtgtctagatcaaggacatagaccagaactcgaaccaaaactcgaactcaaactaagacccgaacacataccaagacccagacccacactcgggaacaaaaaccgaaacatgaattagaacggcaccaagatctttgaacgggactgggaccaggacctggacccagacccagcctcgaagcctacctcagaccgaaacccggaactgaaccttgactcagactcaaatcatgacccgaacccagagtcggatccaatcgaccaaaactcgtagcccgtgacttgaaactggaatcgaaactagaagcggattaggaccgaagaataaaccatgaccaagacatgaacatagagccaaaactgtaaccggaacaagacccagactcggtcaaagagccactctgggattgggtccaaaatctaaatccaaacccgaaccaggactcgagacccgaacaaagacctaaattcagaccagaacattgaacatgactcgggacccagaactgggatcgaaacccacactggaccccaagtctcggtcctggacctagacccaaacc

SEQ ID NO: 287250 - DNA, 514 bp, Cannabis indica
gtcagcgacgtaacatactcagccgctaagaggcatgcacgtgaaatagtcaggacagagggtagaccaaagaaacaaccagcaacctataacggccaaaccatcaacttcatggacgacgaagcttgaaattttcttaatcctcaccatgatgctttagtcatttctttatttatttcgaattgttttactaaacgtatactgatcgataacggtagctctattaacatcttatttttgaatgctctcagggagatggggatcgacgaggccaccatcatccgcaagtccacagtattgattgggttcagtggagagcagaaacactcactcggcgaggtcatactccacgtttatgcagaaggagtcaacctacagacgaatttccttgtagttgactctccatgtaatatcccaataagcttaatagttaataattagggtttatatttatattatgagttaactaggtaataagtgggattatgatcctactaatctagttcaacacaaa

SEQ ID NO: 287251 - DNA, 594 bp, Cannabis indica
tgtaatacttagcattgaaacctaggtcattgtcgtaacatcgtgaatcatagacaccatgtcccactagaccaatgcatcttcttgaaactgaaaggttgcagagaccaccctgtcattaccggtgacactcgtaaagttcaagattctagtaatcaccgttagccattgctcagatttcattacatccgaacctcccagaaaaactggaggtgcttgcttgcggaacctttcatacaggggttccatctgattcactgccaccactggttcagcctgtacagcaggggcaagtgccactggaatttctggagcaggcattgcaggagcaccctcctgtcgtttcaaaattttggtagagtttgcaacgggctatgggtaccaaattgaagttcagtacagctttccatcctcagacagatggacaatctgaaaggacgatttagatactggaagacatgttacgagcctgtgttatggattttgaaggctcttgagtaagtacctaccgttgatagagttctcgtacaataatagctaccaaagtacgatagggatggctccctatgaactgttatatggcagaaagtgtag

SEQ ID NO: 287252 - DNA, 678 bp, Cannabis indica
gacctggacccagaatcaggatagggaactgggaaacgaaattcggaccgtgacctatgttagcccaagatatgtttccaagagggggggtgaattggaaatttaaactaatttcggaaaattaaaacttttaacacaaaattatgcaattagtcaattaatcaagtaaaagcaagtagtatggcaagcaatatattaagacaaataattaaacttgtaaagtaaagagtttaaggattagaaaatgcaaactctcgatttttacaaggttcggtagaactatgccacctacgtccttggtcttcaaagctatggacctagctttgagttccaatatcgagccaagttaacgggcttgactaacccttacaaccgggaaattttcaccaaggtatttccaaacctcttacaatagtttcgcacccccgaggactattaacctctttctcggattgttaaagtgccaatctcactatttccgggttgtttacaaaaccggtgccaacctcacctcaatcacaatatggaaatgtgtttgatatacaagctaaaatcactctagaaatatgatgatacaatggaaacctagagtgaaaagcaagcacacttaagatgaataaaatcaaattttggctcaaagtgtgtgaaaagtgttggtttggatttcaaacttagaag

SEQ ID NO: 287253 - DNA, 791 bp, Cannabis indica
ttaattgaaaaatgaacaaggcttgttcagatgcctccggttagctcctcgatttcctggcacgtgctttgggcgcgtgaaggtgtaattaatgatagtcattactgcagcgattcactttttgcaggcgtcgattcatttcacgtccattaattgatacggcgcattaatgggtgtcagacggacactcaagcgtttccaccgccttgatgacaaaccaatctggccgctggatcttgggaatttgaatcgtgtgcctccccagccgttcgattggtaggtgatggcgcctgttccacatgcaccttggcctataaaagccaccattcttccttcatttggttactttcagcctttcacccaatttcttcaaattttccagagagaaagaaaaccctcaaaccagaaaaccttcaaactctataggtttcttactaaccttcattcgttactgtcagtcaacatttcatcgtcgatcaacaacaactcccagttctaacactttatgtaagtttttcgcatcccttacattatcgtttgcgttcatggcatgctttactgttcatctgttttttatggatttaatgttcgaagtttctgggaatttttcgccttgagtttctgggtaacacatttagatttctcttattttgcacattatatttttccaaaggcccatctcttctttacgtgatgaccttcaagggtatagagaagactttgtctttctcaatttttaccctttcttttttcttttcttttctttgcttacgtgtaatgtcactatctgt

SEQ ID NO: 287254 - DNA, 863 bp, Cannabis indica
tttaaatacaaagattatccataccaatggataatcacctgtacaacaaaaatagaagaatcgacaaaaaataaagacaaaaaccaacaaccagagtacaaaatagtcaactttaatgacttagacccctacatatcttctaaagaagacattggtaattatatattaatatacttaatatattttatttctatgtaaatattttattaaatctaaacaaaattaataatcaaaatgcagatatattagccgtcgcaatacaagtcaaggaaccgaaagatgtaacaacaacctatggaataaaaagaatacaagaaatatatttgattgataagaggtaaaaaaaaaacttgactaaactaaatttaaattcctattaaaataaattaaaattttaaattatattatataaacttaacaaatatttataatgtttagtttcaagccaatttgtttaaccatgtggggtcgctttgtcaatgatgaagcccaaaaaatatcggacatgatcgatgaaaaaccaatcatacttgcaacaaatatatctgcaaaaccattcaaaggtaattactgcaaagcacaacatgtgaaatagatttatatatatatataattattaataattaattataaaatatgtaactgaaaaaatttaaaaaaacaaaaaaattaatttaatataaatataaaaaaataaagaaatataaattttacaaataattgtaggactattaatgtaaatatatattatatcaaagacttctatatatattcaatgaattttaaatatacattaataattagttatacactaataacagtaattcatatagaagttgatgtttggttgattttatagtata

SEQ ID NO: 287255 - DNA, 594 bp, Cannabis indica
cttttgaagatcttttgtggctcaaaaagcctagatcaaagtggaccaaagataaaagagaaaaattcattagagcaaagaaagatttaaagtgaagtgcaaagaataaagaattttacctatcacttactgtgtagaaactcttgaagatgaaaattttatgcacaaagccttctctctttcttattttctctcctttttaactcttacgtttacttctgaaactgcccaaaaaataataaaaaccctattatgctgcctctcttcccttttatagagactctttctttttatttttattatttttttattttttactaaccacccactcaacgtataagtggtgagagtggagagaatatctcctaattttactctcatcttgactgaccatttttatcatactattattattattttttttttcattattattatatttttttttattaaacaaattattcctttacattttgaatggcttataaagaaggtaatttatttataataataataataataataaccctttttttcgttcaacagatgccccctcaagcatgtgcatgcaatttatgtacatgtgcatgcttg

SEQ ID NO: 287256 - DNA, 538 bp, Cannabis indica
tttagtagctcacccttatcaagcttaccatgtgcatattaagattgtaaaacttagaaagtcggtggcaagtgagaccttggaggcttgtgtgtgtactcgctgaggaccatataactgagggtggttgtaaagcccgcttagttaatttggaaattatcagttaattatgattaattatgaaattatttatagctatttaaataatttattatactgttatttatggaattcagaaatgcatggttatgttattcagtagttttcatattttgcatttccggtgcccggtattttggaactcggcgtttggctcagtagaaatcacaacttagtatgttagtagtttgggacgggtttttagacattgggaatgtcgggaatggccgggaatttagaatttcccaaaaatacccctttagtgatttttatgtgattttagtatggaggggcaaaatggtctttttgccccaatgactttttgtcttttagtgaattgattatttgaaattaaatgtttatttatttaattattggc

SEQ ID NO: 287257 - DNA, 493 bp, Cannabis indica
tgtcttttcccttctctaactccgccagagaattctcgattctcttgtggggttcggccatggcgaagaattcgactaaggattcgggccttcgagcttgtaactccttccaaaagtcggtcctcggcaagatacctgttatcagcatgcaaacaagcgaagactcgggagccttctcgacttttgttacttctgcattaaaccgtttaaaatagtcttgtaaagactcaccaggttcttgtttgatgttggccaaagtcgtataaggtggcctataggtcattgtggcctggaaatgtgtgaggaataagtcgacgaaggtttcccatgtcgatatcgacgcctcaggcaattgggtaaaccaatcgtgggcgttctcctcgagtgttgccgcaagaatgcggcattttgcgagctgtggtacctgatccacttccattatagtattgaatttttcaagataatctattgggttagaagtacctttatactt

SEQ ID NO: 287258 - DNA, 879 bp, Cannabis indica
agcaaaatttgacagcttcagcatctttcagtaaaatgtgcataactttcacatacaaactccaaatgagttgattcaagatgcgttggaaagaagaaaaagaaatctaaaacttttatgttttgactttttccaaaatctgattagaacatagtcaaatttaagcttgaagtttcagctttattttcttgcagaattttctctattctatagattgttgttttccgaaatttgatcaatttatacattccaagtgtgaaacctgaaaccaaagaaaacaagcgtaattctattccaaatataataataaagaaggaaaacaactataaaaagtgacccaaaacgtaggctaaaaatagcctaacaaattcccccaaactagattcttactcgccctcgagtaagactaagactaacactaaaactcgattaactaagctatcagataattatattactgctggctcatgtgaaatttccttccattaactaaactagattttcaattctaaaaactctaacaattaattaggatgctcattttatcacacaatgcagagatacaaactaacttcagtatcgaaataatgtcataatggtttcactccatcaaactagtccacaaaccaatagccaatatgcttgcatgcttacctctctccactaatgttgacaacattcttttcggaatcaaaaggactttttaaggttagaatttatggcttagatatttggaaaataaaagacaattttggctaaagatatcataagcacaaaagaacccacaagcttctcataattttaaaatttcccgaagtgttcccacaactaaccatgattgagatttttttctactttttttccaatcactagacatca

SEQ ID NO: 287259 - DNA, 461 bp, Cannabis indica
aaatgtccatttggatctcgtaggctggtttattttttttcttgttcgaggaacgactgtatagcagtgtgaagagccatagtttggacttcgatagccattgtacagaggcatgttaggtaccaaaaaagatgggctatggactttggagtgaaaagtgcagtccgaaaggggacgagatgggcaaaaggatactttgggtgaatcaaaaaatcgtattgaaaatagggtccaagtttggagagaatctgttcgtgagtataaatagccctgtgagaggctttttcctttgctgaccttttggatttagaaaggatgagctttgcatctcggggaaatgagcagggaaatgagcaattcttttgcgatgatgatgatgatgccatgatatatatgtatggaatggtatgggacgagttgtggctgattaaagggatggttttgagtgggtgttgaggaga

SEQ ID NO: 287260 - DNA, 619 bp, Cannabis indica
gtttgcagttgctcgtttttttttttgatttcatcaagtgattctacaaggagtatgtgattggtaccttgatcgtacgtcaatcttctgtgggaaggtggctcgagttcgacgggcagcatagcttcataaccgtacgccattgcgaatggtgtttgtccggttgccgttttttcagttgtacggtatgaccataggacttcaggaagctcttctggccagtttcctttggcatcttcaagttttttctttagtgtatccttcaaggttttgttgactgcctcaacttgaccgtttgcctgaggatgcgccactgcggagaaacttttgatgataccatggttcgcacagaaatcagtaaaggattggctgtcgaactgcttgccattatctgagactattttgtacggtagtccgaaccggcatattatgttcttcacaataaagtcttgaactttctttgatgtgatggttgcgagtggttcggcctcagtccacttagtaaagtaatcaaccgctaccactgcatactgcactccacctttacctttaggtaattgtccgatcaggtcaatcccccaaatggcaaagggccacggactttgcatctgtgttaact

SEQ ID NO: 287261 - DNA, 501 bp, Cannabis indica
atatttgacccctagacaagattatcatcttccaatcctaaaaatataaataatgaacaacacctcattagttattctaggagaatgattcatggtaatatcaaaaaaatcattggatggtaataatatttttctaacaatgatagcctaagtaagaactaagaagtattgtagcgttttatttttaagaatatgaataatattaagacaattggattccacaatcaagctcctattcttctaataaaaaaaacacattaatatacatgtaaatgatttttagttttacaataataaattattaataaactcataatttcataaaataataaagtagtaattttaattaatttttaaaaataatttataattttttttcaaattattagttgtaattattatttccaattttataaaaataaatataatttttttttaaaaaaataaatttttagaaacttgccataaaaaggttattagattattaccttattaattttt

SEQ ID NO: 287262 - DNA, 205 bp, Cannabis indica
tcattaacaccttgatataccaatcaagtgtaatagtagtatactcctcgtaataggatctgataggttgaattaaacacaacctttttagagacttcatatagctttttacacttctccaaaatcactactgcacccccagagtaatcaccatctcatcagcagactttctagcacaaaggcaagtctcgaaatctgatgtggt

SEQ ID NO: 287263 - DNA, 284 bp, Cannabis indica
atattgaggctgcatggagttccaaagacaatagtctctgatagaggttcagtattcacctccaagttctgggagagtctacataaggcaatggggacacgattgaaattaagtacagcatttcatccccaggtcaccgcttcactgggatgaagttggagaaagacgctatctaggcccagaagcagtaagagaagcttcagaagcagttgaaaagatacggcaaaggatgctcaccgcccaaagtagacagaaaagttatgcagatctgaaaagacgggagg

SEQ ID NO: 287264 - DNA, 525 bp, Cannabis indica
cggttggagttgggcgaggccaaaaagaagctgttcgttgccgagaagaagatctccatgctgacaaaggatctcgaggctgctgaccgctttgaggagaccatcgagatcttatctgctgaagtaaaaagtcttcaggatgagaggacttctctgcgagcagttcttcttcggatgaaggaggagaaggacgccaaggtgggggagcttacagccgaggtggacaggttgaaggagaaggtcaatgccttggagacagccggtctcgagctcttctttgatttctggaaggctaatccccgggccaactttgactacttgggcgaggctaaggacatgtaccttgagtactgcgcggcccaagtggcttatggtgggaacgaggcggctgcttcaacctccgaccaagctgcttcaacctccggtcaggttgctgatgcttttcctgttcaaacaacagatcctcctgctccagttggcccagaagaactgaaccaagagcctgagactccagctgtttaaaca

SEQ ID NO: 287265 - DNA, 462 bp, Cannabis indica
aactaattttggattaacttaaatttgaatatttttgaaattcataattaagttgagattttctaggaaattaattattgagatattctttaaatattgttttaagttgaaaatttgttaattttggatcaacttaaaattgaatatctttcaatctaaggtgataagttcaagatacttaatttgttatttaattaaattttggaaaataatttaagtttgaaattttgttattttagaacaacttaaattagatatttttcaaatatttattttattatattttaaataattttgaaaatttttataatttttgaaaattaatttttgaaaattaaattaaagttgaaaattaattatttaattaattttagacaaacttaaataaagtaatttttattattaaaatatatagactaaaataaatgattaaataaaaatacattttttttaaataatgag

SEQ ID NO: 287266 - DNA, 771 bp, Cannabis indica
aatgaggactgcaaattcgacaaagaaatggtttgaggtgaggaagaggggtaattaaagcgaaaagaaaatcgaatgagaactcaaacctggttgagaggggatcacagagaaaagaaaaactcagcaaacctaacaaaggtggaaccagagcagagcctgtaggaagcttcaagaagaagattacaaatccataattgatgtatacttcttttgcttttataattgaatacacaatattcttagctaatattgaatagacggcattgtttgctaacgtgtaacgttaatttttgttgattatttgtctaagattattattgtaaatagttttgtaattatgtatattaatgtaaaaattcctatttcatactcatacgtagggatgcatatggggtacagggcggtgcacaaaatgcatttttcgtcctcgtccttggttctcattatttattttctctcgtccccatcccgttcatgtataaactctagcaggaaacgggacgggaaatccccgtcggtaatgaacactataacgggaacccgcttattaaaaaagtttgatattacaaataagtttatatatttaattgtaaagtaaaaaaaatttaggattaatatttaatactcttcaaaaggactattcatattcatatgaaatagcaaataattagcaataacataatcgtggtacttattcatatttaataacaagctagagtatttaatatatatatatatatatatgaaatagtataatttgaattaata

SEQ ID NO: 287267 - DNA, 1000 bp, Cannabis indica
ctatatacgcatgccacacaaagaggtcaacaatagggtaataagaattccaaatcatatatatgtttgggtcaaagacgcttcacatatagaaggaaaaagtaacacatattacaaattaacttataaataatcaaattgattgggaaaaatttaatgaaagaccaaagtgttattggtttttatcttttttttttattattattttttaagttaattattaattaaggtagagataatatttatttatagaagcaaagaatagaagaaagaagaagaattgaacaccggccattggaattgtcaaccccatgaacccagaaaacccggctaccttttgacaatacaccaagaattttgtgctaatttatttaatttattattacttcttcttgtcactatcatatatatctatctatcacttattttttactaacattttgtttgattgattgattgattaataacttaattactatatatattaattataacaattgtaattagcaataataagctctaaaatagcactaatttagatatatttaaaaattattgtttaattatagtaggaagattaattaactactaaacaagtaatggcacaacaatatgcatgtataatattataattccaattgagtgtttgtttataattaacaacgtgattatagtgtaattatttaattagatgtaaatgagatacccctaaaatttaaatatctatcctctctatttttggtagccgtaaaaattgggtgtaattattaaattattatagtttgtaaatagatatttactatatatctaataatattacaacaaaatccatataatttgaaatagaatataataattaatatttatgttgtatataatatattgtaacgtccccgcttcaagcttccattgggcccttacacccacggaatgaatggctcttatacacgggtacgtcactctggctgcttcctggattgatgactgaccctacagacca

SEQ ID NO: 287268 - DNA, 578 bp, Cannabis indica
gtcagatttttcttttcttttcttttttcaattttcacaccttttccacacacatacaacaaactttccatcaaaattcccccaaactaaagatctacttatggtatggttagggttaaattgggttaatctttttaggctcaatatgtgtagaacaaataataggttaaggctcaaaaaagggtaactaggataaaattacagggatggcttgaaaggcacaatcgatccaaaaaaatgcctaaatcactttcctagtcatgcataatttattatttcgcctcaaatagcaagcaagcaagttctagaattttccaaacaactttccacatgttccaaattagcatacataaatcaattcaattactagaaaattacctaatatgattccatgttctttcaagtataaaattgaaattagtcaagaatgtaatatcaccaagcacacggatttttcgaaaataagtgaacttttcaaatcatgctatctacctacttttaaattgactcatattaagaaaattgactcaaaacaataaaaaactaaaaattaaaaattaaaagacataaaacttaaa

SEQ ID NO: 287269 - DNA, 516 bp, Cannabis indica
tatctttcactaaaacctcaggtggaaacttagtgcctttcatgtacatgtaaagaacttctaacttcaattcatacaccaaggggtccacctccaactcctcatgtaaaacttcacgcacctttttcagtgtagagtcaatgtccaacatcaatgtcttactttttgaggaatcaaatacccagttgaaaccctcgacagtccaaacgccatcatacagtacaggcacaaatacagttgaatctgtcccaaagaaatacaaacaaataaacagaaaaaataagcatattatatcgcacactaaatcgcacaagctactactaatgtcgcacaatgtcgcctaataaatcaacaatataaacaagtatcatgtcgcacacaaatcgcacaaagaaggaaacatatcgcataaggtcgcacaatataccatacataacaaaatcgcataacgatgcacaaaggtcgcacataaatcgccaaatatcacaatcgcacacataatcgcacgaaaatcgt

SEQ ID NO: 287270 - DNA, 648 bp, Cannabis indica
ggacaatttgaataaaattagtattacatttgcaaaaaatcactaggtcatctgcaaagcataagttgataagcttcagatttttgcataacggatggaagccaaagcctttggaatgagaagtttgaatcaacaaacgggtcaagtattctatcatcagaacaaaaaggagaggagatataagatctccttgacggagaactttctctcttttgaatcatgacccatgaagacgaccattgagtataagagagtaggaggtccccttcaagcagaccaaaatccagtcgatgaagcgggacaggaagcaaagacccctaaggagctcaaaaacaaattggcaatccaccgtatcataagccttacgaagatcaatcttcataatatttctcgctgaaatatttttccttgtgtaaccctttaacaaatcttaaaagatcaatatgttgtgagccagtaatcgatttttaacaaaatattgtgactaatatttataaatcatcatttttatgttgtgattaaaaaagttcgtagctaaaaactagttataatcgcaaaaatcataatttgttataactaaatacatttttagtcacaatacttattgtgattaatactaaataagtgataatttgtatctaaatacta

SEQ ID NO: 287271 - DNA, 682 bp, Cannabis indica
atccacgagctgcgtatgtcactatcgttgcccggtaaagacaaacgataagtagaaacctatctgcggtttcaagaataattactcataacggtaatgaccgttaccaatcctctccactcgttatccatgagctgcgtatgtcactatcggtgcccggtaaagcaaacaataagtaagaaacctatccgcagtttcaggagtaattactcataacggtaatgaccgtatcttaattcattcacaacaacggtgataaccatgttcttccctcattcataaataattcaaaaacgacaataattgtttctcatcattacctcgattgctattgagtcacaacaaatacatattattaatctcaatcaagatcgagtcacaacaaatatatgtcgggatctcgatcataatcgagaccataacaatcatatcattaaccataaacagtgcttagtagtgcaaataacttttcttacctcaagttctagtttaggtatgttggctgacctgcttggagaatgatcgatcatcccagccctatgtcataatgatgataaaccaataagtgtttatcccaaaacactgcttaataaccgtagaggaacacctagggtttcttaccaaacctcgaggtaaaacttcactaaaatgaaacttatattttggctttaaaatatacacc

SEQ ID NO: 287272 - DNA, 249 bp, Cannabis indica
cttcaggaaacacagacaacacaattgtcattcttttcctttcatagagaaattttcctgagccgccactctctctctctctctctctctttcttattctctgattcgaaatctctaagtgatagagtagtgcctacacacagcaagtagtacctcaatcatagtgaggaagactgtgaagaattcagattcaacaaagaaggagtttctgaaattattttattggatagtatggaaaaattaaagcaa

SEQ ID NO: 287273 - DNA, 545 bp, Cannabis indica
gttccatgatgatctcgagctacacagcccattccaaaccggcctcttgttcaaataagccccatcaacattaaccttaatcttgtttaacacaggtgcaatccaacgttcacagtttcgccccccatcattcaaatgagacaacgaaagccccttcctttcctgagcaaatttgtattgatcaagcaagattctagctgatgttacaatatttgaagcaagccaactcttcttttgccaaacaaagtcattccgtgcacgccaaatagcccaactcaccatcgttgcttcctccatttcaacttcgtgccccctggtgaaaattcccaacaaccagttgctgaacgttgcagcccagcctcaacgtccactatgctgcgatgccaagcagcctttgcaaccgagcattccaccaacgcatgttgaatagtttcagtactagagttgcacaaatggcagtcagcattgacaggaacataacgcttttagagttgaaaacacgttggaagcacacccgaagcagctcgccataaaaaattactgat

SEQ ID NO: 287274 - DNA, 528 bp, Cannabis indica
gaattaataaagcttttattttacaaaaaaaaaaaaaacaaaaaaaatatatattatatatataatatacaaaaaaatacattatattttaaaaaatatatctcattaatatatatatacattgaaaatatatactaatataaaacaattaatatacaaataaaatatatttatccccaaataaaacataaaatatatatatatacagtgaatatatatatacaaaaatatatatatatacagttaatatataaataaataaaataataaatacccaaataaattatataaatatacagaaaatatatatatatcaattaatatatatataaataaatatatatatacagaaatatatatatacagttaatatataaataaataaaataataaatacccaaataaatatatatataaataaaatatatatatacaaaaaataaaaaattaatacccaaataatgtatacatatacacatattattaattatacacccaaatacacaatatacatatacagatctatca

SEQ ID NO: 287275 - DNA, 522 bp, Cannabis indica
cctagtctcggttcgggtttaggtctctgtttgggctttcatctgggttcgggtttgggtttaggtccttgtccttgtccgagtcatagttcagttctagtcccatttgggattctgagttcgcatttgggtttgagatcgggtcggagttcgagtactggtctaagttagggttcgggtgcggatttcagtctaggcccagatcaggctccgggtgtgggttcgtttcatgggtcttggtctaagttgggtccgagtcccaagttccaatcccgatctgtgtttggattcagttcttggtctaagtccttggttctgatcctggtctaggttcgagtttttgtccgggtccgggtctagctttgggtctgattctaagtgtgggtgttttagttcgggcccgagtgtgtgtctgggtttgtgtccaggtctgggcctcgatctgggtctaggtttgggtctaggtccaaattcgtgtcccgagtgcgggtccaagtttgggtctgggtcaggatctcggtc

SEQ ID NO: 287276 - DNA, 135 bp, Cannabis indica
agatgatttcggctatagagagaaagggaaggctcagttttctgaagagagaattttctgacagaaagcttgttgaaaacttatgatttgactgagccatcactttctatttataggcaactactaggtttaggt

SEQ ID NO: 287277 - DNA, 757 bp, Cannabis indica
tcaaaaaatcacaaaatcattggttactattatcacctatttattaaccttttgcttctatttttctactaacgtttttgtctataataacctccctgtggaatctaccgcccgatctatactacaaccaccgctagtggaagtcacattttgggcgtaaatcaaattttggcgccgttgccggggaggtaattttttttttcaaaagcttagtgaaatctacaatcaagaggttagtaattgttttatttttatattttattttcttgtgaatatcttcttatcttgtgtaaatatttttgaaaaaaaaattcaagaaactcaaagtatgctctaaggttgcagttttatctgatcttccttatcagaaacgatttcttgatataaaaaaaattatttcctttaatttttatttcattctcactttgacttttatttagtatgatagttcatatcatgttttagtttttttttttctttttttttttatttttatctttttctttttatttctttttaatactcttagaatttaagcccttaaaaaaaatcataaaatacaaaaagaaaaaaaaacaagtgagttctaattattcataaaacgcttagtattttgtacaacagtataatattacatatgacgcaaacaaaaattattctgtctagaaaagttggtttttaccctccaccttacctgggaacctcagttctgtttaggcaaggttgggacgaaccggtaccttggtaacctttccaa

SEQ ID NO: 287278 - DNA, 678 bp, Cannabis indica
ggaactttcacttttaaatttttacacaagatgaaccatcccaccagtaatttatatgcctggagatcagctaaaagggttctataaccacctcaacacagaaacgtgcgacataactttggagtggaagatgtgtgtaatgactgcttgattttattatggaaattaatagatatttaagggtttatttaatcttttttcattatgtacctcttagtagataattatggtttactttcacaaatatgcctttaatttttattttctcagcttatggagatttatttaaattctaggtgtattgtgtatgttatatatgaaaatttacgtttttcatatttatgctcgataatagtagaatgcgatgatttggccaagtagagtcacctaggtgatgtatcttagaattagcaggaaacagttagacacttagaatgtcaggattaattggggttatgatttggaccattttactcctaagttattagattacttcttagtgaagtaaagggaaacgtagtctttcttgccttatgatttatttttgggaggtaagtgaatttttttagtaaatcctttgattattttgtttattgtaaattgaataaatcaaagagttattgtggataaaaattagatacattctctctcttttgttcctctctttctcggccaaag

SEQ ID NO: 287279 - DNA, 612 bp, Cannabis indica
aaattaattaaatgtgactaataaaaggtttatgattgctcaatttctgaataacaagttttgaataagtaaatatttaatatttaggatattaaacgattaatcaataagatgaacttgaagaaaataaaagaataaataaacaaaaatatacaagaatcaaattttatatatttttctaataatgatgtggtggtctctgagatctggaactatattatatggagaatctcgttcgcaagacttagcctgatagtcaaacgagaaataacatctatattagttatataatgtgctgcacttaatttcagtacaaatgggagattattgagatttatgccttaaaagcaagtaattaatagataatgtattgtagaatatataaaatgttgttataagataaaataatacattaataatagaaggatatttaataaatatttgaaaatttcttatttaaatggaaattgtataattctgtaacgtcctacaagaaattaaaattatacaatgtaataaataactaacagaagagaagagaacttaagtgagataatatgattgaacttttcaaactctctctctcttttcctctctctctctcggctgtgc

SEQ ID NO: 287280 - DNA, 944 bp, Cannabis indica
aaatttgaatggtccaacaagtgcgaggaggcattcaaaaaactaaaagagcacatggccaaacctccaatcttgtcaaagcccgttctcggagaggacttgttcctatacttagccatcttcgagcatgcggtcagcgcagccttagtccgggaagaggaaaaaactcagcatcctgtgtactatgtcagcaagcgcatgataggagcggagacgcgatacccagtcattgaaaaactagttttttgcctcctgatggcctcgagaaagctgagaccctacttccaagctcacccaatcaaggtgttgaccaaccacccactccggcaagtcctacaaaagccagaggcatccggaaggctcctcaaatgggcaatggagttaagccaattcgacctgcactacattccccgcatttccataaaggacaagcgttagcggacttcatcacggagtgcaatgaagccgaagctaccgcgaacatacccacaccatcagtcctagcatggaaagtacttgtagacggagcctccaacaagaatggatccggagcgggggtcgcaatgatatctccaagcagacttcgactctaagcagccctacggttcgacttctcagcttcaaaaaatgaggccgaatatgaagccttgatagcagggctgcgattagcaaagactgtgggggctaaaagagtagaagtctacagcgattcccagctagtagtgaaccaggtgtcaggagaatattagacgcgcggagagagaatggccgcgtatgtagcgatagtccgggaagtgctccacgagttcacagactataaagtggaaagaatccccagagaaaagaatactacgcggagtgtctggctaaattagcttcagattgggaaaatgaagaaactgggggtggtacccgtggaatgcttggcagagccaagcatcaaa

SEQ ID NO: 287281 - DNA, 916 bp, Cannabis indica
atatgttcctaacctagctaggaatctaatttcactaagtgttctagatgaccaaggcatagttagcaagattgaatctggccaaatgaaaataagcaaaggagccctaactatcatgaaaggacacaaagatggaggcttatactacttaaaaggacaaccagttgtaccttgcaattacactgctcacagcaacaatgataactcaaatgcaatgctatggcacaagaggctaggacacataagtgagaaaggactgcaactaatgagtgaacagaacttactaggtaaagacaaggtatgcaaacttgatttttgtgagtgttgtgtacttggaaaacatcatagactgaaattttccactggcacacacaacactaagaaaatactagagtatgttcactctgatctgtggggaccagagaaaacaagtactcatggtggctgtgtatattttttatctattgttgatgatttttcaaggaaagtttggatttttctgttaaaacataaaaatgaggctttttctaagtttacacagtggaaaacacttgtggaaaatttaacaaatgaaaaattaaaaactctaaggactgacaatggattagaattttgtaatgatgaatttaacaattactgtaaagaacaatggcatacagagacacaggacagttagaataacaccccaacagaatggagttgcagagagaatgaacagaaccattctcaacaaagtgagatgcttactgttgcaatctggactatcacaaggtttctggggagaagcagctttaacagctgtgtatttaattaacaggagtccatccagtgcaaatggattcaaaactcctgaggaaaaatggtctggttaaacctcctaacttatctaatctcagagtgtttggttgtgcagcat

SEQ ID NO: 287282 - DNA, 728 bp, Cannabis indica
aaagagaagtgtttaaacagctggagtcccaggctcttggtttggttcttctaagccaactggagcaggaggatctgttgttcgagcaggagaaccatcaacagcctggtcagaagcttggccggaagttgaagcagccacctctttcccaccataggcaacttgggtcgcgcagtactcaaggtacatgtccttagcatcgcccaagtagtcaaaattagcctggggattagccttccagaaatcaaagaagagctcgaggccggcagtctccaaagcattgaccttctccttcaaatggtccgcctcggtcaccttggcgtccctctcctcctttagccgaagaagaacttgccgcagagaactcctctcatcctgaagactgttaacttcagcagataagatctcgatggtttcctcaaagcgatcagcagcctcgaggtcctttgttagcacggagatcttcttctcggcagcaaacagcttcttttcggcctcaccgaactcatgccagacaactccagtttccgtcctggcctcctcagcttccttcttggcaaagtctgcctccgccctcaaggtgtcggacagagccgcactcttggaagtagcagatttagcacgggagtaagtgtaagccaacttcaaaccggcttgcacaaaggaaaaaggtcagcatatggagccaagtgtgaaaagttaaaagggaagtatcaaaaaagactaac

SEQ ID NO: 287283 - DNA, 94 bp, Cannabis indica
  modified_base (90)..(90): a, c, t, g, unknown or other
agaacagatctcttgctctctctcaaacaacctatattgctaaacaaatacttgtcgcctagcgactaatcacaaaagcactgctgtccncgag

SEQ ID NO: 287284 - DNA, 518 bp, Cannabis indica
tgtaggaatttttaagataggaatttactatcttgccccctacaccaacaaacaaacgaatcaaataccaaggtcaatttcgacctttcactgttcactttgacttttcaaagttaaccccaaaacgaccccgttttgtctttgaacaaaacctaggaatggatcgagaaccttctcatttccttcctttctctctgaaatgctagaaaccctagcagagagtttctcaaagagaaactcgaatccaaaccctagaaacccagaaatcccaaacacaaacccagcaaaaagatcagatctaaaatgatctgatctttacacccatacacacacaaaaacagaaagatctaagtttagaaaacaccagattttcccgaagttcaccaataaattggctacgtctccgtttgagctgctcctcaaatatgagagctcgattccactatatcaagtcgatctgaagtacaatcatgaagattccaagtcacaggtaaattttgactggtaatcttaagttt

SEQ ID NO: 287285 - DNA, 1097 bp, Cannabis indica
acataatagacataatccatgcaataaaataacccaacataaccagaatcaaaatccaccattagagagcaaagcttgagttcataaactcaaaccttgctcaatcaccacaacaactaaaaagaacaccttagaacagctcaaataacctcaatataacatcagaacacaaaaacaaacaactcttaaaaccacaaaaccctaactcacaaatcaagcaataacttaacttaaagcttaagaaatcaaaggggaaaggtactaaagggtttaccttcaattggaaacaccaataacttgttagattatccagaaatgaagctgaaaaatccctaaccttgctgcttctagggagctcgagaaagagagagagtttggagagaaaaagagtgaatttcttgatttttttctatttgagataaattcattaaatctaggtattatctaactattataatgagataatatcaaattattaaacccaaataaatctcactaaaagacacggagtcaaatggccaaaaagaccattttacccccactaggaccaaaaacatctaagtcacttaagggtaacttggtcattttaaaactccgactattcccgacattttcaatgtctatctaagttgccccgctactacaaaaatataaaatgtgattctattggccaaatactgcttccaatgttgtcgcgcacaaaacatgaaaaacataaattttcatatacaacataaataacacacctaaaattcaaataaatctccataatttcataaatcataattaataatctaatttcataactaattatctgctaattccaaaaaaattaagcggtctttacacaaagtgagtggatatcaaggtctggtcgtgaattgagtgttgtgttagtggctcaagtttcactatctgcatttctagaaggaaaatggtactttgatagtggttgctctcgacacatgacttgcaacaagaaattgttagttaattacaaagaagcaaaggagggagctgtcacttttggtgatggaaacaagggccagaatattgagaaaggagacttggtgatgagtagagttgcacctctaact

SEQ ID NO: 287286 - DNA, 739 bp, Cannabis indica
tttttctattttgggttaatattaccttaaataaacatttatactgccataagcaaaaataaacatttatattgtttattaatttcaaatatactattttcaaagtttcttatttacaaaaatacagtaaataaattcccccagatgcgcaaagagatgtgtgacacacatgtggctatgtgggcgagtgagactcacacgcgagtgagggacaaagcatttagacttccctgacactcacaaactgtagcgtcagaacgcagcagtagttgccacgtggcgaattcgaacaaagtgaattttaacgtataaggcttcttttctcagcacaaaacaactaaacaacaacacaaaaacaactagaaaacaacttaattataccatataaatcaattaaagtttatcatattatgcaaacaaaaataaatttataagacaaaaacttcaaaaaatacaatactgaaataacttaatagcaacgaataaacaacacgataacaattttattttaatataaaaattaattgagcatcaacacttacgtcatcttaaaaaataaaataaaaacaacacacaaataataaaatatatatatatatatatattatatacatttatttcaattagttaaacaacgaaaaaacaactatataaactccactacaatatgcaaattacataggcatgaaaataactctaaaaaagtaaaaaataaccactaatgtataaaataaaataa

SEQ ID NO: 287287 - DNA, 657 bp, Cannabis indica
agtctacgttgtgcatcaattgtggcttagcattttcttccatcaaaattcggtgcatcacagttgagggactgattcccttgacatcacctagtgtccaagcaatggccttgttgtgcgcccgaagtactctcagcaatctatcagtttccacatcagaaagagaagttgacacaataactggcagctttttaccttctcccaagaactcataccgcaagtgactagggaacaccttcaactcaagctctggaggtttttcagtagatggcataagctctttaggcactactcccaactcctcataataccttatgttcaatggcccataggagtaaagccattaacccattacatcttgtccctcttgctccgtcaaatcatcttcaattaggctcagtttgagaggatcatctatcagctttttctcactcacaattgtatcaattaaatcaacgaagagacaattatcactttcctttgggtatgtcattgcctttaacacattaaagaccacttcttctccttggactctcagctttaattcacccttctgaacatcgatcaaagcttggccagttgctgttaggttatatttagcctatgtttcgggtctgtaaagttagcattttctcgtctattggtgtcttttggagc

SEQ ID NO: 287288 - DNA, 812 bp, Cannabis indica
aaattattattgcttttctttatgggatagtgcggcacagccattccaaccaaagtgcttaaaacccaattttctttacacttaacaataaagggaacaaagcactattctcactcaatttttttgtttatttattttattattttttgaaaaataaaaaagacccaaaaatgaaggggggtttagtgagagttaaccctagagttttggtaaacaaaaatgattaggattagtaagacaaagtaaacaagggaacatttagtggagcccataagagcccaaaaaagccctttgaatagttactcactcacaccctaaaaaaattgaatctaaaatggccgacaatggattatgtattgtataataatatgtatcccaattagggcatttatttacctaaagcataatactatatatattatgatgacttaggaggactacttttactacatgtcttagatgttggtttggtattgtattgtgtcaacctctttcactcttttttgtcattgggccaaagcccaaaaagggaaatctagtccacattcaacaaaggttgaaagccatttttcaattgtagagcttaggcataatcttgggccaaagcccaaaaggaaaaccaatctacattcaataaagctttccttaaaagaaaagaataacaaagaccttttcttttgtagagcttaggtatcacattgggggtaggaaaacacaaaggttattacattgaagaatttacaatgaatatatgggtttaatttttttttctacttaagtatgacaatttttttttaatttttaaactattt

SEQ ID NO: 287289 - DNA, 509 bp, Cannabis indica
acaagggtattactggccaaccttgcgacaagatgctctcgcatttgcgaagaagtgtgacaggtgccagcgaatagccacatatacccaccaacctccaagtaacctccattctatcacaagtccatggccctttgcagtatgggggattgacttaatcggcgagttacctaaagggaaaggtggagtcaaatatgcggtagtcgcagtagattacttcacgaaatgggccgaagccaaagcactcgcaaccatcacagcaacaaaattgcgcgagtttgtctatacctccataatttgtcgctttggtattccatacaaactcatctcagacaatggaagacagtttgattgtaaagagatgcgacaactatgcgacgatttgggaatcaaaaaggcattctccgcggttgcttacccgcaaacaatggacagactgaagctgttaacaaaataataaaacacaccattaaagggaaactagaagatcgcaaaggggcttggccaga

SEQ ID NO: 287290 - DNA, 515 bp, Cannabis indica
ccttatttcgatgtgattttgagtcccttttccacgctcccaagtgtacttatgaccacgcagttgaagttcacacaatcggcaatcatggagagcagtgttgaaaccgtggatcaaagattgaggataaggacgaccgcccttcttatcatcatgcgtggtaatgttgttgaaatctccaaggatacaccatggtaatggtgaagaatcggcaagctcacgaagaagattccaagttgtatgtcttctcgaacggtttggctcaccatagaacccagtaagacgccaatgaacaaagccaggaacatgaatctctaaatcaatatggtgggccgaaaacttaagcaaatgagcatcagttgcaactttccataaaaaagcaataccaccttttctaccttgggccggcacagaaaaactattctcaaagcccaaccgaaccttgagtctatccacagtgtcattgttgcataaagtttcacaaaggaaaataaagttgggcttcttttgtacac

SEQ ID NO: 287291 - DNA, 586 bp, Cannabis indica
ctttgcagatttttctaacactctcatttcaatcttctaactttatgtagttggagtgatgtccttaattattgtgtatattgtagccatttattcacctgttttcaaacaatagatagacaaaataaaaaatatagtaataactacgtggcagagtctcatcctcatcgtcggatgatgccatcttcttaactttcactatcattgaaaagttcaaatacataagtcattacaaaaaacaaaaacaaaaattattgttactaactcttttcacatatcaagagaattttatatataaaagtcattatcaaatcagtgccatgcaatttgatcaacatgatgcctcaaacccctcttaactcttttttacatttatcaaacgaatttcaaatacaaaagttattattatcagtgccatgcaatttaatcgacaacaaaaaaaaagcaaaataatatcataatatttgaaattcttgactgataacaatatatatagtctaagtgatactatatatataaagatacatttatttatttatttttgtagaagctagggaattaaatcatatatttaaatttttttttt

SEQ ID NO: 287292 - DNA, 570 bp, Cannabis indica
tttatttattttttcaatttttagtttttaggatttacagttcataatttgtacaaaagtaggtgaaaattaggtggagagaaaagtattattattacagcatgaaactcgtgcttcataataaaatatgcctaaaattatttatttggaagcatgtaataactgaatacatttatttatttattttattcagacctgaatattattttgaattttatattgggataaatacaattttggatcctgtgttttgcaaaagttattaattggaatctctgttttgttaaatgacaaaatgtaccctatattttctaaaatgttacaaataggatcctgaattgattttttgtcaaaataaaatttaattataatccgatctaaaattgttatgacaaaattgtttacattttctatatctgtttgtattaagaattgttttcaagttaattatattaaaaaaaaaatgttgtcaaaaattaagctaagggtcctatttttactattttggaaaatacagggtttattttgtcatttaacaaaatacagggtccaatctgtaacttttgcaaa

SEQ ID NO: 287293 - DNA, 354 bp, Cannabis indica
aaggatttcgaaattgaagaagaaaagagaagggaagtggccgctatagagaaacgataggaggctcaaatttcatctgacaaagttaacataagttaagttgaatgagagccatcactgtctatttataggtaaccacctaggtttacgttagaattatttggcattaacaaaatgaaaaaataaatgataaaatccatttaagtgtggccggccatgggcttcggataatgggcctcacttatgcaatatttgtttttttataatttctgcatgtcattttctcaaaaacgccaattttcaaatttaaccacttaaatgccaattcctctaatttaataactaaaattaatt

SEQ ID NO: 287294 - DNA, 525 bp, Cannabis indica
agatctaggtcaagcattacgatcgcagcctgggtctgggtcttggtctgagtcctagttcgtatccggatccctatctacgtccaaggctgtgtttcgaatcgggtcccagatttaggtccaggtccaggtcctggtctagttacggttgtggatctaggtctaatttcagttatgattcaaagtccaagtcctagttccagtcctggtcaacttcttattttggttccaatttagggtcaaagggtatgggttcgggtcaactttagggtttgggactgtgtttagatccgagtgtgggttctggtccttgtcagggttcgggtcttgggcttggtcccaaatccagacactgactacaggttttgtccaagctctgggtctatagccggatcccaatctcggatctgagtctggttccattttcgtctgcgtcacgagctgggtactaggttcaagatagggtctttatcgggtaataggtccatgtccttattctatttcccaggtccctatcctgattct

SEQ ID NO: 287295 - DNA, 519 bp, Cannabis indica
taatctaggtcaacgtccaggttattgtgtggattttgggttctggcctaggtttgggttcgagtcctagtctcggttcgtgtttagatctctgtttgggttttaatctgggttcggttttgggtttaggtcctaaacctggtgctagtcctagttcgtttctagttctatttgcgattttgagttcgagtttgagtttgagttcgggtcagagtttgagtcgtggtctgagtttgggttcaggtgcggattgtagtctaggtccaaatcaggcttcgggtgtgggttcacctcctgtgtcttggtctaggtcgggtccgagtcccaagttccaatcacgatatgagtctcgattcagttcttggtctaagtccttagttctgatcttagtctgggttcgagtttgggtccgggtccgggtctaggtctgggtctaattctaggtgtgggtttgagttcgggtctgagtctgtgtccgtatttgtgtcaaggtctggacccgatctcggtctagcttcg

SEQ ID NO: 287296 - DNA, 855 bp, Cannabis indica
ctcagctttaattcacccttctgaacatcgatcaaagcttggccagtagccaagaatgattgggacattgttatcttcttccatatccagaacaataaaatcagctggaaagatgaacttgtcaaccttgactaacacatcctcaatgactcctctaggatgagctagtgatcgatccgccaattgtagagttaccgtggttggctttgcttctcccaactgcaatcttttaaaaacagacagaggcatcaagttaatgctggctcccaagtcacatagcgcatttattccttcaattctcccaatggtacaaggaatagtgaaactccctggatctctgagtttgggagggagtttcttttgcagaatggcgctacactcttcagttagagccactgtttcatagtcctccatttttctcttcttggacagaatctccttcatgaacttcacataactgggcatctgttctaaagcttcagcaaaaggaatgttgatgtgtagtcttttaaagacctctagaaattttgtgaactgcttgtctagattggtctttcagagtctctgaggataaggtatcttcacatgatgatcaatactgactggtggagactgttgttgtggtgcagggctatcagtagccttcttttctgttgatgttggaattggtgctggttgatctttaatctcttcatccactggttgtatcatctcaggcccatcatatttcttaccgctccttagggtaattgccttgcagttttccttaggattaacttcagttgtactaggcaaatttccttgaggaagggttgctacctgagttgctagttgccccatttaagtctacaaatc

SEQ ID NO: 287297 - DNA, 699 bp, Cannabis indica
ttagttttcatttttgaattttaaattttgatgagatttttaaggttgttttaacaaccctaaattttcaaaatttagttggttagtttaaaataataatttaattatattaatatcttatttcacatctgttacatggacaatgtttgtttatttatattgtttattcaaaacttttttttaacaaacctattatttatttgatctaaattgctatgattaacttgttgacagatccaatgatctgattttaatcatagtccaattgtcaatagatcctataaataatttgtaacaggtaaattttgtacttctttcatctgtgtaaacctagtaacatgatagggcccatcagaatcatttgacctgtgtgagcctatatgtttgcttttgggcttagatgcatataggaagcccatttaagttttaagtaaatggactaggttgctaaaataaaatttcacttaggtaattttatttaggcccaattagaattgggcttattcaattaataacaattatttatttaatggttaaattcctctcctttgggccttgtgtgagagttagggggccaatagcagtgggtacgacatactgaacccagccctccctcacatgaaccaccctaattgtgaagccccattttccttatttaaataattgtattacgttaattatattagtctaacctaatta

SEQ ID NO: 287298 - DNA, 92 bp, Cannabis indica
aattgacgtttttgagaaaataggaataaaaattgtgaaaactgcaaaatccaagttctctctctcttttcttcttcataatttcgaaacct

SEQ ID NO: 287299 - DNA, 472 bp, Cannabis indica
acatgtgaatccaccacaagctcttccacattgggagcagagatttgtggaaatgcaagaatgtatctgccagcaagatgaagaaattctgagactaaggcaacagggtcctcctgcagtgcctccaccgcaagctcaggccgttatagttccagcggtgccagtgaacaccttttgctggcaatcatatggagccgttatatgagaggtttcgcaagcaagcacctccggtgtttctgggaggtccatatgtgatgaaggttgagcagtggctcacagtaattgagagaattctgaatttcatgggagtcgttggaaatgatcgggtaacctgcgccacttttttagttccaggaagacgctctcatgtggtgagaattggtgtccctcactcgagacgtcgctgttatgacctgggaagagttctgagatctattcaacgccaagtattataattgttgggttttgtgcc

SEQ ID NO: 287300 - DNA, 717 bp, Cannabis indica
aaacaccatgcagatccagagaccaataccacgtatcaattgtagactcctgaacaatgttggtcttcaaaattaactccttatcccgatcattgaaaatatcggagatcacttccaaatcccaacatctttctcctggcaccatgagattgttaaccttccactgctccataccattagcgatagtagtgacccacggatgagaagtatcttctaaccacggatcaaactgaacactaatacttgtaccaggaccaacaacccgtcgagcgcccttcttgatcagctcttgtgtttcgaagatgcttttccaaataaaactaggattcggaccaagagaagcagtcaaaaacgacccatgagagtaatatcgagccttatagacccgactaaccaaagaatgctcattcgagactaatctccaagcttgttttccgagcatagctaagttgaaatcccgcaagtgacgaaaaccaagcccaccatgatgtttatgccgacacatatgcttccaactagaccaactgaccccacgtttttgattggagcccgaactccaccaatatttactcatcattccttctaacttattacaagtttccacaggcaacaagaaaacagacatagcataagtagggagagcttgggcaacagttttgatcagcacctctttacctgctttagaaagcaaccgaccttcccaactcaaaattcttt

SEQ ID NO: 287301 - DNA, 751 bp, Cannabis indica
aatctcttgatttgtgttgaattgagcttagagaataattcaaggatgttttacatgcttgaacttgatttttatttattgtttttactgctggaaagtgttaagttgttgaagatgaagctcttattcaagagcttgatgttaccatgaataagcaagattttgagatgtttttacaatctgaattcttggattattatgggatttttatgcatgaaatatgttagttgagcatctattatttgctagtaatcttatttgttaatttgaaagtttggttgagaatttggggtgaaaagattggattttcttgctaaaaatcgtgttcaagcttgctggtttcgaggtttgcaacccagatgctgcggcatgctgtggagcatgccacagcccgcccctgctgatggaacctgggggttcgtcccaggtgtcgcggcatgacttgggcatgcctcggcccaccctcgagtttttgggcagtttcaagtcaaattttaaaaattcataacttttgattccgaacttcgatttgggagttctttatatcgttgcaaagctcgttccgagctctatatgattatctaaattttaaatgccatgattgaattttatgagtatggaatcaggggttaaccctaagtgtgaaatatctcggatttgtgtgactaggattagcggcacctaatcaggagcacccggggattcagaatctctatctattgctggacaacaggtaagacagtgattagca

SEQ ID NO: 287302 - DNA, 622 bp, Cannabis indica
cctcctcagcttccttcttggccaagtccgcctccgccctcaaggtgtcggacagagccgtactcttggaagtagtagatttagcccgggagtaggtataagccaacttcaaactggtctgcataaaggaaaagttcagcatatggagctaagtatgaaaagccaaaagggaaatgtcgaaaagaaaagactaaccctggtaagctccttcaagactccacccaccaacacatccagagatgagtcgtcagcatcagccagctgctcaccgacctcaggaaccagccggttcatgtagtgagccatcacctccttgcccttcttggcctcaggcagcacgggcatgggtggagttggtgccagcacccgctcaggaatcctcctgaccagctcagacccacatgttggtggcccagactccttggacttggcagacttgggagtggaaggatttgcagtagtcagctcctcagaaaggtcaatgacctctccagaaggcctcctctctgaagacccctctccgcccttagacttcttagccggagggaggcgctagagcttccgctcatcctcttccttaaggcacccatcatctgccgagacatgtctgcacagagcaaaa

SEQ ID NO: 287303 - DNA, 858 bp, Cannabis indica
gtgtgacaagggcgattcctgcactggatagttgatctgtagctgactcgtccatatgtagtttccaaggcggcttgtcttcactgttacttggctgaggtatttgtactggctcggggtcgccttccgatatgatttcttctttgcctgtgcattctaccacaaagtctgctaaggcctggcctttgattgctgttcggggttggaaagtaatttcatactgacccagctccactgcccacttgagtaaccgtccagaagcatctaacttttgcaatatttggcgtaacggttggtcagtgtacacccgaacaggatgagcttgaaaatagggccttaactttcttgttgctagaatcaggcagtaagtgagtttctctatcaatgggtaccgcccttcgacctcaataagtcttttactaatgtaatagaccgggtgttgtatgttgttttcctctctgatcagcacggcactcacagcatgctctgtgacagccaagtatatcccaagttcttctccgtccagaggtttcgagagtacgggaggctttgcgagttgcgtttttagctcctgaaaagctttttcacattcctctgtccactcaaatttcttatttcctcgcaggatgttgaagaatggaaaacacttgtctgttgattttgaaacaaatttgctgagtgcagcgatccgaccagtcgaactttgtacttccttggttcttgttggcgacttcatatccaggagggcttgaatcttctctggattggcttcaattcctcgggcattgaggataaagcccataaactttcctgagctgacaccaaaggagaactttaagggatttagtttcatgttgt

SEQ ID NO: 287304 - DNA, 322 bp, Cannabis indica
aaaaacaaagaataaaaatacattcatagcacaatttagaaatataaaaacattatttgtattcagttggataatagtttctccatagttgtgcgaccgtatataaaaacttgaacaattaaaaaaacatacaactttaggaaatacaaaccaatacaataaacatattataaggactaaatgtcaaatatcctaaaagttttaaaccaggtccagagtataaaatcaaatataatacatacattcaaacaataacactaactattgtctgataatagattcaaccaataacacaaaatagtcaccaaaataaaagatccta

SEQ ID NO: 287305 - DNA, 739 bp, Cannabis indica
tagtctgagtcccagatctagacaaggactagtggtctgttctaggccccagtactcgaatcccgagtcaagatcttgatcactgtgacgggtctcaatctggttctagttcaggtcccaggtcccatttctgagtttgggttcgagattgagactggggtgcggttctaggtcccgacccttgttctgggtccctagtcttgctccatgtttgggtctgagctcaaatttgggttcgggtcccgagtcatggtttcagttgggatccgggtgtggctcccaattcgggtctacgtctgattcggagtccgggtcctggtgcggttacaggttttgatctacatccaatttctgttatgattcaaagtccaagtcctagttcaagtcccagacagcttcctgttttggttccaattttgatcacagggtacgggttcgagtccacttttttgtttgggactgggttcaggtcccggtgtgggttcgggtccttgtcagggttttggtccaaggctgggtcccaaatccagacaccgactacgagttttgtccaagccctgggtccatatccggatcccaatctcgggtcgcagtctggttccatttttggtgtcaggtcacgagttgggtcctaggttcatgttcgggtctaggtcggtaactaggtcccggtcctagttctgtttcccaggtccctattcttattatgggtccaggtcccagttattgtgtgtgtttg

SEQ ID NO: 287306 - DNA, 595 bp, Cannabis indica
ataggtgtctttatgaggtttaacctctttcattttttttttaaaaaatagtgctttaaaaagggatgatttgacaactttattattacttaaatttgaaattgaagacaactcacccatcacccacgtgattcccattcccaagcttataaatgtattttgtttctctctctatctctttttgtgggttgatgtttatagaaaaattcttgagattggtgtcaagataaagaccatcaaccaagaactttacataaaacccttctctccattcttcactatttcaaaaacttacaaagctcattcctttcattcattttttcacttgagttttgagagagaaaataaagatatatatagagagaaattttttgcgggtgtgctgagagaaaaaacttgaaacgatgatgaaggagtgtggaagctctcttggtgaagagagcatatctcagtaagaatatcttcaagaagaacaatacagaggaagaagaagaacaccaaacaactcaaactttctaagtaaaaaaaatctctttttttctttatttatttttcctaaaacgacataaattttattgggtttttgttgttttta

SEQ ID NO: 287307 - DNA, 565 bp, Cannabis indica
gagatgagtgttggtcggaatatcaaacgataaacaagcaaatatgccgaccaggagtactcaacagattaaagaatggctatgtctaaagaaaagtcaaaactcaagaagttagaaaattttcttgagttacggcaaaaattttcatgaagcttaggataagcaagataaaaggcggacgcaatgcagtgcagagacacgctttatggctgtaaacccacatgaagacatgataaagaggaatcgcagaagtttctaaacctagggtttcctaaacatttttctacagcacagtgaaagttgcattcgaaatggaaacatgcaaagataagcataaaggaaataagaaacttactcaagattcgagtgtctgggttcgagcaacgtctatccaaccagcagctgtatgaaggcacttcggcaacttcaaggccagaaaatttcgttttcgctctggagcttgcttagcaaagaagggtgatgaaatgagtttatgtgccaatgttgtgggtatttataggcaagtcacgaaaaggggtaactgtctaaaagaaacctcagacgc

SEQ ID NO: 287308 - DNA, 442 bp, Cannabis indica
tgcatccaaaccagctcaaatctacctagatatgcataaataaacttctgaaaacaacaccaagcaacaacaacaagtgcagcaacagattccattatttccttaaaaaccatagctttgagttaaaattccataaattgataaaaccaactaatcaccaacacaatcatgcttgaatcaacattttaaaatcatgctctaactacagaaatcaacaacaacatacagcagcaagtacaacaacaaaactaagcatgcaaccaattcttacttgatttttcaagaaactaaagaggagaagagtaagagctatacctagagcttgaattgcacacaaaaatctgcttgaaaaccaaagaaacaccaagattcttgctgctcaaagaggggccgaaatagagagggcttgagagaaaaaagattttgctttcttttctaattt

SEQ ID NO: 287309 - DNA, 575 bp, Cannabis indica
ctcaccgtggtaagtgctttacagttttgttttcccttcatttttcttcttgggaattctttcttacacttgtgttattgttcagcttgctgctgaggctggccgcctctccaagaacatcattaatcatggcttcgttctgtctgattttggggacatgaacgacgtcaggaaggtccttcaggacctcactgcggagaggcagctctaccaggaggctgctgagcgccgggaggcggctgccaaggccaatgaggaggaggccaaacggagggaggcccaagcggaggccatgatccgggacgaggcccagcggagggacaggctggaggcccagcatcaggaggagctgagggcacaaagcgaggctgctgataaggccaagcgggagctccgggaggccagggaagctttggacgaaatggttgccaaggtgagatccttagaggaaactcaccaggcgaacttagagtccaaggccgctctagccgcggagttgaaggagctcagggacttcaaggagcaaaccatcaagaaggcaaaaagagccgagctcctttctcctgtttcctgcg

SEQ ID NO: 287310 - DNA, 520 bp, Cannabis indica
attagatgttaatccacgtgttcctcgaatatgttgtgtcattgatcttaaccaaacacattctcgacttgcctcgtgaattgcaagtatctcagcatgatttgaggaagtagccaccagagtttgctttgtggaccgccaggatatatatctagcagtgtcaccgcaagtgaacaaatagtccagtttaagatctagctttatgtggatcagataaatatcctacatctgcgtagccaataagtcgtgacccacaattattagaatagaacaatcctttatcaatagtaccctgaagatagcggactatgttgcttaatccctttccaatgtctatatgttggagcagaactaaatcttgctaacaaattgacagagaaagctatatcaggtcttgtacaattagcaagatacatcaatgctcctattgcactaaaatatgatacttctggaccaaggagctcttcatgttcttttctaggtcgaaaaggatcttttctacatcaagtgacctaactac

SEQ ID NO: 287311 - DNA, 577 bp, Cannabis indica
taatttattcatttagatcatttcggaactgatttcatgaattttggtcatcggtgtcgtttttcagggcagtttttcaaaaaaaaaaaaaaaaaggaaaattaagaaaaatttaagaaaattccaaaattttattattttgatttatttttggaattttattttatttccttatttttgttgatttagtcaattaaattacatttgttttaaactttccattcttatttaacatatatcttcatatattatatgttatttagtaataaattattatggaaagtttttaacttggtaaattaattacatgctttatttttacatgtaattacaataattgtgatattttaagaatgtgaatatttaattattctacaattaagtgcgcaattattatatttatttaccaattaagtaatttactgattgaattaattgataatctgccattaagtacattctttaattttgcatttaattcatttcatataattaattgtactaatttgtatatttaccttatttatacaaattaattattagtgcacaaatatttaagatattatatggtcataaa

SEQ ID NO: 287312 - DNA, 599 bp, Cannabis indica
aaaagaagaaacaacttagtctcggtagagtttaatcaaagaagacagttgcttggacatctcatgctggacttcttccattgctccaaggcgattatgcacattctgaagttcggacttgacttccaggagttctgctgcagcagaacttgaacttgcagcagcagaagcagcagcagcaccagcctttggtcgtttttgaaacacaccatcaaagtattcagagggctggaatgtaggtccactgataggaggctcaagtgtttcatgtgattgggccacattcttctgagaagataaaaccttataaattagatttggaaacacaagtttaaaggttggctttttacctcttcggaaggagacaatctggttcagaatgtgggaggccaaatcaatggaagttccaaaagtgatgcggtataagagtgaagccacatcttgagataccaaggtcttgttgaattaggaacccaattgcttaatgcaaaccgcataagagatgcatgagcaaaagtgaggtgggtgattcgaagactctccctggtttcaactcagaacgagccccagtgagttcagagtgcatcaactcacgatcc

SEQ ID NO: 287313 - DNA, 516 bp, Cannabis indica
ttgtgtagtttgagcttctagtattagtgttaccttaaaatgagaataacttttctatggattggacttgagatgagtgacaattgattgtcataataagaaaaagataaaattattaatgttattttagtacctttgtcatttgatttgactacaccatttgatcttttacaatctccttcctttacctttcacgtgggcttttgtattgtatatgataaatatgttttacttctttaagaagtttggggtcttgtcccttgtagggtgagctattagcaaaataagctacccaagtgtgtgtataggcgtgagtgtctattgaagtgggtaaatagctttgtatttatttatttttttgttggcaatatataaggctttgacatttggaagaccttaagagcaaagaagagagtgttattttctaaatgccaaagggttgattgttgtaagctagataaataattttgggtatttcctttcttggaaccacttgatatcttatttataagagaa

SEQ ID NO: 287314 - DNA, 565 bp, Cannabis indica
acatcgagaaaaatgtgtcagacagcttgcttaataccttgttcaatattcctgggcgtagcaaagatggaatcaaatcccgcttagatttgaaagagttagggattcgttccaatttacacccacaagttgttggtcgacgaacgttcttaccaccagcttgtcatgctctaactaaagcagaaaaacaatctttgtgcggttctatctcccaggtgaaagtacctgaagggtactcctcaaatgtctctgattgggtagatatgaaaaaattaattttgagtggtctgaaatctcacgatcatcatatatttattcaacatattctaccagtgagtatcctgttggaaattaatttgccacgatctagatttactaacaagtatgtttaattaacaccctaatatgaattctaaaacaaatgaaaataaacacatataaagtttagaaaaccttacagtgggtgcagcggaataatatgactccttccattcaaatctctagcccttaattcctttctgtagcagaacataatcaagatctgaatctggatcttcttttctcc

SEQ ID NO: 287315 - DNA, 534 bp, Cannabis indica
tcttaagctcatcacattaggaacacaaactcgagcttttgataacaacatttcactgtttgaaactgaaaagcctctaagccgaccagccattacttcgtctcgaaccttaactagctcgggatcttctagttgtgcctttctgattctctgcaacagatcagattggagtgtcaaattatgcaattttccaactatgaactcaatccctgcaataaccatttcagaggctaattgaggggctatcataaccgtggtacaaacctgcccgggacctttcctgcttaaagcattggccacaacattggccttcccggggtgatacagaatttcacagtcgtagtctttaaccaattctaaccatcttatctgcctcatattcaaatctttctgggtgaaaaagtatttgagactcttatgatcagtataaatctcacacttttcaccgtaaagataatgtcaccatatctttaaagaaaaaaccacatcagtgagttctaagtcatgagttggatagcgctgctcataatcttt

SEQ ID NO: 287316 - DNA, 851 bp, Cannabis indica
tttttctaatatctaaatgaattttttaataaaaactaaataattttttaaatcgcttaatcagttttaattttttttttttaattttcttaaatcattcaaaataatttttttttaagatactaaattaattttttaagatttaactaaaaaaaatattgaatctttttcatatttattttaagggggtacgatttgatagttatcaaagtttagggggcgaaattactaatttacaaagtcacattagcatttaaactaaataatgggacagaccctataaatttttgtaaatgtaaaaattcaaggatacttaacaattcttatattcttaagggtaaaatcaatattgtgcgagactggaattcgtgtttagggctggattaaatttatatgagatcttataggtataaggtgatccgtgctgaggatgtatttctttatgcattgattgttgttgacactatctggaggatgcgtaatgaaatggtacacaataacactcatccagatgtgatgaaatgtattgacaatatttgtactgctgttgcagagttacatgattctttcttgcctgcttctactccgatctcgagggagtcttagaatcctcctcctcaggattggatttaaactgaattgtgatgtaagagtgggcttagagactatgtgcattgttgttgtagcaatgaatcatttgggcaaggtggttcgggttaacacgtcttggttggacttctcggatgcgttatgtggagaagttgcagcctgttgcttggctgtttcgctggctatggatttagggtataagtatgttattgtagagattgactcgagacaagttattaatg

SEQ ID NO: 287317 - DNA, 792 bp, Cannabis indica
acttatcaaaggctagtgaatatgatgttcgcagatctcattggaaagaccatggaggtatatgttgacgatatgctcgtaaaatcacaacatgcgaaggtcatattgcccacttacaggccatgttcgatatactgcgacgatataagatgcgtttaaatccactgaaatgcgtctttggagttggctctgggaaattccttggtttcatggttaatcagcgaggaatagaagccaatcctgcgaagatcagggcattggtggaaatgccatcaccgaccaagccaaaggaggttcagagcctcacaggtaaagtcgcagctttaaaccgctttatatccagatcttctgataagtgcaaggagttttttcagattttgaaaggcaacaacaggttccattggaatgaaaaatgcgagcaggcctttcaagctttaaaaacgcacttggggcagcctccgatcttgtcaaagccattgtccggagaagtcttgtccatctatttggccgtctcagaatatgcgattagttcggtactaatacgcgaggaccaaggacgccaatacccagtgtattacgtcagtaagcgattactggatgccgagacacgttatccccaaatggagaaattggctttcgccttgataatatcctcaagaaaattgcgaccctatttccaggctcacagcattgaagttttgacgaacttccccttaagacaagttctagcgaaaccagaagcatcggggagattgttaaaatgggcgatggagttgagtcagttcgacatca

SEQ ID NO: 287318 - DNA, 516 bp, Cannabis indica
aggggtaccaaggataatatgttgacctattagcgagctgacactctggatatagttgagttcagtgacgctgatcatgcgggatgcgtggacgataaaagggtccacttcaggctacattcatatgatggctggaggagctgtatcgtggaaaagtgtcaagcagacactcacagctttatccgcgatagaggcatagtatatggcgtgttatgaggctacttgtcaggcaatatggttgcagaatttcatttcagcactagatgttgtagcctttatcacgaggccgctgaaattatattgtgataattctgcagcagtggctttctctaagaacactagaagtacttctcgctcaaagcatattgacataaagtactattttgttaaagagaaagttacagagtctcttatttccattgaatacacgcctagcactagcatgttagcagacccactaacgaaaggcttacccatatgtgtatttttggagcatgtttgtaaagcccgcttagt

SEQ ID NO: 287319 - DNA, 499 bp, Cannabis indica
acaggagaaaaagtatcacagtagtccactccgtaggtttgagcataacccttggcaacaagacgggcctttaagcgagcaattgtgccatctggattgaatttaatcgtaaacacccatttgcacctgatggcctgttttccggaaggtaaatcaaccaagacccaagtaccatttgcaactaaagcattcatctcttctatcattgcagcaagccaaccaggatgagacattgcttcacgaacagttttaggaatagtgatagaatcaagagaagcaataaaagagcaagaagaagaggagagatgattataagacacaaaagaagaaataggaaaagtacattggcgtttacctttacgtagtgcaatgggaagatcatctgtgatttccggatctgatgacgaagatgcaggtgcaggacatgaaacaggaggtggaggagggcgcctagtgtacactataggaggccgagggagtggtggaggtggtggaggtg

SEQ ID NO: 287320 - DNA, 307 bp, Cannabis indica
acagagataaatggttgagtactcatttcacttcgctgaaatatcatttatacggggctaagtatactacttgtaagactaacttaattgattttgattaattataattcttaaattagataagcaagggcaaaattgtaaagaaagagtttctagggtatatttgttaactaagactttggctagtctaattaataaatatattaaatgacaatattatttaataattaattttagttattaaatagttaaaattggcatttaaatggttgaatttgaaaattggcttttttgagaaaatgagatg

SEQ ID NO: 287321 - DNA, 665 bp, Cannabis indica
tatgttggatatgtttcaatggtgtttgtgtgtttttacagcgttatcgatgaaatgtcgataggatatcgatatatgtagttttctgtttgtgtgtttgaacattgttgtcgacaggttgtcgatatcatgtcgacaatttgtcgatggttttaccttgtttgatattatgtagttttgccatgtaatgtcgataatttgtcgactatatgtcgataggttgtcgataataagttgtagttgattcttatggtagttaattgttagaatgtcgataatttgtcgactatatgtcgataggttgtcgataataagttgtagttgattcttatggtagttaattgttagaatgtcgataatttgtcgactctatgtcgataggttgtcgataggaagttggagttgattcgtatggtagttaattggtataatgtcgacaatttgtcgactgtatgtcgataagttgtcgatgttggtcgtttgtcactcctcttatgataatgtcgatagcatgtcgattgtatgtcgacggtttgtcgaccaattaggtggtcactgaatgtttgataatgtcgacagaatatcgacatgtcttaacttttttgacattaaaatgtttttggtttttgttttttcagatggctcccagactcataattccagca

SEQ ID NO: 287322 - DNA, 678 bp, Cannabis indica
aactctccgccaggtaatagggttccaaaccctgattcataactatcgtgcggtctatccaacttactaaaaattctggctaccacataagagtgagtggccccagagtcaaacaacacagagaaataagagttgttgaccgagagctgacctgttaccacagaagagctggcttctgcatcagcctgggttatcgcaaacaccctggctggagtgggtttcgctgcagtcttcggtgctttggttctgagttggggacaatcccttttataatgccctggcataccgcactgaaaatacccctgccctctacactcccccagatggtgccttttacaactagggcactctgggtaagtgtatcgggtctgcctcgaccctagttccctcggaacctcttgttctgacctgagccactggatgcagtaggtgcctttcttttctgatcagtggtcgagccactacctcccctactaaatcctgatgtaggaagggtgatagccccgccaacaactagagtctcccgagattctaaagtgcacttcactgcacccttacctcgcaatgccttatccaccatatcagcattaggtggtgttgtcatcggtagtaatcattaggtcgtgtctgattttttgcatttaacccgtccagctacttctctttcttactgaaatc

SEQ ID NO: 287323 - DNA, 573 bp, Cannabis indica
taccatggctctagtgccagttgttggaaattattttaccaggatctagatttactaacaagtgtttgattaacatcctaatatgaattctaaaacaatgaaaacaaacacatataaagttagagaaccttacagtgggtgcagcggaataatatgactccttccattcagatctctagcccttgattcctttctgtagcagagcataatcaagatctgaatctggatcttcttttctccttctttgatgcacaattcccatagtcttacatactatgattgagataccacttgatgtgtgtgggcactactcatcactcaaggaattttgaaaacagagaagaaagaaagagagagagtggcggcttcatagtgtttgagaaaataaacagtaaagtgtctgtcaaacctgaagcctttaccttctatttatagaataccacatagggttaaagttgaattatttggcatttaaaaatgaaaaataaaatgagaaatagaagcttaggtggacggccatacatagaggaaacaacccttctgttgggttttatgccctaaataaaactcttt

SEQ ID NO: 287324 - DNA, 545 bp, Cannabis indica
gagataaaacaacctaaactttaaattaaaacaaaattttatatggttacttattcgattagttactgttgctccagaattcgcccaaaatacgtggaccagtcgagaggggacacgtggatcagataacttggaaagatttgctaagtctttgtgcgccaccaggaagcgctgttagcatgggtcccggaggaggcacccggagtacaaggtactccaggaagctagtatagcgtgaaggctctccgggatatgtcaggtctctcccgagcaatcaagtcgcatttaatgctgcatgggaggaagcgtgttgggactgtaacacgcaataaagtctgacggcacaacccccaaccagcagcgctacagtaatgatcatttaagtctagcgacggctactctgcgaagagtcacgtcaatcacaaggcaaaaaggaacgattcttcataaaagaccctaccagcacctacgggagtttgtaccactgcatcacccactggtagtattcatcggaaagtagcccaacctttaattggagtacttac

SEQ ID NO: 287325 - DNA, 774 bp, Cannabis indica
gcatatttttttgacaaaaacaaaagaaaaaaaaaacaaagtacatatatatataagtcattctattgtacgagacggcccggctcctgctgcatgatcttcagagaacgtgggaacttcgtgcatattgtcaaatgaagtactctgattattaaaaatgggagatgttagcgagacgggatgtctagcatctaaacatagacgaaaccatatctggatttcagtctttaacatttccacttccctattaaactgctcacaaaggacatgcacgtgtctatcatgttcgttgaggacacgcctcatctcagcatcttttctagcaataatagtcgacgcctgcagcagttcgtttctgagaaactgtgttctcgaagacagctgctcaacccgatcagttagcccgtccagttgacgcagatgatcatggcactccctagcccgttctcgagtgacatcctctgaatcaaaaagagaatgctccaaataatataccttatttcgtaaatcattaaggtacgagagagcatcaggagggagttcttttagttcagtgatgggattcatgctacgtgcaaagtgaggaagtgaattgtggctttcagaagacataagaaaaaaaaaaaaaaaaaaaaaaaagaagaaggaagctggatggaagaatgaagattgatgaagaagctagatggaagaagaagatgatgcatggcaatgaatgaaatggtggtaatttataggcagaggagcttacttcccatgcctacacgtagtaaa

SEQ ID NO: 287326 - DNA, 372 bp, Cannabis indica
cagtcagcctcacatcaagtctcagacggtcgctcttgacatgtgtccccatccaaaggcaaaatcagctcggatgaagtctacacgcaacttcagaagtcccgtacagacttgggggcaaatgttgtcccaatttctgaactatgacgtggcatcacgtgatttgtcacacgtggagtccacttggaacatctgctcgggaagacaggccgagcaggatgcctcgctggcatgcccagagcaaggtattcagcgatccgcgcagagcaaccaacacttagcggatttagctttcgcatcatgagtcatcagcacaatccctataactcagggatcaatttacgtggagatggcatacacacgatcccacta

SEQ ID NO: 287327 - DNA, 984 bp, Cannabis indica
gtaaaaaaaaaaaaaaaaaatgaaagacaaaatatgtttagtgtcaaaatcaaatttcatctctaacattcacttagttctattaggcgtgtccatttcatttgcctaatgggaaaaaggaaagggcaattttcttttattattactgaaaagaaaaagaaaaggtgagagtattaagcaagttactgattcaaaaggtaggccaattaattaatttgggtagctaagaaaggatgagaccgacaataaaaataagatgacttaaattgggttggtctggtttacttttggtacaacatttcattttttttttcttttgaagctacttattttttttccatgttactattgaattatataatatatcacatagtacaataatgatgctacaatacaattttcaacccaaacccataaagagaaaaagtgtaaaacctcaacgatgagaggtgacccaagcagcaataccaccattttcggggcctataactaccactaaatagtacaaacatctgcatacatataccaatatataaattttcaaccaccataagtttttttttatttatttaggttagtccaacataagtttaacttatagggtaaaagagccactaaggctagcttagtggtgagggagggatgggaaaaaagggagaggtcatgggttcaaacctaggactttgaagctattaagctattaactgattgtaaaatactattacgctacactcaaaaaaaaaaaacttataaggtaaaagtaatgaggaaattacaaaaatgtatggaaatttaatataatttcaaaaatatgatagaaaaaagtaatataacaaagtatggtattttttgataaaaaaaaaggttaattagtaatttttccccctaaactttgacatataataaatcgtgccccctgaacttttttggccgttaaaaattcccctcgaactattgagattgttaaatttaaggacttttgtc

SEQ ID NO: 287328 - DNA, 831 bp, Cannabis indica
tgttaatggctgaagtaatcctgccggtcgttgatgctcagctttaatttgctgacaggttaagcacttagtgacgtagtccaccacatccctcttcatcccataccaccaaaaatagggtttcaagtcttgatacattttggtggttcctggatgcaatgagtaaggggtagtatgagcttcttccagaatttctttcttaagctcattgatatcagggacacacactcgtgctttaaacaacagcattccactgtcagaagctgaaaagtccttagctttgcccgctaagacatcttctcgaatcttaaccaattcaggatcttctaattgggccactctgattctttccaacaaatctgactgaagtgtcagattaaataatttctcagtcaccaactcaatgtttgccctagtcatctctgaggctaactgaggagaaatcatgaccatgttgaatatctgatcaggtccttttcggcttaaggcatcagccacaacatttgcctttccagggtgatacaggatttcacagtcatagtctttcaccaactctaaccaccttctctgtctcatgttcagatccttctgagtgaaaaagtacttgagactcttgtggtcagtatagatctcacacctttcaccatataagtaatgtcgccaaattttcaaggcgaacaccactgctgcaagttccaggtcgtgagttgggtaacgctgctcataatctttcaattgtcgagaagcataggctatgactttatctgcctgcattaacacacagcccaaaccctgccttgatgcatcacaatacaccacaaacttctcttg

SEQ ID NO: 287329 - DNA, 821 bp, Cannabis indica
cagggtctccttcttcaacagactattcaatgaaaaagaaaatgataatcaagttcaagctttaagtggaaagctagaaaaaagaaaagaaaaagggtcttacattggatactgagttaaggatctcatgaagacgagaggaggaggttgaaggtgtaagaagctcctcctcctcctcctccgatgacgagaggtgttcgtcgtgtgtggatttcgtggacattgtggattttgaattgaaatgagtagcaatctccactctccactgtggcgctggaaattgaaaaccacagatttatttgtttttcttaaataaataaataaagtgtaaatattaaagtcatgtaaaatattaattaattattcaaaaaaaaatatatatatttaattaaataaaaagttagaaagatttttttttttacgaggagctaattacaatctcttattataattttttagtcaatctctacgttcgaaatcacataccggaatattttttttaattttttttctataacgatattcgttatagttacagtatcatccttataaatttttgaaaaatttctaatagtttacagtgccgaaaatagaattcttgatattccagtttaccacgcgcgtttaaaaaatttcaaatgtatttcggctactataaactattcaaaaattttaaaaatttactagaaatgatattataagcataacgaatatcactgtgaaaagaaaaattaaaaatatgttgacatgtatttttgaccatggaagttgactaagaggttgtaataggaggttgacggtagcaatcttttttttttttt

SEQ ID NO: 287330 - DNA, 579 bp, Cannabis indica
tcttcgtctgggttctggtcttagtctgagtcccagatctagaaactgactactggtctgttccagctcccgttacccgaattctgagtcaagatctagatcactgtcacaagtctcggtctggttctatttcaggtcccaggtcccatttctgagtttgtgttcgggatcgagactacggtgcagttctaggtcttgaccctcgatctgtgtccctagtctggttccttgtatgggtctgagttcaggtttgggttcgggtcccgagtccaagtattggttgggatctgggtccggcttgcgattctggtctaggtttgatttaaagtccaggtcctggtcccgttacggttctggatctaggtccaattttagttatgattccaagtcaaagtccttgttccagtcctggtcaacttccagttttggttccaattttgggtcatagggtacgggttcgggtccatttttgggtttgggacatggtttaggtccgggtgtgggttcgggtcctcgtcagggttcgggtccagggctgggtcccaaatccagacaccgactacgggttttgtccaagcc

SEQ ID NO: 287331 - DNA, 567 bp, Cannabis indica
ccggaacagcgtcggtagcgaatttcgccaataccgacgctgaaagcccttaaaaaccgccctaaagcccaattttgtagtagtgttcaatcgggcaaaaatttcacagcatgtcgacaaaatatcgacatcctgtcgacattcagtcgacaatacaaacttattatcaatttcctaaaactgtcgacaacacatcgacatactgtcgacaagttgtcgacaataaagggcaaaaaataaactcaaccctcagtcgacatcctatcgacatacacacaaaatcctatcgacatacaaaaacatcaatacaatacaaacagacaccaattctatcgacatcctatcgacatacaaacgatatcctatcgacatacaacaacagcaatacagcacaaacaccaaaaccatcgacatcctatcgatattctatcgacatattatcgataaccctgtaacaatcacatataccattgaaacaccaatatctacaacctaaagagcacaaaatctataaaaattccactaatctcaataacatgcaataattggcatccaaatctatgaaaa

SEQ ID NO: 287332 - DNA, 521 bp, Cannabis indica
ctctttctttgcctgggggcaatctttcttgaaatgccccaccatgccacacaggaagcatgtcttccggttacattctcccggatgatgtttcttgcaccatggacactcatggtaagagtaaccctggcgtccacctctgccttggttcccacgaaaccgcttactttgccctgagcccccagaagctggaataacttttcttttctgctcggtggtggagtcaccaccatccctaccataaacaagagtaggaacagtgggggttcgaccaacactcggagtcacccggggctcatgaagaaatttcactgcaccctcggctcttaaagccttttcaaccatttctacatacgtagttgcctcggtggtagtaatcaccagatcgtgcctaatctttgcactcaaacccgccaaatatttctctttcttactgaaatcagttggcacaattcccgctgcgagcttggccaaacggtcaaatttggtcgtatactcagtaaccgacattccctcagttt

SEQ ID NO: 287333 - DNA, 674 bp, Cannabis indica
aaagtaattggtatagatgcagcttggatcaagactaagcataaaggtgtgttattagtagcaactacacaagatagtgaataccatagttaccccattgcatggggtttggttgacagtgagaataacacttcatggacatggttcttagagaagttgaaggacttgatacctgatagctcagacttatgttttgtttctgatagacatcaaagtattgaacatgcagttcgtcgtgtttatgttatggcttctcatggggcatgttattggcatgtaaagcaaaatataaaacaccgtttcaaaagtgctgctgggactaaattgtataagaaagctgcaatagcgtaccgtatcgaagagtttaataaacacttcgaccaacttcgcaaaacatatccacgtgtcgctaagtatcttgagaatgatgtcaagttcagaaagtggtctagagcacattttgttggtaaccgatatgaagtcatgaccactaacatagttgagtcagtgaacaatatgatgcgaaaggccagagagtatccaattattgctatgattgattttatcattagcacgatgggacaatggttttttgaacgtcggcgggaagcatgtgtagttacaactccattaacaccaaagagggaagaaatattacgcaagagatgggatga

SEQ ID NO: 287334 - DNA, 582 bp, Cannabis indica
agttcttccggctaatttcctttagcatcctcaagtttcttctttagtgtatccttcaaggtcttgttgactgcttcaacttgaccatttgcttggggatgtgccactgcagagaagcttttgatgatgccatggttcgcacataaattagtgaaagattgactatcgaactgcttgccgttgttcgaaactattttgtatggtagtccgaactgacatatgatgttctccactataaagtcttaaactttcagtttttcctgtgcattccaccacaaagtcggccaaggcttggcctttgataactgttcggggttggaagttgatttcgtactgcttcagctccaccgcccacttgagtaaccgtccagaggcatcttgcttttgcagtatttgtcgtagtggttggtcggtgtacacccgaacaggatgagcttgaaagtaaggtcttagctttttgttgctaagatgaggcagtaggcgagcttttctatcaacggatattggccttcggcctcgatgagtcttttactaacgtaatagactggatgctgcatgacgttttcttctctgattagtacg

SEQ ID NO: 287335 - DNA, 828 bp, Cannabis indica
aaaaaccattttctctctagtctctctctccctttcggcctctttgagcagcaagaaaccagcctattcccttggtgattcaagctctctttagtcaaattttgtgatctcttgttgttggtatgttctctctagctctcctttaagttttcttgaaattttgatgaaaatgaagtgttgttgcatgcttgtttttgttgttcttgctgctgtggtttatggtgatttacagaggtttaatcttgttgttttaagtaaattagagctagtgtaatgcatgttaattgctttgatttcaagattgaaagtttttagttcaaggttggttttcaaagagaattttcgaaatttgtggctgtgtgtattgcatgagtttgttttggttttctgcagctttagtatgcatgattatgtggtttttatctagttttgagggttgtaagtgagctttagccaagtttgagtttgaaactcaaagcttggagctctcatggcactttttgtttctgtgcaatctgggtgagtttgttgctttagaattgttatttgggtcatatagatcaggtctggaagatcttgtgtgatttgggttggatttgaatgagttatgaaattttaaaatctgcctgcgaggaaccggaattccggttgtgcatccgaaaatccggatgggttttgaaaattcccagaaccggaattccggttggggaaatttcaggaacccttgatttcctcgtttttatgttatttggggtattgccatgctttttatcgatagtgaaacttttagttcctagtttaagtcccccggaagtgatttagcgtatc

SEQ ID NO: 287336 - DNA, 704 bp, Cannabis indica
tttgcctttaatttttaagtataagagagaagtagaagacaagagcacttatgaattagaaatggatttggttttatagagcagtacacatgttgggaatagtaagaaaaattaatggccactaaatgtgtaactgtacaagtgcaacccatgaagtgtgtaattgtcgacagaatatcgatattctgtcgataatttgtcgataacacactaaacaaaagaaacggcatacatatttgatatgatgtcgacgttatgtcgatagcttatcgatagtacacgtgtctgacatgcaatgtggcggttgggaatgtaggaaaaatttattaacattaaatgtgtaaccgtacaagagaaacgcatgcaatgtgtatttgtcgagtgaatatcgatacaatgtcgatagcttgttgatagtagaaaggattaattaccattgtatacgtgtctgacatgcaaagtgcattatggagtctatattgatagtatgtcgatagtgtgtcgatggtttaccgatgagaactgtcacccttactgttgatgtttttatcgacataatgttgatgagtatcgatgggatgtcgatatttattatttttttggtattttttccagtactcacctttttttgtttgaaattgcaggatcgacaacgtttcttgttgtatcatatacgatggtgtttggtgtgttgagggttataa

SEQ ID NO: 287337 - DNA, 534 bp, Cannabis indica
accccaaagaacatttctaaagcatcaaaacaacccagaacacacagatactaaaaatgccatgtgagctccaagctttgagttcaaaactcaaacttggctaaagctcacccacaagcatcaaaaccagtttaaatctactcaatcatgcatataaaaacttctgaaaacacaggaaatcgaccccaacaaacacagcaacaaaactcacattttcactttgaaaaaccatagcttttgaaccaaaaattctcaaactagaacaagggtaactagcatgcatttcaacctatctaatctcacttaattcagcattttaatcacaaaaacaacaacaacaacaactaacagcagcaacaacaccaaaaactagcatgcaacctatccactttcctcaaaaatttaagaaaataacaagacaagtttcaagaaccataccaacaacttgtgatcaccaaatcttgctaaaatgagcttgaaatccaagaaaatggccagcttcttgctgctccaagagggccgaaatagagagag

SEQ ID NO: 287338 - DNA, 754 bp, Cannabis indica
ctagacactgagtagtggtcaggtccaagcatcgatcccggatcccaggttccgacgtgggtcctatgtccaggtttgggtctaggattgggtcctcgatcccgatcaaagttctgagaccaatttctggtcctagttcaggggtccaattcctaggtctgtgtcccccatctatgttcaggtcctagctcccgttccgggtccaagttcgtgttcgggttcggtccgagtttaggtcgtagttttggttagggtccgagttcgcatcccaatcctagtcttggtctgggcttcgggtcccaggtcttagtctggttcttgggtcttgggttcggcccctgtgtccaggttcgggtcggagtgtcgtgttccgatttgggtctggtttggtttttagttctgattcctggtctgagtctgggtccaggtccggatcgtggtctgggtctaggtttaggtccaggttcgagttcgggtcccaggtgcagttctaggtctgggtctaggtcagggtctcgttacaaatctagtttccgagtttcgatcctggtctgggtcggcgttttggtcccggtgtcagtcttggtctaggtacacgacgtgtcaaggcccgacttcaggtcacggtttgggtttggggctaggtctgagttcggttctaggtttgggtccacgtcctagtcacggtcctagtcttgttcgatggtcctggtcttacggttcttgtttaagctctattttcgggtcctaggtt

SEQ ID NO: 287339 - DNA, 894 bp, Cannabis indica
gaccttttggttgtcccgtcgagggtttcgaaaaatgacggctgtaattattactttttattgcatttatggtgccacgtcacaaaactcctcggttttcgtgtaggcgtggccatcgttggccgttagattgggcgaccttaggcattctggttgccacgtgtcgtaatcccaattaatgagggatatgggtatttaaaccctttgatacgaatcaaaacttccatttttccctcttgttcttaacttcctccttccctccattacagagacttcaaaacccacttccagattttctaccactctttctacaatattctcaatctcagaagtgatcgagagcaatcgcagaaatcaaaactaaaggttagttttcaagtcattgcattttcgttttctgtttggagaaaaaatgctttactttctgggttctggtattttagaggcttttttaggaatgtatgcttgtatgtgtttatgaggctatgtgttttaggtaagaaacctgggtaaattcatagaatatgacctgtaaactgacataaccgcacacaatatataggcactgttttacgtcttgaatactcgcggatattcagatgaacaactcgaatattcgctggtattcagatgaacaatttgaatactcgcgtattgccaagatttactttcatttgactgttagctagatcttttaggatttttatatgtcgcgggctgagttgcgagggtatcaatcgccgttccaaatggtgggtgtatctcagtattctaatggtcatatatgcgattatatgccccttgagatactgaggtacacccagccatttgcaatatgcgatgatattcaaatgatcgtactctttggctgataggtagtctcggaacggtggg

SEQ ID NO: 287340 - DNA, 629 bp, Cannabis indica
acacataataatagtaataaaaaaagttactttaattttggaagaagaatacaaatgcaataacagataaaaataataaaagtaaattaaagcaaaaaacacatttcttatgcttaaatcattgattcattgttctgttaacctaaaatagaaacccaaagaaaccaaacgagacttacttccattaacatactccaagtcgggaatgacattcaatacttaacaatttgtttatgcatttaatatttcgtatacagtacttgttatatatatagctaactttaaattttgtttgttaatggtgtagacatggccaactcggaatcaggatctgattcaggcgcagaaaatgagtgtccaaccgtaatacctacacgagggccgacgcagatgaatgaaatatccaaactaatggatcagggcaaaagagtggccctcgaggttaatgacaaaggacaatactgcgggaaaagctatgcgaagctcgtatccactctaggagtcagatgccggcagacgatagggttgtcctataaaaactggaaagaagtcaacccgactctgaaaaataaagtttggaaagacatacaggtaagctgttatttgttagaattttgatttgtttttct

SEQ ID NO: 287341 - DNA, 576 bp, Cannabis indica
attcctacttgctatgtgctaataatttctgaattggattttgtgttaaaccataattgatttctatttattattttgtagtatcctgtatagccatgtcaaatcccatgttatcactcttgactgaaaataagctaaatggatctaacttcccaaaatggaatgagaacattaacattgctctcattggtgaaagtgccttgtttgtgttaacctagccatctcttgaacaaccgggtgacaatgcaactaaagctgtgaaagagaagttcgagcgttggcagaatgctaacaataaaactccatacttcatgctttccagcattgttgacaccttaaaaacaaggtttggaaaaaccgacacggctgcagaaattatgacaaagttaactgagctattcggtatggcatctattcagtctcgctttgacgcgactaagaaattcatcaatgcacggatggaaccccatcagaatgtgcgtgatcacgttctcctaatggcaagttatttccaggaagcccaaaatcatggtgctgaaatggatcagacaactcaagtaagtcttatcttgaata

SEQ ID NO: 287342 - DNA, 846 bp, Cannabis indica
caccttaatggacaaaacttgtaattaattatttggatataataattttaccccacagggattttattatatttttataattaattaggataatatattaagttaaattctcttaatttaccccacagggagttatgaggatttgatttaatagtgttatcacaaattttaattaaagatagatttcattcctccattattcctaaattaaatacttcattaaatctatcataaagttcatataattttattagatttaaaatttagcccacaggcaattttagatttaataaaattttcatcttcatcatgtttctacattggtaaaacatgaattcattaaagcctcaatttcttttaacatctaaattttgtaatcctattcttgcagctatttcatccacctctaaatatgctgaaatcactagtgaaatccctgagcttaggagtgacaacttcaaaatctggaaggaacgagttcttctccacctagcttgcactgacatggactatgcaataaggaaagatgaaccagctgctatcactgatactagcactgctgctgagattgcactgcgtgaaaagtgggagcaatctaatcgtctttgcatcatgttcattatgtccagaattcctatgggaatgcgtggatcggtggagccacctgagaaggtgaaagattttatcaaagttatggatgagcagtttgacacttcagataaatctttgttcatcaacctcatccaagagttctcgtccacaaaactcaccggtgttaaaggagttcgagaacacatttctaaaatgagggacatcactgctcatttgaagaaactcgacgttatc

SEQ ID NO: 287343 - DNA, 556 bp, Cannabis indica
gtttgctctcaaaaattttatcaactctgattttacttcgagcaacaaaccctttccaatttttagctttctggccgggatagctggatcgatctcgatctcttctaactcttccacaggtccaacattgctgcttgggtccccaagtcgaggatccacatcttcatcctcgccttgggaagtttcctacttgggaatgttttttcccttgtctgggctctggctggaggatatttccttcttagccttggccactgcaaggttgtaacattcccgagcagattgctgattccctctaagacaccctaccccatttttggttgggaacttcaggcacgagtgaaatattgatgtgacagcttttaagtcatacaaggctggtcggccaagcattacgttaaaggctgaaggaacatccaatattaggaactgtgccatgatagttatgctcgtcggagcttgtccaactgtgaggggtagccggatttgtcctagaggtgcaactccttgaccggagaaaccatagacaggctggaggcatggagtcagatccttg

SEQ ID NO: 287344 - DNA, 847 bp, Cannabis indica
cacatgtgcgcactgatttggggtagatcccatcatgtttactagatttatacaaagatgaaagaagattacaaaatttacctgttactaattatttatttgacctattgacaattggactatagttaaaataggatcattggatttgtcaacaagttaatcatagcaatttagatcaaacaacaacatgttttacaaaataagtttttatataaacaacaactaaaaaacacatgcaacaacattggatagtcggttataggatttatttaatttcaaaattcttaaataattaaatatttaatttcaaaaataaataaattaaattaaataattaattttaaaaaatcaaacctataaatttaaaaattaggtttataacaaacctaaatatctttaaaaaaattatcaactaactttttaaaatttttgttattttaaaaaatgaaataaaattatatatctaataaaataaaatgataaacaaatatcatttatctaattttataatttaatttaaataaaataacaaatttttgaaagttgacaaaatatctagttagtttttcaaaattatctagactattttattaaaaaaatattatatttttaaattgcaaataagatcattttatagacattatttaaataataaaaatataaaatatctcaccttaatttttattttatttttttaaaaaaaagtataaaataattaacttaaaaaaagaagataaccaattaagcaaaaaaatgtagatattatattatatatggatgttcaaatcactaaattaattatcaatcattaatgcttgattgtattttccttttattacattgattt

SEQ ID NO: 287345 - DNA, 615 bp, Cannabis indica
ttttcaagcttattttccttcaatctaagtgttcttcaagctttggtaaagtttctaaacctttccctttggtaatttttagaaaatgtttaaaaagatgatgatgcatgcttgattttgatatgttcttgctgctgtgaattgttgttattttcagaggtttagtattgttattttaagtaggttagagctagttaatgcatggtatgtgctttgattcaagatttgaagtttttagctcaaaaatatgattttcaaagaaatgtgttgaatctgttaattgcttgctgtagatggttgcttttattttcagaggttaatttatgcatgtttaagttgatttgggctgaattgaatgcatgttagtggggtttaaccaagtttgagttttggaactcaaagcttgggctttaatggcactttttgtttctgtgcaatctgggtgagtttgttgctttagaaatgttatttgggtcctatagaacaggtctggaaggtttgaggttgtttggatttgatttggtagagttatgaaattttgaaaatctgcctgcgaggaaccagaattccggttgtgcatccggaattccggatgggttttgaaaattcccagaa

SEQ ID NO: 287346 - DNA, 434 bp, Cannabis indica
cgagacacttgactttgactagagtgataggaaatttgaaaaattgggactttagaaaaactgaaaaaggtgaaaaaaaaaacatttgacaagacactacacctttaatctatagtaggggtgttcatcaaaccactcacactgcacaaatcgcatgcacctcaccacaccgcataagaagtgcggtttgaaatcctttgcagtgcagttgtggtttgtatttttgccaaaccgcgcggtcgatgcaatttgcagttttaaattttagtaattgcagttcaaactgcaccgcactatatattataaaattaccaatttttacaatattgattttttatttttttataaaagaacaaatgtatgtaatatatgggtatataatattattttttagagacaatgacttgatagtagtatatataatatgatgataa

SEQ ID NO: 287347 - DNA, 614 bp, Cannabis indica
tgctaactcgagattttttcatcacatgttgaatgcgagaaaggaaagaataacaatttcataaattgaaaggggggatggatcgtttatcgatgaagaagaagatgtggttgaagagatttttttaagagatacacctctgagaagacaagagggagaagtattgaaggaattgagtggtaaaaaattttggatttcttggcgggacaactacaaaggccttttgaagaagatgaagtttaaagtacggtctttagttgtgaaggcagtaaggctctaggtcttgatggttttagtattgcagtctttcaagctagctcggaagttattaaagaggatttgatggatgtcttcaaatcttttgaggaagatggaacgattcaccataacaattgatgcaacaacttggttatatggaacaatggaatggacacggaagtatggaggattgatcagaatatgcaaaagtatgcactgtaggggctttcattgtccgaatggacatggaaggttttctaagaattcgctgaccctactagctagtggaagaaacctatccttaacacccactggttttggatataaaaatcatttaagtgttgatagttgttgag

SEQ ID NO: 287348 - DNA, 569 bp, Cannabis indica
catgattatagttatcttattttaaatttaaattaggtacaaattaaaaaaaatatctaaattaaaaaaaatttaatgtctgaccataaatttaaaaataagataagatataatcaaatttaaaaataagataaaaaatcaagcaaaaagatagatatttacttgttttcaaattcaaattacagtaatgtcatgaattaattaaaaaaaataattaatttatttatgatatttagaattgaaataggaatactaaatgtctaaatacaaaactacacaaaaaatcagaaattaaatccatgaaatagcatgaaaaatcgaagaaaaacgaaaaaacttgcaagctgtacggacagtatgctgagcatactgcccgcgcgcgcgcagggaggtgcactgccaagaaacctcggcgcaggggtgaagctgcagcatacccgcacgccgagagggggttttagacacccctcggcacgttgctcggacaaaaccttgtccgaacacgcgtctgaccgaggatcactcggtttcgcgcgcgtgggtgggtgcatcatcctcatatttttttt

SEQ ID NO: 287349 - DNA, 535 bp, Cannabis indica
atcttaatttggtattaatattcttcatttttcattttgctgatggtttatgttattcggttgatgtaaattttgcattgatccatgtactatatcccctagtctaagtcttagtgagggtcactaaaatttggaacagcttgactgagtacatcgcacttggctgaccgtaacactgttgagtaaattttatatttagttacgattgaacgcaattctgaaggcttgagtttatagatgaataggtgggttggtcgcagcccttatcacttaatttgtgagtgaatacttgggttgagtgtaattcctatcacttactttataagtgaatagttgggttgagcgtagctcctattacttactttgtaagtgaatagttgggttgagcgtagctcatgtcacttattttataagtgaaaagttgggttgagcgtagctcctattacttactttgtaagtgaatagttgggttgagcgtagctcatgtcacttattttataagtgaaaatttgggttgagcgtagctcatatcact

SEQ ID NO: 287350 - DNA, 459 bp, Cannabis indica
atgacaagctaatagaacctagacatgcgagtctatattggtttatcgagactgttagatcattgggaccagctcgcattatagagagttgatctctatactttcgcaggattatagaaaggatactcgtacatatcctgatacacgcgagtcggatccgttctctaattccacataatgcgagttcccgttatgcgatcagactttggtcatactcgcattatctcgctgactctagctcaggcgaggtttacactcgaggagtctctcatggacgtctcagctttcattggaaatatgaatacgcgtgtccttcaaacaggagtctggtctcgagtttctaggtgagagaaatctcactataacacatgcccctagtttcgcgatgtgacagatgcggtcacgagggaaactatgcgcgagagacatgtgaaaggttgtcacgaggaggtgaccttt

SEQ ID NO: 287351 - DNA, 549 bp, Cannabis indica
ctcggttatataggccatggtccatactagttgagacaataatacttgtaagactcagttgtttgattttaattaatcaattataattataaaattagactatgtcttatatatgaattttcactaagctagggcttaattgtgaagacaagagattctaggttttatttgttaattaagagactttaataagtctaattaatttatattaaattgcaattttatttgataattaattttaattattaaataataattttggcatttaagtggttgaattagaaagtatgacatttgtaaaaaaataggataaatagttgaaaaatggcaaaattgcaagtggtgggcccacatcctatggtcgaccactaatgctcaattttaccatttatttatcaattttttaatgccaaataattcaaacctaaacttagaaggattcctataaaaagatagtgatggactcaaaactgacagttgatgcacttaagcctttcagtcaaatttgagccttctctttctttctctatttcgaatccttctctctct

SEQ ID NO: 287352 - DNA, 560 bp, Cannabis indica
gaagacttgcgttctcaggaatcagctggtgttctcgcaacttcgcagtgtacacagtaatcgccagtcgcgatcttgtaccggaaggctcccgaggatttcagctgtctctctgcgagtcgcgtcaagtgccggtcgaactggtctatctgcgagagcaagaaagagcgagtaagcaaaagatctcaaaagtaattcagaaaatgtctaagttaaaaaatacgcgacatactaggtctgcgattaaagtcagttctaatcccagggactttaaagacataaaaccacttcgatttccagtcccccatgttcgataccattccttctactccattgatctcagaagtcgcccatttgctaaaacagtagaagccattatgaagacctacgctttttatgtcgtagaaatagctgaactcttctactgagggggccctatgaacatattccatgtacatcgcatagaaggctagggcagtgcgatagctgtttggagttagctgaaaaggtgatacatcgtatcgcctgagaatagctgcgatgaagggatggaaggggac

SEQ ID NO: 287353 - DNA, 354 bp, Cannabis indica
taaaataatttccaacacagtatgctgtgcatactgcccgcgcgcgcgcagggaggtgcactggagagaaacctcggcgcacgtgagaagctgcagcatttttgcgcgcggagaaggggtttcagacacccctgggcgtgttgctcggacaaaatcttgtccgaacacgcgtctgaccgaggatcactcggttccgcgcgcgtgggtgagtgcatcatccctgatatttttcgaaacttcaaaaaatcataactaattcaaattaaatcgaaattgagttctgtaaaaaagtaaattgcttaattttttccatactatccaataaaaataattccagaaacagaatttcaatta

SEQ ID NO: 287354 - DNA, 781 bp, Cannabis indica
gagggcatcaagttcaagttggagtgaggccgctccttgcttattgtgctcctcttgtagggcgagaaccatagattgaccataagaagtaatggtggcagcctgttacacatcattacataaatgttagataatggtaaaaggaaagaatttttacaagtaggagaaacttaccctaatcatctcgcggcacccaagagcaacgatctgggcagggggcaaacaatcaagcctagacatggtcttgtccatgatgtccataaggccctcaatgtggctatgtgccaccttcaaacccgtagataaagcctgacaacgaccctctaagggcagtgcagcaagtgactcggcccctgtggacgtcgaaccaatgaggattgtatcattggcggacccagatgcggagtcaggaggaggcggccgagatgaggcaggcgatccaacaataggggtgtgaatatcaatggccaggcgagggttagtcttcctaaccttaccaggaggagccatgggagaggcggtagaaggcgaaccctctttctcctggtaggttgtttgtcgcaacaggctggccatatctgcaaaacacacaaaaatgattagtaacatgtaataacatgcaaactaatgaaaaaatgcaataagcaagacaaatagcgatcatcaccaagagagtcacactccctaattggccttttcttagcagacccgggcatagtacttttcgctatggctgtctgtgccagcgtcggaggtcctaagggtcgcgggatttcccgca

SEQ ID NO: 287355 - DNA, 375 bp, Cannabis indica
aaagtaaagcttgggttggatgcatggagtatgcatcggaagggaccgatattgaactttgattcagatatattaaacttaccgtaatatctattcaattcaatatcacctagttgaccctagatcttccaagttctatgagtggatgcgaaaaggaattaataagtcagtgaatttacttcgtaagttctaggtctgcttattggaagctcagatatataggcccatgatcctcatactagttgagataatactacttgtaagactcagttcattgattttgattaatcaattataattctaaaattagactatgtctagtttatgaaattttcactaagcaagggcttaattgtgaagaaagagtttttagga

SEQ ID NO: 287356 - DNA, 819 bp, Cannabis indica
aaaaaaaaaaaaactaattaatgattaaatacttacatcatcgtgaagccactccgacctagaaacaaaactgtgaagaacttcacatcgccaacaccggtgtgcacattcctaggtcgagcattgggaatgtctccaatcaaccacctcttttaccatagccatcaactcgtccatcttagccagtagagtctccttcagatctttcaaactatctgtgaaggaccgcctcatgctgagatggctatttactagccccgtctgtgccaacatgacggcttcctgctgggactcaagcttctccagccgggcctcaatgctatccaacctctttacaaggtcagtgtccacagttgtactggttggagcagaaggacctgctgaagtagatggctcgtgtacttcaggtgccggtggtggtggaactaaatttgcctttgtcacggcctcgttgatggtcttcgcttgagtttcaaacacagactcctgtgtaccatcaacgtccaccgtttgttctacgtccatctcaaagcaaagaggggctctaccctcattaatactcttgaagtatgcctcttcactgggtcggggaaacaagcacttcttcaccaccaactgaaacaaaaaagaaaacacagaataattaaaaacactgaaaaaaagtcaaaaattatgataattgtaaacaagcagcacaatgtcgctaaatgtcgataacatgtcgcgacatatgtcgcgataagcgatgcagcaatttcttttgcgacatcgcataatgtcgctaacacatcgcgaacaatgtcgcgaatgttcattttc

SEQ ID NO: 287357 - DNA, 560 bp, Cannabis indica
tcgcaggctaagtcctattaaatggacgccccgcgaaatacaagaagtcagggtggcatggttgagaccggaggcggtcaggggaatcctcaaaatcctcgtggtcgcggccgtggccgtggcagagctcagggtggtcgccctgtaaatccacctcaagctcctcctgattgggagcaaagatttgctgagatgcaagatagaatccgccagcaagatgaagagatccaaagattgaggcagcagggtcctcctgccgtgcctcctcaagtggttcaggccgttgcagttcctgcggtgccagcagaacaacctgttgttggcaaccgtatggagccgttgtatgaaagattccggaaacaggcacctccagtgtttctgggaggccctgatgtgatgaaggccgagcagtggctttcagtgattgaacgcatccttaattttatgggagtggttggaaatgaccgggtgacctgcgccacttttcagtttcaggaaggcgctctcgtgtggtgggagttgataaccctcactcgagacgtcacgctgatgacctggga

SEQ ID NO: 287358 - DNA, 563 bp, Cannabis indica
atatatttaaaaaattagaatggcaaaataaaatagctaaacgtggtagtattaatgaatagatattttctataataactataataaaaataaaaaaataataaaaataatataacaacccatcttcttatagaaagatagttttacagatgaaataaaaaataattaatgcaaattttcttttgaaaaagaaaatgaaaagaaaaagaatgaaattaattaaatactttcatcatgattatcttcgtgtcatataaatttaattaaaattaccataatttattatttatatgaaatacctctcttcacataatgtttgcaacaatattttgaatttttgataatccctccaaagagaattgtaatcgaagagaaatttttctattttgtttatgttaggatttataaaacacttaagaaatatataaatcacaaatctaaacatattcctaaaagttctttaatatagaaaatcataaatcataaatttattgaacctttgttaaattaaagaagaagaagatgataaaagatgagcgcaagcactaacctgaagccattgt

SEQ ID NO: 287359 - DNA, 809 bp, Cannabis indica
gacacaggtaagacagtggttagcatatagagtatgcgcagtggcgcttatgttgaaaatgatatgtataattatttagtaaccgagattagggttattaccctaataggaacggtctggtagcctagggttattaccctagtgatatatgtgtgtaaatgccatgccatgttaaatgtaatgagatttaaggattatgcgcttaaggaataatccggttggactcgataacgataaccgagatgaaccattctaaggccttattgaatttggacgtgtgagggtaacacgtaggtctacgccacatagatataaataaatgtgtgagtgcaacacatagctctacgtcacgtagacataaatgggcatgagagtgcaacatgcatatctgtgtcacacagacatataaatatgaatggcattactgtttaaatagcatgatgagcttattattgttattgtttatactgtcttgttgggcttggctcacgggtgctctactgtgcaggaaagggtaagtctatagctaatcagccatgagtgtaggagctgggcaaagaatgtacatgtccgggccatactagaccaagcgagtgttgggattttatgccctaaataaaacccatttcaatctaatctaatttgttatcaataaaagattagaagtcatttatgtttacatgttgttttcatgtttatggtttaatatatacaaaatctgttaagtccagaacatatagtcatttacaattacagtgatgtcaaaacagtggaatgtgattgtgattatatgcttcgaaagacaaagt

SEQ ID NO: 287360 - DNA, 136 bp, Cannabis indica
aggatctttgatcattgggattagaacaatggttaatgtttatagcgtacatatagagtgtctatatgactgagagtgtaattccaagttctatggtggatgcaataagaaattaataagttaggcaatttacttg

SEQ ID NO: 287361 - DNA, 798 bp, Cannabis indica
caattaccaaaggtaaaggcggagtgcggtacgcaatggtagcagtcgactactttactaagtggactaaagccgaaccactcgcaacatcacatcaaagaaggttcaagactttatagtgaagaacatcatactccggttcggattaccatacaaaatagttttggacaacggcaagcagttcgacagtcaatctttcactgatttctgtgcgaactatggcatcatcaaaagcttctctgcagtggcacatccccaagcaaacggtcaagttgaagcactcaacaagaccttgaaggatacactaaagaagaaacttgaagatgccaaaggaaattggccggaagaactccccgaatttctatggtcataccgtacaacggaaaaaatagcaaccgatcagacaccattctcaatggcgtacggttatgaagctatgctgcccgtcgaactcgagccaccatcccatagaaggttgacgtacgatcaaggtaccaatcacatactccttgcaaaatcatttgatgaaatcgaacaaaacgagcaactgcaaagttgaagttggtagctcatcagcaaaaagtagctcggtatttcaacaaataagtgaaagctcagaaattctttgtgggagatatggtcctaagaagggtattcctaaacaccaaagacagcacgtcaggcgtactaggacccaacttggaaggaccatatcaggtggtcgaagttcttgactctggagcatacaaactgggtaagtatgacaaaaaaaatgcaactcattctagtaccacgata

SEQ ID NO: 287362 - DNA, 616 bp, Cannabis indica
cataataaatggagttttaaaatcacaatccaaacatctaaatatggaggatgagtttttatggaattcattggaattggacatgttgactgattgcttcaaacaagtgtcgtacacattgcatcgatcacattgaatgttcttttctagaaaggaagaatgtgtggatgatcttcatatgtaatggctcttcgtgtcattccacattctaaacacaattggtaatcacattgaggacattcaaaatataaagcaggtttggttgaatatccacaagtattacatttacaattataccttttcatatgaagggagaggtggttgtgattaggttggtgggaggtttggattttttgtggtaattgatcaatgcaatgtttatgaagaaaatacttgcatctattgcaaccataatacactccactaacatctgatgttgattgacatgcaaaacatctaacattgacatctttatagatagtatctgttgtgtcaacaagtagtagcaaatgaggatgactagaatgttggatgtaatgttggccttcattaagacatgttgttatggaatttgacattaaggcacattcaatatccatgtcaaatccacattctt

SEQ ID NO: 287363 - DNA, 556 bp, Cannabis indica
attgggaatacccaactttatgaatagttacagaaatacatgtactataatcctgggaatcaccccaccaaaaacactataaataccccctcaaagctcattaaatggggtcgagaattttgggttgcataagtgcaagaagagtaaatactcaccaagaacattctctgtatttaatacactcataaatacacagactcgtggactaaggctcattaacgccccaaccacgtaaaaatccttctcttaatttcttacagctctttaatcttctatcattttattggttgccgaaaacctcggtcaacatttataaattataagtttaaaaatgatatttttctatatatatcatttttttttcttattggaaatttataaatcatatcttaaatatttaaataacttagatattttgtagaaatttgaatattgcttaatttagatattttgacatataattatggtaattattatttatttattattttattcctaaaataataattatctaaccaaatctattttaaaattagtttattttattaaattataa

SEQ ID NO: 287364 - DNA, 574 bp, Cannabis indica
tggtacatcttggtggtgccgggatgcagggaataaggggtagaatgagcctcttgaaagatttcattcctgagctccacactacttggaacacataccctagctttatacaacagcatcccgttgtctggcactaaaaaatccctggcttgaccagctaaaacctcttctataacctttactaactctggatcagtcatctgagcaactttaattctttctaacagatcagattgcagcgtcaagttgtgaagctagcctaccacaaactcaatgctggatctgaacatgtcctctgctaactgaggtgagatccgaatcatgccaactacctgcccgggacccttcctgcttaaggcgttggttgtcccgaggatcgtacgctccaagcctaaccgccccgacatgtacaatcttcatcggctcgtcctcacagttcctcagccttggtcatgcccttacctacacataaacatagcactgtgagtcgacagactcagtaagaaaagcataaatcataatcatacgtaaatcctgggttatgatcagacgcccatacccctgaccacaaccc

SEQ ID NO: 287365 - DNA, 785 bp, Cannabis indica
agtggtatcagagctttggttcaagcttaaatcaactcaagaaagaatcaagaaagtgatcaagactgggagaagaagaagaaacacaacaagaagttgtggacagtgggaaacctgtggaaattccacaaactgataataaacaaatctttctaaactcaactcaatttaattttgatttttctaacatgagcaatatcaaggttgacattgatcgttttgatggatctggtgattacaggatctggaggagaaagatcagatccctgctggctcaacagaaactacttagggttcttgaagaccctattgaatggccagaaaacacttcaaagattcaacaagaagaactgttggaaacagccactggaatcataattttcaacctttctgatgccattatcagattggttgataaagaagaaacaccagctaaaatttggaagaaacttgaagagcagtttcaacaaaaatccctaactaacaagatctacctaaaagaaaggatctttgggtttaagatgagtcacactaaaaccctagatcagaatcttgatgagtttctcagaatgcacattgaattggcaaattcaggagagaatgaagctctaagtgatgaaaatcaggcaataatcattttgaattcattgcctgattcatacagagaggtaaagacagcaatcaagtatggaaggacttcaatcacacttgatgaagtcatctcagccctaaaatctaaagacttagagatgaagagtgaaaaatccaattctggacatggtgaa

SEQ ID NO: 287366 - DNA, 545 bp, Cannabis indica
ctaggaacacacactcgagctttatataataacattccactgttcgagactgaaaagtctctaggccgaccagccactacttcgtctcgaaccttaactagctcgggatcttccaactgtgcctttctgattctctccaacagatcagattggagtgttaaattatgtaatttcccgaccacgaattcaattcctgcactaaccatttctgaggctagttgaggagctatcataactgtagtacaaacttgccctggaccttttctgcttaaaccatcggccacaacgttggctttcccagggtgatacagtatttcgcaatcgtagtctataatcaactccaaccaccttctctgcctcatattcagatctttctgggtgaaaaagtatttaagacttttatgatcagtataaatctcacacttttcaccgtaaagataatgtcgccatatctttaaagcaaaaaccacagcagcgagctctaaatcatgagttaagtaacgctgctcataatcttttaattgacgagaggcataggctatgac

SEQ ID NO: 287367 - DNA, 525 bp, Cannabis indica
tcttctgcctcgtcttgctcgataccttcacggaccatcaatactggtaagtgggccgcaacattgtaacattgcctgacttcaccttgattacccctcacagttcctactccagcttcctgggtaggaaattttagacacaagtgccggatagacgtaactgcgccaaagtccactagggccggtcgaccgaggattgcgttgtaagcagttgggcagtctaccactacgaatgtccagtatttaaaagtgctctggggtgtgtccggacacaaggtaactggcaacctcacttttcccattgggataagtgtggttccattgaatcccgtgagctgggaaccgcttggcgaaatatcccagtccgtgaggcctatcaccgtgaaggcttctttagataataaattcacagaactcccgttgttgatgagtattctagccacaatcttgttggcgatgggagtctctatgaccagagggtcatggtgaggaaaatgcaccatctttgtgttgggtttataccct

SEQ ID NO: 287368 - DNA, 783 bp, Cannabis indica
ctcgatttttctttcaaaaaataagttggttgagcatttattacatatatctaacctatctaagtgagattaaggagcttctaagtttgaaatccaaaccaacacttttcacacactttgagccaaaatttgattttattcatcttaagtgtgcttgcttttcactctaggtttccattgtatcatcatatttctagagtgattttagcttgtatatcaaacacatttccatattgtgattgaggtgaggttggcaccggttttgtaaacaacccggaaatagtgagattggcactttaacaatccgagaaagaggttaatagtcctcgggggtgcgaaactattgtaagaggtttggaaataccttggtgaaaatttcccggttgtaagggttagtcaagcccgttaacttggctcgatattggaactcaaagctaggtccatagctttgaagaccaaggacgtaggtggcatagttctaccgaaccttgtaaaaatcgagagtttgcattttctaatccttaaactctttactttacaagtttaattatttgtcttaatatattgcttgccatactacttgcttttacttgattaattgactaattgcataattttgtgttaaaagttttaattttccgaaattagtttaaatttccaattcacccccctcttggaaacatatcttgggctaacaattggtatcagagcaagggctcaaattatttgattagatttcacaatctagagcatggcgtttccaagtaattcacaaaataacat

SEQ ID NO: 287369 - DNA, 767 bp, Cannabis indica
acttctttcagttttccagtgtttgccttcgccagttcttctcaactttcacttgtccacattcagtacccccagttcagcgatctactgtaagtttcttgcatccttagataataacatgctttcatttacttcgttcgctttctgggttcgtactttgagttctgagtgtgtgagtgttttaagttctttaagtgttctgctttatgtttactactttagttgtagaatcgccattatcacgccttcgttataatcgtacagctttgttgaagagaaccatgtgttcttcgttcaacagttgcttagggcatagaatggttttccctcttttttttttcttgttgcaaaaccactttctgcgatttcactgcacccgacacttgttcagggattctctctagggtttctcatgtgacacgtgtccggagggggcctctttccagcggttaggggacccccactccctttttcttgacttagggtttggtatgggacctaactgctggaattttcttttttccctttttgtctttcgcagaacacaaaatgtctgcttctggttcgaaatcttcaaagaagaagggaaaagacatggccacgttggaggaggtttccctggggcctgttgcccaggaggggtacaaatccagagcgactgggtgggaagcggccgagcttcgatccaccctgacttgtcctcaccagctggagaacattattgaagttgctgggatcaaaccctccacctcagggacctatcaccg

SEQ ID NO: 287370 - DNA, 104 bp, Cannabis indica
gtgggagcgctaacataaacattgaatctatagcttctaagtggttttaaggataaaataaattgtagggtgtaacgaaaatctaatccctttacagtgtagat

SEQ ID NO: 287371 - DNA, 729 bp, Cannabis indica
agaaggtgagcaaaagcgtggcaagtcaaaagctccttccactggaacgttcggccaattcccccattacccaaataatttaagctcgaatggtaaacgttccaacaacaacaataggcaaggaaatgggaagaagggaacgttcaccggcaatactgagcaagctccctaggagaatcaagcaaagtacactacatttaccatcttgactgaggatatagaaagtgtctacatggccactcaattgatagccccgtataagaagcccgcacccatgaagaaagatgttagcaagagagacatgaccaaattttgtcgttttcacggagactatggccacgacaccaacgaatgcaacaatctgaggatggaaattgaattcctgataaggaaaaataacccacacttacggaagtatgtaaagaccgatcagagtcagaggaacgacattgaccaagacttgctacctccaccggtagacagacatttgcaaattatcattggaggtccacacatagctggagtaacaagcaaagctcgggagaggtatgcccgaacagcttatcacaagcaacaagaagttatcctggccatagaagaaagttagcccaaaatcccacgggcaagagggcctaccatgaccttcaacgacgaagatgtgtcaaaatcaggttctgcacaatgacccacttggtcgtggaggtatagatagcaaacaagaatggtggc

SEQ ID NO: 287372 - DNA, 648 bp, Cannabis indica
ttatcttaaatggttttaaacggactagctagtgtgacgtctcgggaaatcggggcgttacatacacttccatatttcgcccgatctggtctttaaacatcttgtttaccaatatttggtacgtagctccagctttttttagaccaaacgacatgactttgtagcaatagagacccatatctgttcagaaacttgtatgttcttggtctggtggattctagcctgaataagtatccatgaagcttaaaatttcctgccctgctgttgcatctacgagatgatcgattcatggaagtgcgaaacagtctttagggcatgctttgttgaggtctgtgaaatcaatacagactcgccatttcttgttcggcttgggcacgagtacgggattcgcgacccaagcgggggaaaaagcttcaattatgaagttgttattgcacagcttttcaacttcatctttcagggctactgctctttctttatccaacaaccttcatttttgttgaactggctgaatgttaggatcgatattcagaacatgtgaaataatagaagggtcgattccgaccatatccgcatgtgaccaggcaaaaacatctaggtttgctctcaaaaattttatcaactctgattttacttcgagcaacaaac

SEQ ID NO: 287373 - DNA, 423 bp, Cannabis indica
agcttactacacacactactaaatttaacaacaacagtagacacatagcaaacacaaacagtagcaacacttaactaacacacttatttcatctacacaacacatcacagttaaactaaggtaattaactaaagagaaaagaaatactccctcaacaatccgaatctccaccaccggagtccctctcttcgttatcgacggagccccaaggcgcaaggatttcttccgggaaagcaggaaaggcagcggctgttttggactggttgcgacgaagattttgcatcatccatgcatctcgttccctttcatagttccagtgagtctgcagccgctcacacatctgttgttgtaaagcctcatgcttggacagccgctcgtccactggatcccttgaagtggaagctgtggcagtggatggagtgg

SEQ ID NO: 287374 - DNA, 704 bp, Cannabis indica
attcaaactgttttgaaactaaaacaattaattcaaaaataaataaataaaaaaatgagcttcatctttatcttggacgaactccacccctttgtccaactttccgattcaactcgctaagatagcatccgagttcaagcagcttgggctgtaataagaagaaaaacaaataaacatggttagtaggtccagaattaataatccaaatggataataattcactaaaactcatcagtttataggaaaagaaataccttgtttctttgcaagaagtttaggacattggggtttccagtgtcctttttcattgcaatagaaacactttccttttagtgtatcaccaggagtagcagcctttttctttttaactgttttcacagcttgaacaggcttcttgctatttttccacttcttctttgtcttaggtctggaagtagaggcaaggtgtgcctcagctttaatcgtcccattaccatttccagaattatgaggtttactccctttcttcttgggtcctccaatcaaattttcatatgtcaagtcttgttccttcttattcatgacataatttgatgtatagggcagaaaagctggagtcagactattcaagataagactcacttgagtttgtctgattccatttcagttccatgattctgggcatcttaggaataacttgccatctggagaaggtgatcacgcac

SEQ ID NO: 287375 - DNA, 536 bp, Cannabis indica
tggatctaggtccaatttcagttatgattccaagtccaagtcctggttccagtctcggtcaacttccggttttggttccaattttgtgtcacagggtacgggttcgggtctacttttgggtttgggattgggttcacgtctgggtgtgggttggggtccttgtcagggttcgggttcagggcttggtcccaaatctagacaccgactgcgggttttgtccaagccctgggtccagatctggatcccgatctaggttcgggtccaggtcaaagttcggtcccgagtacgggtccaagtttgggtctaggtcaagatctcggtccagatctaggtccagcatttcgatcctagtctgggtcttggtccgagtccaggttcatatccggatccctatataggtccaagtctgtgtttggaattgggtcccaaatttaggtccaggtccggttcttggttccgttctgggtacacgaccgtgtcggggcccgagttcgagtctcagtttggatctgaggctaggtctgtgttcggttcta

SEQ ID NO: 287376 - DNA, 476 bp, Cannabis indica
ttttgtatcaccctgggaaagccaatgttgtagccgatgctctaagcagaaaaggttccgggcaaatttgtaccccagttatgatagcccctcaactagcctcggaaatggttagtgcagggattgagttcatggtcgggaaattacataatgtaacactccaatctgatctgttagagagaatcagaaaggcacagcgggaagatcccgagctagttaaggttcgagacaaagtaataactggtcggcctagaggcttttcagtctcgaacaatgaaatgttgtaatgttagaggagctgttagagtttgatgttagtttggttcgaattctagggttaggttgagttgaatttagcctatagcagctggttttgagtttatttggttggtttgatatcactttgaacatggagttcaaagcttagagctttaatggcaaattgattttgaatggtttgttctgtgaattgttgg

SEQ ID NO: 287377 - DNA, 1499 bp, Cannabis indica
gctcttatgttattgggcattgtactattaggtattaaattatgtgagatccaatattaaattataagtattattggtgccctttattgattcatgcagtgtccaccttatgcatgtaagatggtcggtgttgaataattactagtgtcgtttaataatactcatgacaacatattataataattatatattaacgcgttatttatgtgggatactctaacagtaacgtgtaccttaacaaagcaatcgtggaactgcatacgaagaagtgcggccacaagagtccggtcttttccaaaagctaatttcacagcatctttgattgtggcttcaacattcacttccgttgttgttgtttgagatttcgagttgaacggccagaagccggtggtggtggtggtggtaatgttgcattttttgttgtagtaaccactttgcaatgctccataacattgcccaatactcaaactcaaaattataaagatacctataataggagccatctccaaaaccctattatcttcatttttcaaatatctatgtatgtatgtatgtatgattattattattactaggatttgtgaatattgagttgtggttttaatgtttttttgtgtctatttatagggaatgagaatgtacttgtagaccttaattataaatatttatatatatgcttggcacgtatatatgatattgttggtgatcaattttgatttttttgtaagctggacaagacgtgctatatagtcgtgtgtatatatatatatatatagatattatatatatatttgtggattaattattataatattttgggtatatatttataagattagtgtgttaatcatgtgtttaattaagggtgtgatattctaagacagatatgtgatcatttttttgccaatttttgagtcaaatccgacagaagatttatatattttattttttttgacgtgaaagatttataatattgatcacactacaatttttatatatatatatatactaggtgattgttacgtgccaagccacgtagtgttagttttatttaatattttagttttttattttaattaataattaaaatagtataattatttgaacgatttgttttaataaaaataaaatatgtgtcagtatatttagtaagtaaaacatagttgtgttataataatgtatgttattaatagtaaaatgtacattaatcttctaattgaaaaaagttctattatctcatttcatatctaataatagctacacaactatatatttatagactttcacattctttgcaaattactaataagcaccaataatattttcatattctaatatttttcaaccttctcctcttggtggtaaaattaaaaataaaactaaaaataaaacacaaacatataaggtaaatactaattacagcccatttcatctttttttttaattattatttttttaagcttcaagcccaaaaaatttctaagacaacacaatccatc

SEQ ID NO: 287378 - DNA, 670 bp, Cannabis indica
tcctcctctcggattttcaactgatgataacccgatcggagatcaatcttagaaaagaccgtcctcccctgaagttgatcgaacagatcatcgatcctaggtaatggatatttattctgcactgttagcttgtttaactcccgataatcgatgcacatcctcatagttccatctttcttcttgacgaacaaaaccggagctccccaaggtgacacactaggccgaataaaccctatgtcaagcaatccctgaagctgaatctttaattccttaagttcagctggagccattctatacggagccttggaaaccggttccactcctggtgccaaatctataacgaaatcaatctcccgctgaggtggtaaccctggaagttcttcgcgaaaaacatctagaaattcctgaaccactccaatatcttctggccgaatggtatcttgccgagtggtgtccatcaccacggccagaaaccctaaacaacctccatgcagtaattccttagcggacatggccgaaatcaccgggatctgagatccccgaaccgaaccaacgaacacaaatggttcttcactttccggttggaagatcaccatcttcctcttgcaaaaaatactggccgagtacttagataggaaatccattcctaaaataatatcgaaatctacta

SEQ ID NO: 287379 - DNA, 732 bp, Cannabis indica
ttttggatgtgcagcttatgcacatcaaagcataggaaaacttgaacctagggctttaaagtgtgttttcttagggtaccccgaaggggtaaaagggtatagactttgggtaaaggaaaaagggggatttaaaactatgaatagtagagatgttatattccaagaaaatatttttccttgtttacctaatgaaaagtctagtgcaggaatggaagatactaaccctgcaggtacaaacctagaagttaaaactggttctaatcaggtggaacaaaatgaagacacaccgggaatggttcaggtggaacctaaccaaagccagcagcccattaacaatggtcaagggggaggaactgatgctcaacaagagatcagggatgaagacaccgaagaggaccttacaaactatcagttgacaagggacagatctaagaggactccgaagcctaatcagaaattcagctacaacatttggagtgaagaattggcttatgctcttctaacagatttggaaatggatgatatggaacccaagacttatagtgaggcagtaaatggaaagaattctaaggagtggaataaggccatggatgatgagatgggatctctcaagaagaataagacttgggttgtggtaccaaaacccgagggtaaaagcattgtgtcttgtaagtggttgttcaagcacaaggaaggaagatctaaaggtgagcctataaggttcaaggctag

SEQ ID NO: 287380 - DNA, 525 bp, Cannabis indica
tggcaaccattccataaccatatggtttttcacttagcaaatatcgcagcatcaacattgaccttgattggattagtttctggtttagtccatagctcagctccatcatcagaactaccgaagtagatatgagaaagagaggtgttatcctgagctttacgccagtgatcaagagcaatgcgggctgaagatagaacatttgcaacagtaagaaccttatctttccacacaattgagtttcttgctttccataaggaccacgcaaccatagccaacgaacagacccgatcagaatcaagagactgaaagaggctatccagccagctagcaaaggagaggtcaagagagactccaacaggtagacccatatggtgccaacaagaagaagcaaaaatgcaagaaagcaggatatgtgaggttgtttcaggagccgcttggcagacagggcagacaggtggaacatcaacatgcttggttctaagatttacgcaggtcgacaaactccctgatgcagcacgccaaagg

SEQ ID NO: 287381 - DNA, 684 bp, Cannabis indica
tcttcaaagatgttattaggaatttttcctctaacttttaaatgcaatagctttgctaaaaagttgagagacgaaatccaatcacaaccgggatacaattcagcttcaatttcctcaaataagtcatcaaattgtgggtttgtggttggttgttcatcttctccttgtagatcctctgttgtcgagggaaagaagtcttctagaataggaatcatttcatcctctgattcaacatcggcaactgctacatcatcgacagcatcctcaggctccccgtgataaatccacttctcatatccttgcataaaacctcgatcaaatacgtgtgctctaaccctatctattttttcaaacctactatttatacatctcacacaaggacatcgaattcttccatcacaatccttatgttctgatgccattgctaaaaaggcttgtagaccattccaaaattcatggcaaccacgatttctgattttggtccaagacttatcgattgtcgccatctacaatttaggcgacaaatgaagtattaaaaatttgaatgatttgtaaagtgttatgaaatataacaaagctatggtatatatttataagtataccaaagcattgagatattcttttcaacattaataaaattttatgaatattttatgaattacacacatttaaataaaaatttta

SEQ ID NO: 287382 - DNA, 490 bp, Cannabis indica
acaacaacacagcaacagattatacaatttccttcaaaaatcacatttttgagctaaaaattccaaactttgaacaacacaactagcatgcatcataaccagctctattctactcaattaaacaagattaaacctatgaaaatatatcacaaacacagcagcaacaacacatcaagtaagcatgcaattcactcatattttcaccatttttttcaagaaaacaaaggaagaaaattaggaaatacataccacaatcaagagttcacaattttaagttgaatctagcttgaaaattgatgaaaatcccagcccttgaatcacatgcacccagccgaaaagagagaaggaaaagagagaggttttttctattttctaactttgtgattttttgaaaaatgaagaatgaaataaaatacacatatatcattcatttcagccaacaaataaataaaataaacaattaatttcaattaataaactcactagaaga

SEQ ID NO: 287383 - DNA, 686 bp, Cannabis indica
cgcaacctaattcaaaccgcaatccacgcagcaattcagatcgcaactaacagagcaacctaaatcgtaaaaataaaaaaaaaactaaaaaataacaaaaataaaaaaaattaaaaagtgatatatatatggtaattttcctagtaattattattatatttataatttatttgattaaaattttataaaataatccacctctcttaatttactctaaaatacaaaatgtttccttaataatgagtttcttatctttttataataccaattaacaggtaatataagcttttagatattagtactcattattttattattattattattattttatttatttaaataaccattaatataaaattacatacgatactatttagtataataataacaccttgaatatcataacaaactattttgaataccaattagtattaaattatatataagggtaaataccattttgaatcatgtgttttgtaaaagttactaattagaccctctgtaatgttaaatgacaaaatagaccctatattttccaaaatagtaaaataggaccctaaactaattttcaataatttatttttaatataactactttaagataattctaacacaaacaaatacaaaaaaagtaaccaattttgtcatataacatctgtagattagattattattaagtttta

SEQ ID NO: 287384 - DNA, 529 bp, Cannabis indica
cttcttcgatttttggaaggctaatccccgggccaactttgactacttgggcgaggctaaggacatgtaccttgagtacagcgcagcccaagttgcttatggtgggaacgaggcggctacttcaacctcgggccaagcctctggccaggctgctgatgcttcccctgtttgaacaacagatcctcctgctcatgttggctcagaagaaccgaaccaagagcctgggactccagctgtttaaacacttctctttttatctcccttttatatatatatcatattcggcctcaaggccttttttaagacatcatgaccaaccaagtggtctttaaacttgaaattatttttcattttttggacaacgggctgacccgacaacttttaatcccagtactacgtgcttttttcatccttaatgaatttcattctctctttataattgtcgtgcaattgtgattgttttaattttaccaaatgttttgtacaggtataggtgtcccccaagtgaccgagcagacgtatgactctt

SEQ ID NO: 287385 - DNA, 495 bp, Cannabis indica
gtggagttagaacacaaggcgttttggacactaaaaaatctcaacatggatatttcagcggctggagaagcaagaaagttacagctgaacgagttggatgaattgcgtttgttttcatatgagaatgctaaattgtacaaggaaaagacaaaaagatggcatgatgatagaatcaaggaaagagtttttgcaaaaggacaagaagtgttactctttaattcaaggctcaaactctttcctggaaaattaaagtcccgttggtctggcctgtttactgtacaagaagtgactccttttggtgcgattacagtgaaagatcaacaatccgggagggaatttaaagtgaacaggcagcggctgaaacactattggagaggcaaggtcaaccgagagaagacctcgatttctttgaaagatgcttgatcattgtaatttggggaaccaaaaaaaaaaaaaaaaaaatttctcagtgaaaggcaccccttgaaaaaaaaa

SEQ ID NO: 287386 - DNA, 715 bp, Cannabis indica
ttttcatggaattaattttgaattttttgtgtagttttgtatttagacttttatttttcatatttcaaatctaattatcagatttaaattaattagtttttttaaattaatttaagatattagtagttcttgaaccttgaaaataggtaaaaatctatttttttttacttagttggttatcttatttttaaaatttgattattttatcttatttttaaatttaaggtcagatattttacattttaaattatttaattaattttataaaatgaccttatttgaaatttaaaataaaattattttaatcaagaaattttaaattgtaacaagatattttgctaactttcaaattttattttattttatttaaattaaattataaaattagataaatgatatttatttattattttattttattgaatatttaattttattttaaaataacattaaatttgaaaagttttgacatcatcttttgaatagatatttaggtttgttaaaaacctaatttttcaaatttatatgtttaattttgaaattaattatttaatttaattgaatattttcgaaaataatattttattatttagaatttttgaaaattaattatttaattaatttaaattaaataaatcatatatccaactatccaatttgttgcatgtgtgtgttttatattgtttattatattaaacaagtttttttttttttt

SEQ ID NO: 287387 - DNA, 645 bp, Cannabis indica
attcagctgcaatcaatgtaagattttcgaaactcttatgtgtttaatttcattattttagagatattcatttttaggatgttaatttaacatacttgttagtaaatctagatcctggtaaaatattcccaacattaactgataggataatctataatgtagtttacccacaccttggataagtgttatgtcctttccagggtattggttaaagtaagcttgggttggatatatggagtatgcatcagaaaggaccgatattgaacttggataagatataataaacttaccgtaatatctattcaattcaatatcaccttgttgatcttagatcaaatgatctcaatcctgagatggttaggttttagttcagttgcattatttatgtttttcaatctgttcgttaaagtcgactaatggatcttcttgtgacatatagattaaggacatggtagttcaattgagtgggaatgctaatcatagatacgaaatctatagcttctattagggctgcacaaaaaaaactgctaaaccgtgagaaccgcctaacccattagaatccgcccgcatgaaaccgcccattaaaaacccgctaaaattgggttgggttgagttttaacccgctgtttggcgggcgggtacggg

SEQ ID NO: 287388 - DNA, 871 bp, Cannabis indica
gttgagatggggcggcaaccagtttttgatccactcgtagaggtgtcccaatcggatcaagttctcaatctcgtccttgagatttttgcattcgtcggtgctgtgcccaatgtcattgtggtactcgcatctcttattgggatccctccgggagctgtctttgtacaggggaggcggtctccggtagtgcgtattttgcctagtagcaaaatatacacgttcttgggagtccgttaactccgtgtattgggtatattggggagtatacccccttttctgtcgcttatcctccgtccgggtgctgcctttggaggacctttactccttgagccctgggaaggaccggctaaacttgcggtcggagcggagtgcgagggggcttgtccatttatccctgagggatttccaaaatgggaagatgcgggggccaaggcctggccttggctatatccgggagtagcagaaaactgtatgccgctcatcggtggagctgctgctggcacagtgcctgagagctgggctccgggcacatatcctgctatcccggtgggatagtatcctccataggccactatttgggcctcttccaggttaatgtatttctggactctcttctggaagtcttgaaggtttgaagctccttcttgttgtaactcgttccagaatggagtccctgtacggatgcctgcttggagaagagcaagctgttgtccgtcatctactttcttggttttagaggcttcttccctaaacctctttatgaaattcttcagtgtctccgtaggcagctgcttgatgttagtcaaggcgctgacctccagattgacttttctcgcggcgacaaattgtctccggaagctggtttgcaact

SEQ ID NO: 287389 - DNA, 673 bp, Cannabis indica
aaccacgaaggagaggtgccgtttgtgttttgttactgtttacagtataaaagtaaatatattaggcatgtgcagtataaaagaaataaaaatgggcttggatagtaaaaatataaagtttgccgtgtcccagtatttctgaaaacatttggtaaaaaaacaatatttttgtaaatttcatcgtgtgatttctacaagaaaaaagatcccaatgcaaggcccaatccaatctcttctccaagcccagccgcccagtgggtctgcctgccccgtcagctccaaacggcaccattctattagtccaacccgtcccagtcaacgcctgtgtggcctttctttgctccagcagtgcctgccacatggagtcacctaattggatctgctttcctagcttctccctctcatttctcttcagcccacgtgggcctctgctgctgccttctcctctcctcacgccaaacccatcccctttcactgtacctgctcatcaaaatgacatattacatcaaaaagacaaccatcaaatgagtaataagaataataataatatatatagggatagacgtttttattttatacacttaaataccgtatgtttttttcgtacggatcaaatactttaagttatattttcgttacttccgtcactacttttctgttaaattctattcaa

SEQ ID NO: 287390 - DNA, 609 bp, Cannabis indica
ctacagaaaggatcatttcaaaggccaacatagatcccaatcaagatcgaaatcaagaggaaaataccataaggacagaaaatgttatttctgtgggaaagtaggtcacatcaagaggttttgcattgagttcaagaacaaactcaaagaagacagagaaaagaagcatgattctgcttctaatgttgaagaatcagatcgttgctcatctgatggtgacttgtacatggtttcagatcaaagaatcacaaatgaatggattcttgattctggatgcacataccatatgtgtcctattcttgaaaattttattgactataggaaagtaaattctggtactgtactaatgggaaatgacaattcttgcagggtaattggcattggaaaggttgctattaggcactttgatggtactgttcgaatgctacatgaagtaaggcatataccagaacttagaaggaacttgatatcacttggtactcttgaggatgaaggctacagttacaagtctaacaatggtcagatgagaattgcaaaggggtctcttactatcatgaaaggtgaaaagaagaatggtttgtacattctgcaaggagaaacagtaatggc

SEQ ID NO: 287391 - DNA, 637 bp, Cannabis indica
cataatgtatttcatgtttctatgttaagaaaatacgtttcagacccttctcatgtacttagttatgaaaatcttgagctgcaaccagcatgtcatatgaagaacagccagttcagatccttgacaggaaggataaggtccatcggaacaagaccataactttggtcaaagtactctggagaaatagcaaggttgaggaagccacctgggagttagaatcagacatgagagctcaatatccagagttgttcaggttagatttcgaggatgaaatccttttaagggggataattgtaaagaccgcttagctttaatttgaaaattagcaggtaattagggtttacttatgaaaattatttattagctttgaattattaatttatgatgatttatttgaaatcagaatgtattttatatgtcatatatgaaatttcataattttgcatgttttgtgcccgacaacattgaaacgcggtctttgcctattagaatcacatcctagtatttttagtataggaggacagtatagttagacattaggaatgtcgggaatagtcgagattttagagttgaataaaatacccctaagtgacctttaatggcttatagtgtgtgaagggcaaaatggtttttttgc

SEQ ID NO: 287392 - DNA, 74 bp, Cannabis indica
aaacgagataaatgattgagtactcatttcagatctggttgttggaagctcagatatataggcccatggtcccc

SEQ ID NO: 287393 - DNA, 760 bp, Cannabis indica
atttgactgaggtatattgtatttttatgttcatttggtatttcatagaaggaaagaaacaaagaaaaaaaaaactttgtggaattattaatttaaattttttgttataatttttttttttcactatgctggtggtatattaactttttgactatggtatatctgcttatgattgtggtatatagtttttgtatgctactgtatattgtggaaaacaattcatttaatagtatattagtttaagtttgtgatatatgtatattggtttaaggtatattgtttgtatatcatacgatatattaataaaaaattaattatatggttaaataacatattagacaacaacaacagcagcaaaatctaaaagaataaaatatataatgaaaaaatagttgacaaaaattcagtagagaggttttgatttattatttttcataatttctattactggaataaaacatataataccttttatataatgaagggtattttaggtattaaaatgtaaaaaaggacatttgctttattattttaaaaaatggacattaactatctatagagttagaaataaagccatttacttacatttctctattttaaaagcttatcttctcctcttttttctttttttttttttcatcaaataaaaataattatttttctatattatttggatcttaaactttagtaggagggacgatggtgctctactagggtttaggtgatttctcagccaaggcgagacgtggaaaataaaata

SEQ ID NO: 287394 - DNA, 654 bp, Cannabis indica
tggtcatgtgaccattctggactattctttttgagcatattgctgagtggccttgtcagtacagacagtcggggaacaaagtctcgtaagtaattgatgatgcccaagaattgttgcacctgaacttttgtgagattttcatctgggaatttgagtagttcatgggctatatgtggttgggcttcatattgtcctttggataatttcatcccaaggaattctatttgcgtctgtccaataatcattttcttttcagacaacatgataccatgggctctagtgatagaagcaaactgggccaataacgcttgatgggcttttgcatcaggagaaaagagcaaaatatcgtcaatatagatgagagccttttccaatattgggccatatattttggtcatagccttttggaatagggaaggggcagttttgagcccgaagggtaggacggtccactggaaatgattatttggaatgcaaaaggctgttttgggtcgatcatctggtttgatgcctaattgccaaaatcctgcttttaggtcaaattttgaaaaaatatgggctttggataaactggcaaacaatgaattcttatttggtattgggaatttatcatctgctaagaactcattcaggggcttgtaatttatgaccaac

SEQ ID NO: 287395 - DNA, 651 bp, Cannabis indica
  modified_base (51)..(51): a, c, t, g, unknown or other
aaaaaatctgtcaggtcggtattttttacttttttactgtgttttttttanaagtttcatactgcagttatactgtgttaagtttcactggtgttctactggtgttttactagtgttctactgttgttttgagttatactgctttgtgttttactgtgtttataaaacacagtattttaaaaaatactaatattccagtattttgtaaatttcccttatattattatcttttctttcttttttaaaggcccatcttatcttttccaacgtaccaataaataacaagtagtataaaacaaaatttacagctactatttttataattaagaataattgtggctaaaatatatatgtatttttatttgctacagtaaatatagcaatagtaattcttttgtatctaactgacagcaaaatactacttaccaagtattttctaaaaataatcaatatatattataagtacacttttaatgggtattacccatcagggccgtcttaaatattttggaggccctgttccaatcttaaattttaggcccctaataaaaaaaaattattttattataataattgttatttatttcattacaactttaagtaagtatcaaccttctatttaaaaaatgccattcttcgcacactttttga

SEQ ID NO: 287396 - DNA, 682 bp, Cannabis indica
cccttctactatgatgtactgtgctgcctttcttctgatttttggagcttcatttcggttatctggaagttccccagagttgagataggctgctcttggcgtcatccagtttggagatgtgtcgatcattttgatttgtttcgtgccagtgatgctaggctcttcaaggaactaggtagggaccaggtttgccttgtcacttatattgctgctcgccaatcgagctaacgcagatcatgtattttgctcagatatgctatcactttttctctccgaacctcctattcgccggatacatgatttaccaccagctgtgaatcactgcaaatctcaatgtgttcagccttcatttccttcgctagcttaagtccagcaattagggcctcgtactcggcttcgttgttagaggctttgaatccgaatttgaccgcaacgtgcaggtgttgccccccagcctttctcgatttgacgagcatatcatccacgtacacttccatatttctgccgatctggtctttaaacatcttgttcaccaatctttggtatgtagctccggtgtttttaagaccaaatggcattactttgtagcagtagagacccatatctatccggaaacttgtatgttcttggtctggcgaatacatttggattttattgtagcccgaataagcatccatgaagc

SEQ ID NO: 287397 - DNA, 763 bp, Cannabis indica
aatacccctttagtgttatttttatgattttagtgtgaaggggcaaaatggtcattttgccccattgttagtttgtctttttgtggcttaataaattggaaaatatatgtttaattaatgcttttgttggctgaagtaaagggattaagtggcattctttcattttacaaaacttagaaaaaaattacaaaattttcaaaaggaaaactctctctcttttcctccctctttcggcctccttgtgcagcaaggattcttgctatttttttcttggatttcaagctcactttgttcagatttggtgttatcaagttgttggtatgtttcccttagcttttctttaagttcttgaaattttggtgaatgtttgatcattgcatgctttgagttttgtggctgtagtgttgctaggtttttgattatgttttcagaagctttattatgtctaaaatgaatggattatctaggttataatgcatgcttgctatcttgtttaagttgtgtgatttttagctcaaaagtttggtttcaaagcaaattcttgattttcgttgctagggttgctgttatggttaggtaaggttttctggtgttaaatgatgttggaatatgttgatttatgcatgttttagtggctgtttggaggtttagtcaagttttgagtttttgaacttaatcttgaacctccaatggtgaaatgtgtttctgtgcttaaagcttggttttgttgctttggaaatgttctaggggatatatagaacag

SEQ ID NO: 287398 - DNA, 531 bp, Cannabis indica
tcgattactgcgaagtcagccatcgacttggcagttacggggcagttcccaaagtgattgggagcttgatcatccctttaattgctatgacatctctcgagaagccatagatgcttgatgtcataggtcgcaaatccttctcttgcaatcccatttgcttgaaggcttggaaattcagcaaattcaccgaactcccattgtcgaccagtatacgatggacattgtctccaccaatattggcgactatcaccagtgcatcagagtgcgggtggtggacccatctcgcatcgctctccataaagacgatgtcctcgcattctttcttgaagagcttctctggccgttcaccaagattgttcacattggttaacggcctctccttggcttctctggcatacctttcttgcgatttgcgagagtcgcctgcgatgtgcggtcctccgattatggttaagatattgcgaggtgttctcgagccactcgcgttctggctatctcctttgccatccgcttggggatgtccctcctcgc

SEQ ID NO: 287399 - DNA, 805 bp, Cannabis indica
aataattaattgagtattgttatattggctgaaatgaggatttgaaactctttattttcattttacaaaattggaaaagttagaaaaaagtgtgaaaagctctctctctttctctctctattcggccctccttgagcagcaaggaagtggatattttcttggtgattcaagctctttttaacaagatttagtgttcacaagttaattggtatgatttctatagctctcttttaagtttcttggaatttttggatgaaaatgatgatttgcatgctagttcttgaggtgttgttgctgctgtgtttgtgtgatgatttcagaggtttaatcttgtttatttgagtagaataaagctgcttgtgatgcatgattgttatgttgtttaaagttgtggaatttttagctcaaaattatagttttcaaagagaaattgtgaaattggttgctgtgtttgttgcatgagtttgagaatgatttctgcagttttattatgcatgattatgtagtttgattctagttttgatgcttgtaggtgagctttagccaagtttgagttttgaactcaaagcttggagctcacatggcatttttcgtatctgtacttgctgggttgttttgatgctttagaaatgttctttagggtatatagaacaggtctggaaggtttggtttggtttgggtttgatttgaaagagttatgaatttttgatagttttctgcgaggaaccggaattccggatgagggtttaggaattcctagaaccggaattccggttgcagaaccggtctaccggttgggggattt

SEQ ID NO: 287400 - DNA, 510 bp, Cannabis indica
ttttctccttattatttttttttggagattcttacttatacttgtatcctttcccagcttgctgctgaggccggccgcctttccaagaacataatcaaccacggcttcgtcctgtccgattttggggacatggatgaagttaggaagatccttcaggatcttactgctgagaggcggctttatcaggaggctgctgagcgccgggaggccaatgaggaagaggcccagcggagggaagcgcaggcggaggcaatgatccgggaggaggccctgcggagagataggctggaggccaggcaccaggaggagctgaggacggagggcgaagccactgcgaaggccaggcgggagcttcgggaggccagggaagccttggaggaaatagttgccaaggtgaggtccttagaggaaactcaccagaccaacttggaatccagggccaccctggccgcggagctgaaggagctcagagacttcaaggacctgttggatattattttaccaggatct

SEQ ID NO: 287401 - DNA, 494 bp, Cannabis indica
actttacagatttaaataaagcctgtcccaaagacagcttccaacttcctagcattgaccaacttgttgatgccactgcaggtcacgaacttcttagctttatggacgcatactcgggatataatcaaatcccgatgtatgaaccagaccaggagcatacctcgttcattactgatcaaggcctatattgttataaagtaatgccttttggtttgataaacgcaggtgcgacgtatcaaagacttttaaatatgatgttcgcaaatcttattgggaacaccatggaagtatatgttgacgatatgctcgtaaaatctcaacatgcaaaggaccatgtcacccatttacaggcaatgtttgatatactgcgacgatataaaatgcgactaaacccttggaagtgcgtctttcgagttggctccgagaaattcctcagattcatggttaatcaacgaggaatagaggcaaaccccgcgaagatcagggcgttggtg

SEQ ID NO: 287402 - DNA, 619 bp, Cannabis indica
cgaaaacatagaaatcaatgctctataatgcgagctggtcccaatcgaccaacagcttacgataaaccgatatagactcgcgtgtctaggttctatcagctcgttataagatgtccgtaactgcgaattaaacaagaacgcagacatcctagacttaactaaatgttaggtgtatcctaagcccgcgagcttacaccgaaatatgaacagccaactcgaacattagaagtcgcatacgttgctgtacttagtaaatagaaactgttattcatttattaatgtttacgttttagtttaattactgtgaatcaatgtataaaaagattgacaatgaatgcaatcctggtgtaactaacaagacacttgctttgtatataaaggagtgatccaccatgaaatgacacctacgaaactcttgcaatagtggactaagcagaccgtgatctgactgaaccactatactcctttgtcttcttgatatttccagattttactaagtacttacgttcttagttcgagtactcgccgttttaactcttagaatagtgcaagtggatcctggtcacagaatactaaactcatatcctatactaacatacattttgaatccattgataga

SEQ ID NO: 287403 - DNA, 696 bp, Cannabis indica
ctctttcttcttccttgaaatttcgaaccacttagtgattagagtagtgcccacacacagcaagtgatacctcaatcatagtgaggaagatcgtgaagaaagacattcaacaagaaggagtttcagcactaaagaaggagagaaagagatccaggttcagatcttgataatactctgcgacagaaaggatacaagggttagagatctgaacggaaggagtcatattattccgctgcacccaatgtaaggtttctaatactttatatgtgtttatttcataatcgttttagaagttcatatttagggtgttaatcaacatacttgtgagtagatctaagatcctggtaaaataatttccaacaactggcctcagagccatggtaattgatttgcttgcaagaaatttggacttaaaacgatttgtttgtgttttggatggtatcatgttgttttgagtgttgtttgatgattgattgatgtttgtgaattttcgtgaaaaataattgaatatctgtttctggaattatttttattggatagtatggaaaaaattaagcaatttacttttttacagaactcaatttcgatttaatttgaattagttatgattttttgaagtttcgaaaaatatcagggtggtgcaactacccacgcgcgcgcatgaggggcatccctcggacagcacgcgcacagaca

SEQ ID NO: 287404 - DNA, 592 bp, Cannabis indica
aaaaacatagtgtgtcaatacgacttgcctcacaaaatagtctcagacaatgggaaccagtttgactgcgaagacttcaccgaattctgcaaccagcatggagtcgttaaaagcttctccgcagttgcaaggccacaaacaaatggaaaagcagaagcggtcaataaaatcctaaaggtcaccctaaagaaaaagctgttagcctgcaagaacaattggcgcgaagaattaccaagagtgttatgggcctaccggacaaccccaagaaccacgaccggccactcgccatttttgatggcgtatggttgtgagacaatggtcccggtggaaacgttattcccatcccacaggagaacgacttacgatccaacaacaaataaagctttattacaagaagcgttggatcagattgaggaactccgggatgagtctcaaatacgaatggcggcttatcaaaagaaggtgactaagtactttaactctaaagttaaaagtagaaaattcactattggtgatatggtcctaagaagagtcttcccagtcactcaggaacccggagcgggggtacttgggccaaattgggaaggaccat

SEQ ID NO: 287405 - DNA, 681 bp, Cannabis indica
tttaggcggtaaattcctaaattttccctctatattttcaattcctataccttaattatcacttattcagttgagccttcattagcatattagcaatctctatcgtcttcatccccaaatcaacctctctatttcactctctaaaactccattatccaaactgcctggtaatctcacgaactccctctccgtcgatgatgaagagagaacgaacaggaaagtagcaggttcatgtattactttgggtttttctcttcctcctttttataattttcttttccacttttttcctccaattcttctttcccctttatatttttgaggcttttctgttctcaatttgtcttgttttcctattttgttatttggattcttcttatttttatttctttaggatttttactaatatgaactttgttatctaagtttacatgtaatttagagtagcttattgtttgtgataaatctcttcagaattgattttaaatctgccatggagattcatgaatgaaataaatcaccatttatattttcttaagaaagtctctttcaagaaattgtgttttacctattacacaaagctagatgattatttttttggaattcagatttttttattaactacaataattaaagttattatttttgtcttgtaaacgtcaatatgataatggataaaat

SEQ ID NO: 287406 - DNA, 1173 bp, Cannabis indica
tcttctattcctttcatgttatcactaaggattaacatgtcatccacatataagcaaacaattatcacataattttttacaagtttttgaatacaaacacttgtctccattgttatgcctaaagccatttgaaagaatagcattgtcaaacttgacatgccattgtttcggagcttgctttaatccatataaggatttcttcaacttacacactttatgttcattgtttggtaggacaaacccctcaggttgttccatatagacctcctcatcaaggtcaccatttaagaatgtcatttttacatccatttggtgaacatacaagttgtgtaatgaagccaatgcaaacaacacctttatggtagttgttctagcaacaggagcataagtatcaaaataatcaataccctccttttgcctaaaaactttagctactaacctagctttaaaggtttgtatagagccatcagtgtgatatttctttcgaaatgtccacttacacccaattgctttgcatccttgcagaagatccacaacatcacaggtgtcattggagagaattgagtccatctcatcatcaactgcttctctccaaaatgcactatctctagattgcatggcttctagaaaagtcttaggatcatcctcaataagaagtattaaaggaattttccttattacttcttctctagtcccttctaccacgtagaaagaaattagttgagaatctatttcatccttatttagacttttctcttttctcaccctttgacctctcctaggttcaatgggttgttctacaactttagtagtgttctcctcttgagatcctcttttagaagtagaagcttgagaattactttcatataaaatattctcacctagaggtgtggaactttgagagttgtcctcatacaacttattctcaaaaaattctacttctctagattcaattacaacattggattccacatccaatagcctatatgccttactattgttggcataaccaacaaatgcagattttatggcccttgaacccaacttggttctatttggttcggtcttcttacaataagcaagacacccccaccactttgtaagtaaccaactatttggttttattcctctcgatccataactcatatggagacatgtcatttttcttcatag

SEQ ID NO: 287407 - DNA, 659 bp, Cannabis indica
attagatatgataaatttaccgtaatatatgttcaattcaatataacctagttgatcctagatcaaatgatctcaatcttgacatggttaggttcaatctcaagagtgttatttgtgttctttgatttgttacttaagcctaccttttggtccgtgtgatatgtacattttggaaacatgatagtacaattgagttggagcgctaatcatagatacggaatctatagcttctattcggatatagaagtgaaacaatcactactagaaaattgggctttagtgacacacattgagtaactctaaaagtgtatagtgacactacaatgcgcgtcactaatgagggtgactgaaaccttttacattcattttctacgcgtcactataggggtatagtgtcaggttttgtcagactgaaaaggtaatagccacacatatgaagtgtcactatatcatatttttagagatatagttacatacaaaaagtaccgctatattaaatatttttcttttttattaatattgttaatttttatttatttatttattttgttttaatactaaaaagtaaaataaaagtccaattaaatattaatttgaaaaatataatatttaattattttaattcaaatttttatatattataaataataatttataat

SEQ ID NO: 287408 - DNA, 677 bp, Cannabis indica
gtatgcaagcatctagagtatgtattatgtgatgccatgctataaatgttaattattatgtatatatgaatgaggtaaatagatgagttagggtttaaggcaataagtgcgtaagtgtggtatcggtgcttaactcgctggggttgttgatttcaggggtactagtaatggacctccgcaatcatccagaccacagggcgagcaagtagagcccggggctacccgaaccgatccaccagcaccgcctccacctccgcaaaatccgggggataatgcggaggctgttaatgctaatcctcctgctgattggcagcagatgtttcatgaaatgcggagtgttatacttcgtcaagaagaagagttgcaacgtttgaggcaacaagctgttccagctaatcaagggttaccaccagctcctgtgccagtggtgggtaaccaagggtttattatgccgcatcgggactctgtgttcgagcggtttgtgaagctgcaacctccggtttttctgggaggtatcgacattattaaggccgatcagtggatgagcactgtgttgggttttatgccctaaataaaactcattacaatctgattacttatcaatttagaagtgaagcatgtttccatgtatgttacatgtttatggtttaatacatatatttgatatatgcacaaaa

SEQ ID NO: 287409 - DNA, 720 bp, Cannabis indica
tatgtttgtgtatgtctaaacatttgtttgtctttaagtgttttgtcgttgatcataatttgccaagggggagattgtaagtgtcatgtctttgtgtggcaaattatgtaaatacttttgtttagtatttctgcttcagtattgtttgtctaacatcttttctgtagttagttgcatctgatttcactaagttcattttagtgccatgtcagctttctgcgtgtttgttagtttgtgccagctgtactttgctggttggttagttagtcagtttttattatctttaggatataaattctgttatgtctgttgttctaactaactctcttcggttagaatcattttcttgattcttgctctgctagggcacaacatctctttgttttgttttgttgtttgcagagagagattccagagatcatcctgaggttgaagatggagttcgaatctgcttgatctgaagggagttcagattactatgctgaaggtggttcagctgtgtgtatgctaagtgttcttgtgtactgagatctaaatgagtttagatctcaaagcttgaggttgttcaagtgttaggtaactttgtacaaaagtcaatttagattacattgtttgatttgatgaatcaaaactggaatttgtaattgaattgattgtatagtgaaagttactgtacccggttcaagggaacccaagcactactcggttgaaatgcgtttc

SEQ ID NO: 287410 - DNA, 650 bp, Cannabis indica
taacaccctaactagcataggcgtgttaacgttattttaaacatactgtccagctcgttgctaatcaacgaggttaatgaaaatcgtgattaattaaaattttcttatttaattaaaaacttataatattacatataaaatatttcaggatcccgtttacaaaatactttacaaaagtttgctattcgtttacaaaatatttgtcgcccagcgaatagcaaaaaaagccctgatgtcccgaggatcgtacgctccaggcctaaccgtcccgacatgtacaatcttcatctgctcgtcctcacgattcctcaactttacccttacccttacctacatataaacatagcactgtgagtcgacagactcagtaaaaagcataaatcatataacatacatacatcccggattatgatcagacgcccatatcccggaccataaccctaatccccgtgtcccacacggtactgagtctagaacgttcgtacgacggtaccattgaccataatatcagcctatactcggtacgctagtcatactctagccgtaccgatgtgatattgtatcagcctatactcggtatgctagtcatactctagtcgtaccgatgtgatacagtctagtagtacggtgctattgaccataatatcagc

SEQ ID NO: 287411 - DNA, 586 bp, Cannabis indica
agagtgaaaactaaccaaaaatatgacccaaaaattagactaattttagcctaacaaattcccccaaactagattcttactcgccctcgagtaagataaatactactaactactaatccactaactacgctatcagataatcacaatattactgcctcatgttctgttttcttccactgctcaaactagaatttcaattccaccaactctaacaattaatttagatgctcagtttgtcacacgctgcataaacacaagatgacttcacaatcgaaataatgttataatggttttactctttccaaccattccactacccgataactcatatgcttgcatgcttacctctctccactaatgttgacaacatcctttctgaatcaatagggctttttgaggtttagaaagtatggcttagatacttggaaaatgaaaaacaattttgggtaaagatatcataagcacaaaaataacccagaagcttcttctaatttcaaatttcccaaagtgttctcacaactaaccacgactgagaaattttttttctttcttttcccaacatcactgaatttttattatttttctt

SEQ ID NO: 287412 - DNA, 922 bp, Cannabis indica
tattatggttaaaatatctaataaaaatatctaggttaatttcaaatttattaattatttaattgtcatataagataatttactatcatatttacaaataaaaagataaagttatcttttaatttaaaaaatgttaaatatcaaaatatctaatcttataattaaataatagataattattaaagaaattgagaaatttttaaatcttaccataaattggaaatatttaaaattggaaaaaatccaaattagaaatatttaaaattggagaaaattgaatttttgggaaaaaatcccaaaaaaacgggtttgggagtgtgctgcccacgaggctgcacgtgcagcctgcagaggctgcaaatcacccattgcgcgtgcggagggtcccgtgtgtgtgaaatctcggcgctgacaggcttcgtgtgggcggatgtgcagcatctcctcgcgcagacatacgagttcagctaagcgtgcgcgtggcctggttgtccgagtgcctggtgcacacgatgcgcccactcgacagccatggcacccaaatttccaatattcacaacttcaccaatttttatcacaatcgagtttcgtaaaaaaggaaaattgcttaatttttcacaaggaatccaaataaaatattttcaaaaacagaaaaaatatttttcatggaaaaaggttctgtacaacacaaacattcatcaactaacacataaaccacatgaaaccatccaaataaacacaaaacatcgttttaattcatatttcaggaaagtaaatcattaccatggctctagtgccagttgttggaaatattttaccaggatctagatttactaccatgtatgttttacgaacaacctaatatgaattctaaaacaataaaataaacacatatcaagtttatgaaaccttacattgggtg

SEQ ID NO: 287413 - DNA, 195 bp, Cannabis indica
tagaataccacatagggttaaggttgaattacttggcattaaaaatgaaaaataaaatgataaaagggcaagtaaagtggccggccatagcattgtggaaacaagcctatcactttttcaactttcctattttatcatttctagtttcccattttcacaaagattgtcaattctctcattcaaccacataaatgt

SEQ ID NO: 287414 - DNA, 558 bp, Cannabis indica
tatatgtacaaaaaaaaagagataataataataaaagaagtgggtggaatcttggttgtactgggttaatctcgaagcagctcagtcaatgcgcggaggaaggcgaggtccaatacgcgcctctaccatggcatcaagcttcttcttcttctcccgaaatttggcaatcatttcctcaggtttggggtagaaggtaagcttgatattttggtcgttggtagaccaagccatgaagactccatcgtcgaagcgctttgggcaccggccgcaggaaacaggagaaaggagctcggctctttttgccttcttggtggtttgttccttgaagtccctgagctccttcagctccgcggctagagcggccctggactctaagttcgcctggtgagtttcctctaaggatctcaccttggcaaccatttcgtccaaggcttccctggcctcccggagctcccgcttggccttggcagcagcctcactttctgccctcagctcctcctgatgctgggcctccagcctgtccctccgctgggcctcgtcccggatcatggcctccgc

SEQ ID NO: 287415 - DNA, 227 bp, Cannabis indica
atagcgtatctatatggtggaatatatagagcgttctatataactgagagtgcaattctaagttccaagagtggatgcaacaaggaattaataagctagtgaatttacttggtaaattcttgatcagcttattggaagctcggatatataggcccatggtccccatactagttgagacaatactgcttgtaagactcagttaattgattatgattaatcaattataa

SEQ ID NO: 287416 - DNA, 560 bp, Cannabis indica
agttggttatctccagcaggtgggtgagatcccttccagtatttgtggaaggaagggagttatcaattgatctgatagaattaaaattggaggactttgatgttattttgggtatggattggcttgcaaaatacaacgccactattgattgcaagagaaaaatggtaacttttcagcctgagggcgaggacccctttgtatttgtggggaagatgcagggatcccgaattcccttaatttcagcgcttaaggcaagagatttgttgtgtgaggggtgcattggtttcttagcaaatgtagtggatgctacctgggaaccacaagcgggaccagagcatgtccagtggttcgagaatttctggatgtttttccagaagagttatcggggttaccgccgaaacgtgacgttgattttaagattgatctaataccaggagcagagcctgtatcaaaagctccctacaggatggcacctgcagagctgaaagaattaaaagtgcaattatagggaatgatggatttaaaatttacaagaccgagtacttcaccttggggtgcac

SEQ ID NO: 287417 - DNA, 543 bp, Cannabis indica
ggcataaaacccaacaacaaattcttaatggattttcatccattagacaaacataatagtgttagatctcgatagataaatatttgaaaatgcaacatttagctgttcatcaatagatgacaccttagactagtatttacaatatgaaataatgaagaagtttataaaaataagaataactttgactctcgctaatcggaacattgttggattcttatttttaatcgaaattatcctttattattcctattagcttattcactttgaatttgcttacatagtatatcattggatgaatggtttgtaaatcatctgcttataatgtcattctattttcttttatgaaattgaatggcacagatgactataatcccaacagtctatcccgaaaagatataatcctcgatcttagaatcttctacttgtatatgcttactttaggcaaattagacttagagttatattagtagtggtggtccatgctagaatcattactcattgtaaatttggtataaatttaagtctttgactttaaattttaga

SEQ ID NO: 287418 - DNA, 612 bp, Cannabis indica
taattttttccaaactatccataaaaataattccaaaaacagaaaattaattatttttcccagaatttcacaaacatcaatcaatcatcaatacaacacacaaaataacatgataccatccaaatcacaaacaaatcgttttaagtccaaatttctagcaagcaaatcaattacaacggctctagtgccagttgaacgataataaataaacacatataaagtatgagaaaccttacagtgggtgcagctgaataatatgtctccttccactcaaatctctaacccttgattcctttctgttgcaaagtataatcaagatctgagtctgaatgtccttctcttggatttgatccttcacagtcttctaaactatgattgaggtactgtttgctgtgtgtaggcactactctactcactaggatttcgaaattgtatctctcttgtgttgaagaagaagaagatgggcggctatatatagatgaaaggaaaatctcaactttctggaagaggtagtttcctgaattactgaacaaatgcttaactgccttatttggtgtgagccatcactttccatttatagataactgctagatttaggttagtaattaattg

SEQ ID NO: 287419 - DNA, 456 bp, Cannabis indica
aaaatggaaaccattctagcaaccttttcttcgatcaaaataagaagtcaacgttgtcccggtaggcgagagtcaaggttatcttattttatgagcttccaccattgtttcatacttcgtaaatttatctctaagtagtcaccgtaggggagagtctaatagagacgaaaacttacaaaacacttatcaaatgagatcttacggtgttaaatgcgttcaacgaataaccatccataagggggacgaagtctagcgtctcgaggttatattgaaaacatttaactattgtaagaccaacaatggagatcgaatatccttataactaaaagctcattattttaaagagttgtattttctttgatatttattttaatcaatttattttaaaatatatttatttaattaaaatttccaatttagaataaaattctaaatataaattttaatttaatattt

SEQ ID NO: 287420 - DNA, 756 bp, Cannabis indica
catctgatccgatttagatttttaaaatttacatccgatccgatccaattattatgattagatatctaaattaaatatctaattcctttcttccacctgcacaacactcccaacaatatctttcaaaacaattatcagaaccacactttttttaatatgattttttcacaaatacataaaaacaacaaaataataattacaaaaatatagttgtgtagaattttaaatatttttacaatttttatgatttatttataaaaaaatactatctctttatgttgtactcatgttaattttttgttatatgtatgcttttttttattgttattttaatattgtttagacattattttcatattacttttatgtagttttttaattgttttcgtattatttttataaagaaacggtaaaaatataaaaaacatatatataaaaatgtaattttttttacaaaaaataatgacttatgtaatttattttttttaattgtatatcaaattcacattataattataccactctactttaaacaattctacaaattttaaaaaacaacccataaaaaccattccggtagttgtaaaatgaagattctgcaacagtacatctccttcaaatattatttttcacttttttttataacacagacattaggagtgttcataaaatagttgatccaatccaatctgcacgatccaatccaatccaattcgcaaagtgcggatatccgcaattgtgcggattggattggat

SEQ ID NO: 287421 - DNA, 506 bp, Cannabis indica
gtgacagtcataagcagaatttgatcttagtcagactccatgtcagttggctaaaatagtcaacactaagtatgcgttattattaaaattgaatgatcttactttgatattaaaatattatttttaaaaataatcttgttcgaatttcaaagtttgctaaccatatcatatctttttcaaatttattattttctgcaatatatattttaattaagattataagattaagaatatgttaggtttcacattctatcttattagatattttttattaaaattatatttttagcaaaaataacatgaaaattgaaaatttggttagtttaggtttgaatagaaattttagggtttcaaaactataaattttcaaacttgttttattttattgttttaataaaatattctaaccatactaaaatatcttttttttaaaaaaaaattagtttatttatgtaatattaatttattaaattataagacttagaatataatattgaaatatctaa

SEQ ID NO: 287422 - DNA, 457 bp, Cannabis indica
gtaaaataatttccaacactccaggcatgcccctgacgtcaaggtcgaggagatggacgatgattgggcggccccagctcgagattcaggaaaggtagaagaagatgcagaaggaagtgggactgattcggtggacaacactcagttgaatgagcccttttcatgcaaggacatggtctcgagggtcaccaaatcagatcttaccacttttacgagactgaaacttctgcgacttgcttctttacgacctaaacctactgagagggtgcacctttcctttaccaatcctgcgatcattcccacagaaaatgtggtagtctcaaaacccattcttcgatttggggtttcggtcccttttcaccccttcattgcggccattctcaagcgttacgacgtgtctccttttcaactaacccccaacacgttatcgctacagccctggccttctatgcgatgt

SEQ ID NO: 287423 - DNA, 610 bp, Cannabis indica
tctttccaatgttcatttacgttttgttagacgatcagcaaattgagctgaccctactttgttgctaggtacgctcgatccttatctggtcgtagcattcttgagacttctattccctctgatcttcagactatttgtattcggaatgctaatttaatggagttgcaatttcatgtcaaaaaaaaaaatctatgttgaagttacctacatccgtgcttagttagaggctttcatttataataataactagaaaactaagccgcgcttcgcgcggtgttgtccagtttttataatttttttatgtaaatattatataaatttatatttttacgcattgagtaatataatttaaagtataacattaatttcaacgtgtgtattataaataaagtagtagtattgtaactgaaaatattatttttaaaatatatagaaagattgtgatttttggacaaatattaaaaatgctaacaaaaaattattaaaaattaataaattccaaaataataataataatatatatgtataatattgaaaaacattattagtctactattaaaagttatagatattgctaataaataaattataaatttatagatgtactatt

SEQ ID NO: 287424 - DNA, 195 bp, Cannabis indica
aagtccgcgggaagtgatttagtcgtatcacttatagtgttgtagtgtaccgagtataggctgttactctgtcaaaagtaccgtcgtacgaacgttcgagactcagtaccgtgtgggacacggggattagggatgtggtcaggggtatgggcgtctgatcataacccgcgatttatgtatgttttatgatttatg

SEQ ID NO: 287425 - DNA, 758 bp, Cannabis indica
taattattgttttatttttatggttttagtaataattattaattattattttcttatcaattaataattattgttttattattaattattaattaagatttttgttgtaaattataactgtgtttttttaaatgtatgtgacaggttcaactgttaatgcgtgtgttatgtataatggtgtttgggagcttgatggtagagattgggtttataaacggggcaaaaatttgacatttgacattgatccgaacctaagctactcaggtttggttgatgttttgtatgaagaactggatgttgacaaagtggagtatgacttgaaattggaagtaaattacaagtacaggaaaggctatgagtatcgccctgaagttattggaaatgataagcgtgcaaggtactttttatctacacttgcgaagaagccagatgaatttactcctttgtttgtgactttgttaaagaagaatgtttgcgtcgatcctagtcccacaccaagttcttattggaattattttaccaagatctagatttactaacaagtatgtttgattaacaacctaatatgaattctaaaacaatgaaaataaacacatataaagtttagaaaaccttacagtgggtgcagcggaatattatgactccttccattcagatctctagcccttgattcctttttgtagcagagcataatcaagatctgaatctggatcttcttttctccttctttgatgtagattttccatagtcttacatac

SEQ ID NO: 287426 - DNA, 477 bp, Cannabis indica
ctggttttgaatgcacacacacgcgcgcggggcttggtgacgctcggacaagcacgctcgtttcgacaggagctgaccgagaattctcagacacagccctgtctgaatggctgctcatgccgagctccctcggccaacacaggctgcacgcaggggtatgcaatgcaccaattttattttcttcatatcttttgattcaaaaatcatttttcattgaaacaaaagccatttttggtataattttgtgtagaatctaagttttttaattaaaaaatctaattgtcagaataaaattaatttttattaattttttaattaattaaaattagttttagatattagtaagcttttaaattttttgtaaaatttgttttcttcacaaaaataagcattgtggttaattttgaaattttagattatatcagatatttatttttttattaaatttgaatagattcttactttgatattaaaata

SEQ ID NO: 287427 - DNA, 531 bp, Cannabis indica
aatactatgatggcaacacttataaaagtgttgtttaaactcatatcttttagcaacaatctaggaggcaacacttgtaaaagtgttgccttttactttttcttactcaaaaaaaaagtgttaccataaaatatttttgtagtagtggagatggataataaaatatgtaacccttaaaccttatagcttttcaaatgaaatatgctcatttatggtttagggcccagatcttttctttgacaattgtactctaactatatatgggtatttataaaatgtgtacatgtcatcaagtcggttttcaaccttatcacaactcaaaatatgtttgagaaacaactttggttagaacacgattcgatatgtacaccccattgttgagtatcaatagacaaagatttaggaaagattggagtttgctatgtaggctccaccccatgtccaaaaaatgcttagtttcttaaatctgttacacactataatttgggtgtaccaagcatatgtatcgggcaatgaacccatgcttttaaa

SEQ ID NO: 287428 - DNA, 809 bp, Cannabis indica
caagcagtttttctcaactagtatgggcaccatgtgcctatataactgagcttccaataagtagatctagaatttacaaagtaaattctctaacttattaattcctccttgcaccactatagattttgaattgcactctcaattatatagaacgctctatatgttctacgctatagatacgctatgagttatctattgttataatcctaataataatccattgttataatcctaataatcaattatcctctatggatgatttacattgagtagggacaaaattatcgttacacccttcaatatttttatcgctaaaacacttagcaacctgtaaatgatatttcagcgaactaatataattactaaaatgagtgctctatcatttatctctatttagccaagctcgaaggaaataatcgtttcacttctatgtccagatagaagctatagatttcgtatttatgattagcgctccctctcaatcgaactaccatgtccttaatctatatgtcacgagaagatccattggtcgactttaacgaatagattgaagaacacaaataatacaattgaactagaacctaagcatctcaggattgagatcttttaatctaagatcaactaggtgatattgaattgaatagatattacggtaagtttatcatatctagttcaagttcaacatcggtcccttctgatgcatactccacacatccaacccaagcttactttaactaatgccctagaaaggacatagcacttatccaaggtgcaagtaaactaagttgtagattatcgtatcagttaaa

SEQ ID NO: 287429 - DNA, 208 bp, Cannabis indica
ctgcacaagcttttaccattttatttttccattattttaatgccatacaattctaacctaaacctagatggcattctataaatagaaagtattggcttcaggaaactcatgactttgcatattgttcctttcagaaaaagccatgcgccaccctctctctcttttcctctcttcaatttcgaaattccttgagtgatagagtagtgcc

SEQ ID NO: 287430 - DNA, 553 bp, Cannabis indica
aaatgtgacataatatataattaatgtaattttttaactaatagtaataaagtaaatattagtactattaaattgggttcctaacaccttaaaacatcacttttaaattttctagttccttacataaaatatttataaaaattaaaaattatcatattttcttcaattttgtatgcattgttcgatattggctcccctactatcttattctggctccgcagagggaatcgagttctcacccaataatggaaactctccatccatcacttcttgtgcatcaatagattcagaggtgagatcaaattcgtgttctggtaggtcgacaaggattttctagtttgaaggcaactctttactcgtagaagcaggcttcgaaagaggctttttcttctttgccatagaagacaaagaaacaataccgtgtcactttttgggctgaatttaattttctttcttcaaagttaaatatgatgatttcaatttttttaggttgacatttaattgatatcaaattcacattcactatgataaaaactaaaaactaaataaaaaa

SEQ ID NO: 287431 - DNA, 187 bp, Cannabis indica
gatatagatacgtcattagttatccattattataaccctaaacttctaagttaatacagaagttatagattccatctttatggtagcaatcccactcaattatactatcatattcccaaaatgtatagtactcttgagatcgaacctaaccacatcaggattaaggtcatttgatctaggatcaaca

SEQ ID NO: 287432 - DNA, 849 bp, Cannabis indica
aaatattaaattaaaatttatatttaaaattactaattttacttaaataaatatatattaaaataaatagattaaaataaatattagatgaaaatacactttaaataatgagctttattataaggatatttgatctccattgttggttctacataattcttgttttagtgagattcatccctaatagatggacgttcattagcaatttaacgccgtagaatctcgaaagataagtattattgtaagtgttttattcttagtaacgtccatccgaatagtggctgctaagagtaggacttacaaggtatgaaacaatggtagaagctcatgaaataagaatgaccttgactctcgactaaaacgaagcaacgtcggattctcttttcgatcgaataaaaggttactagaatggtgtccattttagttgagctgactgctctattcaatgattgatatctttgacactcgcccaatacgaagcactatataagtttgctggaaactttggaaattatttaggattgtttgtgtttgtattttcacttgtcattcctacttgctaagtgcttaataatttctgaatgtgtatgattttgtattaaaccttacttgatttctatttattgatatttgtagtttacaataagactatgaacaaccccatggtgtcactgttgactgacaacaagatctctagagctaactttgtcaaatggaaagagaacattaatattgctctcataggtgagagtgccctatttgtgttgactgaagcggctcctgagcagccaggtgagagtgcgaccatggtagttatggaaaagttcgagcgctggcagaatgctaaca

SEQ ID NO: 287433 - DNA, 506 bp, Cannabis indica
aatttcccaaaaatacccttttagtgattattatgtggttttagtgagtttattaaatgaaaataaatgttattttatttgtttaatgggctgaaatgagggttatatgttatgttatttactttcattttacaaaaaaatacaaagtttaaaaagttagaaaattttcaagaaaaactctctcaagctctctctctatttcggctgggtgtgtgagtgcatgaagctggtttctttctttgattttcaagcaatttctcttccaatctaagcattcttcaagctaggttagctcctcttccttgtttctttaaaaattgttgaattgtgatgaattaagtgatatgcatgcatgaatttttggttgttattgctgctgtgttttaaggatattttcagaggttaaagcatgtttgctagatgttatttgagttgtttttgaagcatgattcttaggttgagcaagctatggtttttctatgtaaaatatgtgatttttgaaagaa

SEQ ID NO: 287434 - DNA, 546 bp, Cannabis indica
actgatagagtgcgagcacatcgatttgtggaaggcctgaaaccaatggttgctcgagatgtggaaattgtgtcaaggggtcaattcagttatgctcaagttgtcgaaatggctcttacggctgagcggagtgaaaacaaaatttggaaggaaaatgctgccaggagagaatctaagaaaggtggagccaattctaatgaccacaagaaacggggacaggaccagtccgggcagccaagtcaagacaagaggtacaaaagtgataacgaccaacgatttaatggcagcagtgggcgaaacattccagaatgccctaaatgtaccaaacgtcatctcggcgagtgtcgcgcaaaagcatgctacaaatgtggaaaagaaggacacatcaaacgcaattgcccactgtggggacagactgggaacagagcagaacccaagaaagatgacaagtatgttccagccagagtttttgccatcactcaagcagaagctgaggccagtccttcggttgtatcaggtcagattcctatggccaacaccacttgt

SEQ ID NO: 287435 - DNA, 576 bp, Cannabis indica
cgcccaggcctgtgaacatgcaattcgcataggagcccacttcacttgttcgaccatctatccctttgctggaaaagggaaggctgtcatgtctgagattaaaatcaatgtcaggtgatgatggacttctcattttctgggcgggcagtcattctgcattttacttcttttttgatcttcttgactttcatgccttgtattttcttgatggctgttttcttaaccacactatttttgttctgtgcagacatgtctcggaagatgcttgatgctctaaggaagaggatgggcggaagctctagcgcctctcctccggccaagaagcttaagggcggtgaggggtccttagagaagagaccttctggagaggttattgacctttccgaggagctgactgctgcaaacccttctacccccaaatttgccaagtccaaggagtctaaaccaccaacgactgggtcagaactggtcatgagcgttcctgagggggtgcaggcacaaactccacctttgcccgtgctgccataggccaaaaagggcaaagagatgctgtcccactatatgaaccggctggtt

SEQ ID NO: 287436 - DNA, 552 bp, Cannabis indica
atacattatgtacatataattatgaaataaatcatgtgaaccatgcaagattaaatgtcatttctgatctatattaataagtaaatctgattatattgaaatgagttttatttagggcataaagcccaacagttcattatgtccagaattcctatgggaatgcgtggatcggtggaggcagctgagaaggtgaaagattttatcaaagtgatggatgagcaatttgacacttcagataaatctttgtccatcaatctcatccaagagttctcgtccacaaaactcaccggtgtgaaaggagttcgagaacacatttctaaaatgagggacatcactgctcatttgagaaactcgatgttatcattcctgataccttcctggttcattacattcttcacaatcttcctccacagtatgggcctttcaaaatttcctacaacacacataaagaaaaatggactatcaatgaattgatgaccatgtgtgttcaagaggaagccaggctccgtacaggagcaagtcgaaagtgttcacctgaccactcaacctaag

SEQ ID NO: 287437 - DNA, 632 bp, Cannabis indica
gcagatagctcagataatttttctggacattgaagtcgaacacttctccatctagtaataaattcattgacagattcatctggtctttgcttagtttcagctaagtcactaagagtgacttcccttattgagcttacaaactgagcaatgaaggctctttgcatgtcatcccatgtgattatcgatcctggtggtaattgcgtataccaagtgaatgccacccctttaagcgattgtacgaattgtcttatgagtaatggatctgactgagcagattcaccacatgctgagacaaagtacgccagatgttctttgggggacccatttatcccatcaaacttttcaaattgtaagtttatgtaatttgggggatatggaacataatcataatgagacgggtatggtttatgatatccaagaataggcatgtttgttgtttcataacattctcggatgctttccatgattagtgctttcaattcctgatgaggtattgaagttgatggtgtaggctcttttgaacaaggttgcattggcaaagttattgacacttgcccctgttccacttgtttttgcttacttaaactatcttgtttagtctaattgtgttgtaagatattcaacttcagcgt

SEQ ID NO: 287438 - DNA, 602 bp, Cannabis indica
tgtatcaccgcatcatttttggccatataatcccgcattagactctccaaagaacttggttgggaattttgagcatgttgtgaatgtcgcggttgttgtgaaaaacccggtggatatgcttgtcttccttgggctggtgcggtgcttgagcttgctccttgacccccccaagacaaattaggatgattcttccatgcttgattgtaagagtttgagaatgccccattgtttctgttaaaattctgatttcccatgtaacaaacggactccggattagatggacacttctcaaacacatgcccttctccacaaaacacacatgagacatcatcactttgaatggcagcagctggttgaatatttttagcgttcccaatactcaaattcttcaaaacattcgtcatggaagccatttgagctgtcaaagccgttattgcatctacctcaaggacccccgccacttttctacttgttggagctcttgtgttggaccattggtagttgttacttgcaatggtctccaaaatctcaaatgcttcattgtaagacttcgacaaaatagcaccattggccgatgcatctaacaccattcgagaagctgc

SEQ ID NO: 287439 - DNA, 1241 bp, Cannabis indica
ctctgaagtttacttaacaacgaagggtgataaaaatgagtaatgtgccagtgcaatggggtattttataggcaaaaagaggtaactggatacaaaggaaccttagatgcctcgacttcccgcctcaaaagcgaatatgggaaatcaaaagtaatcgagtgcaaccgcaaccgtggagagagaaattcagattttcaaaatattaattgtcagagcattaattagctgaaaactgaagggacgcccagtcatcttcacatcgagtctcgaacagtcatgctcgacacgtgtccccatccgaaggcagagccagcttgaaataagtctacacgcaacctcggaggtcccgtacagacttgggggcaaatgttatcccaaatttggcactctgacgtggcatcacgagaatggtgacacgtggactccacttggagcatctgctcggaacgatatgccgagcaggatgcctcgctggcacatccagaatggaatattcaacgagccgtgcagaatgatcaacacttagcgaattcagcttgacgcatcatgagtcatcagctcaatccctacaactcagggatcaacttacgtggatgtggcatacacacgatcccactatcagtgtattcagcctcaatcccacgatccttgcattcagcattgatcacacgatctttctatttatgtgcattgtaacgagagaggaaactcttcctcctcaagtttccagccctataaatagtgaggaatgttcactgggcaaaggaccaagaaattataagccgatacgcagtaagctaaggctatatcactatctaagaattatatattcagagatactattgtaagagctataagaaaacgaaatttcttccttgttcttaagtcaatacaaataacgaggattaggctattaccgaactgctcgaggctgaacctctataaaattcctgtgtctcattattgctttcttatacattttcactacgacatatcgtttatcgcttatcaaaaagactcattgtcgttggctaaaagcgaagtcgacataattgattaattaaaatcaattaactgagtcttacaagcagtatggtctcaactagtatggggaccatgggcctatatcaccgagcttccaataagcaaatcaagaatttactaagtaaatccactaacttattaattccttgttgaatccacgcatagaacttagattttcactctcagtcatatagaac

SEQ ID NO: 287440 - DNA, 619 bp, Cannabis indica
aaccatactgttttgttctgtgcagacatgtgtcgaaagatgatcgatgctctgaggaagagaatgggcggaagctctagtgcctctcctccgaccaagaagtctaagggcagtgaggggtcctcagagaagagacctttcggagaggtcattgacctttctgaggagctgtctgctgcaaacccttctacccccaaatctaccaagtccaaggagtctggacaaccaacgactgggtctaaactggtcaggagtactcctgagcgggtgcaggcaccaactctgcctttgcctgtgcttccagaggccaaaaagggcaaggagatgctggcccactacatgaaccggctggttcccgaggttagtgagcaactggctggtgatgatagtgactcatctctggatgtgttggtgggtggagtcctgagggagttcatcagggtaagtcttttttgatacttccctttaactttccacacttagctccatatactgaattttttcctttgtgcaggccggtttgaagttggcttacacttactcccgggctaaatctgttgcttctaagagtgtggctctgtccgacaccttgagggcggaggcggacttggccaaaaag

SEQ ID NO: 287441 - DNA, 532 bp, Cannabis indica
actaagtaaattctaaatctacttatttgaaacttgattatataggcctatggtcccgacactagttgagataatactgcttgcagactcagatttattagtttttaattaatcgattataattctacaattagaatatgtcttatttatgaattttccttaagcaatggcttaattgtgaagaaaataagtttttaggtttatttgttaattaagagactttgcattgtctattcaataaataaaataaatgacaattagatttgataattaattataattattaaataaatagtgttgacatttataggattgaaattagaaaatatggtattattaaaagaagaataagtggttgaaataaactggcaaaattgtaaccagtgaagcccattagtgtggccggccactagattgtaatttttgcctattattattattttttttaatccatatcattaaatcccaaaccctagttgaaatactataaaaggaacatgatgttctcattctcatccaacacttttcaacc

SEQ ID NO: 287442 - DNA, 757 bp, Cannabis indica
aagaaaacacttgggttgcctccaagagcgctgtctttatcgtcatatagccggacgctgagctgtgttcttcatagtggcgccagaatcatggcggacttggcttggtcaaattgacctcccaagtagagctttaaacgctgtccattaactttgaaagttgctggaccttcaccttttaactccaccgctccataaggaaacaccttgactactgtgaatggtcctgaccaccttgacttcaactttccaggaaacagcttcaaccttgaattgaatagtaacacttgctgcccaggttgaaactccttccttactagaccttggtcatgccacttcttagttctctccttgtagatttttgcgttctcataggcttcatttcgaaactcctctagctcattcaactgtagcagccttttctcccctgcagcttttaattccatgttaagagtcttcatggcccaaaaagctttatgctctaactccaccggcagatgacaagcctttccaaacaccaaccgatatggagacatgccaatcggtgttttgaaagcagttctgtatgcccacaatgcatcatctaattttcttgaccaatctttccttgatctttgcactgttttctctagaatcatcttgatctcccgattagaaatttcagcttggccattactttggggatgatatggtaaagcagttcgatgtcggacaccatatcttgaaaggagtgcttcaaactgtttattgcagaagt

SEQ ID NO: 287443 - DNA, 552 bp, Cannabis indica
aatttttcaaataaaaagaaaccctaaaatgtaagtgtaaaataaataaaactaattaagctaaaaacaaaaacataaaatatgggattggataataagtttataaaaatatggcatatcaaataccataaaaaatcttaaatgtaaaaaaatgccatagaagagtggcaaacttaaaaatgccatatttttctaactttgttatgaaatctcatatttcatgtaattttcacatttataaatatattttcagaaagtgtggacaacatttataccttttatctgattttaattaccaaaataccacttacactatcacttacagaatcagacgatggttgctgcgtggttgcatcagacgaaagtttcaatcagacgatggttgcagagtggttgctgggtggttggtcgaaggttgcattagacgaaggtttcaatcagatgaagtttctaggtggttgttgggtggttggccgaaggttgcatcaaacgaaggtttcaatcaaacaaaataactgtcagcaaaatgtttatgcaactgttgtgaaacat

SEQ ID NO: 287444 - DNA, 641 bp, Cannabis indica
tcacggccagcaaggggcgctgatgcccttgtacaagtactttagggatgtggcagacttctttggcctctgcccgacccaaatgactccaaagggcattaagtatttgtccactctcttcgtcctctacgcttcccagggatgggatgctccttcctctcacgaggttgcctggttcttcgatctggagtctacccccaagcaaggcaggtcggggtacttctacttctctcagccaggcttcaagtggttgagcggcacggatgacaaggccatcagcaaaatagggtgttttgttgatgagtacttcatggtgaaggattcgagtatcacccggactcagtttcagcagattctgacatatcaccgtcctcccctcacccttgctcttagggatagagctcaaaaacttgctcggttgtcggaggaagacaggaatatcatccagttgacctccgatgataatctggtaaagtatgggctttaccctgagtacttttctcctaagtccatggcgtggaagaagaggaagtccggtgccggccggcctgaacgagctcatcaggaggatgagctcattcaacttaagcgagaggctaagttgaagggaggtgtcggggccaagcagtacgctcatgagc

SEQ ID NO: 287445 - DNA, 532 bp, Cannabis indica
tttttcacttcaaccatcttcctcaaacacacaataactagcacagccatagtagagccaatacccacgccaaaaccctcgccaactaccattaaaaacccacaatttctccctcatttcttcaccattttacccaatttttattttaaaatcttctattttcaatatctaaacttatactgtaaaaaagtttggtttttcccctctatatctataaccgaaactattaaaataaaaggtggtggtataactccggccaccgattttagcggaaaaaacgttgaatctcaatgtccattaaagtataaatatgattctattcattttattaatgtacattgttatattttgtttttagtaaatttgttttggaatatttctattttattaattatgttgtgtgtgtgctaggtggcaggatttttatcgcaatttgtcgccgaattgcgtttataaggtaaatatttactaacttgatatatattatatatgtatatattttgtgttttattgaatatgtgtttatatatat

SEQ ID NO: 287446 - DNA, 802 bp, Cannabis indica
tttgaatcatagtggatatcaagctaatctctgagacgagcttgacagagacgtagcccgtaattttggggtgaactctgaaacaatctggtgatttctctccctcactacttgtttttcattcatactaaacctaaatctgtgtgtgtgtgtttagatctgggttttctgggtttctagggtttggaatcgagcaagttctcagagagaacttgctctgctagggtttcgagtttgtgagtgtgtgagtgaattgtgtctgagtgtttgggattctagactcttctattgagtctttgaatcaaaggattcatacgacatcaagattggtgtcgtggggttaatacggggtcgtattggtctaagttttacttagacaaggaaaggtcaattctgaccttaagactgatattattggctttgttggtgtagggttaaaacagtaaaatcctacagtggtatcagagcctggtttggctaaggaagatcaacaaagaatcaagaaaaatatcaggaaggaatttggcaagaaaatcttgaaagaaagattgacaaaagaacaacactcaaacagcaagaagatcaagattcaaattcaaatatcagaaacacaaactgagaaattctaaaactcttatctgtttccttttaattttattaaaatgagtaacataaaagttgacattgataaatttgatggtacaggagactacagaatttggagaaggaaaattaggtctctcctagctcaacagaaactactaagggtgctagatgaacctattgaatggccagaaggaac

SEQ ID NO: 287447 - DNA, 752 bp, Cannabis indica
ttaagaactaataatgcatcatttttttttcttatatatttttattttatttgtcaaaatcaataaaaaaaatatatcaaattcttatcacataaaaatgtaattttactattgaaaaattaatttaccaaattttagaaattccactaatataatcatcaataataatgtagtatgatgattacatgaaataaatctcctctaaaaaaatacatgaaattaactataaactttttatatgctgttcttctagtcttcaagatttactgtgtacggctcctaatattaaaaaataaatatgttaataataaaagtaagattttttatactgagtcacaacaaattgtaatttttgtaactaatacttttagtgatggacctattttagtcacaacataataatgatgatttataattagttacaacttttttacttttagtcacaaattttgttgtgattaaaaataagattttttgtagtgatatttttcttatcaatttttaaaatttaaaaaaaaaaaaacaaaacaaaaaatggttatagaatacatattttttaaaaacaaaaaattacttttatttttatgattaaaaaattaaaaaaataaaaaaataaaaaatattaccaaatgccccttaaactaattaaatatttaagtagtcaaataatagtattaattactcattattataatatttaattaattagtatttttatttgtataaacaaaaattaaatattattcttatta

SEQ ID NO: 287448 - DNA, 828 bp, Cannabis indica
tatcaaacgcgtggagaaaaaataggttgcgtatgtagcgattgtccgggagctactccctgagttcacggattataaagtggaaagaatccccagagaaaagaatgcccaaacagactgtttgcctaacatagcgtcagacaacgagattgagaaactaggggtggtgcccgttgaacgcctcacggaaccagcattaaagccaagaatattgttgcagcagttgagccagagccaaactggatgacccccatcatcgactaaacataccaaacgcaagttgactcaagaaagggcgctgtccaaaagggtacagtaccaagcgcaccgagatgttatgatggataacatgttagcccaagatatgtttccaagagggggggtgaattggaaatttatactaatttcggtaaatcaaaacttttaacacaaaattaagcaattagccacttaatcaaataaaagcaagtaatatggcaagcaatatattatgacaaataatcaaacttgtaaaataaagagtttaaggattagaagatgcaaactctcgatttttacaaggttcggtagaactatgccacctacgtccttggtcttcaaagctatggacctagctttgagttccaatatcgagccaagttaacgggcttgactaacccttacaaccggggaatttttcaccaaggtttttcccaaacctctcacaatagttttcttccaaggactatcaacctcgccggattgttgaagtgccaatctcacttttctcgggttgtttacaaaatcggtgtcaacctcacctacaaccgagttgtttttctaccggtg

SEQ ID NO: 287449 - DNA, 811 bp, Cannabis indica
ttcgtatttgagactcgtcccggagctcttcaacctgatccagcgcttcctgtaataaagcttggtttgtagctggatcataagtcgttctcctgtgggacgggaataacgtttctaccgggaccattgcttcacaaccgtacgccattgaaaaaggcgagtggccggtcgtggttcttggggtcgtccggtaggcccataacactcttggcaactcttcgggccagttgtttttgcaggccagcagctttttctttagggtgacctttaggattttgttgactgcttctgcttgtccgtttgtttgcggccttgccaccgcggagaagctttttacgactccgtgttggttgcagaagtcagtgaactcttcgcaatcaaattgctttccattgtcagagactattttgtgaggcaagccatatcgacacactatgtttttaataacaaagtctagtgcttttttagcagttatagtcttcattggctcagcctccgtccatttggtgaagtagtctactgctactattgcatactttactcctccctttcctgttggcagggacccaataagatctattccccagaccgcgaagggccagggactagtcatcagggtaatctcattgggaggagctctcggtatgttcgcgaacctttggcacgaatcacatttttggacgtagtctatgcaatcttttttcattgttggccagaagtccctgtctcaatattttctttgagagacttggtcctcctgtatgatctccacagaacccttcatggacctctagcataatttgcctagctt

SEQ ID NO: 287450 - DNA, 631 bp, Cannabis indica
cccaaactcgaactcaaaatcgaaaatggaactagaaccgaactaagactagaccaggacaaagacctataccgaaacccgaaccaatatcaaaacccagatagagacctaaacctgaaccgagacaaggactcgaactcgaacctagaccgggacccaaacccacacaataaccaggacctggacctagaataacgatagggagatgggaaacagaactaggaccatgacctagtacccgacctagtcgcgaacttgaatctattacctagctcgtgacccgacgcgagaaatggaaccacactgggacccgagatttggacccagggcttggacaaaacccgtaatagtgtctagatttggcacccagccctggacccgaaccctgacaaggacctgaacccacaccaaaactgaaacccagccccaaacccaaaagtggactcgaacccgtaccctgtgacccaaaattggaaccaaaactggaagttgacaaggactggaatgaggacttggacttggattcataattgaaattggtcgagcaccccaaatcagacttagacccgaattgggagccggacacggatcccaacccaaacctggactcgggacccgaacttgaacctga

SEQ ID NO: 287451 - DNA, 592 bp, Cannabis indica
atttgttaggtcaaaaataacacaaaaatattgaacaacaatctaaattgacctcctgtagtattaaaacaagtaggaggtcaatcaaaaaaagagatgttaattaatcaaagatccaattgatcaccacgcctgtattgtaaatatgcagttacaaataatccaaccaaagtaataggaattagacctaagaaaatttacaaataaaaaaacttcaatcattttaatttctttgaaagggaaaaaggagaggtaatatctatccttaaattttaatcggtattactcatgaatctcaataaccaaaaattaaaaaattgacacgttaagtaactatagaataaatgaactaccacagaaggtttttatgaattgttcgttcaattaatttcaaataagtcctatcttgttcagaccgataaatagagctgaggttatagtcaaagctgctagtagaaaaccgaaataactagttatagtaggcataaagagactaaataaaatatgttctttttatacatatgtttctaaagcacttccataaatttccatttataaaagatacgaagataaaaaaaaataccaattgaaa

SEQ ID NO: 287452 - DNA, 540 bp, Cannabis indica
gggtgttaatcaacatacttgtgagtagatctaagatcctggtaaaataatttccaacaactggcctcagagccatggtaattgatttgcttgcaagaaatttggacttaaaacgatttgtttgtgttttggatggtatcatgttgttttgtgtgttgtatgatgattgattgatgtttgtgaattttcgtgaaaaataattgaatatctgtttctggaattatttttattggatagtatggaaaaaattaagcaatttacttttttacagaactcaatttcgatttaatttgaattagttatgattttttgaagtttcgaaaaatatcgggatggtgtcactgcaccacgcgcgcgcatgaggggcttccctcggacagcacgcgcacggacacgatttcgtgtctgaaaccgaggcctgcgcgcgcggagaggctgcttgcagcctcctgcgccgagttttctcggtcagctcctcccttgcgcgcgcgcggacagtatgcaatgcatactgtccgtacagctcgcaattttttcgtt

SEQ ID NO: 287453 - DNA, 678 bp, Cannabis indica
tgcacaaccggaattccgattcctcccaggaagcattcaaaaattcataacttgctcaaatcaaatccaattcaaacaaaaccttccagacctgttctaaataccccaaagaacatttctaaagcatctacacagtccagaacacacagatatcaaaaatgccattaaagctccaagctttgagttcaaaactcaaacttggttaaatctaactaacatgcatccaaatcagttcaaacttacttaaacatgcatattaaaacctctgaaaacacaggaaatcgacctcaataaacacagcaacaaaactcacaaattcatttgaaaaaccatagcttttgaactaaaaattgacaaactagagtaaggataactatcatgcatttcaacctatctaatcacatttagttcagcattttaatcatagaaacaacaacaacaactaaaagcagcaacaacatcaaaaccatacatgcattactcattttttcatcattttcaacaaacttaaagaaggaatgattagaagctaacctagcttgattagaacaccaaaaagagttgaaatcacaaggaaaaatccaaggacccttgctgcacaaagaggccgaaagagagagagaggctagagaggaaatggtttgattttctttttctaaatttttctaacttttgaaa

SEQ ID NO: 287454 - DNA, 634 bp, Cannabis indica
tcttggacggttgggcattcttagttttggccatttttctttgaaaccctagaacacaaacactcttacactttgaaaaaaatattagacctttgaggaaaaaaaatagaaggagaagagtgagtggtaatcgtgggtgagtgggtagttgagcatatataacatttgattttacttacccaaaatcagaaaaataactaaaaaaggaaagtaacttccttacctttgcatcacgtgtggagagaaaagaggaaaccaaaaaggtttttccaaacaatggtcaatgtttccttaaaaggaaaaggaaaccaaatatccccacacaatctaagcaattaattaccctaccataaccgaaattgccaccaaaaaggaaacaaaaaataattaattatttaagtacaagtttcctaaaaacaccaaactaagaccaaatctcaacaaataaaggaaacattctataaaaaaatacaattaaaacatgtttccataaaatgaaaaataaaagaaaaaaatatttacaaagattcgaaaaaaaatcgaaaaaaatatggccccccttttctttaattttttcaaaaaaatgccccccaaaaaaactttagcaaataatgaacaagagaacacaaagaga

SEQ ID NO: 287455 - DNA, 595 bp, Cannabis indica
cctatttctacttcatgaaaagtctctcaagtcttggacgtgttcaaatcttttaaggctgaagttgagaatcaacttagcaaaagaataaagcaagtcaggtctgaccgtggtggtgagtactatggcagatatgacggatcaggtgaacaacgtccaggaccttttgccagatatctagaggagtgtggaattgtcccacagtacactatgccaggatctcctagcatgaatggtgttgctgaaagacgaaaccgtactcttaaagatatggtaaggagtatgatcagtcattcaaccttaccagaatcactctggggagaggcacttaagacagcagcctacattttgaatagggtaccaactaaagcagctgcaaaaacaccttatgagctttggacagggcgaaagcctagtcttaagcactttcatgtttggggatgtccagctgaggctaggccttataggccaaatgaaaagaagctggaacccaaaactgtgagcagctactttattggatattctgaacgatctaggggtttcaagttttatgatattgagtttgggggagaaatacggttaaagactttgtttt

SEQ ID NO: 287456 - DNA, 512 bp, Cannabis indica
atttttgtaaataaaatcaattttaggtataatattgaaaaaattccttataataagatctaagagacttgtagtgatgaaggtaatgtaaatgtaactttaagtatttaatctgccagaagaaaaaacatgtggtataaaactgtataaaatctaaaagatcatgtatttataccgcaaatactcctatgtttgaatagaatttaataaaggggttttttcattaatgtacaacaaaaattaatatattacaaaaaatgtgtaaaaaaaacttaaattataaaaaatacatacattttaataacatatttactaatatttaaatcattcaatataatatttagtaaacttaactataaatatatatgcattcataatattctttaaatgtaaattatagattaaggagctgtgtagtcattataacatgtgactttaaattttaatgttgatgattgatttattgatttgatacttataatagttactaatatatgtatggaagaagaaca

SEQ ID NO: 287457 - DNA, 533 bp, Cannabis indica
cagaagcgtcagctagacgcgtagttttcttcgtacgagccatcattctatggctgggtacggaatcagaagaaggattagcacgaagacgagggtggacttcgtgcagaagttgaagcagttcctggtcgatttgatgctcaggctcccaagactcaccaaggttcatctacaaaagaaaacacgtaagatgagtgttggacggagtatcaagcgaaaaaacaagcaaatatgccgaccaggaatacccaacagattaaagaatagccatgtttgaagaaaaatctaaactcaagaagttagagagtttttcttgagttagggcaaaaaagttcatgaagcttaaagaaagcagagtgaaaaacaaacgcaatgcagttctaaagtaagcctcacggctgatagctaacgcaaggaaatggaaaagaagagtcgcagaagtttcaaaccctagggtttcctacagtgttctttctacagcaaagatacattcaaaagcacaaaaatgcaaaaggaaaacaaaaaggaagtca

SEQ ID NO: 287458 - DNA, 489 bp, Cannabis indica
gggtgatgacgtggggacttatgccagtcatgtcctcctggcaccacgcaaaaacatcaatggcacccttcagtgtctttattattttttccttctcctacgggtctaggctctttcctagccggagtactttggtggagtcgaggtcacacactgatatctcctcgacgtcctccattggttctacgattttttcggaccccacgcggggatccaactcgtcttcttcagccatttctggctcaatagtttcccggaccatcagcacgggtaggtgggtggcaacgttgtagcattccctcgcctccccctgatttcctctcaccgtccctatcccagcttcctgggttgggaacttcaggcacaagtgccgtattgatgtgactgcgccaaagtctaccaaggcccgtcggccaaggattgcgttgtacgctgtcgggcaatccacgaccacgaaagtacagtacttgaacgtgctctgggggtgtc

SEQ ID NO: 287459 - DNA, 548 bp, Cannabis indica
gaaatctggcaaatggatgtcaagacagccttccttaatgggcttcttgaagaaaccatctatatggagcaaccagaaggttatgttcttcctgggtaggaaaataaagtttgcaaattaaataggtctatttatggacttaagcaagcttcacgctcataaataaaaggtttgatgagatcattaaaacttacggctttaatcagaatgaagatgaaccttgtgtttaccaactcaagaaagaccaagtagtagtattcctggtcctttatgttgacgacattttgaccattggcaacaatatcaagaaaattactcacatcaaggaatggctagacactcaattcgatatgaaagatttgggtgaggctgcctatgttctcggtattcagattatcagaaaccggaagaacagatccctactctctctcaaacaacttacattgacaaagttctagagagattctccatgactaataccaatggggcaaatatgccttctagatatggtatccgtctatctaaggaacagtgtcctactgatcctc

SEQ ID NO: 287460 - DNA, 728 bp, Cannabis indica
atattaaaaatttctcatttttttttggactttatttgatttatttattttttcaaattactgtcatgtttttactttatattttatattaaaaagtttacaattattaaaaataatattatttatttaataggtaaaaatatagtaaccatttaaaataactagacatacgtgcaatgacgtgcattgcacgtaacttcaacctagtatatattaaatacatctatatattaaaatatatgtgttcatttattattatatatataactaaaaaataaaaaattaatactatattaaaataaataatatttgaatctttaattttttaattgttttaaaagcaatttaatatttatataatttgatgtgaacaaatcatatatcatcttataagaaaatactcatattatattatatttttcttcattttaaatattatttgaaaatactataaattatgtttaaattaattatttataaattcaaactttatattaaaaaatatatgtatagaaatacaaatttttatatatcataagtttttatatttttgtgacaattatattataattaatttcattatcattatatataattaaaattttattaataacactttaaaatttataatttactaaacactacttaactcaaattttttccatacttaactgtgttatattattttatataatataatatttagattaaataattaagttgtaaat

SEQ ID NO: 287461 - DNA, 574 bp, Cannabis indica
caaaatttcaaaaaatcgaagaaatttaatacgtcgaaaataaagttcaaactgtctattgcacgggtttgaaataacactttgaagccacgatctctgtctcttccttgctctctctctaagtttttatctcaatttggtagctctagggttctcaaattcatagattaaaatgttctatttatagtgctttaaaagatagatgaatccccttagaattaggattttattttaaaaataaaataaaataagataagtacggcgctataatgcccaacacaatttttatttctacacctgattagtattttggtcataacttcttaaatacaactcagtattggacgattcaagatgtttcggaaagctaagaacgagatctaaaactttcatgttgagctccaagtccagttctgcctctaaggttgtcaaaatttacaattaagctccgccttgtaaaactgagctcgccgacttttactattttccaccaaaatatgctaacatccttccaaatgactctaaatgcatgattagttttttaaaaaagcctaacaaattataatcacactaa

SEQ ID NO: 287462 - DNA, 580 bp, Cannabis indica
catatataaattagggaggaaaaacaagatgtaatacatatgttatttataattgaattattgataggatgctaaaaactattatatatatatatatatggctaaggctcctttattttttttatatattttttttaaggtaggaacatgtttcttactgaaaataattgtgatgaataatcgttccaatataactgcttaaataaattgttagaatagataaggctattttcttcaaggaataatataacataatttttaaagtttaattaatagcaaaaacaccttagctccaatttgaaagattgtggctcggttgagtttttaaaagttatttttagattttggaaactcaaagtatttctactgctatatatatagttggtaattaaccaatcaattttagtttagtagtttttttttgaaaagatttcttagaagctaaaagctaaaactcaaaatggacctcaaagttgatgtacatagcacttttcattgattatatagccaattgttacatgcaacatgatattcttgttgttactcaacacataacgagaatgagatatatcaaaagaaa

SEQ ID NO: 287463 - DNA, 664 bp, Cannabis indica
tgtattgactttacagacctcaacaaagcatgccctaaagattgttttccacttccaagaatggatcagctcgtcgattcaacagccaggcacgaaatattaagcttcatggatgcttattcgggctacaatcaaatcaagatgcatccgccagaccaagaagatacaagtttccgaacagatataggtctctactgctacaacgtcatgccatttggtcttaaaaacgccggagctacataccagagactggtcaactaaatgtttaaagatcagatcggcagaaacatggaagtgtacgtggatgatatgctcgtcaaatctagaaaggctagcaggcacatagatgacctggacgaatgtttcaaagtcctcagaaaatacaacatgaaattgaatcgcctaaaatgctccttcggaagtttctaggcttcatcgtcaacgctcgaggaattgaagccaatctagaaaaaatcccagccctcctggatatgaactcgccaacaaaaaccaaagaggtacaaaacctaactggtcgaattgccgcactcagcagattcgtgtcaaaatcaacggataaatgtgtcccattcttcaacatcctgtgaggaaacataaagtttgagtggatagaagaatgtgaaagatcttttcaagatctaaa

SEQ ID NO: 287464 - DNA, 549 bp, Cannabis indica
ggttggcacgattcccgaggccaacctcgccaaccgatcaaaatgcgtcgtatattccgtcacactcatattttctttctgggtaaggtgagtgaactcttttctcttggcacttctaacggcctcattgtagtacttcccaggtcatagttgtgacatcatgtatcatagacaccatgtcccaccataccagagcgtcctcttgaaactgaaatgtggcacacaccactctgtcatttccggtgacacccataaaattcaaaatcttggtgatcacagttagccactgctcagctttcatgacgtccggacctcccaaaaaaaccggaggtgcctgcttgcggaacctttcatacaaaggttccattctatttaccgctgctactggttcggcctggacaataggggcaggtgccactggaacttctggaacaggcactgcatgagcaccctcctgtcttaaccgctgaatctcgttatcttgttcctcaattctggcttgcatttctgcagacctaatttcccaattctgggcttcctgattggctt

SEQ ID NO: 287465 - DNA, 482 bp, Cannabis indica
cagttcggaatagcctaatcctcattatttgtattgacttaagaacaaggagaatagttccttttcttagagctcttacaacagtatctctgaatatgaattcttagacaaaatctttcgaccttttacccagtgagtatgaaacactacttatagggctataagcttggagatgaagtatttctcttctcgttacaatttttataagcagaaagattgcatagtaaatacagaatacactgatcatgggatttggacagcttgccatatctctgtaatctgatcccaaagttatagggatttccttgatgactcacgatgcgaaagttgaatttgctaagtgttggcgttctgcgcggattgcccactgttcggtctagaggacttcgttcgagcgaatgtatgaggtgccctgctcggcctgtgtcttgcaagcagatacccgtagtcaattccacgtgtgtcaccatcgagtgatgcca

SEQ ID NO: 287466 - DNA, 535 bp, Cannabis indica
cacaagggcaatttagtcaatctcatcacaaatattctcaaattaatttcagattaatcacatataaataaaatgccaataaattatcccaaaattgtatttcggccccgaacccggttcgacccgaaacacccggttatgactataccgcgccaacttgtcagaacacacctgaaaaagacagcacatgcacactatataataatatagtcccataagcacgtaaatatattaatatcaacattttacccttctcgggtcataattactaaaatgcccctggctcaccaacggggtctgaccatgttataaatcatattaattcacatatactgaattatataataatataattcctcaattattcataattatctaattagggttttgctaatctatttcttaattctagggtattacaattaccccctccttatagaaatttcgtcccgaaatttacccgaacaaccccacatatttttactgcatatttgtcttgagttcccaggttgcctcttctactttactgttcctc

SEQ ID NO: 287467 - DNA, 727 bp, Cannabis indica
acaccactcggccagataccattcggccagaagatatcagagttgttcgagaatttctagatgtttttcccgaagaacttccagggttaccacctcagcgggagattgatttcgttatagatttggcaccaggagtggaaccggtttccaaggctccgtatagaatggctccagctgaacttaaggaattaaagattcagcttcaggggttgcttgacatagggtttattcggcctagtgtgtcaccctggggagctccggttttattcgtcaagaagaaagatggaactatgaggatgtgcatcgattatcgagaattaaacaagctaacagtgaagaataaatatccactacctaggatcgatgatctgtttgatcaacttcaggggaagacggtcttttccaagattgatctccgatcgggttatcatcagttgaaaatccgagaggaggacattccgaagacggctttccgtactaggtatggacattacgaattcttggttatgtcgtttggactaaccaatgctcctgcagcatttatggatttgatgaatagagtattcaaggatttcctcgatatctgtgtgattgtgtttatcgacgacatccttgtgtactctcaatcagaagaggagcatgagttacatcttcagatggttttgcaacggcttcgggaacacaagctttatgccaaattcaagaaatgtgaattttggctatctca

SEQ ID NO: 287468 - DNA, 705 bp, Cannabis indica
tttttttaccgatatttgttgatgagtaaaaaaaaagggaaataaaaaagattgtgtaaataaataaaataatgacagtagaaggagcaaattagtaaatagatgtatagatgaataaaaatatacatgaataatagccgcacaaaacctgagacgaatgtatacctgtgttagtgttattattttgtgacagtgtatgttctgttcaatgtctagtcgtgtctggatttttagactgttatatctgcactaacgtttgtttacgagagtctcttttaagtgttagttagtgccagctggacttatcgttgtggtcatatatataatcagtttctgttagtaaagtggttatccattaatcattcagacagttatttcggttgtttttagagagatagtcgtatcttgtttcttgtgattgtgattacaggttagatcttgaagcttgagagtgttcgtcaatggcggaatgatctgaatctggaattgttgagttcaaactgaagggatttcagtgtcatcttcatcatcagatctgaagggatttcagattgaagacatgttgaagaggagctcagttgctgcacaagggattgtgcattaacaatcagtgttcttgattgtcgttggtaattcattactatttgctgaaaaggttgtatttgattcctttagagagaattggaaattgtaatatgaaccttt

SEQ ID NO: 287469 - DNA, 712 bp, Cannabis indica
ctaccactgcatactgcaccccacctttacctttaggtaattgtgcgatcaggtcaattccctaaatggcaaagggccacagactttgcatctgtgttaacttgttgggcggagctcttggtatctttgaaaatctctggcatttgtcccacttcttaaagtaggctctcaaatcttcgatcatcgttggccaaaagtaacattgccttagaattttcttggataagttctgtccgacggcatgatttccacagaatctgttgtgaacttcagataggagtcgtgcagcttcgtcttgagtgacacatctgagcaatggcatcgagaatcctcttctgtacatgactccctctactatgatataccgtccagctttccttctcatttttcgattttcatttcagttattagggagttccccagagttgaggtaggctgctattggcgtcatccagtttggggatgtatcaatcattttgatttcttccgtgccagtgatgctaggctcttcgaggaactggataggaaccaagtttgccttgtcacttacattgttgcttgccaatcgagctaacgcgtttgcagttgtattttcttctcttggaatttgtctgagatcgtagcttttgaattgtgcgagcagatcgtgtatcttgctcagatatgctatctatcttttctcctcgtgcttcatattctccagatacatgat

SEQ ID NO: 287470 - DNA, 519 bp, Cannabis indica
aaatttacaaggacaaagaaacattgataagtacactatgctactttgcaatcaagaagacatttcaatacaaagtagtgaaatcttgcacaaaagaatacaacatagtgtgtttggacacaaactgcaaatggagtttaaaggctacaaaaaatggaaacacagaaacattcataataaggagctaccaagaagaacacacatgtgcagttacaataagatttggagatcaacgacaagctacatcaaagttgatagcagattttgtaaaaccaaaattcttgaacctgaaaacaaagtgcagcccggcagacataaagacagaaatgaaagacaaatacggaataaagatgaattacatgaaagcatggcgtagtaaagagcgagcacaaacccagctacatggaaatgctaaagagtcgtacaatctcttgccaagatacctgtacatgctacagaaaacaaatccaggtaaaaaaaataaaatattttagttcgaaaatagttgttaaaataaaa

SEQ ID NO: 287471 - DNA, 554 bp, Cannabis indica
tggcgtcctcctctgccttggttcccacggaaccgcttgctttgccccgagccaccagaagctggaacaacttttcttttctgctcagtggtggagtcaccaccatccctaccataaacaggagtaggaacagtgggggttccaccaacactcggagtcacccggggctcctgaagaaatttcactgcaccctcggctctcaaagccttctcaaccatctctgcatatgtggttgcttcagtagtagtaataaccagatcatgtcgaatctttgcactcaaacccgccaagtatttttctttcttgctaaaatcagttggcacaattcccgctgccaacttggccaaccggtcaaactttgtcgtatattcagtaaccgacattccctcagtttgaaccaattcggtgaactctttccgctttgcactgcggactgcttcgttataatacttggagttaaacaactccttgaattcttcccaggtcatcactgtgacgtcccgagtgagggttatcaactcccaccacacgagagcgtcttcctgaaactggaa

SEQ ID NO: 287472 - DNA, 517 bp, Cannabis indica
catttggttcgggtaacacgtacagcttgggaacatgatagtacaattgagtgggagcactaacatagatatggaatctatagcttctatttggacatagaagtgaaatgatgatttccttcgagcttggcttaatagagataaatggaagagctcttattttagtgattatattagtttactaaaatatcatttataggaaactaagtgttttaaggataaaatacattgatgggtgaaacagtatattaatccctactcggtgtaaatcatctatagaggatctttgattttgagattagaacgatggttaaattttcatagcgtacctatatcgtggaacatatagaacgttctatataattgagagtgcaatttcaaatctatagtggtgcaaggaggaattaataagttagggaatttacttggtaaattctaaattttcttattggaagctcggttatataggcacatggtcctcatactagttgtgacaatactgcttgtaagactcggt

SEQ ID NO: 287473 - DNA, 698 bp, Cannabis indica
ttccaagagaggaaaatacaactgcagatgcgctaacccgtttggcgagcagcaataaacctggtcccgatccagtttcttgaagagcctagcatcacaggcacagaagaaatcgaaatgatcgatacatctccgaactggatgacgccaatagcaacctatctcaactctggggaactcccagataaccgaaatgaagctcgaaaaatgagaagaaaggcagcacggtacatcatcgtagatgggatcatgtacaaaagaggattctcaatgccattactcaggtgcgtcacaccaaatgaagctgcacgacttctatatgaagttcacgatggattctgcggaaatcatgcagccggacagagcttatcaaagaaaattctaaggcaaggctacttctggccgacaatgattgaagattcgaaagcctacgtaaagaagtgcgacgaatgccagagattttcaaagataccaagagctccgcccaacgagctgacgcagatgcaaagtccgtggccctttgccatctggggaattgacctaatcgggcaattacctaaaggtaaaggcggagtgcagtacgcagtggtagcagtcgactactttacaaagtggactgaagccgagccactggcaactatcacatcaaagaaggttcaagactttatagtgaaaacatcatatgccagttcagacta

SEQ ID NO: 287474 - DNA, 784 bp, Cannabis indica
atttattttgttgatatcttatttatttaatagtaatatatattaacatattcatatgatgagatatgatattttggtataaagtttttacatgttaatatatatgatatgtgtatattatattattatatatagtgatatataatattataattgagattataacatattattatatgtatatatgtgagagagatatatatatgatatatatgagttatatgtatattatatgatgagtatgagatataattacatatatatttgtgtataatatactatgagtatgagttatatgtatataatatgtagaaatagtgatttctatatacatgcatacatgatatatatattgtgtatatgcatattaatgtatttgtatgttaatatatatgatatgtaacatatatatatttaattgtggaattaatattgatattttgtatatgttatttatgatagtatggtaacatatatacaatattaattaatataaaattatttgagagttataattttatgggagttatatattaattttgtgtattaatatatgtatataaattatcatattaatatatgtactatatggtatgataatggagatgatgataagaaaaatgtgttcattctatcattattattgtgaaactatattatgattaaagatagttacttggaaatgaagttccattttggtgataatcatctcattttatgagataagaaaaagtgaactatgtgagttacacttttttgtgtttgttcatttcatagcaagagc

SEQ ID NO: 287475 - DNA, 311 bp, Cannabis indica
tactctatcactatagggtttaaaaatatgaagagaggaagagaagagagtggttcgaatggcatagaatagatggctcaaacatttgactgaaggcaaatatgttcatcatctattgatatgaggccatcactatctatttataagcaacaacctaggtttaggttagaattatttggcatttaaaatattgaaaaattaaatggtaaattcccttcaagtggccagccataggatgtgggcccctaatttacaattttgccattttttaacaatttatcttattttctcaaaaatactattttttccaa

SEQ ID NO: 287476 - DNA, 281 bp, Cannabis indica
ttgagaaaatggaaatgaaaattgtcaaaattgtaaaatacccaagtggggcccattaacccatggacggccacttaatgcggtttttccaacgaatattttcattattttaatgcctagtaattcctaacctaaacctagtggttacctataaatagattgtgatggctcacacttagagagagagagagagagagagagagagagagagaatcagatgaaattttgcattacaaaaaaaattgagccatcttctatccttctatacccgaacctctctc

SEQ ID NO: 287477 - DNA, 648 bp, Cannabis indica
ctctctcgcatctctatgatcatcatagttctgtttttttttcacgtggttagatcttgggttatattttgtatattttttaaatctttaatatgtcattgatttttttggtcagatttgcttaatgagatgaatatttttgcttaaaatattatactgcaagattgaatgatgtgctgtcattttttttattttggtattgtttaaatcaaatcatgagcaaaatattctttatttttattattattggaatgttatttgatttcatgaagatataataaaaaaaaaactcaacaacctaatgttaaacaaaaaaaaagttaataattataattttaatataaataatatataaattatgtaatattagattttaaaaaaaacaagttatagcatttaaattttataattttagaatttactaaaacctattttaataattattttttattttttgaaaataaccctttagtgtttgtcttaaaatagacacttatacttattagtctcgattttaaactaaatattaaaagaaaaaataatatatgtatattttaagtgtccgttttaaaacgacacaaaaactcatttgtctgagtttacactactacaaaattgggctttagaggcggtttttaaggtctttca

SEQ ID NO: 287478 - DNA, 635 bp, Cannabis indica
cggtaatatttaactaaaactttaaatttgcaaagaaaaataaacataaggaggttttgccaccaaaacaaaagatagaggggttaagtgtataaaaattaaaacataagggagttttgccaccaaaaaaaagataagagggttaagtgtataaaaattaaaacataagggggtttcgccgcaaattgctcttattattttcttcttaaacttaaatggaatgcttatctactattactcaccaagtcgtgtgtccaatcaaaaccatcatgcatattaaaaatttagttttccaaagaaaaattaatttggagtatgagaactatacacacaacaaaaattgcagtatttaaaaatggagtttggaagaaagaaagtcaaaaggattgtgctgcttactatggcaacacgtcaagtagaggaaattataaatttattgtttttatttttaattaagggtaaatattattttagaccctgtgttttgcaaaagttacagattggaccttgtattttgttaaatgacaaaatgaaccctgtattttctaaaattgtaaaaataggaccctgagcttaatttttgataactttttttttaatacaaccaacttgaagataatgcttaatacgaacag

SEQ ID NO: 287479 - DNA, 563 bp, Cannabis indica
cgacttttttggcgttggtagcaactctgacgactaatacaccggcagctactccggtgacttttacagtaccgacaataaactctgggaaattcgtcgaaattggcattgtcgtcagaaaaattaccgaaaaaatcaccaaaaaactagtttcttttcttcatcaagaaaccaatttcttggtaaatttttttgtgtttttttctctatttaattgattgatgaaactggtttcaattatattcagtgtatatcatttttgttttgttttcataatctttattattgttatgtaacaaaactagttccttgatgaagaaactactttcttggtgaagaaactagtttcttgatgaagaaaccggtttcttaatgaacaaaccactctcttgatgatttttctagtgattttgttggcgacaatgccaattttgacgactttttgccgccagcaataactccggcgattttttcgacaccggcaattactccggcgacttttcaccgacatcaaactctagaatagtcgtcgaaattggcattgtcaccggtaaaattaccga

SEQ ID NO: 287480 - DNA, 634 bp, Cannabis indica
aatttctgagagcaaacctagatgtttttacctggtcacatgcggatatggtcagaatcgacccttctattatttcacatgttctgaatatcgatcctaacatccgtccagttcaacaaaaatgaaggctgttggataaagaacgagcagtagcactgaaagatgaagttgaaaagctacgcaacaacaacttcataattgaagctttttacccggcttgggtcgcgaatcccgtactcgtgcccaagccgaacaagaaatggcgagtctgtattgatttcgcagacattaacaaagcatgccctaaagattgttttccacttccaagaatcgatcagctcgtagacgcaacagcagggcacaaaattttaagcttcatggacgcttattcaggctacaatcaaatcaaaatgcatccgccagattaagaacatacaagtttccgaacagatatgggtctctattactacaaattcatgtcgtttggtctaacaaacaatggagctacataccaaagattggtaaacaagatgtttaaagaccagatcgggcgaaatatggaagtgtacgtggatgacatgctcgtcaaatccagaaagactggggggcacatagacgacctggacgaatgctt

SEQ ID NO: 287481 - DNA, 695 bp, Cannabis indica
agataataacaagtccatagagtgaaaaagtagtactcaacttgtctcattaaaaccaaaaggttttttaatggaatgatgtgtctaaagagaagttgtgagacactaatttccacctatatggacaagaggtggtgccgcctcttatgagaattgggagttattctctagagagtccatgaaatggatgttgcacatggccattaacggtgcacaagcgagatataatgaggtctcaagtgaactctagcaaagatgtgtgtgttatcaccggtttgtattaaaggaatagtggttcaatgcttcggcaaccaaaatttcaacaaactttgtggtaactacactaaggtaaaattcaagtcgaaagacattttactttatgcatctaagcaagatctctataaaagtgtttgatttattcaatcaaagtgggggatatatgtaatatttgattgattaaataatgttacaatggtgtgtcacaaattttaatctagtgggagaatgttatattatttgtatataatataatatagattaaaatatttaaattgtgacaaattatatattaatatgagattaatatatattatgtgttggaggtttagtattatattcatatataagtataaataataacacataaaattgtaaacatatgatgagttacaaatactgaaaaatgaaatgtaact

SEQ ID NO: 287482 - DNA, 1094 bp, Cannabis indica
ctttatgtgaatgagattgtgagattacatggggcaccgtattctattgtttgtgatcgagatgctcggttcacttcatctttttgggaaagcttacagagagcaatgggaactcgattgaagttcagcactgcatatcatccagagacagatggtcagactgagagaacaaatcagatcttggaagatatgttgagggcatgtgtgatagatttccaaggatcatggagcaaatacctgcctttgattgaattttcttacaacaacagctatcagtctactatcggggtagcaccctatgagatgttgtatggaagaaaatgcaggtctccactgcattgggatgagttgggagagaacaaactcctagggccagatgcagttcagcacaccaacgaagctattcagaagatcagggctagaatgatcacagctcagagcagacagaaatcttatgcagacctgaagcggagggacattgagttcgaagtgggtgatcatgtgtttcttcgagtgacaccacgaaaaggactctcggtgaagagatttggcaagagagggaaactaagtcccagatatgttggtccatttcagatattggatagagtgggcagtgtagcttatagaatagctttaccgccatcattatctggggtgcacaatgtatttcatgtatctcaactccggaaatatgtgtcagacccatcgcatgttttgagctatgaaacactgggtttgcaggaagatttgtcctacaatgaacgtccggtaaagattcttgatcaaaaggataggattttgagaaataagacaattaccttggtgaaagtcctatggagaaacagcgtggttgaggaagctacttgggagctagagtctgatatgcgagaacaatatccagaattatttgagtaaaatttcgggacgaaattttcttttagagggggataattgtaatatccgctaactccgaaagggtatttttgtaattttatttagctgagagtattttttttttattattttacatatttatggatttaaatatgtatgggattatttttttgtgatgatataatattattggcatgtgc

SEQ ID NO: 287483 - DNA, 597 bp, Cannabis indica
aacaaatatatcttcatgaagttactattgctccaaaaagattgattaaataacaatataagtttttggtgtagatttgtttttattagtcttgttttatttttgagtaatttagttaatttaaaaaatttgtaaatagtacccttttaaaataaaaaatgcaaatagtattataatgattgcaaataaaataattattggttctgaaattaaagatttaataatattaatttatttatcaattaaactgattgtagtatttataattatctttatatgattttttgtaattattaacaatagacaaatattttattaaaaaataatataagagtaatacattataaaaaatataaagaaattatttactccatacagtgctaatttataattataaatatgattactaaaatatatgtatattttataattttaataatttttacgaaaaagtttattaaaattataaaatacatatacattttaggagaattatcttatatacttatttttttaactttttttttttttaatttatggtttgagtttctggagtgttagttgcactagtggcaatatgagtttttatgtagaatt

SEQ ID NO: 287484 - DNA, 673 bp, Cannabis indica
agggtagtttgtggtatgttcattgggcaagtgaagtgattcattttgtgctcaagacttctacttcaactactttttagttttgacagataagtatttcaagtctttacatttggttatggattgttttatattatattatagattgttttgtcatcgttctttcacattatttattttttatttaattttgttgtaatataattttatttattattatttaatttgttgcttgattttgtggtgggcctacaattattaagactttgtcgataagtttaaatttaatataatcaaaatcacacgtgttttgttaagtgttcttagtttgttgcttttagccaaaaggttatacttttggttggttctctataggttttagtcgagattttgttctctttttgtagttgagttttagttttttagttaggtgtttaaatctgaatttagtctattaaatttaattcaatgatttttgcttttttaatacctgttgtttctttgaattgtttgttttttcaggtagtatttttgtattacaggtcgaaattttggctctctggtaacatctatctacaaaagaagggtgtttctaatgagctggaggtgttgtttgagaatgttataattttattgtctaaatttctagagacagttttatcccatgtggctt

SEQ ID NO: 287485 - DNA, 509 bp, Cannabis indica
cttgttcggccaagcttggggagcagctagggctggattttccttgttgattccaagttattttagcaagatcaaagtgattttaattgaggtatttcttggctttagttcttacttggtttttcttgaaaaatatgatgaaaaatgatgatgcatgcatgagtttttagttgattttgctgctgtgtttttgtggttaatttgtgtgattcaaagcatgattattgatgttgattgagctgtgttgaaagcatattagttaggttgttcaagcttgtagtttttatgtgaaaaagttatgaattttggaaagaaatgttatattttgtttctgtgaattgctggatgttcttgtatgttttcagaggtgttattatgcttagttaagtagaattaactaggctaggatgcatgttagtggatttaaccaagtttgagtttttgaactcaaagcttggtctttaatggtgaattttgtatatgtgctttctgggtgattttgaggcttt

SEQ ID NO: 287486 - DNA, 610 bp, Cannabis indica
gtttcagtgtaatcaatactctcttttgagtaaagcctttagccactaaacgtaatttaaacatttcaatctgtcccattttatcccttttagttcttaaaaaattcatttgcaacctattggtttgaaaccatcaggtaatagaactaacttccacatatacattatttttgtccatgaacttaatctcatcatccatagcttctatccattttgaagaatgtggacaattaggtgcttcactataagtaagaggttccacaaaatgaccaagatcacattcaccttctccaaggtaaataaaattatcatcacaccttattgacatcttttgtctttgagatctccatataggaggtacttctggaataacctctatttattgaccatcattttgaatgacatattccacaattagatttctctgataacaagaccctcatcaacaacaaaaccttcttcaataataggttcctcatcaatagtaggaccctcgtcatcttagatagtaggagcaatatattcatcagcaatgggagcgttatcaactagagtaagaataagactgctattattatcatctcttgaaaaagacataggaataaaaatt

SEQ ID NO: 287487 - DNA, 856 bp, Cannabis indica
gcaaaagaagtaaaaaagtcttaaaaacttacatcgtctccaagccatgtcttcggagtatgtagttcgaggaaccaagacgaatcgtgtctaccggagaagcactctctcaggtacttgttcccaatctggtcgagtacccaacagtgaaaagtcctgagcagcttccgatcaaccactctaagtgggtccgtattcacgagtgtctatgtagccctagacttctttttcatttcagtgtactcatcgaaccacttaggccgctttctcttcctccggttctccaccagttctggagctgtctctaacacctgtaccttagaatcttgagtatccccgatgctggtgatattcgtcttctcaggtgtacagaacatgtcattatcatccggtctgtaatcatttgtgagaataatttcatttttcggtgactgagcctcttcttctggttgtggctgtggctgtggttgtgactgtgaatctgctgccggccttccaggatcttgcagaagtctcattatggtcttcaactgatccataatcgttgtttgtcctcttagcagagcggtctacccttcctggtggaaatattttaccaggatctagatttactaacaagtatgtttcattaccatcctaatatgaattctaaaataatgaaataaacacatataaagtttaagaaaccttacattgggtgcagcggaatataataactccttgcgttcagatctctagcccttgattcctttatgtactagagcattatcaagatctgaacctcgatctctttctctccttccttgatgttgattctccttcttgttggttggattcttcacaatcttccacacta

SEQ ID NO: 287488 - DNA, 500 bp, Cannabis indica
ttcttccttattcttaagtcaatacaaataacgaggactgggctattaccgaactactctgggctgaacctctataaaattcttgtgtcttattattgctttattatatatattcattacgacatatcgtttatcgcttatccaaaagactcattgtcgttggctaaaagtgaagtcgacaaatacatttttgaaattcatataaaataaaataaattaattttcaacataaatataattttcctatttaattaaatctctaaatatttaagtttctagaacataatcaacttaaatatttattttctcatttaattaaatatatctaaaaaataccaaaacgtctacctagaaaatatctatctagataattcataaactaatttctaattttctaataaaaatatattttagtctatttattttaataaattattaatgaaaattacttgatttaagttgatctaaaattaattaaatgaattttcaactttaatcta

SEQ ID NO: 287489 - DNA, 878 bp, Cannabis indica
caccttaatccattctaaactgaaccatattcaataatctgcacttgggggagtgatcctgttgaattagtcaggacctatgttgagtaaatccaaacaatgttggaatttactcactggcaacaccttggttcctgcatcagcagggttctcttcacttggcactttctcgagataaacttcaccatcttctatcttttctcttatccaaaaccttctaatatcgatgtgtttagatctctcatggtaaacgggattcttacttaaatgaattgaagattggctgtctgaaaacacaacagctttgccctttatcatctgtagttcacctagaattcctttgatccaaacagcttccttgaatgcctcggttgttgccatgaactcagcttctgtagtggaaagggctacaacaggttgcaattgagacttccagctcatgcaacatgagttcagttgaaaacagtagctagttagagattttctagtatctctatttgatgcataatcagcatcaacaaaaccttcaagttccaccttgatacctgtcctcttgaatttcagaccatagttagaagtagtctttagatacctcagtaaccacttgactcctttccagtgttcttcacctgggttagacatgtatctactaagtgtactgacagcatatgctatgtcaggtctagtgctaatcatagcatcatcacacttccaatgcttcagcatatggtatttcttccatctgtttcctttctttgtcattcttgggagattgacttgctgagaacacaaaatgaccagcaatggaacatttgcatctttagaatcagtcattttaaattccttaggacagattcaatgtacttagcttgagtcaa

SEQ ID NO: 287490 - DNA, 639 bp, Cannabis indica
cataaaatgatttctgatctttattaattagtaaatctgattatattgaaatgggttttatttagggcacaaaacccaaaaatcttatgcgatttgtactttatgcaagtctaatcctttttatgtcaaatgagttaagtccttgttggtttccttatcagattgaggtctctagaatgaaaacactagtgtgggcccatgaacccttagtttgggcacacttgggtgtgtgagtcccgacaccaaatgattggttaatatttttgagtcccctataggttccatggggcccttaagaaggatgtgttaactcatttgaaatttataagtcttggtcaaagtcgcaagatatattttttttttaatttttttgaaaatcagatataagaccatagaatgtcaaaagataaatactttttataaattcaatattcttagtaacgatcacccaaatagtgactgctcaagaatataattacaaatatttaaacaatggtagtagctcatgaaagattaatcttgcatccaacccaatcttggacaacgtagaaatcttattttgatcaaataaaaagttactaaaatagtttggctaattagtaatttttccccctgaactttgacatgtactaaatcgtg

SEQ ID NO: 287491 - DNA, 899 bp, Cannabis indica
agtgcctctgctctgcactagaatacttccccctacatgaactcctccgagtccatcacagcgtccctccagtcaaccaagtagcccttgcaacactgaccctgaagctaccacatcctctgattgcagctcactcgccaatcgtccaatgcatactccttttgacacggattaagtatggtgcacccctcggggtgaggttcgcaaaccaaccgttcccaacggcacctacaaaacacgcttccactgaagccaagtccctctggacaagtcccttcggaaactacacacgccaactctatggcgcaccatcctcctgatggcaatcgagcaagacactctcatcgcaggataaagtttggtgcgtcccacctggacgaggctcgcaagccaactgcacccaatgcagcaccaagtgcactcttgcacccaatttcttcgcgaagttcacaacattggccctccggcccaaccgcatacccacggcttcatgcaaaaggtcccactgacccactgcacactcgctcctctgagctcctgcttgtgtcggctcccaaaactgtgtcacaagtttatctcccaaaatcaaccctgcatcctctgatgactcgctaactttcgataaacttgatgacacccagtcttactcttaagacttgaagtcatcccaatccgctatctcccatcggcatatgttctctgaaccattcggcttacagtgtcccatacaacaccagtgttcccataaacacaaaacatgcccataacatgccgcaaactagctcagtcttgatctcagtctacgcccttgcatattgtctatctgcagcttgcagcaatcatgcaagtcttcaccctgaacaaccaatctgttgtagtgtttccctctggattcacac

SEQ ID NO: 287492 - DNA, 550 bp, Cannabis indica
cttattaattccttattgaatccacacatagaacttggaattggactctcagtcatatagaatgctctatatttccacgatatagatacgctattaattatctattgttataatcctaatttgatcaatgaccctctaatagatgatctacattgaatagaaactaaattaccgttacaccttcaatgtattttcgatctaaaaaatatttaataaatggttttaagtttcatacaaagaaagccgaaaagaagttaacaactcaaaatagtggggttattatgactgccaaaactcaaagtttttcaagtagtagggatccaaatcctatttttggagatgttacattttatgggatattaacagatattatagaattagattattgttcagaaaatcgtgttgtattatttaagtgtgattgaatttcagtagtggcatcaagaaagaagaagattgcacaagagtaaacttatcaaaattgatgcgtgaagatgaaccatttatattagcttcggaagcagaacaagtaatgtatgtggaagacctc

SEQ ID NO: 287493 - DNA, 811 bp, Cannabis indica
taaaactataaaccacctttttaactaccccttcttatttaaacactcaaattacatgaagaataagaaaaaaaaaaaaattaaacccacatgttttcttattattggttgtgaaaaccttaacaagaacttaaaaggccaatcaattcaagccaagtcaagtaaaaaagagataacaacttgaaaagaaattaagaaaaaaagacactctttttccatttttttttttctaaagctcatattttgagttggtaggaggtgggttgtccatcattttggggggtcagcatctcattttctattatcacaaaaaaaaaaaaaaagaaaaagattaattaatcacacactaaatatctggtaatcttcttgttgaaatatttggctatttatagatcctttaaaacaaaaaacagaacagtgagagcccaagttctcttttttcttgtttttttggtttgataatggcggctttgaagatgtcatctcttctgtttcgctcactcagggctgcttctggctctggtttgctttctaaaggtatgttcttggtagttcttgcttttggtgatgaaaatatctttggtttaagttaagttgtgtaaaaatatacactttaaatcagttataatttctaatgagtttttcaacacagttccaaagttttgtcaaaagttgaccaaaagggtccaagaaaatagttatgatctttcatgaacaattttttattttttgttttcttctttttttttgttatttgtactttctaatacagccccactataaaatcctaaactatggtaacgatggcgag

SEQ ID NO: 287494 - DNA, 630 bp, Cannabis indica
tcagtgctgtagttgggtgtttctctatttcctgagttagagtaatcccaagagagtataacagaacctagggttgtgggttcgggtttcccggattagggtttcgaccatgtgatttacccggttttattatgtgattagggcatccatctagcgcaagactttccgtttaggtcggccagcacacttgaatctggaaagaaggtaagaactgtgtataatgtgtaatatgaatatctgagtgtatatatgtgttaagtgtatatgcatgcttatggtttaattgcactaccaacacttgtacagaatggtacagagtgcattggtacagtgaatatggttgaaaagtacattacagtgataccagtacgtgtacaggaaggtacagggtgtctgtggtatatcactcagtggtactcagggtacgaaacaaaccctaccaacacttgtacagcaaggtacgtagtgtatgtggtatagtggttgtaccctagtatggaacgttcttactcatttgttaagccttgtaaataggtgtatgtgggcctagatataggtcggtattatacgatatgttatatgcttttcttactgcgtctatcgactcacaaatctgcttccatgtgtagg

SEQ ID NO: 287495 - DNA, 651 bp, Cannabis indica
tatgtaatgcggaagaactataactatatcaataatacatgcaatgaaagatcgatatacctccagccattgatctttgagcttcaatccctgcgatagcttcagtattagagttcgggcttcctcgctctctcaactctctttatatggaatttgctgaatgtaatcagaatgagtgagaagctcggggaccgaaaccttatatttataggtgagatactccatcagtatctgcgtcacattaattgtcagaatattttgacaattaattcaggaaatcaaatcgggtaatgaatatagaaatctgactatatatagaatattacataattgattttgtccagattcaatgaatataaaatatttatttatcaaaaaacactactacaaaccaagcttttagaggcactttttttcagcaaatattaaagaaccgacgtcatagggttggaattttttggaagggattttgacaccacctatggcgtcggttatttggaaataaccgacgccatagggtgtcccccctatggcgtcggttatttctaaaaaaaccgacgcctaaagggtttataaccctagcccagcccatcatcttcctcattcgaccagccaacccagaaacccccaaaccagagaaccccaaaccct

SEQ ID NO: 287496 - DNA, 743 bp, Cannabis indica
ggcttgccccttgatcgcagttctcggtttatacttgatgtcgaactgacttaactccatcgcccactttaacaatctccccgatgcttctggtttcgccaaaacctgtcttaaggggaagtttgtcaaaacttcaatgctgtgagcctggaaataaggtcgcaattttcttgaggatattatcaaggcgaaagccagtttctccatttgaggataacgcgtctcggcgtctaataatcgcttactgacgtaatacaccgggtattggcgtccttggtcctcgcggattagtactgaactaatcgcatattcggagacggccaaatagatagacaaaacttctccggacaacggctttgataaaattggaggttgccccaaatgcgtttttaaagcttggaaggcctgctcgcatttttcgttccattgaaaccttttgttgcctttcaaagtctggaaaaactctttacacttatcagaggatctggatataaagcggtttaaagccgcgactttacctgtgaggctttgaacctcctttggcttagtcggtgatggcatttctaccaatgccctgatcttcgcaggattggcttctattcctcgctgatttaccataaaaccaaggaatttcccagagcccaccccaaagacgcatttcaacggatttagacgcatcttgtatcgccgcaatatgtcgaacatggcctgcaagtgggtaatatgatcctccgcatgttgcg

SEQ ID NO: 287497 - DNA, 873 bp, Cannabis indica
caaagtatgattaattgcgaatctatcctatactcggtactctagtcgtaccgatgtggtagcagttaatccatactatctgatagcctagcacatgtctgttggcatctcggtgcaactctatgcacacctcactgttgccctgatatgctaatctgacggctatataaaattttcctaacatatatctaatatgttactctgatggcaactgacatgtacgctaaacatgtataagcatatgcataacagtatactaatcttaccttgattccgaattcaggtgtgccgttcaacctgagtggaacgaactgctcagtgaattacggtctcctaaaccataataatcacaacactgataagtgacacgctaaatcacttcccggggacttaaactagaaactaaaagtttccctatcgataaaaagtatggcaataccctaaacaacataaaaatgggaagaactagggttcccaattttttcccaaccggcagaccagttatacaaccggaattccagttctggaagaaacccagaacaccaaccgtaattccggttcctacaggccattctgaactggtattccggttcagtgcaggaatttttcaaaattccataactcgaccaaatcaaccccaaactaattcaaactttccagacctgctctaaatacccccaaataacagttccaaagcaataaaacaacctagtaagcacagatacaaaaattgccattaaagctccaagctttgagttcaaaactcaagcttggttaaaccccacaacatgcatcaaaacctgcttgaatctactcaaataagttcataattaagcctatgtaaactaacaacaatcaactacaacaagcaca

SEQ ID NO: 287498 - DNA, 612 bp, Cannabis indica
cgaaatggcagcttataccgggaactccgatcctagcgaccacttatcacggttcaaccgtgtcatgacggtcatgagagtcagcaatgacgccaaatgtctgtgcttcccacttactctaagtgggtccgcggaggaatggttcaagaagctggaaccaggatccgtgggctgttggaacaagctacagaccaacttccggagacagtttgtcgccgcaagaaaggtcaacctggaggtcagtgccttgactaatatcaagcaactgcccaccgagaccttgaagaactatataaagaggttccgagaggaagcctcgaaaaccaagaaagttgacgacggacaacagcttgcgcttctccaagcaggcatccgtacggggactcctttctggaatgaactacagcaagaaggagctgctagccttcaggacttccagaagagagtccaaaaatatatcaacctcgaagaagcccaaatagtggcttatggaggatactatcccaccgggatagcagggtacatgcccggagtatcgccctcgggtactgccccgaccgcaactccacaaacaagtggcatacaattctctgctacccccggatatagtca

SEQ ID NO: 287499 - DNA, 813 bp, Cannabis indica
aaccgtcgcctatagtattaggcacggtttaaaaccgtcgcctatacccagttataggcgacggttttaaaccgtcgggaatcccagattagcgacggttttgaaccgtcgcctattttgcccaatttacgacggccgaataggcgacggttatagaaaccgacgacaatactttaaacgactgtttaaaagcgtcgcgaaaacccatttttgtagtagtgaaagcaagattcatttccctcgttttccgaaaacccagtcctcccaacgatttgggaaggcaaagtttgtcccaggctctaagatgaaggccatggtttcctttctcaaaaccccaccagaagtcacgaattagaccatcaattcgattcacaaggcgattagacaatttggtcgtttgcatggcatagataggcatggacaagcccaccgatttaataagagtagcccggccggcttttgataaagttttggccttccagccttgtaactttgacgtaagattgtcaaggatgaagttaaaatcagcatctttttgtctagatctgaagaggggtaatcccaaatacttagtaaccccttccggagaatctagacccagagcttctttaattcctttcctcatgccatcaggggtattcttgctaaagaatatggaagacttaagcttattgaccttctgcccagaccactcgcaaaacttctcaagacaattccaaaaacctttggcctcaattaagttggcacgaccaaccagaattaggtcatccgcaaagaagacatgggatagcaccgggcccccctacttagctt

SEQ ID NO: 287500 - DNA, 176 bp, Cannabis indica
aactgagtcttacaagcagaatggtctcaactagtatgggggaccatggggcctatattttcgagcttccaataagcagatcaagatttaccaagtaattcactgacttattaattccttgttgcatccacgcatagaacttggaattgcactctcagtcatatagaacgctctat

SEQ ID NO: 287501 - DNA, 864 bp, Cannabis indica
tacccctggtccgtacgggatctcgccgcggccaagcttcctctcgccgcggcgagaatattgcaaaattgggtgctctctgtatctcttaactcgccgcggcgagcctcttcatcgccgcggcgactgaagccttgtaaaacctcgagatctagccgcggccaagttgtgtttagccgcggccagatatgcacaattgctcaaaaattgagttttcttcggctcagcacgtcttttaacgaatttctgcacccgagacctcttttattccaaagaacctgaaaacatagaaaacaagcgtaattccgtcccaacacagctaaaaacgcacataaattggatccaaaacataggctaaaaatagcctaacacctcacaaggttctaactacaacaaatggtttttaactacttctctaacaagtgaacaatatgacctctatttatagagtttttcactcccatatgaacatgaatgaccaccataaagcccttagatgttaccaattataaattgagcatttatagtattaaatgggtgattttgaggagttttggaatgttagaaagactcaaaaacgtttgtgcttgtatgctgaaaaaacagtaactagttactagttaccatttttttttcagctttagccaattcttctccaaagtgttccaaatcacttacacttgattttgaaccatttatacaccttataaatgaataaatcaagtctccaacaactatatttttaatagctatcattcattcacattcataaacaattagtaacatcttttactaatttaagagtgaaaaagagatgagagttacatattcaagtgatcatcaaatttaaaggatttgcaactc

SEQ ID NO: 287502 - DNA, 592 bp, Cannabis indica
acgatctttctgtttatgcgcattgtaacgagagaggaaactcttcctcctcaagtttcctagtcctataaatagtgaggaatgttcactgggcaaggaaccgaaaaattataagtcgatacacagctaagataaggatatactattatctaagaattatatattcagagatattgttgtaagagctataagaaaaggaatattcttccttgttcttaagttaatacaaataacaaggattaggctattaccgaactgctcgaggctgaacctctataaaatttctgtgtcttattattgctttattatatatatccattacgatatatcgtttatcgcttatcaaaaagacactcgtcgttggctaaaagcaaagtcaacacacatataaagtatgagaaaccttacagtggttgcagcgaaatatgatgtctccttccactcagatctctaacccttgtatcctttctgtcgcagagtatcaccaagatctgagcccaaatgtccttctgttgaatctggattcttcacgatcttccacactatgattgagataccactttgatgtgtgtgggcactcactcactcactc

SEQ ID NO: 287503 - DNA, 554 bp, Cannabis indica
atataatatatgtatatacttttattttttttgcttgggctaggctgaacggtgcgggttgggttcattgggttagaaaaataccaagccgaaattaacccaatagcagcgggttatatttttatcaacccatatgtatttcggccataaaaaatgaccatgcttcggcccattttgggttgggttggccgggttggtcggcccattgtcaacccatgctcagccctattcaaaagtttaagtcccatggtttgtcagttcactggatttagactgccatgataattggcaataaggtatacttaccccttggataagtgttatgtcctttccaggatattggaaaagtttaccagactcagatgtatggagtatacattgaattagatcgatattgaacttggacaagatatcataaacttacagttatatctttctaagtcaatatccagttactcttgttcatcaatctgcgagccatcatcaattccacctcgcgagcattggaaatgatcttattttaagcaaattgaaatatatttttaatgaacttg

SEQ ID NO: 287504 - DNA, 641 bp, Cannabis indica
  modified_base (20)..(20): a, c, t, g, unknown or other
cagccatctcagcggcttcngttccgagaagagaaaagtcgaaatctgggactttggaaagagtggtatagatataatcagacactgcctgatcatactgcttcttcccattctctttctcagtctccaaatcgcgggccatctccacgatcgtcgcctgcgatttcttgacctcaagctccgcctgttccttcgccttgctgagttcttcgagctctttctccttggccttgctgagttcctcgagctccttctccatcctcgccacttcatgcttcagcttttttatgttctcctgaaaatgagcattttgcctcttcagcgagtcggcttccttcgaaggagtagcagcagcttttatgaagagagtcatcgactgcgcgaccagctcggcagatcgcgtaacaagatcctcataaggaatctcagccaggaacttctcttgcatggctaggaagtcgcgagctcgaacaggtggatcaattacaactttcttccccttgtcctgtgtggtcttggccagcttcttggaagagtctgcgacaagtgtagccatcgcatcgctcttcctcttttgggcgacaaccggcgaagtcgtcgttgttccacccttcggtttgatcttcaggacaggggcagac

SEQ ID NO: 287505 - DNA, 618 bp, Cannabis indica
cgatttcatatccagtagggcttgaatctctctggatggcttcaatctcggcgtgacaataaagcctagaaacttaccagagctgactccaaaggagcactttaagggattgagtttcatgttgtatttcttgaggactttgaagcatccgtcaaggtcattgatgtgccccccaaacttcttggattcgacgagcatgtcatccacatatacttccatgttttgtctgatctggtctttaaacatcttgtttaccaatctttggtatgtcgccccagcatttttgagaccaaatcgcacgactttatagtaatatagacccaaatctgttcggaaacttgtatgatcttggtctggtggatgcattttgatttggttgtactctgaataggcatccatgaagctcaatatttcgtgccctgctgttgcgtccacaagctgatcgattcttggaagtggaaaacagtctttggggcacgccttcttgacgtctgtgaaatcaatacacaaacctcttgggtgccagtacgggattagcaaccgaattcgtgtagaaagattcaattatgaagtttttatttcgtagcttctctaactcttccttcagggctagagctc

SEQ ID NO: 287506 - DNA, 638 bp, Cannabis indica
aaactagaaactaaaagtttccctatcgataaaaagcatggcaataccctaaacaacataaaaatgggaagaactagggttcccaattattccccaactggtagaccggttctacaaccagaattccgattctggaaattcctggaagccccaaccggtcgaccggttgctgatggcttccctgaaccagaattccggttcagtgcaggaactttcaaaaatttcatatctcattcaaatcaaacccaattcataccaaaccttccatacctgttctaaataccccaataaacattttcaaagcatcaaaacaacccagaaatcacatatacgaaaaatgccattaaagctccaagctttgagttcaaaactcaagcttggctaaaccccactaacatgcatccaaacctacttgaatctactcaaacatgcataatataacctctgaaaacaacaacaaccaactacaacacgcacagcaacagatttcatcggttcaccattaaaattaaggttttgagtcaaaattccaaacttgaacaaaagcaactaactgttgggttttgtaccctaaataaaactcatttcatataatcagatttaattattaataaagatcagaaataacattttatgtt

SEQ ID NO: 287507 - DNA, 551 bp, Cannabis indica
tgccaatactctcacggctgcaaaaatcatgaaccagttaactgaactgtttgggatggcgtcaattcaagctcgctttgaggcgaccaagaatttcatcaatgcacggataaaacctcatcagagcgtgcgtgatcaccttctccagatgactagttacttccaagaggctaagaatcatggagctgttatagatcagacaactgtgagtttgatcttgaacagtttgactccatcttttctgccccttacatcaaattatgtcatgaacaagttggagcttgactttcacgagttcatcaacaaccttcagacatttgaaaatttgattggaggaccacagaaaggaggaactaaagctcctacttctggcactgctaatggtacggccaaggatgaggcaaacattgcctctgcttcgagacccagtaacaaaaagaattggaagagtagcaagaagcctgttaaagctgtgaaaacatttaaaaagaaaaaggctgctaatctcgagggaaagccaaaaggaaaatgcttctattgcaatggaaagg

SEQ ID NO: 287508 - DNA, 494 bp, Cannabis indica
ttcttgttgctagaataaggcaataagcgagtttctctatcaatgggtatcggccttcagcctcaatgagtcttctaatgatgtaatagactgggtgttgtatgctgtttccttctctgattagcacgtcacttacagcatgttctgtgacagctaggtatattccaagttcttctacgtccaaaggttttgtgagtatgggaggttttgcaagttgtgcttttagctcttggaaagctatttcacattcctccgtccactcgaactgcttgtttcctcacaggatattgaagaatgggacacacttatctgttgattttgaaacaaatttgctgagtgcggcgattcgaccagtcaaactttgcacttccttggtttagttggcgacttcatatctaggagggcttgaatcttctctggattgtggcttcaattcctcgggcattgacgatgaagcctagaaactgtcccgagctgactccaaatgaacactt

SEQ ID NO: 287509 - DNA, 509 bp, Cannabis indica
agaaagatgaatccggccacttgctgcgatatgtggagagtatagggtttggagaaagtgggcgtcacccttacttgttttgggcgatagatacaacatcatgacgagcaacgctgctgaaaacttcaatagtgtcacagaagagttcaggaaatatccaataactactttggttgaatttatcaggttcacactccaatcgtggttcgctgatcgcctcgaaaatgctgacaaatgtgccacccctttggccacgctcttcgaaaaaaacttggcaaaaattcatgaaaatgcaagttacaggcgcgtccaatgttgcgaaaattatgatcactacgcaagtatacgcaatcaagtagtaaactcacacaggtgaggtcgaaccacagggaattggattaattactactaaactatacttataattctatttggcaaatcaaaagtatttatgattgaaaagggaagaaagaaattcaagaaacttaaagaaacaagtgaatattaat

SEQ ID NO: 287510 - DNA, 539 bp, Cannabis indica
aaggatgcacagcagcgtaccgctgggtgtgcaccgagtcagttggtagacatactccccggtcatcttcgcggcaaaaggagccaaagtaggcccaaggaaacggttgaaccagtccgtcagggggtcgaggtttagatcccacggattctggtagttctcctcgttaagggaattttgcacatcctctcgcaaaaccctcctcaaggcctccacctcagcgtggccccgggagtactcgtcaagggcataattgtacttggctatccgaagctcttgcctcgcctgatctccagggaccggagtcagcacaatgccgtgaggcactataaactcctccgcctcggaagggatcccgaaatcatgactcgcggccggagtgtccaccctccgcggccgcttagaagattcctctgcaaccattttgcctttgcgcttgcgcaccagagcaacctcttgctcttctttactttcttcaacttccccaggaagagcccattgctcttcttgaccttctttggcttcctcaagaagtacct

SEQ ID NO: 287511 - DNA, 596 bp, Cannabis indica
ataactcccatgcatgaattataactactcaaataataattctatgcctattaatataatatgtatgtaacatacacaatattaattatataaatatatatgttacatatctcatataaatataacatatatactataatatacatacatatcatatacacataatatatatatttattacacagctatatatgttacatacctcacacatatataacatatatatacacattaatatacatgatatatatattatatacacatatataacatatattatatatgcatgtctcaaataaatacatagaaataattatttctacatatttaatctcactaatatatattatatcacatgctctacatatatataatatatattactcatatatacatgttatatattatatatctcacatatatacatacaataacatgatataaatttcaaatatcatatatataatatgatataaacacatgatcacatatatataactcatatatatatatatcatatatattactatcatataaaatagtaaatcacaaaatatacaccaccatgctcacccatgaatggttttcacaaaatc

SEQ ID NO: 287512 - DNA, 679 bp, Cannabis indica
ccataaaaaatgggcaaattaaatttgttatatttaagtaaaaaacttttaaaatctcatattaagtataatttcttttagaatgcgtccccgcttgtacacctaaccattttcttaaaattctcctatatatatcccagttagtactagtgtttcaaacataatatattgatttatgggattgaaaatatagaacttttttctccctagtcgttatgtcttggaagttagaatcatgcatgaagaatggcaatgctatggagtgtgcacgactatacagtatcctccattttctttatattgtgctttgtgcaattatgctataggttatcctaattttcaatatatgatgaagttatttaacattgatattattgagtcccaaatctttacctcaattaggtatcaacccgaacttgatctcatgccggtgttgaacccagccttaaaactaatcttgcttacattgtggtcggtgtaggtaccaaactaaaacaaaatgagatttcgtagctctttaaaacttaatgctactaaaagacataattagaactgtacacaaaattaaaggagcactaatttttgacattgaacatgtgtcctcttaaactatgttgccacagaacacccatttgtaataaaaaaaaaaaaaaaaaaaaaaaaaaaaaaaaccccaaaa

SEQ ID NO: 287513 - DNA, 539 bp, Cannabis indica
tttctttttcttctttccaacgcatcttgaatcaactcatttggagtttgtatgtgaaagttatgcacattttactgaaagatgctgaagctgtcaaattttgctccagtagtcgcgaccaccacttttcatggtcgcgaccatggtcgcgactaggagccaaacagcgagttttttttttcgtattttgcctatggtcgcgactagactttatgtagtcgcgactaggggcgaaaaacgagatttttgggcagtttttgactttttcaaaggtagcaaccctaatttctatttaaggggctcatgttttagaaggaaaggaggcagaaataaaaccctagagatgaagaaggaggcaaaggaagcaattgtggcgatccggaatgcaatcaccaactagttctttcttaaactcttagtttctatgttaatttctgttttagttttgattatggatgttattatggattttatgaactaaactcctatttagggagatgatgaatgttgattgaaattacttttggttaatgataatt

SEQ ID NO: 287514 - DNA, 569 bp, Cannabis indica
aaaaatcaattgtaattaagttaccttgtctttgtctgtggaacaacggcccgatccatgacctttgaagtgaaatttctgacctggctctctgaggcggtaagttgaggcacgaggatcatgtcatgagtctcgaataggccagcttgcagcagcaaatttgatagtaatttttcccacattgccaggtgacgcttcaattcgttcagggaaatcgatccgaggctcgagtcaaatatgctcaacaaccaatgatccagatctacctctagtgccacccaatgctttgctccattgaagtagagggccatatatattctctccttattcttccaactggccaagaattgactttcatcccctcgaatcaaatctaatatgctctcgtcccactgatagttagcctggtcatcacccgcagcttcccaccgagcaataactcctgctgggaaaatacacggcatgatgacacatctatttgggtaggcctctggataaaagtgttgtcgcctcctcatcaaatggaatgccgcatccaaatgctaaaaacatgaaaattaaatatgtca

SEQ ID NO: 287515 - DNA, 462 bp, Cannabis indica
ttaatactaagatgaaaataattcattttattatccatctaagtataattttataaatattaaattaaaattttatttagaattttatttaaatttgatattttaattaaataaatatatatttaaaataaatagattgaaatttatattagaagaaaatacattttaaataatgagctttattaatattatgatattcgatctccattgttggttttacatagttagtgttttagtgagtaatcctccctaatggaggaacgttcattagcaatctaacaccgtagaatctcgaaagataagtattttcttttagtgtttattttagtatggatcaccctaatggtggcgactttaatagggcttacaaagagtatgaaataatggtggaagctcataagatagaatagccttgactctcgcctaaacgggacaacgctgaattctaatcttgatcgaata

SEQ ID NO: 287516 - DNA, 530 bp, Cannabis indica
tttctttttcccaggagtggaagtagggtttttctgctggttccctagacttctgcttttgggtacttggcgaggattctcctggtctctctccaagtccagcagggatggcttgatgatgcacgtggattcctgctgcctccatggctctttgcatggccaccatcacttcttgcatcttttggttttgttctttttgggctgcgatttcagcttcgtgatcggcagccttttgtgtcaagagtaccagctctgtgtagctgccttcgtcgtaggagtcgtactcattgaagtttccttcgtattcgtcatcgtgggttccttctcactcctcagagcccacatttgctcttgaggacacgtcctcatcgtttgggtcttgagcgtcttgaggaggacgaggttgacgtgtgtttcgagtctccaccattgttgttgtgtaatgttattgtctactttcaaacgcttccttcagctctcaatgaaagagcaccaaaatgttgaccgaggttttcggcaaccaatataat

SEQ ID NO: 287517 - DNA, 617 bp, Cannabis indica
ccttgccttaaaaattatgcggcaagggtattactggccaaaattgcgacaagatgccctcgcatttgcaaaaaggtgtgatagatgtcagcgaatagccacttacacacaccagcccccgagtaacctccattctatcacaagtccctggccctttgcaatatggggaatcgatttaatcggcgagttacctaagggaaaaggtggagtcaaatatgctgtagtcgcagttgattacttcacaaagtgggctgaagcaaaagcactcgcaaccatcactgcaacgaaattacgtgagttcgtctacacctccatcgtttgtcgttttggcattctgcataaactcatttcagacaatggaaaacaatttgactgtaaagagatgtgacagttatgcgacgatttggggattagaaaaagctttttccgcagttgcttacccgcagagtaatggacagactgaagccgttaataagataattaaacacaccataaagggaaaattagaaggtcgcaaaggggcttggccagatgagttatcgcaagtcctatggtcctataatacgacccctcgatctacaactggcgaaacacccttctcactttcttacgggtgc

SEQ ID NO: 287518 - DNA, 421 bp, Cannabis indica
ttttcccagctaaaaaggctacctcttttagatgcaatgggaagagctctctttagtccatttactaataagtagtatgctccttctatattagtatttctgattaaaagaggacggctacatctctgagggagagtgaaagccgtagctggttgcaaaagaaagagccggagtgtctaaagatagaaaaggcagaaaaaaaatgggcagcttaataaaaaattgtgagagtgagccaatgttctcacttgaggtcactagcacacaccgaagaaaaatcttggttcaaaatcctgtaaaaaaattccttgtttattgtctttctcaagtgtgtgtgaatatgtggattggtagaagttcaacttcacaatgagccatacttaataaatgattaggccactcattgtgtttcctctttaca

SEQ ID NO: 287519 - DNA, 854 bp, Cannabis indica
atttctgatacacacaatgagcaggttcttaattccaacctgcataatgatcaggttttttctactccttcaactgattcctcacaggttcaaatccttctgttgtcactcgaacaggaagacaaacacataaaccctcatatctcaatgaatatcattgttatcttgcactaatgcttttgcttcctcttttcaaagcaagtctaacacaccttatccattatctgctgtgttgtcttatcacaggttgtcccctgcctttcgagcaactgttatggccatttcgagtcactttgaacctgaattttttagtcaagcacatggcatacccgaatgggataatgccatggacactgagatcgatgctcttgaaaggaatgacacttggattgtggtttccttacctgagggacaacatgtcattggttgcaaatgggtgtacaaaatcaaactcaatgctgatgggagtgttgagagattgaaagctcggttggttgcaaaggggtacaaccaacaggaggggattgattacactgatacttttgctcctgttactaaacttgtgactgttaaatgtgtcattgctcttgctgcaattaagggctggcacttacatcagttggatgtaaacaatgcattcttgcatggtgatctcaaggaggatgtttatatgactcttcctcaaggttataaacctaagggggagcttcctcacaatcctgtatgcaagctaaagaaatcactttatggtttaaaacaggcttcaaggcaatggtttgcaaaattctccactgccttgtttgatgagggatttaatcactcggctacagaccattcattgttcattaaacact

SEQ ID NO: 287520 - DNA, 734 bp, Cannabis indica
ccataaataaaaaatattttagcgtctaaatttcttaaaaaggactttacacacttatccttctttgaataataccatattttttccattttaatcctataaatatcaaaactatttatttaataattataataaattatcaaataaaattgccatttattttatttattaattagaccatacaaagtcttttaattaacaaagaaatcccaaaatctcttttcttcacaattaagtccttgcttagtgaaaattcataaataagatgtagtctaattttagaattataattgattaatcaaaaccaattaaaagagtctgcaagcagtattatctcaactagtgtggggaccatggacctatataatcaagcttccaataagtagaactagaatttaccaagtaaattttctaacttattaattcctccttgcgccactctagattcagaattgtactcttaattatataaaatgctctatatgtaccaagatatagatatgctatgaattatccattattacaatccaaataatcaaagatcctctatagataatctacatcgaatagtgacaaatttaccgttctacctttcaatgtattttatctttaaaatacttagctacatataaataatatttcagtaaactaatataattattgaaatgagcctcaatcatttatctttattaagccaagctcgaaggaaattatcgttttacttctaaatactt

SEQ ID NO: 287521 - DNA, 830 bp, Cannabis indica
aagaaatatggagtgaatatgatccaaaattatggtaactttgttcttctttagttaattaataaatttctttatcattgtaatgtttctgtgaagatttatcaataatagaaagaaagattgaagaatttattattattattattattattcaattatttaattattttaggtttcaaataaaattgaaatgaagataagtataatttttattaaacaacctttggtcaattatttaaacataagatattaaaaaaaatctattaacacacaataaaggttgtttaattttatatttaaattaaatcaaaattactaatttagaaattcacacagttcaaaattttaatcaaataaaaatcatatcacttagttgagtattattaggatactcataaatatcttaacatcaaatattaaaataaagatatacagtatttataaatttatttaaattttaaataaaaataaaaataaaaaatgtaaatccactccaaaattattaataaaaactagtcattatttattcttagtcactcaagctcctataaatgtaacgaaattaaataccaaccttactttttttatatttctatctaaaattttcaaaaaatatataaagaaaaatttttgctctctatagctttaggctatggcaaaattttaaatgggggttttattaaaaaagtaaaatatcgtgtttttgaaaattataatttatttctttacaccaatttaggcaatcatttcataaaaatattttaaaaaaccataatatttgaaggaaaaaaaataacatatttctattaaaaagttactaaaagtgtcga

SEQ ID NO: 287522 - DNA, 736 bp, Cannabis indica
aaaatgcgatggatggctagattgatcacatgggtaagtttagaaccttatttcttagtggggaatattttagagaaaattaattatcgggtttgagcggggttatgggatttgaccattttacccctagtttggtgaagcacctaagttttaagttggagggcattttagtcatttcctttattgaaggataggtggctgccctaagaaagtgacacctagcaatttatttcagcaagagttaagcttagccaactcatttatctcatttgaagaaaaataaggaattagacatttcatgaactctctctttctctctttctttcggctggaacaatcaaggggcaagaaccaattttctttgccatttttctgagttttcagcaaggattcaaggggggaaatcaatctaaggtaagccctaatggtctcttctctaaatttcaagttttgaattagttgaagtagtgaaattgtaaatcatgggctgttagggttagagttgtttgaatttcggattctagggttagtttgagttaatttaagttcctagtagctggtgtagtgattgattgtaagttttatgcaactttgagctttgagttcaaagctttgggctttaatggcaacttgggttttgatggattgttctgtgaattactggctggaaattattgtttatgccctaaataggagctctggaaggtttcatggcaattggtgaagaattgagcaa

SEQ ID NO: 287523 - DNA, 318 bp, Cannabis indica
attctttctgaagcttattttaattatttcattaaatattcctatttaagttgtaaattagttatttctaactaatttttttaatcaacttaaatttgaatatcttttgaatttcaaaattaagttgaggaattctaggaattggttattaagattctttagatattttttaagttgatattttttcaaatatggataaacttaaaatggaatattttcaaattaagtggttacaacttaatttttatatttaattaaatttaatttgaaaaatatttaagttggatctttttaagatttttctataacaacttaaat

SEQ ID NO: 287524 - DNA, 717 bp, Cannabis indica
tgcatgtccataaaaaatagggtaaatactattttggaccctgtgttttgcaaaaattactaattggaccttctgttttgttaaatgataaaatagactctgaactgattttttgtcaaaataaagtttaataataatctgatctaaaggtattatgaaaaaaatatttacattttctgtatctgttcgtgttaggaattgtcttcaagttggttatatcaaaaacagaagttgtcgaaaattaagctcagggtcctatatttactattttggaaaatacatggtccattttgttatttaatataacaaaaagtccaatcgcgataacttttacaaaatacagcgtccaaaataatgtttactcaaaaaaagtattatattttaatttttgaaaatattttatacaataaactataaaatatgaatcaagaaattaaaataaaaaatacaactgataataaggttagaaaacttaagtttcattatatcaaaatttaacttgtaatttttaaaatagaaaagaataagagatgtgtccagaatgttatatttgtatattcactaatattatacaaatttatatatatttgtaattaagatatgcacatgtatagtattgaaaaattttatagtgcactgatgcattcttggagaatattttattcaattgttttttttacggtcattgtcattatttaagacatcctgtaaaaattt

SEQ ID NO: 287525 - DNA, 538 bp, Cannabis indica
aaacctattatacgatatgttatatacgtatatactctagaaccctagcagccagatagtatcgtattcctttattctcaccatctctcaattttttttatcctctctattgtaccaaatcaattgttttaatcttaagagcttcgggatcagcaatcaaccgatcattgttccgtgttttcgaaatcttcaggtaaaattcgtagttgtgttttattttcgttttcagagaaataagctttcataaaactaccatatctctctctccataggttcgctttcactgatctaggtaccgttttaaagataatttaatgatctatattttttatgaagaaactctttcctaattctgattatttcgatatcaaaaaattcatgttttacactgactgtcgaattacagtttttttaaatttcttttcgatattgccttagtaaaagtgtaatatctctctcgatatctattattttccagcgattcttgtactgttagaaatataattcaataatccatattttctttgaagaaaccttt

SEQ ID NO: 287526 - DNA, 582 bp, Cannabis indica
atcagagattgatgtattagaagccaaccatacttggatagttgttcccttaccttcaggacaatacaccatcagcaaagctcgccttgtagccaaaggctacatacaacaacaaggcattgattatttcgaaacttatgcccctgtggcaaaattcaacacacttaaactactctttgccttagctgcaataaactagtggtatctccaccacatggacatcaataatgcatttttacatggtgatctccatgaggatacttacatgaaattagagctgaacatcagtcggtttggtcggtttttttctatataaaaatctaaaattcagtttttggtatggattggtgcaatccgaaaatcgaccgaccaatccataacctatcttaaaactgaccattttgaaacctcggtttggtcggtttaaaccgcccaaaccgacattttttttaaaaaaaactatataattcaatttattctctaaacatattattatacatttcacaactataaacatacaaattaattgtttaaaactaattatcttattttttaaactttaatattaataaaataataata

SEQ ID NO: 287527 - DNA, 1182 bp, Cannabis indica
ttagtttttatttttttagtttttttacgtaaaaaaacaccagttttcgatgcattacttaaataaaaaaaaaaccagttttgtttgttgtagtagttattattttagttatggtaactctctttacttttttttttaattttcatattttttgtttttttttaaagttatcttcagttgttgtataaagtatattgtctaatagtgtagtttattaaactggtttcgtatttgatttatttcagtattcaattcaagtttatttgcaaatttattgttttttatgtgatattatatagtacttatatatatatattaaaaattatagttttacattaatttatatatacattttgtttctttataggaagatgataatgaaacatgttatgataaaaatgagttgttttaaatttttgcataatgcatatatatataatcattgaatatatcatgaaaagatgatcatttattatgatttatctaaccttgtaatatgtgtagataggatgatgtgaatttctcttgagtattcttcaattgttgctgccgatgatgaacattggagatgagtttgattgttgttgtcagatttgatttgtgcagattgtttgctggagaactgattgatcggtgtggagaaaatattaatcgatgcttgcagatttcgatccaagaaaattcgactgcgattttgatcgcaggttgaatcgctatgggagagagaagaattaacagtgagagagagaagctatcgtgaaattgtagagagagaaaaaaaagtggagagtgtttttagcttttctgtttttggttagtttttaaatttaaaggaaaaaaatctgatttgatttttaatattttttatggtattagacatgtcatttcccatatttgttaacttttttgttttgaatgccatatttagtggcattaagttttcttgccatatatatgtaaactatagtatattttcccatatttatgtaaatagccctaattctaaaataattgaaaccctaaaaactaacaatcctaaaaaaaatattcaattttaataatgaattcaagtttttggcatgttcaattttttaaggaaatttaactatgatatactgctttaattattttttactaaaataactgctagcggtattttatttttttacttgtgtattttat

SEQ ID NO: 287528 - DNA, 578 bp, Cannabis indica
tagatattttaatttttttttttaattttaaattttgatgaggtatttaaggttgtttttaacaaccttcaattttcaaaatttagttaattagtttgaaataataatttaattatattaatatattatttcacatattgttacatggatattgtgtttttcttatttaattgtttattcaaaacttttttttgtaacaaacttaatatttatttgatctaaattgctatgattaacttgttgacagatttaatgatctgatttaatcatagtctaattgtcaatagatcctataaataatttgttagaagtaaattttgtaatttctttcatctgtgtaaacttagtaacatgatagggtccattcaaatcaatttcacctgtgtgagcctatatgtttccttttaggcttagatgcatataggaagcccatttatttctagatatttaaaggggttttttttcattagtgtacaacaaaaataattatattacaaaaaatgtgcaaaaaaatacaattttaaaaatgtacacatttgaaaacatatttacaaaaattcatacatatttttaattaa

SEQ ID NO: 287529 - DNA, 1052 bp, Cannabis indica
atagctaaattgagaatttttttccttttcagatttgttgatgtttatagttttttttttttcttctacaattgatttttttaattatgatatctttatggatccatttatttgattcatatcatcattaatattatatcatctgaaggcaccattttattggtttatatgtttttgtattcttttatttaaatgtttggtttgataaggtgagtagaatcatatctgatccagataagatttgatttgaataattggtctaacgggtcgggacaaggcagatcatcatttgatctggattagatctaatccgatctatttacactcctaaataaaaaatgaacaaatgtgattcctttttcaaaagaaggaaaaaaaaacactcttgtatacctctgcaagtatccaatgaagtttgatatgaaagaaagttttttttaacaagtgattgttgaatcaatatatgtaatgtatacatatatgtatataaagaaaaatgattggtttattttatttagtgggagggaatgaatagagattgagataaatgataaatccgtactccacaacatttgatcatttctcaacttttgaagggtatcatttcatttccaccctttaatttctacaaaaataaatgatatgaaatgatatataatttatggtccaagccaccgaaaccatcattgccgattttgatagttcataatagaataatacaaccctctaaaccaaattgggggtcccctctctttttttttttttttttagttaagtagcaaggaagggaaaaaataaatttaaaagaaacaataaagtgtagttagtggaatttgaacctttaccttctaacatattagtaatctacattaactattacaccaatcttactattatgtttataaatatcatattttaatacaaatatatgttgtaactaactaaatacatatacaattttacctgattttttttctaagggggcgacgtgccccgtcctggctacaatgtgggtccgcccctgccagctagtgtcgagttttaaatcatac

SEQ ID NO: 287530 - DNA, 543 bp, Cannabis indica
attttatatcttttgtttaaaagatgagttatcttttagtgagatatttcctaatactattttaaatagaatcctaattctaagaggatttatctatccactataaatagaatcctaattctaataggattcaactaactttcccattactataaataagacctcttagactacaaatggagggaaatccaaaaactacaaattaaatattatgatttttattaatgtctagttctgagtagttttcttttagttaagggttatttcaaaacccgaaacatgaattcttaattttattattgaatgttaatttttagtttccattatatcaaattgcttctacttttctatattcaatcatatgattattgttttaatcttgtttaggcggccgctaaattaggttttactttaatcaaccgtcatcttaggattactattcacctaatagtctaagattctaagtgtttgtgacaaattgcaattttatttgtgatgaagaatagaacctaggttaaatgaattatatgcttcattgatttg

SEQ ID NO: 287531 - DNA, 868 bp, Cannabis indica
tttcttgatgagaattctagactgtttagaagagtgtatgttcggggtcattggttttctttttctgaaaaagacattgctcaagctttgcaacttccagagaatgtctccaatgcagttatgtctatggatcgtgaattgatgctctatgaactcactggtgcacggtctgaattgaaattgggggagagtcttcggattacacatcttacttttgctcatgcatctcttatgcggtttgctcttagcaactgggttccaaactccaacaagaccgtggtgtctcaagatgtggcctcattcttataccgcatcacctctggagcttcaattgacttgacctcccacattttgaaccaaattgtttcattccgaagaggtaaaaagccaacctttaagcttgtatttccaaatttaatctttaaggtgttgtcctttttagaaaaatgtggcccaatctcatgaaacacttgagccttccatcactggaccaacattccaaccctcagagtattttgatggtgtgtttcaaaagaggcctaaagctggagctgctgctgttgcaagtttgagttctgctgctgcagaaattcaggaagtcaagaatgaggttcagctggtgaacaatcgtcttgctgccatggaggaacttcagcaagagatgtccaagcagctgacctccttggtcaagctctaccgagactaagtttttttttctttgcttttgattggacatattactatcttcttatttgttatctttggcccttagataaacaaaaagggggagtaatattttgtttttaactgtttgtttggaccaactctggaccctttttccagggggagttgtgtttagtacttgtga

SEQ ID NO: 287532 - DNA, 707 bp, Cannabis indica
ttaattataaaaatttttaaattttacaatctaaaccgttcaagaatttaattacctaaaataaattaaaattataatttaatacatatcaaaatttcagaaacaaatattctaagattatcttcaatccaacactataatattttatataatgtgaattttctcattttacactacaaaaaacagtgtcccactgatgataataataataataacaataggaaagataaataatggaatatttttttaattgttaacttttaataattatataatgcttttaagaaaaaaaaaaaacaaataattaaaagcattaaattactcttattttattaataaaataatataataataaaaaaatatatattttttaaattaatttttaatattgtgattagaatcacaataaaataatttagtactgaaataatagcttcttagtattgatttaatataaatttaaattttattattagagatggcctaattacccaaaattaaaagcattcaaaaacaaaaaaatatcattgttaaaaaaaaatttatttatacatatatatttaattaatcatcaaaaaagagaataatgaatcaaacaaaacaaaatccaatttcttttttttcttttttttattgtttccaaaaaagacaaaaattaaatttaaaaaaaaaaaaaagaaaagaaagagagacacagcatatgttat

SEQ ID NO: 287533 - DNA, 382 bp, Cannabis indica
ccttgcaattcttgagttaactcctcacgtatacgagcgtatttctcggagtatctcagcttgagcattgggaggtgcttgttgttgttcgagtgctacttcatctaccggtgctaccgatgctccttgtctacctcccctaccgctttggcctccacgtcggcctccgcgtcgaccatcacctcggcctccgccccttgcgggtgctggagctgcatccacgtggatgtttctattgccgttgattcgaactgatcttcttggagacattatttcctaatgttccttgtttgtttctaagaatctctaaaagaagataaacttaaataagatatcactattttcaaaaaaaaaaaactagcccatacttacataactagtt

SEQ ID NO: 287534 - DNA, 75 bp, Cannabis indica
ctatatatccgagcttccaataagcagatatagaaatttactacttaaattcactgactttattaattcttcgtt

SEQ ID NO: 287535 - DNA, 501 bp, Cannabis indica
tatattaatgatagtttaattattttatgattatttcaaaaaaaaaaaattgtgatagttcaaaccgcaaaaaccgcaccgcaccgcatcattttttgcggtgcggtttttgcggttttttagtatcgcggtgcgggtgcggtttggaaaattagaaaaaccgcatgtgcgggttggtttgaaaaaatggttaaaaaccgcaccacccgcaccgcgaacacccctacctggtgcaatatggaaagtcagaataaagtggccagggctagtaacggttggagagaatggagtccaaggtgtccccgtaaccaaggtgaaagcccttggagggcttcagacgggaatgatggttatctgtcacaagctccgttggatttggagcaaaggtttgcaaaaatggaagctgtgattcaacgacatgaacaagagattcagaggttgaaacaacaaaggtttcctgtagtttcttttaccgcatatgccaatcatttttgatttcgg

SEQ ID NO: 287536 - DNA, 1069 bp, Cannabis indica
gtttttactttttagtaacccaaatcattaacggctggttagagattcaaacactgaatatggctcgaaagctcaaattatcttactgctaaatgtaatttagagagttcaatccaagtcagaagtaggagcaaatatacaagtatcctattgaccacttcccaatgaactttgcatttattgcacaagagagcatttgagatagatgaaggctgccagcccaaatgctatcttgtataggggtgatcatctttataagattgcttaacagtaaaatgtgattatgtttagaaatacttggaagttggaaaggaacgttttggaattacctggttgatgaatattttgccatgaaagatgtcgtttatggcaatgtcaacacttttatgaggttcaagacactgaagactttagtgttagtgtgacagtggtgctgaattttaatagtcttctaattgtgatttcaattgaaaaaatttgtaggaagtctttgtagatataattcagtagcactgtggggtatccattagaactgtacataattcagtacataaaattttgtaaaccgtcaaattcaaacaactcgcctaaattgaactgaaataacttaggaaaaatgcaaattgaaaaacccgataaaaatataaccctattcggcgggttaattttatatacttaaaaaattaaaaaaatttattattaaactaaaaacttaaaccctgaaagaactatgcatttttttcaaaactcaaaaatacccctcacaattcactcattctctctctctgcatcatctctctctctctctctctctatctcaccccaaccgcccaccctccacccgaaccaccctcacccacccacgtcaaccccaacgccgatcaccaccctcacccccgtcgaccacgaccccaacccctccgaccccaaccccaacccgaaagagcaaccccagtccgaccccaacccgtccgaccgtctgtgaaacttttttttttttctgcgatttgagagagggaagaagacagaggtccgaccgtcttttaaatttttttttctgcgatttgag

SEQ ID NO: 287537 - DNA, 618 bp, Cannabis indica
tggtctgcaacttattccagcagcccacagatcctggctccaatttcttgaaccactcctctgcagacccgcttagagtaagcgaaaagcatagacatttagcgtcattgctgactctcatgaccatcatgactcggttgaatcgtgacagatgatcgctttgatcagagttcccggtataagctgccatttcgggcatcttaaagttcttggggagctctacttccaggatgtgcttggcacatggctcccggtcctcacagtctgagtcggagtcgtcgcctttctgtctgtgggagactcaggcgatatctattcgaagtatggcgagttctgccatgattcctttgtttaatgttcccgtggagactgcgggtccgtatttcttttggtcaaggagatcccggaggtcaccttggttcccattgatctgattcctcaaatcaatgggaggacatttctgtccacttcttcctctccctccgggctcctggtgcacagaaacgctttttcggtcctctccatcctgagggccaagactcccttttttgagtttgcccctccgcggacctttccctttcggaaaatctgagctgacctttcgcggatcctgcacct

SEQ ID NO: 287538 - DNA, 760 bp, Cannabis indica
caaaatttattaactattaaatggtttaattcggaaaaaaaaatccattattattacatgaacccaatcacgtgtacatcaacccaccaaaccactatataagtaaaggttaggttatacaaactaagcattttttttcaaaccccgttttactgttacctacatcaaatggacccttaccaaaacttcaacccttttgaaacaagtcctcaaaaatccccaccgcatcctttttcttccacaagacccgtaggtacaccgtcacggagtccaagactccgttcagcgtccatgtcaggatgtcctaactgtgcaaggctcgagtctgttctccacgaacacgaaaaaattataaagaaggctcatttacgagccacggaggccaagcaagagtcatacaaactcgcggaacatctgtaccattcagcccacgccatgcaagaagccaacacttcaagagaaaaattagagggtatcatggatgacattctcgactacaccgaggtgtccataccccactacccacttcatgtgaaacaagaatcaccaagcactactccaagagaaagcccttcacgaccaaagtccccgttcagagacaatagccctccgtctcaaaggaagttccctcaagttatagaacttgattgaacatccgttcggtttcagtcgtggtattttatatatatatatactgtacttttgttacaactcatctcatatggccgttgaatcaactttttgttaggccatttaatga

SEQ ID NO: 287539 - DNA, 575 bp, Cannabis indica
accccgaaaataccaacaccgctaaaacctaacatatataccccgaataaattctaaattataaaatgcgactctctataggcccaacgccgctttccacagcttccgaacacagtcacagaaattgagaaattacataaatagcatgataaatatatatgcactcaaataaattcccataatcataatattattgataataataaaatctcatacataaactttaattattaaataattcaacgtattattcgtatgcggtctttacaataaacctctgcatcctcaaatttgaaggctcattggagttgctcttagcacttacgataaaacttagcagaaataaaaattcatagaacctagttagagcctgtttgactgtatttttaattttcaatttttaaaattgtatttttaaaagtgagaatagaaaataattttttagtcattttaaaaatttaatagtgtttagcaaaaatttttaaaactattttttaattttttttacacaaaaaaataaatattttaacatctataccatgacatgattctatccggattcggattcgggtatg

SEQ ID NO: 287540 - DNA, 730 bp, Cannabis indica
gcttatctgttcggtgttttgggttcgactaaaccttttgtacgcactttaggtaaattataatcatgctgattttttcgactcaatagaattggaaatactatctttattcatttattgatcgaaaatgtatttgttaccgtagtaacttacatcagagctagtgatctaatctgatcttttagcttaacatgacataaaacaaataagaaactgtactttaaagtggtcttgccgacctgagtactttgtttctgaaacctttgcgcgtagtccgcccagaaggccattcacttagaagcgaatgttcatttagtactttaaagtggtctagccgacctgagtactttgaagtggtctagccgacctgagtactttgaagtggtctagcggacctgagtactttattggtagtatttccttaaatgttctccattccagtaccgtggtactagaatgagttgcattttttcgtcatacttacccaatttgtatgctccggagtcgagaacttcgaccacctggtatggtccttcccagttaggtcctagtacacctgacgtgctgtctttggtgtttaggaatacccttcttaggaccacatctcccacgaagaattttcgagctttcacttgtttgttgaaataccgagctactttttgttgatgagctaccaactttaagtttgcagttgctcgttttctttcggatttcatcaagtgattctgca

SEQ ID NO: 287541 - DNA, 598 bp, Cannabis indica
tttttggtttggaagaacaatcagtttattaaaattaatgggaggtaattgcgttgaatagtcaacttattggaaatagtaagattggcaatagtgattgcattgaattagtagacttttcaaaggaaagttgcagagaagatgaaaatattaagaaagagaattaaatagagttttaaaaggtaataaatacactttaatataataatacacttaataaaaaagtggaaatgggaaatacaaacacgtgcagtactatgctgttaattttgactattggactttttcacattgaaaagcttactatttaatataataaaaacatacattaacaatgtaaaaggtatatatgtcaataacattatcacctgattatgacacttttaaaatagtatgatatataaataatattataataataataatataataatatataataataataataatattaataaaaactttattattaatagttatcttattatttcttaactactaagaaatctctatttctatggtgtttggccaacttcgagtaccctaaaatactctgatatttctaaaaccaacttatcccaataatctcatcaat

SEQ ID NO: 287542 - DNA, 583 bp, Cannabis indica
aaatagaataatcattctactaaaatatagtgaaaaagacattctctttgaatgatattttgatattttaaaagggaaatttgacaatatatgcttaaaaatagcatatattgttttaagagaaatttgcggccaaacctccttatgtttcatttgtttaacacttaacccccttttctttatttttggtaggaaaacccccttaagtcccgttccgtttgcaatttactgttttgtgcattgaccccgttaacccctaaatccaactcaacttatctaacgacgtggctgctttaatacacaggtggtaattaaaaccatttttgtgttttgaaaataatacataataaaataagtctaataagtaaagggaaatttcaatttttgcccttaataatatatcttatatcaaattttataccccttactaatttatacaaaacaattccactattttcaaattctacccaaaataccccttccatttaattttcccactctctctttcccactctgtgtttccctctctctctgtctttcccactctctctccgacttttcctcttcgtccctgcccaaaaac

SEQ ID NO: 287543 - DNA, 651 bp, Cannabis indica
gtatataatgttttttttaacaatatgaatttatttaattattttttgtttttaaaattattttttctaaaagaattattagtttggccaatactatatttatatgtggcactttattgatcaactaaccaaacgataaattgagtgttaagtttagaaatttgagaatatcaataggaattacaatgatgacatcaactttatataattagaatataaaaataatacattatgaaaaaatttgattcataatctcacacctgtttcttcttctacataatctcacacctactttttttttgttcaattcataataaatgttttctataaaaaaaaaaaatacttttcttatattctgcaaagttgaaaaaaaaaattaaacacagatatatagttatgaatacatatatatataaataattagacaattatttaatttaatttatatttattattatgtgtttttttaaaaaataattaatctaagatagatatttttatgaaaatttattaaaataatagtaaaatattaatttataaatttatactttaataaaatattaaaaaattaagagaattaaggagaaaaaaaaaatagttttagagagattttagaccaccacgtcatcgcatcatacttttttttaatta

SEQ ID NO: 287544 - DNA, 326 bp, Cannabis indica
gaagctaagtgttttaaggaaaaatacattgaggggtgaaacagtaaatttatccctactcggtgtaaatcatctatagaggatctttgattattgagattagaaagatgattaaatgtgtatagcgtatctatatcgtggaacatatagagcgttctatatgactgagagtgcaattccaagttctatggtggatgcaataaggaattaataagtcagggaatttacttggtaaattctagttctgcttattggaagctcggttgtataggcccttggtccccatactagttgagaccatactacttgtaagactcagataattg

SEQ ID NO: 287545 - DNA, 352 bp, Cannabis indica
aaatccttgataatgtgaaattcctctctatatgtctactcttttgggatactggattctatacctttggcaactacttttggttaatcaggaaattaacactagtagttaagacaggttggaacggtgccacaattgtatagaactttccttagactgaataagtacctttcctgcaactttaacattcagtctctctctggtagactaagagatttcagataggtttttacacttctccaaaatcactactccacccccagagtaatcaccatcttatcagcagactttctatcacaaacgcaagtctcgaaatctgatgtggtgtagtctaagagttttaaatacaccc

SEQ ID NO: 287546 - DNA, 379 bp, Cannabis indica
attactcagtaaaagaggaaactgtttatttggaaagttgagctctcccttttccatatatttgccgccccctctcttctcttggtatgcatcagtatcacacgaaatcaagagagaaaaaagagagaaatttcgaaatccttgtgagagagaagtgcccacacacaacaaacaatacctcaatcatagattggaagactgtgaaggatcacatccatctgaaggacattcgggctcagatcttgattataacaactggcaccagagccatggtaattgatttgcttgcaagaaatttggacttaaaacgatttgtttgtgatttggatggtttcatgatgtgtcatattgatgtttgattgatgtttgtgaattctgg

SEQ ID NO: 287547 - DNA, 565 bp, Cannabis indica
gtctttcttcttcacaaatagaaccggagcaccccaaggtgagtagctcggtctaatgaatcccagattcaataactcttgcaactgtatcttcaattccttcaactcagctggagccattcggtacggtgccttagacactggatccactcccggagccagttcaataacaaattcaatttcccgaacaggtggcaatcccggcaaatcttctggaaagacatcaaggaactcacataccaatttcgtattctcaggccctgatgtcacaggttggctagtgtccactgcagtgactatgaaccctagacaacctctacccatcaggtctttagctttcaacaacgatattctcggtatgcgcgccccctgaactttacccacgaacaccgctgggttagcactctcgggctcaaacaccaccatcttccgtttacaatcaatcattgctccatacttagacagaaaatccattcccaggattatgtcaaaatcagataattgcagttcaattagattggcggtcaattcacaaccgtcaatccaaaaagacaaggaccgaatc

SEQ ID NO: 287548 - DNA, 698 bp, Cannabis indica
ggctttaagggcttgctaaccccatgtatcatctatgataatatcattttatattgccaaaactaattaaaatgcaatcatcatatataccttccttttctgcaaatataaatatataatatatactatttaatatatttatatatatgaagaagatatatatagggccggcctgtaagcattgggagcctaatctgttttttgatatttttctaaattgtaacatttgaaaatggtattttggtaaaattaaaggaccatgttgcataaaaaaaagggatgggattatttcataaataatcaaaaatgacaatttttttttttacattcttataaaatacagagtattatatttctgttgttttcaaaacaatattattttgacgttattgtgacgggaaactaaaatgaaagcaacattttttgttgaaaaaaaaaacaaagtgaaaatatgaaaaaaaaaaaaccataaaaatgtaaataaagaagaaaagtccgtaaaaatgtaaaaaaaaaaaaatacggttaaaaaaagtttattgttaagtgttgtgtaaatttccctaaataatagcatttttctaaactattaactaaaggacctaggaacatgcctaaacccaagcccaagatatttgatatctaggggttatttcacaaatacacaaaaaaaaaaaaaaaaacaaaaaaattaacaa

SEQ ID NO: 287549 - DNA, 644 bp, Cannabis indica
aggggcaacatttaccccccaagccttgtttatttgaaaaaataaaacaaggcttgctcaagtgcttccggttgactcctcggtttcctgacacgagctttgagcgcgtgagggtgtatttaatgatggcctttaatgcagcgattcactttttgcagaggtcgattcgtttcacgcccattgattgatacggcgcattaatggtgtcagacggatactcaaacgtttccaccgccttaattgcaaaccaatctggttcgttgatttctgagaattcgaatcgtgcgcttcccccaccgttcgattggtaggtgatgacgcctgttcctcatgcagctttgcctataaaagccaccacctttccttcatttcggttacttcccatttcttgccaactttgctcaaatttcccagagagaaaaaattctcagacccagaaaaacacctttaaacactttgcaattttctccagttcttcttcgtttgttactgtcagtccttcttgtcttcatttgattcacagcaggacccccagtctcaacacttcattgtaagttccttgcaccctttgcttcattattaatatgcatggcatgctgttacttatctgtttgttcttttctgggtttgtattcgaagtttct

SEQ ID NO: 287550 - DNA, 589 bp, Cannabis indica
aaaatatataaataaataaatgtatttataccaagcttggagagagagggagacggacgggaggtggtggtagtccgacgtatgagacgaagatgagagggacactgacgggaggtggtggtggtccgacgtatgcgacgaagagtatagggagaccgacgagaggagggtgggtggagatcgatggatgagagagacaagaagaaatggagatcgagagagggagagagggaggaagacggcgagaggagggtgatggtgcggaggcgtgggtggggttttgaagagttaagattttcgttatagggtgtggaaaatggagaagaaataggtgagaagatataggtgtgcatgtgggaaatagaaacaaagtaggtgggcacgtggaaaatgtggcaagaagtaggtgatgatttttcaatggacccttataggcgacggttttaaatagtcgcctatagtataggaaaccgtcgcctataaagatccattaaaaaattgcattttattaaaaaacgtcgcctattttgtttactacaattttaaaccgtcgggaatctaaaatttttcccgacggttttaaatagtt

SEQ ID NO: 287551 - DNA, 530 bp, Cannabis indica
gtttacttttctccttattttttccttaaggattcttactcatacttgtatcctttccagcttgctgctgaggccggccgcctttccaagaacataattaatcatggcttcgtcctgtccaactttgggggcatggtcaaagttaagaagatccttcaagatctgactgctgaaaggcggctttaccaggaggatgccgagcaccgggaggcccttgtcaaggccaatgaggaagaggccaggcggagggaggcacaagcggaggcgatgatccaggaggaggcccttcggagggataggctggaggccaggcaccaagaggagctgagggcggagagcgaggctgctgttaaggccaagcgtgagcttcgggaggctagggaagccttggatgaaatggttgccaaggtgaagtccttagaggaagttcaccaggcagacttggagtctagggccaacttggccgtggagctgaaggagctcaaggacttcaaagaccaagccttgaagaaggcaaagagagatgagct

SEQ ID NO: 287552 - DNA, 881 bp, Cannabis indica
agaagggatcaaacaactataatttttgatttataacctatctgacgggaaaggaaaatcaaaagttataactcacgtataaaactgaatactaacggttctcacgagctaggaaagtactaaacgaggcatcacaatgccttgataaaagtacttgaacctagaaaatagatagataatataactattcatacaagcaaattaagaatatataaagtgataaaatcattaaaatgtaattaagtttccttaaggcagattataactacaatagcaaggcagaattgacaacagctcgaaaatcaaaaagtttggtagatcactaactacttaaacaagaagattacgagcaatggaaaaacccaaaagtactatacatttgatcaaaatatagttgtttatattgtgaataaaaacgtaagcaaacacaattgtattaagttcaaatgaaaatagtacaaggcattcaagataaggaaaaacctaaattgggttacaaacttgtctttacaaaaatgccactaggggctaaccactaagtcatcttcctaaactaaggatgaggggggaagccgataaactcgagaaagactgtctgcagatagcttgaaaaagatcgtctacacgtagctcggagaaagaccgaacacacatcgctttagaaagactggctacatgtagagagccttgatctctgcacaggcctcattccccctcatcatcataagatccccattttcctgaagtcgagatcttttttcccagccttaagaaattcctcgatactgaaaagaggttggcgcaaaggtctctggcgcaggtttggcccttgggttggctgggattctctgatagaaaccacgccaacttccttcccagat

SEQ ID NO: 287553 - DNA, 696 bp, Cannabis indica
aaataaaactagaaactagccactttgggatcttattaattattaggtattttatcacgtgcttaccttactttctgtttgtattcataataattagtactacgtccttacaaaaaaaaattagtaaccacgtgatcaattttatatatattaattatttttatatgatgcagtagatatatgtaaaattattgctagtactctttgtatataagtactatatattacgtatatatgtactcatgcatacataagaaaaaataagttaattatactttttttgttattaatgattgacaaagaagaaaaataagtagaaatgtttaacgtaacgaaaaagaaaattaatataattaatatttattattgtacgtcttcatatcatgatgccatttagattaatgaaattgctagggagaacataaatttagattaatattcatgtatttgggtaaattattggaacattaaatctaattatattaaaattagtaagatatgtcacttttccattaaatttaaaaatataattctcataactcacccctctctcttcctttattctctctctcgcacacacatgaagaccctagcaacccacgcctgccaactactgtgcctccaactgaacaccatcaacccaccgcgcgcgaactctaactcaagacccaggatcttagaaccacgaccacccac

SEQ ID NO: 287554 - DNA, 735 bp, Cannabis indica
attaaaacacaaagtccaatggataggaagggaggaaataagaataaaaaaatgcaaataaaattaaataataataatgcataaacccaaaaaagaaagaacaaaccttttaacctagaatagatctttaatattgtattatacattttaatattaatgtaaagataatataataatttaagtaaaataaattaatttttaaaaataatttctcaaaatcatcgttctatataattaaaaaagaaaatataattttttctttaaaaaaaaacttgttggtaacctactctagcaagtcactaaattgccacctcattcatttttttagtacccattaatgagtattacctattaaaaaatcatccatatatattgatagtataaattttaaactttttagtaaataactctaaatattgtaattcaaatatgaaattaaataatgtaattttactattattattaattagaattatttttaagtgattatttttttacattaatatatagttattttttattataatactaacaataattatattagccgcacgaagaacagttatataggtattatattacctagttactttatatatgtaaaactagaatgagtactcttaggtctggataagagataaaaaattaattgatgttattattctattaaatataacaaccaaatcttattttaaatatttttcaagaaaaataaattttattttaaataaaata

SEQ ID NO: 287555 - DNA, 480 bp, Cannabis indica
aagacccaggacgcgaacccacactcggagcttgatttggacctagactgaaattccggacccgaaccaaaatttagaccaggactcgaactccgacccgaactcagacccaaactcgaactaagaatggcaaatggaactagaactgaactaggactaggacaaggaccaggacctaaacccaaacccgaacccagatcaaaacccacacaataaccgggaactggatctagaataaggatacggacctgggaaatagtactaggaccgcgacatagtacccgaccaagatcgaacttgaccctaggacctagctcgtgacccggcacaagaaatggaaccagactgggacacgagattgggatccagattctgaccaagggcttggacaaaacctgtagtcggtgtttggatttgggacccaaccctggacccaaaccctgtgacccaaaattggactatgtctcgaatcgagacttg

SEQ ID NO: 287556 - DNA, 625 bp, Cannabis indica
tagacaacaaaaatcatataccatacaataaaacgtatatacctacaataaaaaataaaacaaaataatataatattattaaaaaaaattatatatatcatattaacaaaattatatatcacctttatgtatactaaaataaaaactaaacatgcattatctaaaataaaatgatatactatacaataaaacttatataccatataacataaaatatataccttacaataaaaatatatataataataacaacaaataaaaataaaaatatataggatgctaataaaattatatatcatgtcaacaaaagtacaatagaaaataaaacttaaatattatttaaaaaaattatataccgtataacaaaaaatacatataccatacaccaaaacatatatacaaaaataataataataataataaaaatatagattactaatacatatatatatgtatgtatactatactaaccaaattatataccacaattaaaatatatataccatgaccattgtatataataaaataaaaactaattaaatattatttaaaataaataatcatacaatcaaaaaatataaaaataatataaattaaatacatgtagcatggcaataaaattata

SEQ ID NO: 287557 - DNA, 536 bp, Cannabis indica
aactaaaaagtttccctatcgataaaaagcatggcaatacccccaaaaacataaaatcgaggaaaactagggtttctgaaatttccgcaaccggtagacctgttgcccaactggaattccggttctgggaattttcgaagcccatccggaattccggatgcacaaccggaattccggttcctcgcaggcagaaattcaaaaattcatatctcaaccaaatccaacccaaatcacctcaaaccttctagacctatttcatatagcccaaataacatttctaaggcattaaatccacccagaaagcacaaaaacgaaaagtgccattaaagcccaagctttgagttctaaactcaaacttggttaaacctaaataacatgcaatcaaaccagtccaaacctacttaatcatgcataattaaccctctgaaaacaaatacaaacttcaacaacatcatagcaacaaaattaaaccatttctctttgaaaaccataatttttgcatagaaaaaccttagctttgctcaacctaactatca

SEQ ID NO: 287558 - DNA, 404 bp, Cannabis indica
gctatattttgttccccacctcgcttgttggagcagagagtagctagtttaacaagtttactcgtcattcaataatttcctgagagcagctgtccagggatttcaagaagcaatttcaagccgctggggataggcgacccaaagcggcctcgctaaccaatataaaacagcagcctgatgaaacacttcaggcgtacttggataacaggacacacaacttataacccttcaggtggggatctccattgatccattaactgtcgggggcgagttatgggatgatttacaaagacatccggtaagaagcatcactgagttcaacgaaagggctcaggtgtttgtccggaaggaagaagcccgaaaggaaataaacttgttgaaaacttagtcactaatagttagat

SEQ ID NO: 287559 - DNA, 720 bp, Cannabis indica
gacttgtgatagaatggaggttactcggaggctggtgggtataagtggctattcgctgacacctgtcacacttctttgcaaacgcgagagcatcttgcgcaatgttggccagtaatacccttgccgcatgatttttaacgcaagggagttacctccggtatgattgccacaaatcccctcgtgtacttcacgaagtatgtaaccacaatcctctccgctgatacatttgagaagcggttgactaaaacttctgcgatacaacctttggtcatatattacataacgggcggctcgctgtcgcaactttcttgcttctattttatcatcgggtaagagccccttttccagatatgcgaggataggagtcatccaggtaatctcctgaacggcatctatctccatgattacttcttgatttatggttgggtgagccaatacgtctaccggaatcacatcgagcaattcggcttctctagttgaggccaaacgggccaatgcgtctgcgtgtgcattttgagcacgcggtactcgagacacgactacatttttgaacttctgcattatttcgcgaacaatggctaagtatttaaccaatctcccgcctcttgctaggtattctccattcacctggcataccacgatttgggagtcgctaaaagcctgaagatactcgactttcatctcgagggcaagtttcaatcctgcgattaaagcctcata

SEQ ID NO: 287560 - DNA, 973 bp, Cannabis indica
cacttgggacgaatgtggcctctcctattacaaaaatgacatgtaggaatgaaattttcattctgtagtagattgtcagtatcagtcctccttccttcaaacttgagtttaatgggtccagttggaacctttctcttcttagatgagtcagattcgttaatggtgattgaggtgtcaggtaactcatcttccttctttgatgaatcgacattacagggcagagaatgctcaacagacagatcattcccttgtttataaagcatcttatatcctaaagaagttcgatcaccataaggcttctgaagctgtagggtttgattgatagcagcagtgcctgggggaatgaattgctgctcaaggtgtgcattacgtctgtactcagaaactgttttcattgatcagttaataccatttttttcttaaaatttgagtatctctaagttttttcttattctctgttttgtctaagtgtgggctgaatgcaaatattgttgctatatttgtcacatttctggtttctatactacactcattgcctgatgacgttggtttgtttcgtttagtgtggggagatatttgtaaagcttgcttggttcgaattagatcagctgtgagtttatagatctcattctccttttcatcaagaagtctgttgagatttttgacagtgtcttctgactttcctttttcagtcttgacttgctctagagagttctttagagcacggatctgcttagtcatatactcccattgtgcaaacatttcttcataagcattttgacgtcctgtgctatctgcttctgatgaggtggagactgcatcatcttcagactcaactaaattacagctttgggccatgaatgccagtacctgcttttcctcatttgatccttcactggctatggagtccttttccttatcactatcactccatgttgttgctaagggtcctttttctttttagtgtgtgtgc

SEQ ID NO: 287561 - DNA, 634 bp, Cannabis indica
gggttcggctcccaattcgggtctaggtcggatttggagttcgggtccttgtcctgttacggctctagatctaggtccaatttcagtttagattccaagtccaagtgctagttccagtcccggtcaacttccagttttggttccaattttcggtcacagggtacgggttcttgtccacttttgggtttgggatattgtttaggtccgggtcctcgtcagggttcgtgtcctgggctggtcctaaatccagaaactaactacgggttttgtccaagccctgggtccagatccggatcccaatctcgggtcctagtgtggttccatttctggtgccgggtcacgagctgggtcctaggttcaagttcgagtccctgtcatgtactaggtctctttcctagttcgagtcctcatctgagttttggttcgggtctggatttcagtgtaggtccagatcaggctctgggtgtgggttcccgtcctgggtcttggtctatgttgggttcgagtcccgagttccaatccaaatctgagtctggattcagttttgggtctaagtccttagttctaatcctggtctgggttcgagtttgggttcggtccgggtctagctttgggtctgattcaaggtgtgggt

SEQ ID NO: 287562 - DNA, 605 bp, Cannabis indica
atcagcaaagccaaatctctcaggtggcttaatctgccttctttctctgtctctaaccagttagtaattattaggggtgttcatcaaaccgcaccacaccgcaaaaaaaatgcggtttgaaattctttgcggtgcggtcgcggtttgaatttttcctaaaccgcgcggtgcggtgcggtttgcggttttgaattgttaatatgcggttcaaaccgcaccgcaccgcatattataaaaataccaatttttatatttatttaggtccaatatgtgaatattcaacttaaagtctactattctttcaaaaaaaaaaaacttaaagtctactaattattgtattgttgacacttaatttttttttcatatttattttcaagtcttatggtattttgacaagttttgctcaaagtttgttgtatttgtgatagtttaattatttagtgatagtccaaaccgcataaaccacaaaaaccgcaccgcaccgcactattttttgcggtgcggtttttgcgggtttttaatttcgcggtgcgggtgcagtttgggaaatttgaaaaaccgtgcaggttggtttgaaaaaatagtccaaaaccgcatcacccgca

SEQ ID NO: 287563 - DNA, 514 bp, Cannabis indica
ttcgcgactttatttacgacattgattaatcttctctttttttttttttatgcagcacatagatgccatatcacacttgatgaggaggagacgccatcattttccagagttgtaccctcagccaggtgtgattttggacacaacacttccacaattcctcataggcatttggagctgccagactggtgacagaagtacgttcgaatggccagatgcagtgaaccagtactatctgggtatggagagccgttacatgccatgttggaaggatttgaacttcatatacttcgtcctgtacttcgatcatcaaaaacattgggttgctgttgaggtagatattgatatgtggcagattcgggtgtacgataatgatttatcatgcaccaccgacgcacagtttgatgccatcatgctaccttggactgagttgtttccacatctgctgaggtctactggctattatgatcaagtcaacaacaacattctgaatgtggacttaggggacagtagccaa

SEQ ID NO: 287564 - DNA, 581 bp, Cannabis indica
ccctgtcctcaatcttctctcgaatccaatacaatagaaggagcaccactgcctatgtattcatgattaacaaaagctgcatatgttggaaatcacaacaacaaccagtggtggcactgtcaactactgaatcagaattcatggccactactgaagcattcaaggaagctatatggttacaaggaatactgcaagagctgctattgctcaaagaaaaaggggcagtctactcggatagtctgtcatctattcacttgtgcaagaatcctgtataccatgagaaaagcaagcacattgacattagattgtattggattcgagagaagattgaggacagggttctggaattggaaaaggtgcacacaagtgacaaccctgctaacatgggaacaaaggttcttacattcagtaaactgatgcattatctcagtttgctgaacattggttcttgctgaacatttcgagatatcacatcatcaagacttcagtgaaaagactctgataaattgctttagagaatcaaggtggaaatttgtggaaattgatcctctaaaccaacttattatccaactcatttaaac

SEQ ID NO: 287565 - DNA, 657 bp, Cannabis indica
gaaggagtcatttaattctgttgcacctaatgtaaggtttcctaaactgtatatgtgtttatttcatcgttttagaaagttcatatttagggtgttaatcaacatacttgtgagtatatctaagatcctggtaaaataatttccagcataagtatcagattattccaggataagaacattggaagacaatcaaataaatcttaagatcaagaagaggaactacatgttagtcaataagggtggaattttttttactcttagactacaccaaatcaggcttctagacttgcgttgatgctagaaagtctattgatgagatggtgattactctgggagtggagcagtgattttggagaagtgtaaaaacctatctaaagtctctaactttaccagtgagattgaatgttaaagttgcaggaaagatacttattcagtctatggaatgttctatacagtttttggcgcagtactaataatttattaactactagtgttacttcctcactaacacagatgtagtttccaaaaagtaaagaatctagtatccctagaggagtagacatatagataggaatttcacaatatcaaggattttttgattaaggatatgtaatggtggaggaaaggttgtattgaatacaacctgtcaaatcttat

SEQ ID NO: 287566 - DNA, 575 bp, Cannabis indica
gggagaatgtaatctctcaagctacgaccattagcctgatcttcaacggcaccaccattattaccgttatttgcagcattcgcattcacattagcagccatgatttctgatgtttcagcagttgctgaaactctttcttgcctcttgttccttcggtttctcctacaagttttctcaatttcagggtcaacgggtaatataactgcttgcccttggcggcgcatgcactcaaaatacctgaaatagataagaacagttttgcaagagaaaggttagaaattcagcaagagaaaatataccaaagtagaagttagtataattttgtgtaatattaatctttaaacaattccccggcaacggcgccaaaaacttgttacgaattttatgattactacgcaagtatacgcaatcaagtagtatctcacgcaagtgaggtcgaaccacagggaattggattaagtactactaaactatacttatgattctatttggtaaaacaataattttgcaatttaaaaaaaataactcagaaaattaaaaagaatatacgacgattaatcaagatgagagattag

SEQ ID NO: 287567 - DNA, 848 bp, Cannabis indica
taaccgtaaaaaaaatatagatcacgacccggatgactaaagcagcaactctttgcctatcttcaatgatccagacttgtgacaagtcatatattctaataaaaataagtacctcattagaatatgacaaacaccacttaaaataaattaaacctttactacacatatatatttcacctttcttgtgaaaaccacagacgaaaatgtttttttgtgtagaacattatgatctcccttctcattcgatggttatttggcaaaaatcttctatgacctatgtaagatgtcttaccaattactcgaatagaagatgtatcttcattgcaagtgggacaagctttgtatccctgaccactccaaccagacaaataactacgagcaggaaaatcattcactgtccacagaagagctgcacgcaacttgaagacagtgttggttcgacaatctctcgtatctactccgttaacccacaactccttcaactcatccaccaagggtcttaaaaatacatctatgtccattcccggtgatttatctccaggaataagaatggtcaacataaaattattatctttcatacataaccaaggtggaagattatagttcgccaaaactacaggccacatactgtaagcttggctcatgttgccaaatggattaaagccatcgacagctaaaccgagacgaacatttcgaggttcactagcaaaatcaggatgtttggcatcaaagtccttccaggctgcaccatccacagggtgtcgcatcacaccctcatcttttgatttaccactgtggtgccataccatgtattttgccgtatgccttgaagtatacagtctcttcag

SEQ ID NO: 287568 - DNA, 568 bp, Cannabis indica
ggagaattatatctatctcagatggagagattcatcccagtgtgtcacttctgtaacaggaggggtcatattcgacccagatgctataagctgcagaactacttgaaagctatgatcaatcgacctatgagttttcaaaaacccaataaaactcgaaaggaaggatctcaatgtgagtggagattgagggctgatcgtgaatcgaatgttgggttggtagctcaagtttcactgtctgcatttctggaaggacagtggtacttggatagtggttgctctcgacacatgacgggcaacaagaaattgttagtcaattacaaagaagcaaaggagggagttgtcacttttggtgatggaaataagggccatattattggaaaaggagacttggtgatgagtagagctgcacctcttactgaagtactgtatgtgaaaggactcaaggcaaatctgataagcatcggtcaactttgtgatgcaaattacactgtaagtttttctaaaactcattgtttagtttcatttgatgggtgctcagtcttaacagggaagagatctagtgatggta

SEQ ID NO: 287569 - DNA, 534 bp, Cannabis indica
aattgtatttttgaaggagcatgttgctaagtaagtagattaaactttgttttaaggctagagttcacttttgtaacttgtcgaagtttacatctagagggaaaaaaatgtaatggctattttaaataatagcctttgattcgttcgggttgctgtttagtaatgtgtattgtttagtggttgttgaaattattatttttttcttccttatttcaatatatataagaaaaataataaaaaaatattatgacatatattttcaggtgcgataataaattaaaaagttgaaatatgttgggattaaactcacttaacctctcaagtcagtatatccatctatttgcctatcagatgaatctgaagaaagctgctacaatttatgacagttggctttaataccaacttaaaggggacccaccagcaactacatataggggttcctctattctaaaaagagaggtctgagttgagtgttctgatctctaatctcctatgctcatactttagattcagtttagagagagagagagtcca

SEQ ID NO: 287570 - DNA, 617 bp, Cannabis indica
tgtttgtgtttgtgttcgggtccgggtctgggaccgagcactactacaaattacactattcacgtcggtcaacgctactattcatagtgttgaccgacgtgaatagtgtccaaataattggacccgtctatttaaaaacgtcactaataatatactatttgcgtcgtttgattaaatgatgataaaaaagaaaccgacgaaataaagtaaaaatttaaaaacttgtttttcattttgcgtcagttggtaatagtcgactattgtgcttgcaaagttttaaaaatgacgtgaaatataattgtgagagatagaaaccgacgcaaatttaataaaatccctaaaacccaaaaattatataacatactgctcacatccctaacctttgtctcctccttcgaaattgctctggccaaattggccattctcttcaacccagttcatcctcttcgaaactgaccattctctttcacccattttgtcctcttcaaaactgaccatcctctttctcctcttcttaattaggcagtgacccaaccggcgacctcccctctcttcttcgtcttctgcttaatcgggcggtgacccaacccccggggcctcctcctctcttcttcgtc

SEQ ID NO: 287571 - DNA, 667 bp, Cannabis indica
gattaatgtcaaacacaatttaccatctcaaaataatacggtttattccttcaaaacaaaataatttttcactgagtttgaaaatcaatattttatttccactaagacctgaaaattagataccttaaattatattgattaataaaattaagtaattctcacatacccaaaatcatgaatcaaatgtgtctatcactgagtttttacattcccaaattcataacaacattttcattcatattcaatattgaatttacacacaaaatgaagctcaaaaaacccaaatgtggctccaaacatatacaactaaacttacacataatagaacaataatactgccaccattaaaaccaaaacaaatagagccacattgaacactttcctaaacttcatcaagctgtcaacttcatcatcccttctctgaataattttagataaaatcttcactttctcttcaagctcctccatccttctaaccaaatcaaattcactttttggtggtggagggtctatccattttaaaaaacgacacccaacttcatcattattctataaaaaaaataaaacaaacatcaagtgagatagctggtaaaataagtgcataagcaaatcatgataccagaaaaaaaaaaattgattatcacataatttagtacacaccttgtat

SEQ ID NO: 287572 - DNA, 164 bp, Cannabis indica
atgtattttatcctttaaatacttaaccacccataaataatatgtcagtgaactaaatataatcactaaaatgagtactcaacaatacatctctgtttagccaagctcaaaggaaatcatcatttcacttctatgagctagaaagaagctatagattccatatc

SEQ ID NO: 287573 - DNA, 589 bp, Cannabis indica
tctgcatccggttctaaatcctcgaagaaaggagggaaacgtctggccaccctggaggaagttatgaagggtccagtggcccaggaagggtacaagtcccgtgctaacgggtgggaagcggccgagcttcactctaccctgacctgccctcaccagctggaacacatcgtggtggtggcaggtatcaagcctgcgacctccgggacataccaccggccgccccgggatgcggagacgcccaaccataactacgggggcttcggagcctggagtcagacgcacttgatggccggggccatgcttccccttcaagattactttatagatttccttgtatttgtcggccttgcgccataccaactcattcctcaagcttaccgcctgctttcaggcttatttattttttactctgcccggagctggggctctcccagtccggcagagattttgtatttttacgaactcgtttccatccctaaaaagggagataagtttaaggacggtttttacggtctccgggcccatcctttgaatgagggcccgtcccttttaattatcagaagcatgtgaaggaataccgtcaccgctt

SEQ ID NO: 287574 - DNA, 1240 bp, Cannabis indica
attgcatttcccattagtacagtaccagaatttactttcctatagtcaataaaattttcaagaataggacacatatggtatgtgcatccagaatcaagaatccattcatttgtgattctttgatctgaaaccatgtacaagtcaccatcagatgagcaacgatctgattcttcaacattagaagcagaatcatgcttcttttctctgtcttctttgagtttgttcttgaactcaatgcaaaacctcttgatgtgacctactttcccacagaaataacattttctgtccttatggtattttcctcttgatttcgatcttgattgggatctatgttggcctttgaaatgatcctttctgtagtgatctctgcccctattgttgtctcttcctctggccaagtaagcttcatctttgacattgtctttctccttggacatttcttgttctttggacttcaaggctccaagaacatcatcaagggtgagagtatctcttccatacttgatcacagcctttaattcttggtatgcaggtggcaaagatctgagaagaatgacagcttggctttcttcatcaacagtgtgcttcaagttagccaaccctataatgatttggttaaatacatcaaggttatcatctaaagacaaatgagaagacattttaaaaccatataaagattctaacaaattaatcttgttagttagagagggtttcatgtaaatctcttcaagcttgctccatagttctcgagctgtcttcatattctgaacctttcttctcactgtattggacaagtacattatgatagtgtaatatgccaattcctccatatcttcaagttcttccttctgcaacttgtcagtgagttcttccttgggtttcaatgccttggcaactttttgatgaacaagaattcccttcaaactttccctccataggccaaagtcccctgtcccattgaacttctcaagttcaaatcttgctgatcctgtcataactggttgcagatgagtcttgattgaatcttgattcttgaattcctcaaatggatcttgaacctaagctctgattttgttgtaatttcagcggaaataaccttgaggattcaatcataaaatctgcaatgaactcacaactttgacagtaaaatgaacataacaattaatctccacaatgaatcaaatccgaaatcaaacaaagaacaacacacgattttatcctggttccggtcctagagatc

SEQ ID NO: 287575 - DNA, 581 bp, Cannabis indica
atgtaactcatgcacaccataactcttatagagttaagaatttcaatataagatgtttaacacctttttacactcttaatgttggtgataatggtggaggttactcatagtaataagtaactccgtaaaatattacaaaaagatgacaattgtcatatgttacatattaatttgttacacatatttaatctacacattatattattgataaataatataacagaatctagtcctcatgttctcctaaaaatataatgggctaatacattaaaatttctaagaatataacaaaaactaacattagaaaatattaataaagaggcaataattgtaacaccctaactaccttaggcgtattacgtgatttttaaacgtactgtgcagctcgttgctaatcaacgaggtttatggaaaaacgtgattaattaaaattttgctttttaattaaacatataaaacaatattacaaaagactcgggatcccgattataaaattatttacaaaaagttttaactgtttaactgttacacaaaataaaggtcgtctaacgaccagttacaaaatcagccttgctgtcccg

SEQ ID NO: 287576 - DNA, 822 bp, Cannabis indica
gatttgaaaaaacgacatgcacttgatcttgcacgaatgctgtccccagccgttcatgtatgggtcactcgggctgaaatgggctatgggccatcatagccttacaaaaagcccaataatactcaataatacgcacaagggtattatagtaattaaaacacaacctctaaagagagcagggcttcatcagcaactcagataaaggggccaacttcctcattttttggtctaaggcaaaaaaccctagcagagcatagcacacttcccttgttgcaggtcagtctttatctccgtttaatctcaaatctcttcaaaattctcgatctttacgatctaaagtcggatcttcgttaccattaacacttctaatctgttattctctttttttttggggctacagagatggccaagtcgaagaatcacaccgctcacaaccagtcctacaaggctcacaagaatggcatcaagaagccaaagaagcaacgccacacttccaccaagggggtgagcttaatttctatcttgttttctctaattttttctcttatcaaattgaaaatgcaatttttgttaaacctttttggggttttttttgtttagatggatcccaagtttttgaggaaccagaggtatgcaaggaagcataacaacagcgttaagaacgattctggagccgaggaatagatgaaatgccttcaaatttgcagtttcgagggttttttttcttatttgtcctaattaggctttatagtatttcaagaatattttttttgatccttttcatgtttttgttgttcttattagctacaatgtgatgttact

SEQ ID NO: 287577 - DNA, 674 bp, Cannabis indica
tcccccttggagaaaccgaggatgacccaacagtgaatgcttcccagacaaacaacggtcagccgtccaatacccggtcacgagttccactcgtgggccaagaggtaggcggacagaccttgtccaggaattcattaggaggagtcatgctcgatggatccacacaaaataatggagctattccaccttccaaccaagcgaaccaatcgctaaggcagccaggttcttctgtgttcgaaaggttgggaacaccccgtgacctaaggttcgacctaatgccaatgaatgtgcagtctagagcccatactcaaatccccgctcagaaagacgctgacgtagcccaacccgaccagaatgccaatgaagtcagcccagccgttcaagcccaacttaacgaactgaagaatatgtttcatggcatggccgggcagcgtaacaatgatcttgagttagaccgtccacgcggaactcccttctcgccagaaatcaacctcctgccactacctcacaagttcaagatgccaacgtggaagatgtacactgggagaggagatcctctatctcatctcaagtatttcgagatgcaaatggatctacaaggggtgcgaggagacgtatgttgcagaatcttccctgcaactctgtcagaggccgcacatcaatggtatttcaag

SEQ ID NO: 287578 - DNA, 571 bp, Cannabis indica
ttaatcttgcccaattagttataagtttttttttaaaattaaatacaaaatatatttttgaattttcaatatttgtcaagtttaaaataattattaataaaatcatttacttatttttttcatataaaagttattttcttataaatatttatttaaataatttaaactatattaatttagtttttatgtgggtgattgataaatttaatcttgcccaattagttataattttttttaaagtgaatacaaaatatatttttgtatttttcaatatttttcaagtttaaaataattattactaaaattatttatttaatttttcatataaaaattattttcttataattatttatttaaataattaaaactatattaatttattattacatgaaattttattagaataataaactctttaaatatatattttaatatgtttttggtgagatgagactattgttaatattaaatctataggttatatatattttattgttcgaaaattaatattatttatttttacatatttttgcattatttaatttttgtcaaatatttaaattttaaaaaa

SEQ ID NO: 287579 - DNA, 657 bp, Cannabis indica
ccacccccagagtaaccaccatctcaaatgagttggtgtggatattaggattactaatgtatagttccttaatatctaacatataggtcactttcttaaatatttcttgattgtcccttagtgctccttattcgatcacatcttagatggctcccactaaatagtagatgtctggttaaaaaaaaacttttaaccttttttttattgtttagagagatatctcattgtgactcgttgtcttagtctgaaattgtaagtttctttaagactaggtcatcaacatagcagtctagtatttgaagtgtaaaatacttgctagagattaagcaatcaaattaagataccataaaattgttatgaggattagaaatcttgactcaagtcattcgaatagactatgcaagaattcttctatcttattctcataattctgataagttttttctatccacgtgaatggttagacttgtcttatcagtggtgttcttaagttcctatcacaagtgtcaaccaaatgaagatgggtaaagaattttaatgttctcccactcaattaaggtagtgtgatacattatcaaaaaactttattggtatcaatatttattacaatagtaaatctaaactggaacatataatcaagatcaaggatttattctg

SEQ ID NO: 287580 - DNA, 761 bp, Cannabis indica
gttgtttagttcgaattctagggttagtttggattgagtttagttcatagcagctggttttgaggttaatgttggttttattcaactttgagcattgatttcaaagctttgagctttaatggcaacttgagttgtaatggtttgttctgtgaaatactggttggaatatattgtgtatgcccttattaggtactctgaaaggtttcattgcatttggtggagaattgaccaacaaatgaagggctttgggaaaactggtgcaaaccggctagccagtttgcagtgccacaaaaatcggctagcccgttttggcagggttcctcaggcctttcattttctcaatttttgtctttgcggtgcctcggttgggtgtttcctcatttctagagttagaataacctattgagagtataacagaacctagggttttggttttgggtttctcgggattagggttttaatcatgtaacttacccgattccaaaatgtgattagggcatccatctagcacaagatttccgttcaggtcggccagcacacttgaattcggaaatcaggtaagaactgaatataacgtgtgatatgattttctgaatgtatgtatatgtgtgtgtatatgcatacttagattgttatttgcactaccaacccttgtatggttatgatacagagtgcattggtatagtgagtgttatttgtgagtacaatacagtgataccaacacgagtacgggaaagtgttgaggtgtgtggtatatcact

SEQ ID NO: 287581 - DNA, 552 bp, Cannabis indica
attctaaattttaatgcatatggtgcatgggacctcacatttgatctttatgttcaattaatattgattttttttttatatattattttatttagaaacattttgtgttcttatttaaatttaggctagtaaatttaaattaatacaacatttaacaaaaaagaaggcaaatactcattttgacaaattatttagatggtgttttggcactataattaaaaaataaattttattcttaacaactgaaattttttttttaataatacaattataagtgtttgacaatattttcagaagatttttttttaaaaaaaaaaaaaaaaaaatataaaattttgagaacaccaaaaagttatttgtcggagtttaatttcatcaattttttttttccaaattactttatctcattattattgaaaaaacttttaaaatgcatttcttttttatgaatatatttattaatttttttattgaagtttattttctaagaaaaaaagaaagaataaataaataatttctgtttttacaaaattacatcaaacaaatattttt

SEQ ID NO: 287582 - DNA, 529 bp, Cannabis indica
cagatatcgaggaaatccttgaatactctattaatcaaatccataaaggccacaggagcattggttagtccaaatgatataaccaagaattcgtaatgtccatacctagtacggaaagccgtcttcggaatgtcctcctctcagattttcaactgatgataacccgattgaagatcaatcttggagaagatcgtcttcccctgaagttgatcaaacagatcatcgatcctaggtaagggatatttattcttcactgttagcttgtttaattcccgataatcaatgcacatcctcatagttccatctttcttcttgacgaataaaaccggagctccccagggtgacacactaggacagataaaccctatgtcaagtaacccttgaagcgggatcttcaattctttaagctaagctgaagccattcatacgaagccttggaaaccggttccactctgggtgccaaatgtataacaaaatcaatctcctgctgaggtggtaaacctggaagttcttcgggaaaaacatctag

SEQ ID NO: 287583 - DNA, 687 bp, Cannabis indica
aatcaagacataacggtctatgatctgaattgctcgtgtgagaggactaaagaacagccttgggaaacaaatgaagccaatcaccatttacaattcctttatccagagctgattttgcatggttacttccagatctatggttatcccaagtcatcttatcaccttggatagacaaattaattagacctgtagagtccaccaaattagaaataaaagggacaaacgggtccctacccgacgacccttcacgctcagaatgactaagaacaaagttggtatcgccaatgatcaaccaaggacccccaaatctatcccctaaaaccatgaggtaagtccaaaattttttcttagcatggaggtaaggaggaccgtacacacaagatagaagccaagggtgagtagggggatccaaatagaccaaacccgagatgtggttacgagaacaagagacacattcaaaactaaaatcaattttccaagccaaaataataaaccccccagtaccaagatgcggtacattaatattaaaatagtagtggatggattttagaatacgtaccaagggagttgcatccactttcagttcagtcagaaaaacaaaatccggagagcgcgatctgatcagggacttcagctcgcgaactgtagaggtctcgcccccaaccctctacagttccaagcaatacc

SEQ ID NO: 287584 - DNA, 959 bp, Cannabis indica
tactagtttttatcttgtatttatttttcatgaaataagcacataagattttttaaaagatgtgagaaataaatgatgtaaaattaaaatagaactcatatagttaaaaagatgtttcaataatatattaaaattgatgtaaatttgacaaataataaatattgtgtcaaatttgagtcaacatttattatgattaccatgcactattattttatttatattattttggtaatcttattattatatataactttagcattaaattataaacttttcacatttattttttattgttttacataataaaataatttttaataaaatattaattaatattaaatttttgatttgtaattaataaaataattattttttatgctagcacaatttttaccttttctattcaaaatggtctgatttgaataaaaaataatgaaaaaactaacgaatttagtgttaccaaaaaaaaaaacaatgttttgtgtcaacctaaaaagtgtaaataattagtagaaaatggatatgtcgtttaccgataaaaacgacaatagacataatcatgaatcaatcaagcacgatagagttagaaaaagaacaagagcaatagactgtccagtccagtctactatcctttgataatgggccagtatacggcccggtccatttgattctttctagggccctaggcccttttacatttcccagacactgttttgttttgatgctgatgtggacaacattggagtcttatttgacaggtgtattcaaaacggtgcgtttcgaagcatatcctcctcctggactggggtctccatggtttcgcttttagattttgactcttttcatttttttttttgaactaatttgactgttgattttgatcagagagatcgtgtaactcctgcaacaagcaaaactgaaaagagtaaacgaaatggggatggcttcgctacaacaga

SEQ ID NO: 287585 - DNA, 745 bp, Cannabis indica
acaacatttattatgattaccatgcattagtattttatttatattattttgttaatcttattattatatataactttagcattaaattataaacttttcacatttattttttattgttttacataataaaataataataaataattttttaataaatattaattaatattaaataatattataataataatattaaaaattaatacaatatattataattattttttatgctagcacaatttttaccttttctattcaaaatggtctgatttgaataaaaaataatgtaaaaactaatgaatttagtgttaccaaaaaaaaaacaatagttttgtgttaacctaaaagtgtaaataattagtagaaatggatatgtcgtttaccgattaaaacgacaatagacataatcatgaatcaatcaagcacgatagagttagaaaatgaacaagagcaatagactgtccagtccagtctactatcctttgataatgggccagtatacggcccggtccatttgattctttctagggccctaggcccttttacatttcccagacactgttttgttttgatgctgatgtggacaacattggagtcttatttgacaggtgtattcaaaacggtgcgtttcgaagcatatcctcctcctggactggggtctccatggtttcgcttttagattttagactcttttcattttttttttgaactaatttgactgttgattttgatcagagagatcgtg

SEQ ID NO: 287586 - DNA, 640 bp, Cannabis indica
gggtatttataatttggcccctcaacaaattataaattaacttatggtatctacacattaattccatgacactttaatacccttttgatacccataacataattggtcacttaattttgtatcacactttataatagcatatacattatacatatgtgcccacataggatttttaatccaacaatctcccacttgggcaacatatgttacctgataaatgtataaccttatgagctcaaaatttgctattatgtaaaggtattcacaacaatctcgtccatcaactatacccatataggatcaaagcgattttcgtcatatcaatcatgactaaacccatcaatggtcacatatacaaatatagccaaatgacatagatcaatcatggatgtgtagcatggaaattacatgcaatgtgaaccgaacatgcctatttccaactggtcctccttaaaccaaagtgaggtcaaacttaaacataacaaaacagagtgaataaactgaaaactttatttctgatcagaaaataaccaaatacataaatgtcttaaacaaacataaagcaaagagaatacaaactcccactaaatcatgatatcctcaagtaatactacacccatatgagcagtgtgctcatgaa

SEQ ID NO: 287587 - DNA, 612 bp, Cannabis indica
atttctactgagccaaacgccgggttccaaaataccgggcaccgaaaatgcaaaatatgaaagctactaaataacataacatgcatttctgaattccataaataacagtaataaattatttaaatagctataaataatttcataattaatcatgattaactgctaatttccaaattaactaagcgggctttacagtatttaatcaataaattttcaaaaacttaaagatcaataacttgtctaaatttgctcctattttatttgtatcaacaaaaagggaatcacatgatgcaaatcatcttcccactccttttcgatatttttgacaatctcggggactatgtgttagccttgtacgtaccttagccaaccttaatcgagtcatcgatcccatccaaagaatgtcaccaccttagcaagctttagcctttaagggccaagtaaatccatttcaagagaggttgtatatgtaagtttggaactcttaactcaagcaagaaataatttcagtaaaaacaatctttaccactacaccacacaatacataagggaaatttgattttctatacttaaaaaactaaaatattttattcttaaaccaatacattttaa

SEQ ID NO: 287588 - DNA, 767 bp, Cannabis indica
aatccaatgttctgaaaaatcagggaataaacttttgaacatataattaagattatattccactgtgctgacaacactataatctttaacaaattcatatgttctggacttaaaaagaattcatacattatatatatataatcatgaaataaatcatgtgaaccatgcaacataaaatgttatttctgatctttattaataagtaaatctgattatattgaaatgggttttatttagggcacaaaacccaacataaacgacttaagtcttaagtgtctcgcaaggctactgctttatattggttagcgaggctgcttcaggttccctatccctatcagcctaaaattgctttttgaaatccctggacagctgctcccaggaagttattgaatggtgagtaaacttgttaaaccagctattcgctgctccaaccagcgaggtgggaaacaaaatacagcgtaaattcttcgtcatattactggctcgcattattgtgttaaagttattcaaattcaatattggatctgtggttccgtcatcagatgagacatgcgggtttttgaatcccagaggaaaaggggtattcataaggtgatacggctcaagctcctcgtcaaagtcgtatcgagatagtttccctaattcccccacttgatatctcctgaacttgtcctctagcttgtttatccgtaattggaatggatcctcttgctttggaccaagctgttggcgaaggtcaggtttcttctgattcaagtgctctcgca

SEQ ID NO: 287589 - DNA, 847 bp, Cannabis indica
tttttgaaaaattaagaaaagggggcatattttttcgattctttgtaaatatttttttctcttattttttcattttatggaaacatgttttaattgtattctctattttgtgtttcctttatttttggagattttgtcttattttggtgtttttaggaaactagtccttaaataattcattattttcggtttcctttttggtggcaatttcggttttggtagggttttaaattcttagattttgttgggatatttggtttcctttttccatttaaggaaacattgacattttttgaaaaaccttttttggtttcctttttcctctccacacgtgattcaaaaggtttcaaagagaaatggtcaaaactaagaatgcccaaccatccaagaatccctcttgtggctctgcctctgcatctccgatcagccctcctgcactgcttgcaccagcaatcggagcttcttattcatcctctactctaacaaaaactgccagaaagtcgaagaccaaagcttgaaagtcggcttacaaccttgcttcccttggtgttactgttgaacctgctgctgcttctgcttctatagaaatggctaaattcaacttgtgtttggggagaatggagacaagtcaagccttgcttctcaggaagatgaacaacatcatgaaatacttctgatccaatgatgatgaataagtggttcaattctctatctcttgctttttatttgtgaatgcttaaactattatgactttgttcatggtttttgctatctttggctccttgatagaaaaaaaggggagtagtattatttttttgggattatgtgttacaactctggatccttg

SEQ ID NO: 287590 - DNA, 677 bp, Cannabis indica
attagccatgaatgagtaatattgagtttttatgcttaatttttctatttaattagaaaaaatctctcatttttacattatatgggttgagcttgttccattggttgaaaaaaaaatgatgaaaaaatattgaatttcacttaaatatttttcatataaacttatttttgatatagtataaaaagatgtattgtttgatattttttttttaattaagaagctaatttaagcgtagaaattcaaatttctcttttattattcgtcatcggatcacaatctaatggcttaaatattgttaaaattaatatttatagttaaatttattttttacccatcaattggtattacccattaaaaagtgttctatatatatatgggtgcactcttaatgggtattacccatgaatgggtaatattgagtttttatgcttaatttttctatttaattaaaaaaatctatcattttttcatttatgggttgagcttagataaatagattagtaaataggtttatatatttgggggtacttcttagatgagagcactacttttactctcataagtgagggcattttcacaacctttgatttttaatctcacggtaataacatttttccttacgatagagtatcacatatacgattaataaattatttaaaaaaaaattattagattta

SEQ ID NO: 287591 - DNA, 454 bp, Cannabis indica
aataaccagagctcaaaatcaaccaaaatagacttagaattcaaaccctaagcatacctaaacctaacagccacttattctcaaaattacaagttcaaactaagtaaaaagcttaataacacataaacaagagttctagggttacctccacttcaagagtacttgatctttagcttaattccagaaaattgaggaggaaaagttggcttcttctttggttttggtcccagccgaaagagagaaagagagagggttcaagagagtgaaattccacattttttttatttttcttccaaaaagaaatggattttcttaaactaaacccttgctgaaattaaaagccacttgtcacctccctaggcagccactacactatacctcaaaaagacttaaatgcccttaaggttaaacttaaatattttccaagattaggggtaaaatggtcaattccata

SEQ ID NO: 287592 - DNA, 667 bp, Cannabis indica
agattgggatccggatctggacccagggcttggacaaaacccgtagtcggtgtttggatttgggacccagcccaagaccctaaccgtgacaaggacccgtaccgacaccctgacctgaaccaagtcccaaaccataaagtggacacgaacccgtaccctgtgacccaaaattggaagttgaccgggacttgacctagcacttggactaaaaaatcataactgaaattggaccttgatccggaactgtaccgggaccaggacccggactccaaatcagacatagacccgaattgggagccggacccgtatcccaacccaaacctggactcgggacctgaacccgaaccttaactcagacccaaacaaggaaccagactatggaaacagatatagggtcgggacctagaaccgcaccccagtctcgatcccgaacccaaactcagaaatgggacctgggacctgaacaaaaaccagaccgagacccgtgacagtgatccagatcttgactcgggattcaggtaacgggagctggaacagaccagtagttggtgtctagatctcggactcagactaggaccagaacccagacaaagaaccaaacccgaacacagacctacacctgggacccaaaattagaacttaaacaagaatcgccgaaccaggaccc

SEQ ID NO: 287593 - DNA, 1124 bp, Cannabis indica
tcgaggtcacacactgatatttcctcgacatcctccatttcggtccaacaagttttttcggaccccacgtcggggatccaactcatcttcttcagccatttctggctcaatggtttcccggaccatcagtacgcgtaggtgggttgcaacattgtaacattgccttgcccccccctgatttcctctcaccgtcccaattccagcttcctgggtagggaactttaagcacaggtgccgaatggatgtgactgcgccaaaatctaccagggccggtcggccgaggatcgcgttataagcggtcgggcagtccaccaccacaaaagtgcagtatttgaacgtgctttggggggtgtccgggcacaaagtgactggaagcctcacttttcccatcgggataagcgttgttccgttaaaccctgtgagttgggaaccgctgggtgagaggtctcggtccgtcaggcctattgcagtgaaggcctccttgaaaagtaagttcacggaacttccattgtcaatcaagactctggccaccactttattggcaatgggggtctcaatgactaacggatcatgatgagggaagcgcaccgccttggcgtcttcttccgtgaacgtgatgggttgatccatcagccggggcctttgagctgggagttgagtaacctcccaaacctcattgtgctttacggcccccgcgtaccgctttagttctttgcgggtggttcctccaatatggggtcctccggagatcatggctaccctcccgttgggtctgggcggcaaaccggggatgtgttgggcatcgcccgcgggagcaactggagccaatactcctgctgcaccccccggtgttccctgtggcacaacccctgtcacctggcccggattgaggtgaggcagccgattcttgatccactcataaaggtggcccaatcggatcaggttttcaatctcgtctttgagattctcgcattcgttggtgctatgcccaatgtcgttgtggtactcgcacctttttgtttggactccctccggaagctatccttgtacaaggggggtggtctccggtagtgcgttattttgcctagtagtaaggtacacacgctcttgggagtctatcagct

SEQ ID NO: 287594 - DNA, 906 bp, Cannabis indica
acaggtatattactctgattggcaatgtatttatatgctggaaatattagaagcctctctgaaataggttcattctcgttctagctattaaggtggatacctttcatgtgcattagttctttagtttttattggaaaactgtcagttcttatattttatgtgtggtagcaagcacaatactaggtatggatcttttttataatgattttcataatgagatgtatatcccatgtctcatgtgatgattttaaagtactttaaatgatttgagcttgacttataagttattatttgtttgggcatcaattaaaaatttcacagggttgaaaggaaatcttacttaagagaatcatgagcagttataagccatcttatgaggtacgaatttacttatcaaagttttcatatttgatatgaatttaatgtatatgcaagtcttttaatattatgctctgttctatattggagttccttttgtgctgagttgttttttcttaaagatccttttgagttgagttgtaaatggtttgttgctccatctgctctaattaagatctagtttcagccttgttttttaacaatggcttaggttgtaaatttgtttctggttaatataacacaagctactaatttatcacaaaagaaaaagtttttctttgtttgtttgtgatacttatagtctctttttggttttgagcagagagaaattcaatgcataatgtcctagtgatttgagcgaagagcagccacccatagttataatgaggtgattaatgttatttttaattcttggtgtcccttttgatgagcttgctctccatttcgtactgctctactgctattttttagtcttttagtgtttgtttttgtcatgctcttccatagaagtgcctaaatcacaagatt

SEQ ID NO: 287595 - DNA, 558 bp, Cannabis indica
atataccacgcactcccagtacctctccgtacttatgctggtatcggtactctcagataacattcactataccaatgcactctataccataattgtataagtgttggtagtgcaactaacattttaagcatgcatatacacataacatatacatacactcagatatctatatcacacattatatacagttcttaccttctttccgaattcaagtgtgctggccgacctgaacggaaagtctcgtgctagatggatgccctaatcacattaattataacatagatgagtgactcgctaaatcactttccggggacttaaatttgaaactaatagtttcctatcgataaataacatggcaataccctaaatatctcaaaaatgggaaaaactagggttccaaaaattgccccaaccgacagaccggttcctaatcggaagtccggttctgggacatcaaccggtcgccggttgctacaggtttcccggaaccggaattccggttctgtgctggaaacccgaaaaatgcccccatgacctcaaaatcaagccaaactctac

SEQ ID NO: 287596 - DNA, 635 bp, Cannabis indica
agttattcaaatcaagcaaatgagcctttacaattggggttgttcatgtgagggaaggctgccctaactctcacacaaggcccaaaagagaggaatttaaccttaatttaaacaactgttattaatggaatagacccaatactaattgggcctaaataaaatctattataatgtgataattttatttagcaacctagtccattttaattacaaaagttaaatgggctccctatatgcatctaagcccaaagcaaatatataagctcacataagcacactgatttggatgaatcctatcatgttactaggtttatacacagatgaaagaagattgcaaaatttacctattacaaattactaggttttgtgccctaaataaaatccatttcaatataatcatatttactaactaataaagattagaaatcaccttttatgttgcatggttcacatgatttatttcatgattataaatgctattaggtccagaacatatgtatttgttcatgattatagtcttgtcagcacagtggaatataatcataattatatgttcaaagagtttaattccctgatttgtcaattcactagatttagactggcatgatattcaacgataggtatacttacacctt

SEQ ID NO: 287597 - DNA, 615 bp, Cannabis indica
gaggaaatctagggttcctgaaaatttcccaaccggcggaccggttgcacaaccggaattccggttctggaaattcctgaaacccaatccggaattccggatgcacaaccggaattccggttcctcgcagaccacattcaaaaattcataactcattcaattcaaacccaatttaacccaaaccttccagacctgttctaaacatcccatagaacatttcaaaagcaacaaaatagtccagaacacacagaatcaaaaatcaccattaaagctccaagctttgagttcaaaactcaaacttggttaaacaaccctatcatgcatcaaaccttgcttaaaactacaaattcatgcatttagaaactgcagaaaacatacacaaactcatgcaacaatcacagccaccaatttctcaattttcactttgaaaactaaacttttgaactacaaattccacaactctaaacaacctaactatcatgcattacaagcagcttaattaaccttaattaatcatgcttaaacctctgcaacaacaacaaaatcacagcaacaacaacaacctaaactaagcatgcattactccatttttcatcaaaaattcaagaaaataaa

SEQ ID NO: 287598 - DNA, 609 bp, Cannabis indica
accttgatcgtatgtcaatcttctgtgggacggtggctcgagttcgacgggcagcatagcttcatatccgtacaccattgcaaatggtgtctgactagttgctgtttttaccattgtacggtatgaccatagaactttggggagttcttctggccaatttcctttggcatcttcaagtttcttctttagtgtatccttcaaggttttgttgactgcttcaacttgaccgtttgcttgaggatgtaccactgcggagaaacttttgatgataccattgttcgcacagaaatcagtgaaagattcactgtcgaactgtttgccgttgtccgaaactattttgtacggtagtccgaacccgcatatgatgttcttcactataaattcttgaaccttctttgatgtgatagttgcgagtggttcggcttcaatctacttagtaaagtagtcgaccgctaccactgcgtactgcactccgcctttacctttaggtaactgtccgactaggtcaattccccaaatggcaaagggccacggactttgcatttgtgtcagctcgttgggcagagctcttggtatctttgaaaatctctaacatttgtcgcacttctt

SEQ ID NO: 287599 - DNA, 741 bp, Cannabis indica
atgtacaaagttcgatagacatgatttggtagatatcaaagtcgtggggagcatgatttagtacataaacaattactagaaatagtaaaattgaatgaaattagacaaaagtctttaaatccaacaatctcaatagttcagagggtatttttaatgaccttaaaatttcaaggggtaatatttagtacatgtcaaagttcaggggcaaaaatcctaattaaccttattataataatgttacaatttaggtgaattatgtaagacaccttgtatccctttccgtgattcttatggagcattgtaacttgtaacttggaatatgtaaaaagaagggcaggaaaatgaccctaaaatggtttagccaattaaatgaacgagagttctatttgcacatcataaaatgataaatacactttattattaaaaatataaatttgaataattttaaaaattactcccaaatattttttttttattttttcttcacattattttatattaatttcaatacttattttgatttaaatttcataattttttctaactcatgtatattttttttttctaagaaaatttatataatattttattttaatttttttgtcataatatttaaaatgtaatttatttttatttgataggtatattttttaagaatatgaattggaagaaaaaaatttaaaaaacttagtacaattaaagatataaattttatataaaataaaaattattaaaatggga

SEQ ID NO: 287600 - DNA, 572 bp, Cannabis indica
ctaattttaaatatatatatatatatatctgtttgctttaaaaattatctaaagtttttatatatacaaaaataattaataaataaagttatataaaataaaaatctaagaaaataaacattaacgaaatttaataaacatattaataaagaccttgataaacattccattagagacaaggaataactttagaggtttgtgaattaaaaaaatgaattgctttacaaaccaaaaagaaaagaaatttataggaatcattggtgccagatattttatatattttccaatcctatctctttattcgccagatagatattttttttttgattcaataataaaagaagattatattccctgctgcctggttaaataatatccttataatataaatatttatttttttaaggataattttagtatttgatatatttaatttgtgggaaattctattacatctcacaaaatgataattacactttaaaattattttaaaattcattcttaatatttttaatttctttcttattaatttcaatgcttatttatatttttttcacatttttttttaaatc

SEQ ID NO: 287601 - DNA, 405 bp, Cannabis indica
aaaataatttccaacacgaacttgccggggttcacactcctgaagctacccctccctttacttcttcccagatggccccttcctaaaggcttcttccagtgctcctccagacactattgacttagtggatgaggaggtgctcctgggagaaggtcaagaaaagcaatggggcttttctgaggaagttgaagagggtgaaggagggcaccgggctcttcctgaggaagttgaagaaagtgaagaagagcaagaagttgctctgattcgtaaacacaagggcaaaaggtttgcccaggaggagccaaaacggcaacggagagctgacactccggcccacggtcttgatggcggggtctcccccatggaggaacacattgcccctcccaatattgtgctgactccggt

SEQ ID NO: 287602 - DNA, 294 bp, Cannabis indica
atcattgagatctcatttccgtaattatattagtttactgaaatatcatttacagggagctaagtgttttaaggaaaaaatacattaaacggttgaaaggtaaatttgtccctattcagtgtagatcatctatagagcatctttgactattacaattgtaataatagataaacataatgtttctatatcttggtatatatatatatagagagcgttctatataattgagagcttaattccaaatctataatggcgcaaggcagaattaataagttagagaatttactttataaa

SEQ ID NO: 287603 - DNA, 512 bp, Cannabis indica
agtcatgtactcccattgtgcaaacatttcttcataagcatgttgacgacctgtgctgtctgcttctgatgaagtggagactgcatcatcttcagattcaactggattacagctttgggccatgaatgcaagtacctgcttctcctcatctgatccttcactggctgtggagttcttttcctcatcactatcactccaagttgctgcaagggcctttttcttttttagtgtgttggcacactcagcctgaatgtgaccatatccatcacattctctgcacttaatccctcgccccttttgatcagttgaggcttgtcctggtttgaaatttactcctttgtttctcttgagcagattttctttgtcagctggtgaatttttcctgtagttctttttcaagaactttgcatagtttcttgttaacatggcaacagtttcatctgtaatgccatttaagtcctccagaacaggttttttgttttcttggtgaataagtgcaacgccaacctctg

SEQ ID NO: 287604 - DNA, 535 bp, Cannabis indica
aaaaaaaaaagaagagaaaaagataagtgaatgatgtaaggtgtgattgatttaaatcatcaatcaatgacgtgtgtggctgtatgcatggaattgatgtgtaagtggtataattgtaataaaagaaagagaaaaggtaaaaatgatgatgtaagcgtgtagaagttttttttgtaataaattgtgtaagttagatttttgatgtaaaaatttcaaatttaaaggtagagatattagatagtgtggtgctaaattgcttcttcaatcgatttgtgtagaagataaaaatttcctttctcaattttctctctcccccaatctgtgccaactaattaattataatccctcaaacattccaatcaaactcttctctctcaaaactcctttatccctcttattaaatgaggacacattaatttctttaaaaactcatgtgataattaaggaataaaattttgattaaccttatctacacttctttattttttactttatcaattgaacattatcagatttattatttcaaaaattaaat

SEQ ID NO: 287605 - DNA, 829 bp, Cannabis indica
tcttgaacctaaatcatcaaagaaatgtcaaaaaaagaaaagattggccaaaatggaaagaagcaattcaagcagaattgaattcacttgctaaacgcaaagtatttggacctatagtccaaacacctgaaggtgtgaaacccgttggatacaaatgggtatgtttacgtaaaagaaatgagaaaaatgaagttgtgagatacaaagcaagacttgtagctcaaggtttttctcaaaggccaggtattgattatgaggagacatattctcctgtggtggatgcaataacattaagatatttggttagcctggctgtgagtgaaaaactcgatatgcgattaatggatgtagtcacagcttatttatatggatcactagatagtgatatttacatgaagatccctgaaggatttaagatgcctgatgcatataattcaagcaatcgagaaatgtgctcaattaaattacaaagatcattgtatggattaaaacaatcaggacgcatgtggtacaatcgacttagtgaatatttattaaaagaaggatataaaaatgatcctatttgcccatgtgtttttataaaaagttcaagtcctgagtttgttatcattgctgtatatgttgatgatttgaatattattggaactcctgaaaaactttcagaagctgtggaatatctaaagaaagagttcgaaatgaaagatttaggaaaaacaaaattttgtcttggtctacaaattgagcatttaaaatgtggaattttcattcatcagtcaacttatactgaaaagattttgagacggttttatatggataaatcacacccatt

SEQ ID NO: 287606 - DNA, 609 bp, Cannabis indica
aagaaatacggacccgcggtctccacgggaacattaaacgaaggaatcatggcggaactcgccatactccaaaaagatattgcccgagtctcccagagacagaagggcgacgactccgactcagactgtgaggaccgggagccatgtgccaagcacatcctggaagcagagctccccaagaactttaaaatacccaaaatggcagcttataccgggaactctgatccaagcgaccatctgtcacggttcaaacgggtcatgacggtcatgagagtcagcaatgacgctaaatgtctgtgctttccgcttactctaagcgggtccgcggaggagtggttcaagaaattggagcaaggatccgtgggctgctggaataagttacagaccaacttccggagacagtttgtcgccgcaagaaaggtcaatctggaggtcagcgccttgactaacatcaagcagctgcctacggagaccctaaagaattatataaagaggttccgggaggaagcctcaaaaaccaagaaagttgatgacggacaacagcttgcccttctccaggcaagcatccgcaccgagactccattcttgaacgaactacaatagaaggag

SEQ ID NO: 287607 - DNA, 589 bp, Cannabis indica
ggagactttactgctattccaaaagttttaaccaaaagaaataagagtgttaaatcatcacctcgtctttcaagagctcattcactattattagtgctatggtatggtcttctaaaccttatactgttgaatcttgggtttaaacaaagaaatgatgatgtttttgtcctagtgtatgctggttttgatcatgttgtacatcgtactcccttgcttcaaaagaaatatgatacacacatgatatgttgtctagtgttcctcattgcttgtttatgtgtcttcatgtgtgataatgaaagttccacaaacatttctcaaaatgcacgttgactcaaaatatatagataacggatatcattttttagaattggttgagtaaaaatacattggataatcacatattattcttgatgctctcttggatttttgtttaataaagccttgaattctcatattaatgtgtgcaacttgggaagttttttttattgtgttctatctgattaattcgttgtggtatatgatcattatctttctctgtttgttcagctaagccttgattgctatcatttttttttctatgaggcacttc

SEQ ID NO: 287608 - DNA, 1011 bp, Cannabis indica
agatccaaggacaattttaaaagttcttggttttcttcttaattataaaactctcttctgtgagtcgatatgttcacttcaataggcagcattgctttcgagccaaatgctagcaaaaaaggagtgtgtcccgtggctattttcttggtagttctgtgggcccagagcacctaaggtagctcgtcaacccatctgcctttggcagggtctaagttcttcttgatagtatcctttagggttttattaacggcttccacttgtccatttccctgaggcctcgatactgacgagaagcttttgatagttttattcctctcacagaattcagtgaacaagtcgccatcaaattgggttccattatatactatcttcatgggaattccaaacctacaaataatgttcttgacgacaaagttaaggactttcttccaggttatggagacgaggggctcagcctacgtccatttagtgaagaagtcgactgctaccaccgcatacttagctcttcctcgcccagtgggtaatgtcccaattaggtcgatcccccatatagcgaatgggtagggcgaggttatcattctaagttctgttggcgctacgcgaggtatatgtgaaaacctctgacacttatcacatttcctgacaaactcatgtgtgtccttattaatcattggccaataatatccttacctaatgatctttttagacagactttgccaacccgcatgatccccacagaagccttcatgaatttctctaatgattttgttttcttttatagaaggaacacaccgaagtaggggcattgaataccctctactatatagtttgcctttgatcattgtgtagcaaggcactgtatacaatagtttttgcgcctcatttttgtcattggaagttggctgtcgagtaaatagttgataataggcgtcatccatgttggagagctatctatcatctcgacgtcttcaatttcacatatacttggctcgctcagcagttctaccggaa

SEQ ID NO: 287609 - DNA, 612 bp, Cannabis indica
aggtagtagtatacccccttatcggtcctgaagctagtgcactcttaatctgctgtgtgcatctttatttggttataatcggcgtacgcgtccatgaaggacagtagcttgaatccggaagtggcgtctaccatctggtcgatcctgggcagagggaaacagtcttttgggcaagctttgtttagatcagtgaagtctatacaaactcgccaggtcccgttaggcttcggcaccaggaccggattggctagccattccgggtagtaaacatcgcggatcatgccgcttgttaatagcttgtccacctctttctctaaggcttcggccttcactgagtcgaggggacgtcgtttctgctggactggtagcatgtccgggttgacattgaggacatgggtgatgacgtggggacttatgccagtcatgtcctcctggcaccacgcgaaaacgtcaatggcacccttcagtgtctttattattttttctttttcctccgggtctaggctctttcctagccggagtactttggtggagtcgaggtcgcacactgatatctcctcgacatcctccattggttctacaatttttttcggatcccacacagggatccaa

SEQ ID NO: 287610 - DNA, 572 bp, Cannabis indica
ttatggatctcatgaatagagtattcacggatttccttgataattgcgtcataatgtttatcgatgacatccttgtatactctcagtcagaagaggagcatgagcatcatcttcgaatggtattgcagcgacttagggattacatgtatgcaaagttcaaaaagtgtgaattttggttgttcgaggtatcttttctagggcatatcgtcaggaagaatggaattatggttgatccaagcaagatcgagttagtgaataattggtcgaggccaaaatctgtgacagaagttcaaagtttcctcggtttagcaaggcattctcgacgttttgtcgagggattttctaagatctctactccactgactgagttaactaagaaaaattagcgattcgtgtggtcagacaaatgcgaagcaagttttctggagtttaagcaacgtttgataatagctccggtggtagctttgcaatcaaaacaagagaaattcgttgtttattgtggtgcatccaaacagggtctgggatgtattctgatgcaagctgacaaagtcatagcctatgcctctcgtcaa

SEQ ID NO: 287611 - DNA, 540 bp, Cannabis indica
caggctactatcgtcgctttgtggagaatttttctcagattgttatgcctttgacaaagttacaagaaaagaattaaagtttatgtgggatgacagttgtgaagaagctttcagagaattgaaggaaagattaactttggcgcaagttctcactgttcctaatagcgaggaaccatatgtggtattcactgatgcttcaggtactggattaggaggtgtcctcatgcaaaatggcaaggtggttgcctatgcttctcgacaattgaaaccacatgagaagaattaccctacgcatgacctagaacttgctgcggtaatctttgtcttgaaaatttggagatgttatttatatggcgtaaagtttgagttatactcagatcataagagcttgaagtatctttttactcaaagggacttgaacttgaggcaaagaagatgggttgagtatatggaagactatgatttcactttgcagtaccaccccgggaaagctaatgtagtagttgatgcactaagtagaaagcctcatggtactttggc

SEQ ID NO: 287612 - DNA, 531 bp, Cannabis indica
ctaaggttcctttatgtacagttaccgttttgcctatgaatactcggagtactggcacattactcattttatcacccttcgttgttaagtaaacttcagagcgaaaagagagagttttctggctttagagttgccgaagtgcctacagacgattgctggcttgcttgaacccggacattcgtctttgagtaagtttctgatcccctttatgctttcctttgcatgtttatgctttgaatataactatgttgtagaaagaacgcttaggaaacccctagggtttgagacttctacgactcttcttttccatgtccttatgttatctttcagtcgtaaaggcttatttttgaactgcattgcgtctgttttccatcttgcttattccaagtttcatgaactttttttgccctaactcaagaaaactttctgacttcttgagtttagacttttctttgaacatggtcgttctttaatctattgggtactcctggtcaacatatttgcttgttttcgtttgatactccgtccaac

SEQ ID NO: 287613 - DNA, 478 bp, Cannabis indica
cttgatatctactggaagacttgatgatgagggattcataaattggtttggtgaaagtaaatggaagctcactaatgattctcttgtagtggcgagaggaaagaaagtgaatgctctttatgtcatggaagctaagctacacaaagaagagattaatgcagttcaaaaagatgcaaacattgatctttggcaccagaggcttagtcatatcaacgagaaaggacttcaaactcttgctagaaagcaattcttaccgaatttgcaaggtacgcctcttaaaacttgtgatcattgcttagctagaaaaacacatagagtttcttttcatgcacgtccaccatgtagaagatctaatgttattgatctgattcacagtgatgtctgtactatgcaaactagaactcttggaggtgcactttattttgttacttttattgatgacaattctagaaaaatttgggtttttgctttgaaatct

SEQ ID NO: 287614 - DNA, 902 bp, Cannabis indica
cttcttgagtttagacttttctctgaacatgatcgttctttaatctgttgggtactcctggtcggcatatttgcttgttttttcgtttgatactccgtccaacactcatcttgcgtgttgtcttttgtagatgaacccaggtgagtcttgggagcccgagcatcaaatcgaccaggagctgcttcaacttctgcacgaagtccatcctcgtcttcgtgctagtccttcttcaggagaaggatattcttctgattctgtacccagccatagaatgatggctcgtacgaagaaaactacgcgtctggctaacgcttctgacccccaggtggctcggcttgccactctgcccgatgccgaacaagatttggcggtcccaatggaggaggaccgtgagggggacgctgaagtccaagaggttgaggagctggacgaggcgcgtccgggcagccctcccgctgctgagggagaggaagagattaaaacccctaactacgaggagtacaatgaggttgggcaaccagttgatgctgacggggacgtcctagttgcgggcgttgattacgtcactgaggagcttgctgaggcggttcctcacaggaggcagggtgccttgggcgccagatgggtgagtcctccgtccaagatttcggaggcacgcctccgcactctcgaccaggacggatacctgggcgagctggactgctacattcccgcccacgacaatcgcgctacaaaccctgataaggggatgtgcgcctggtcgggggctcacggccagcaaggggcgctgatgcccttgcacaagtacttctgggatgtggcggacttcttcggcctctgcccggctcagattactcccaagggcattaagtatttgtccgctctcttcgtcctctacgctt

SEQ ID NO: 287615 - DNA, 533 bp, Cannabis indica
attatgacctattaaattaatgatttgtttcgtttgttgcagtttaaaaggaacatatcatcctcttacactaacaaagaaatcaacgaaatacgtgacgaatgggcaaagtatgtcatgcagatgatagcagcaggcaaatgactaataacatagagtatgatgaccaatgatcgctcatggacgatccccatgtgatctaagaaaatgattgataggtttgacatcgatcttagttactattgtcttgcttttttagtttttaggaagtgatctccagctatatgattaaagtcccaagtgactacgtggagacttattttgttcttagtatacatatttttaaattgttcagaagatattctacaaaagattgcaaaatgtaaaaacttaattggatttccttcttttgtattgcattactaaactttgtatggcatattatgattttctatgaagctttaattcttttgtaagagtgttaaatgtatgaattttcttataaaataattattattgttattatgtttttt

SEQ ID NO: 287616 - DNA, 922 bp, Cannabis indica
taattaaaaactgatccaatctaattacattatttatattgaattttttagtgttaaatttgtaacatttggatgttttatgtatttattttcatgatattttgttctattttattacttagaaatattattttaattatttcaaacttttagttgcattacacttgtaatgatggtatatttatagagtattaaacttaaataaaaggtgatatttagtttatacgtatttttctacataattttgagttaatattaaaatttaagtgtgtaattagatatttaattaaaaaatcgatccaatccaattagtaattggattggattaaattggtttgaatgacgattttttaaatccaattactaattggattgaatcgaatgaggagaaaaatattaaatttgaataagatgccaactcttagttgctattacaatgttggtttgctatttttgttagggttataaaacacttaaagaaatatataaatcacagatctaaacatattcctaaagtgctttaatatagaaaaccctaaatcataaatctataaagcctttgctaaattaaagaagaagatgatgataaaagatcagcggaagcactaacctgaagccattgttggagattgcagagaaggttttgatcttccaagaatacactattttctagagtattttctctgatggggaaggagagaatacagaaaccctagtgtttcttggggaccactacctatttatagactcatcttagaatgagttttgggtatttataatttggcccctcaacaaattataaattaacttatggtatctacacattatttccatgacaatttaatacccttttgatacccataacataattggtcacttaattttgtatcacactttataatagcatatacattatacatat

SEQ ID NO: 287617 - DNA, 553 bp, Cannabis indica
gccgagttcagacaggagggtgtccgagcacgtgcgtgcgcggatcctccttgtccgagggtctgtgcgtgcgaatgggttaccctcgacaccatatgcacctgaaacttcaaaccaccataactcttattttttatccgaattgagttccgtaaaaatgaaagttgcttaatttttcacaaggaatccaaataaaatattttcagaaagaaaataaaaatattttcatggaaaaatttcataaaacacatacattcatcatataatcacataaaccattatgaaaccatccaaatcaacacaaagatcgttttaattcatatttcatgaaaggaaataattaccatggctctgaggccagttgttggaattattttacctgaatctagatttactaccatgtatgttatttaatatcctaatatgaatttctaaaacaatgaatgactccttacagtgggtgcaacggaattaaatgactccttccgctcagatctctaacccttgtgtcctttctatagcaaagtatcaccaagatctgagcccgattctc

SEQ ID NO: 287618 - DNA, 587 bp, Cannabis indica
aaagggaaaagaataatagcctgcaaatgggtttacaagcataaagaagggatacttgaaggtgaacctataagattcaaggctaggttagtagccaaaggttttacacagaaagaaggagttgactacaatgagatattctcaccagtagccaagtacaagaccataaggataatgctatctatagctaatcagtttgacatggaaattgatcaaatggatgtcactacagcttttctacatggagacctagaagaagagatctatatggaacagcctaaaggttttgagattaaagggaaggaaaatatggtctgcaggttggttaagtccttgtatggactcaaacaagctcctagacagtggaacagaaagtttgatgcttttatgttaaagcatgggttcaacagaagctaccatgacacatgtctgtactacaaaggagactctataaaagatgtcatctacttactactttatgtagatgacatgcttattataagtcaagaaaggactagggttgatatggttaaagctctacttaagacagaatttgaaatgaaggaccttggaaatgctaccaagat

SEQ ID NO: 287619 - DNA, 608 bp, Cannabis indica
gttggaatacccgatgaagatgcacttgtgagattttggatcaagttttgttctgttgtgatcataaacatgaacaaaggctgtacatccgaagactttgaatggaagatctgaagaaaaagctgagatatgagggaatgtagcaagtaacaaatttcttggggctttgaattgtaatacacggctaggcatacgattgatgaggtaggtggatgtgagtaaggcttccccccaaaactagtttgggtaacgattattttgtaaaacaatgatagatctagaaacttacaagaagatgcctattttttcttttcaaccactccattttgtttgcggagtatcaacacatgaactaatgtgaacaattcctttgatctaacaagtatggaccaagtatggagttgaaatattcctttccattatcagttttctaagatttgtaatcttttggtttaaattgattttgtaatcatggaatgaaatttttgtaaaaataggaagcagtttctagatttttcttttcataaggaaggtccatgttgtcctagtatggtcatcaataaatgatacaaaccatctagatccattaatatttgttactcgcgatg

SEQ ID NO: 287620 - DNA, 552 bp, Cannabis indica
ggactccagctgttggcggggctcctacccctcctgcatcgggtcttagcaggggtggtagtggttcgaccatggactagaaaagaaaggcatccactgcaaccagtggctccggtcagaacaagaggttccgggggaaccagggtcgaagcaatcgccagagtggcaccaaaacccgatacacttacccaaagtgccccagttgtaaaaggcaccatctagggtagtgtaaagggcaagggtgctttcagtgtggcatgccaggacattacaagagagattgtcccctactcagaaccgaagccccaaggactacaacgaaacccagtctagcaagggtgttcgccatagctcaggctgatgaagaagctagcccttcagttgtaacaggtcagctctcggtcaagaacttttatttctctttgttgtttgactctggggccactcattcttatgtggcagccagaatctttagtaagttggatagaccgcacgatagttatgaatcaggctttggaaccctactacctggcggagagttagttatctcca

SEQ ID NO: 287621 - DNA, 735 bp, Cannabis indica
atattaaattttaatttatactaaaatattatatatttaggtgctcataaaagtcaataccagatatagttttgcataaaaatatttcataaaatacaatttaatataaaactatacaatacaatacggtataatatgacgtaccaaacaaactctaatattccacaataatactattaaaacccaacgagaacaaagaatcaaaccatgtaaaaccgaattatattgaaagccaaacaatgacccaagtgatctggcacatagttaaaattaatttcttttaaaatttatggtgattttaatattaaattttaaaaactaatgccatcaaattgaatctaatttgtttctaaacattcaagttaaccagtttatatattaataatatagattgtgaattaggtcttaaaatctccattttcaattatccacttcaataagtaaagagatgagttaatattattgctttcctctttgttactacctccataataatgtggatagtcacgacttttgttttcgtgtaaacctaaccaattatatagatgtaaaaaaaattaggctgcacaatcttttctacatcagtaaataaagagattagtatgagttctgaactcaatgtaatttatttaagggattttttcaatattatacctaaaaatgattttatttataaaaaatacttttaagaaaattatttgcacaataccgttgtgccacgtcagcttacatacc

SEQ ID NO: 287622 - DNA, 674 bp, Cannabis indica
agagtatcctcagtagggaaaataggtaatggaatttgaagaattttatccacatcagaagcaagaaaagaggcatttaacacatccaaatcccactgtcttgctgaagtgatgagggaagatacacgctgatctggttcaatcccatttgatcgcaaaggcaaaaaatttgttataccaggaatccaaggatcagaattacacaaaatgctttgaccagaaccaactttccatctgagtccctttacaagaagttctttaccccaaacaattccttgccaagtaagagaagggtaggagcctttgttagaaaccagaaaggaagaattggaaaagtatctagctttgagaatacgacaaagcaaagaagtgggattagagaaaacccgccaagcctgttttgctagcatagcttggttgaagtgaatgaaactcttaaaacccattccaccttcagattttggttgacaaagagcagaccaagtcttccaattgatacccgatttagaagagtttgaaccccaccaaaatttattcatcatgacctcaatttggtgaataagagacttggagagtctgaaacaactcattgcatacgttgggatggattgagcaacgacttttagcaaaacttcctttccaccaatagagaacagttgtcttgccaagcagat

SEQ ID NO: 287623 - DNA, 664 bp, Cannabis indica
cttcgttttctgtttgagtggggactgtattttctgggtttttagtgtgcatgagggttgtttaaggatgaatgtttatagatggtatgcatgaggctatgttttttaggtaaaaaacctgggtaacttcatagaatatgacctgtaagttggcataaccgcatacgaaatacttgaataggcactgtttcatgctttgaatactcgcgggtattcagatgaacaattcgaatactcgcacattgacaaaatttacttacttctgattgttggctagatcttttaggattttatatgctgtgaattaagtcgcgagagcattaactgagtttccaaatggtgggtgtgtcacagtattctaatggtcatatacgcggttatatgtcccttgagatactgtgatacacccagccatttgtgacatgcgttaatgttcaaatgagcgtactctttggctggtagatattctcggaacggtgggagtacctcagtaacttcagggtcatgcttgaaaacgcatgccccttgagtcactgagtttctcccagccgtttctggaggtatatcgcttggcccaggatgcgtgacttattcgcatttttagtattatctctactcgcatattgatggggtggtcagcattcgcaaggatgctgaccattct

SEQ ID NO: 287624 - DNA, 524 bp, Cannabis indica
ggaaaagcaaagctggaggaacagtgaggtggaactcggcatgattgtacatatcgcggcagtgcaacctggagggtttcggtttattagtattttggagtctgtattttgaggatgcttgtccgctaaatttaaaaaaaaatatatgtatatgtacatattagtaaaatacttttaactagtattttgatactcgggatcccgatccatatgattattaatatattaattatcaaaattagacttcggattttattattataaaatacgggcgttacagtttggtatcagagccactgggttgtccactgaagaccgtcaagatatgtacaatcaaggccagtgtcgagttcaactcacggttccgtaagctttatttctttttgcaaactattttaagatatgttgtgttgtatatatgattaaataagatgttttaaattttaattgcggtcttgaaagtattttgaccactgtctgacctacgtgccttgtgggttcgcaggctaagtcctaaataatgg

SEQ ID NO: 287625 - DNA, 288 bp, Cannabis indica
ttgttgtgtgtgctcggcgccacttattattcttgcagtggaactttgcaaatgtatccacagcactcggaagctcccccgtctgcggatcaggctattttttttacaaaattggaattagaacaatattattaaaaatttccaattgaaccatatttttatcatatattgaaaatttcataccccgctgacaatggtcgaaactatggtcttagatccccatccaccttgaaccttcatgttacctcggttttctgcattttactcagctcttgcctgtaatttaac

SEQ ID NO: 287626 - DNA, 609 bp, Cannabis indica
tattctacgataagtaaaaaaaaaaaaaaaattatcaatcagcatattttttaaaaaaatgtggagtctaaaatgatatatactttttgtaataatataaatattattcacaattaagtttatatatttataaataggaattatttcacaaatacaacaaaaataaaaaaaaatacaaaaatacagttttattaaattttaaatatttttaaaattttttgattttatttaaagaaaatacaatctttttatgttgtactcttattaatttattgttgattttttattatctgtatgttattgtttgttgttgttttgatgttatttagatattatttatgttatttttatgtagtttccttgttgttttcatgaaaaactgtaaaaatgtaaaaaaaattctttaaacgtaaaaaagggtttttttttttttaacgaaaaatgatatcttgtgtatttatcccttaaaaatatatataatctaagtgagtaatttttgcattttttgatttttgcccaaagacatatgaaaatattattagtgatgttaaatattttaccttaacttttttttttttagaattaagcgtttatatattacaacatgtt

SEQ ID NO: 287627 - DNA, 557 bp, Cannabis indica
gagcgtcgggaggcccttgccaaggccagtgaggaagaggccaagcggagggaagcgcaagcggaggcaatgatccgggaggaggcccttcggagagataggctggaggccaggcaccaagaggagctgagggcggagggcgaagccactgctaaggccaggcgagagcttcgggaggccagggaagccttggatgaaatggctgccaaggtgaggtccttagaggaaactcaccgggcaaacttggaatccagggccaacctggccgcggagctgaaggagctcagagacttcaaagaccaagccttaaagaaggcaaaaagagatgagcttctttctcctgtctcctgcagccggtgcgccaagcgttttgatgatggcgtcttcatggcctggtctacaaatgaccagaacatcaagcttaccttctaccccaaacccgaggagatgatcgcaaagttccgggagaagaagaaaaagcttgatgccatggtggaggcgcgcatcggtcctcgccttcctcctcgcattgattaggccgcttcgagtttgaccca

SEQ ID NO: 287628 - DNA, 632 bp, Cannabis indica
taaacaactgctaatttccaaattaactaagcgggctttacatggtggtaaggcgagtatttgcaaacacgagagatgcatctgcaggagtgtccaacccaaactaggagggtccatatgttgggttttgtacgctaaataaaacccatttcaatataattagatttactaattgttatcccaaattttgcactctgacgtggcatcacaagaatggtgacacgtggagtccacttggagcatctgctcgggaataatagaccgagcaggatgcctcgctggcacatccagaataagatattcagcgatccgtgcagagcactcaacacttagcgaattcagctttcgcatcatgagtcatcagctcaatccctataactcagggatcaacttacgtggatatggcatacacacgatcccactatcagtgtactcagcctcaatcccacgatccttgcattcagcattgatcacacgatctttctgtttatgcgcattgtaacgagagaggaaactcttcctcctcaagtttcccagccctataaatagtgaggaatgttcactgggcaaggggaccgagagattgaaagtcgatacgcagctaagctaagactatattattatctaagaat

SEQ ID NO: 287629 - DNA, 635 bp, Cannabis indica
caagctgatgctgcagccagtccttacgtggtgacaggtcagcttcctgtcaaaaactccttgtatactgtgttatttgattcgggagctacacgcacatatgtggctacatgggtaattgatcttttgggtaggccttgtgatattcttgaaagagggtttggaaccctaatgcctgacggggagttggttatctccaataggcgcattaggtctatgctagttaggatcaaggatagggagttgagtgctgaccttatagaactggaattaacagagtttgacatcatacttgggattgattttttgtccaagtattcgaccagtatagattgtaagtggaaaatggtgactttctagccagaaggtgaagatccatttatttatgttggatcagttcagggatctcagatcccggttattttctgtgttgagggttagggatccactacacagtggatgtgtaggatttttagcagtgttgatagtcagagttgttaaggattttcttgacgtttttcccgaggagttgccgagatttctgcctcaacgagaaattgattttgtgattgatctggcacctaaagccgaacctgtttctaaaactccgtataggatggctccagcagaactca

SEQ ID NO: 287630 - DNA, 651 bp, Cannabis indica
ccacagctcgcaaagtgccgcattcttgcggcaacactcgaggaaaatgcccatgattggtttacccaattacctgaggcgtcgatatcgacgtgggaaaccttcgtcgacttattcctcacacatttccaggccacaatgacgtataggccaccttatacgactttggccaacatcaaacaagaacctggtgagtctttacaagactattttaaacgctttaatgcagaagtaacaaaagtcgagaaggctcccgagtcttcgcttgtttgcatgctgataacaggtatcttgccgaggaccgacttttggaaggagttacaagctcgaaggcccgaatccttagttgaattcttcgccatggccgaaccccacaagagaatcgagaattctctagcggagttagagaagggaaaggacaaacgccggtcacctataccgcgttcacgatctcgcagtccccgagggaagaactccaggggccgaagcccaaggagacgcagcccgcggagacagcgaagtccgaagttggccaagtctcctccaaagaaggaatcctcgccgaaaaggaaaggtggacctcgtttcgtcaactatactgaactcgcagtctcccgagaccatatctacgcaatcgaagaaagaaacgga

SEQ ID NO: 287631 - DNA, 531 bp, Cannabis indica
ttcttagggctttcgaagcacaaggtcctccaaaggcagcaaccggacggaggataaacggcagtaaaatcggggtatactccccaatatacccaatacacggagttaacggactcccaagaacgtgtatagtttgctactaggcaaaatacgcactaccggaggccgcctcccctgtacaaagacagctcccggagggatcccaataagagatgcgagtaccacaatgacattgggcacagcaccaatgaatgcaaaaatctcaaagacgagatcgaaaacttgatccgattgggacatctatacgagtggatcaagaatcggttgccccatctcaacccgggtcaaacggctggagttttgcctcaaggagcaccagggggtgcagcaggagcattagccctcgttgctccccccggagatgcccagcatattcccggcctgccaccaaggcccaacgaaagagtggctatgatctcgggaggacccccccatcggaggaactacccgcaaggagcttaaacgatacgc

SEQ ID NO: 287632 - DNA, 664 bp, Cannabis indica
tgttaaattatgttagaaatatgttgagatatgcatgatttagtggctgtttggaggattagtcaagttttgagtttttgaactcaatcttgaacctccaatggtgaaatgagtttctgtggtcgaagcttggttcttttgccttggatttgttcttaggggtatttagaacaggtctggaaggtttggtgtgatttgggtttgatttgagcgagttatgaatttttgaatgtttcctgcgaggaaccggaattccggttgtgcaaccggaattccggatggggttcaggaattcccagaaccggaattccggttgtgcaaccggtctgccggttgggagattttcaggaaccctagtttttctcgtttttatgttatttggggtattgccatgctttttatcgatagggaaacttttagtttctagtttaagtccccgggaagtgatttagcgtatcacttattagtgttgtgattgttatggtttaggagcctgtaaaccgccgtgcagttcgttccagtcaggttgaccggcacacctgaattcggaattgaggtaagattagtataacagtatgcatatgtattacatgtttagcgtgcatgttaggaagcctgttagattacattagatatgtatgttggcttcgtaccatccgaccat

SEQ ID NO: 287633 - DNA, 911 bp, Cannabis indica
ttctgtgccttcttcattttttttgaagctgctactggtcagcaggtgaattttgccaagtcttcaatattttttcagctccaacactcctcttgctattctggatagaatgtgtgctatgctgaggatgcccatggctgatgcgcaaagtacttatttgggtctcccttgtactatggggaggaataagaatgcaatcttgggttttctcaaagataaaatgctcaagcgaatacagagttgggagggtcggttgttatcaaaagctggccgtgaggttttgctcaaaacggttgctcaagctttgccaacctatgctatgactgtatttcttcttccgctcaagacttgttcacaccttgaaagcttaatgtcaaagcattggtgggggtcctctactaactgaacaaaaggtgtaagctggtttagttggcgacgtctttgcagaagcaagaattcaggtggcttttgtaatttgcgtgattataatcttttcttgttaggaaagcaggggtggcgtcttcttctgtatgaagactctctcgtgggacgcatttacaaggcccgttactacccaaatggaaatttccttacagcagagataggtgataacccaagctttatttggcggaatgtgtttgagtcccaacagttggtccgtgatggtgctagaaggaggattgggtctggtatgtttacccctgtgcttaatgttccttggctgatttctgatgtgaatccttgtgttgtttctacccatcctgctctggcgaatagcacggtatcacagttgatgcatattgatcgtaagcaatgggagtcttgaggtcgttacatgatttatttgaggcagggatgttggcttgataatgcaggttccactaagtgatcatgttaatgttgattcttgg

SEQ ID NO: 287634 - DNA, 848 bp, Cannabis indica
gtttctatttttcaatgtgcgttgtttcaattttttgaggttaaatgctagttgtttctatttcacaaactacagttttaatttttcgagtttaaattgtttctattttgttgttttcattttcaatgtgagtttttttttttttttttccttatttttattgatatttgtttccttttctactaagtgctacttgtttcttatttcctacgattaaattaatttcttatttttaattgtgagttgtatctatttttgtatgatatttattttctatttcatatatataatggtaaatgatagttgttatcatttcacaaactataatttctaattcgagtctaactatgatcttttggaaactgcctcattattgatatttcaacacacactaatgtattggctgccagttgcttttcacattggggaatgcttattgaaaccattcactttaggatttaaaagactgatatatatgttggggagggatgttttggacctatatataaggtatttagtttcggtaatcaattgtttccattttcaatatgacttgtttccgttttcagtgtgagttgttcctaattttttatgttaaactttatttgttactattttttatgacatttctttctattgtggttaaatactactaatttctattttttataatatttattttcatttcacatatatgtatatatattaggttaaattctagttgttttcattttaaggtcatgttgtttctatcttttgaggttaaattcacgtatatgtatatatatgatgttaaataatagtgtttctacttcaagataatgttgtttctattttttgatgttaaa

SEQ ID NO: 287635 - DNA, 477 bp, Cannabis indica
cagttaattatgtttaattatgagaattatttatagatatttaaataattatttatgttgttattattgaattctgaaatgcattttatgtcatatagtgaatttcataattttgcatttccggtgcccggtatcatggaactcggtgtttggctcagtaatatcacaacttagtatgttagtattgtgggacggttatttagacattgggaatgtcggtattggccgggaatttagaatttcccaaaataccctatagtgccctttatgttatatttgggtggaggggcaaaatggtcattttgccctaatgttatttggtcctttagtggacttagtaattggaaattaaatgtttattatgttaatttttggctgaatatagagttggtatattgcatttatcctttattttcaaaattggaaaagttaaaagaaaaaccaattttctctcaaagctctctctttctctcttgt

SEQ ID NO: 287636 - DNA, 565 bp, Cannabis indica
accttccactgtgttgacatcactataattgtgaataactatatgttttggacttaacagaaattgtatacattaaaccataaaattgaaaactacatgtaaacataaatgacttctaatcttcaattgataacaaatcagattatattgaaatgagttttacttagggcataaaatcccaaaaaactcccacttgcactaacataaaacaagcagtgcatttcaatcaatctaatgtcttgatatccagatcaagtgtagtgtatttgactagacccaaattactggaactgtaagtctgtggtaagcaactgctttcttcaccattacttcctttgtgttcataaaacattgtgcaacatcatttttgtatatgcattactcatctagggatactgaattctttactgattataaagtgcatctgaataaattgaagacaaatatctaattctatccaaaatggaatagagataacacagttaagaactttcttcagttgaataacttttcagtgctttacaaaagcaacaacaacaaagttatgtaacttcactgatggagc

SEQ ID NO: 287637 - DNA, 837 bp, Cannabis indica
aatttttttagaattaacaattattcataaacatagaaataaaattctaagtatttatgtagtattaactcgttgaagagttgaaaatactatagaatttgtttcaataataaaacgcatacacaaacattaaaacatataaatatagttggtattggtataaacaagataagataaacgaagctcaattcataaatgcaattcatttcaaaatagaaaactttattataaattctccaaaattaaaggaattgtctccaacaatatgaaaaatagggaataaaatccaatactaataattgaaatccaaattgttcttaaactaaaacaattaattcaaaaaattaaagaagattctgagcttcatcttcatcttggactatctccacccttctgtccaactatccgattcaactcactaagatagcatccgagttcaagcagttgaggctgaaataagaagaaaataaataaacatggttagtaggtccagaattaataatccaagtggataataattcattaaaacacatcagtttataagaaaagaaataccttgtttccttgctagaaatatagggcaatggggtttccagtggcctttttcattgcaatagaagcattttccttttggtgcatcaccaggagtagcagcctttacctttttaactgttttcacaacttgaacatgatttttgctattcttccacttattcttgttcttgggtttggaagtagaggcaaagtttgcctcagccttagtcgctccattaccatttccagaattaggagctttaggaccctttttctgcggtcctccaatcaaattttcatatg

SEQ ID NO: 287638 - DNA, 899 bp, Cannabis indica
gaaaccgcggataggtttcttacttatcgtttgttgtatcggacaacgatagtgacatatacagctcgtggttaacgagtggtaggggtactttatgaagtacctaaattatgtggttatgaagttgtggaacgatcaagagtgttattatgtgatgagttgtaattgaatacatttttgttaaggtaggattgaataaatgttaaattgcttatgaaattggtcatttttcttacagtctctgtggcttagggatgtaagaaaacaggttgtaatgatgtatgattggagtgctttatgaagcactgaaattgtgtggatatgctaatgtgtgaactagggtgctttatgaagcattgaaaatgaatatttatgataatgcatgattaaggtgttttatgaaatgctgagattgttgattatgtatagctataaatactcttaattttgtaatgagttgctcgtatagacgttgaattgtaaatatacgttgaaagagtgcaatctactggtatgaataatctgttgaaaagaaatctactatcactttccataattttcttttgtctaatagctttcttgctgagtcattatgactcacgggtgcttcatgatgcaggtaagaagattagcggttctttttggccacgagtcagaggtctcccagcaatgtacatatcaatcgtgttgtcttggcttccaggaagcaggatcacccctttttctatgattggatgtataacctactcttgtattaatggttttataattggttataaaagaatttattagcaggggatccccatattacgacagtattttgaactaaagtttctattttaaatttaattaaagataatatattttttttgaattaaaccacacttttcctaaactaa

SEQ ID NO: 287639 - DNA, 558 bp, Cannabis indica
gagcagaccattgagactttgctactgaagggaacagtccaggatgagaggacatctcttcgagcggtcctttgtcgggtgaatgaggagaaggaagctaaggaggaggagcttatggccgtggtgatgaagttgaaagagaaggttcatgccttggagacagccggcttgagctcttctacgacatttggaaggctaatcctcaggcaaacttcgactacttgggagaagctaaggacatgtaccttgagttctgcgcttaccaagtggcttatggtgaaactgaggcggctgcttctacctccggccaaaatgctgatgtacctcccgttcaaacaacagatcttccagctcctgccagcccagaagacccgaaccaagagcatgggactccagctgtttaaatacttcttcttttatccttttatttttatcttatcttattcggccataaggccttttctaagacttcatgggactccagctgtttaaatacttcttcttttatatttttattcttatatatcttattcggccacagggccttttctaagacat

SEQ ID NO: 287640 - DNA, 214 bp, Cannabis indica
taacccttgtatcctgtttgtagcagagtatcaccaagatctgagcccgaatgtccttctcttgattctacattcttcactcaaggtatgaaaattatgaagaagaaggaagagagaggtggttcgaatatagaaggaatagatggtttaggaaattttctgaaggcacgaaatttcatcatcttttagtttgacccatcactatctatttata

SEQ ID NO: 287641 - DNA, 696 bp, Cannabis indica
tcgaaggaaatcattgtttcacgtctaaatacctatagaagctatagattccatatctatgtttagcgctcccactcaattgtactagcatgttcccaaaatgaaacaccctaactagcataagcgtgctaacgtgattttaaacatactgtgcagctcgttgctaattaacgaggttcatgaaaatcgtgattaattaaaatttgcttatttcattaaatacttatacttttatatacaaaatatttcgcgatcctgtttacaaaataatttacaaaagtttgctattcgtttacaaaatatttgtcgcccagcgactaacagcaaaaccttgatgtcgcgaggatcgtacgctccaggcctaaccgcctcgacatgtacaatcttcatctgctcgtcctcacggttcctcaactttagctttgcccttacttacacataaacatagcactgtgagtcgacagactcagtaagaaaagcataacaaaataaacatactagtatcccgggttataatcaggcgccccatacacctaaccataaccctagctgaatcaagatcgatttgtacaaagtatgactaaactgtgaatcttgcctatactcagtactctaaatcgcactgatgtggtagcagttatccactactaacttctaggttgccgtacgcatatatgtctgatggcatctcggtgc

SEQ ID NO: 287642 - DNA, 518 bp, Cannabis indica
aatcttggtgtctatagaaagcttattaaatttcccataattcttatgaagaaaggttttactaaatcataatttatcggtgtcgaaaatttgtatttctacgctgtctgttgtaaatcgtttttttttttcatatttcctatataagttgtctcagtaaaacttgaatatctctctgaatacttatccgattccagcggtcttaatatcgttgaaaagctgattcaatgacctataatttttatgaagaaacctcttacaaattcggaatctttctatgtccaaaatcagtatttgtatacagtttgtcgtgaattatttttctcatatttcctgaaaaagttgtctcagtaaaattggaatatctttttcaattctagcccgtttttaataatctatatatcattttaaagcttagaaaattatctacattttcccttcagagagttttctctaatttggagttttccttggtcgaaaattatcgttttgttgctgtagtctaaagttcgtttgct

SEQ ID NO: 287643 - DNA, 889 bp, Cannabis indica
ttcaaggttaaagaaggaacattgatctgtgatgtttgatggaagttcagactgatctgttgaagagagtttagcttgctggaagaaaggggatcttgtcttctcagatatacgtggacttagatctttgttcttgagtgtattcaagtattttggtaactttgtatgaaatcattaaagtttacattgtttgaattgtatattaaaactagagaatgtatgtttgaataatttcttagtgaaggttatcttacccggttcttggagacctaagcactacccggttggaatgagtttccaatgcaaaagaagcttgtaattacgatgtgcaattgattttatgtttttatacttgtgatagaaaacctaatcgtgatttagtagcttttggtatatcttgaactttcatttagtatcagagccatcctttacatataaagaaattgtgatcttgtagctacgtaattctggttaggtttgtcttgttatctgaataggttttggtgtaagttcttttcttctttcttgatctattaagtctggaaatctaatcctctttgagattcatctcagagtgcaccatagttgttggcttggatttatgtaggttgacaggaaatggagatgttcagagaaagaggatctacttctagtccacaaatgctagaaggatctaattatccctattggaagaccaagctgagagccttcttaaaagatgtggatgaacgagtatggatggttgttgccgaaggttggtctccacctactggttgttgatgatgaagggggaaaagaagaataaatccagtgaatggtcaattgaggagatgaaacgagcaaattttaatctaaagcttttcacgctctctttaatgttgtctccaca

SEQ ID NO: 287644 - DNA, 607 bp, Cannabis indica
tgtgtggttaatttctgaagtttattctagattatttgtgttgatttgagctgctggtaatgcatgattagtggtgttgtttaaggttatggattttctatgtaaaagtttagttttcaaagagaaaattggaattttggtggctgtagttgttgcatgagttaggttttagtttctgcagtttttatatgcttgaatatgagtttttaatcagggtttgatgcatgatatgttgcttagtcaagttttgagttttagaactcaatctttgacctttaatggtgaaatgagtttctgtgtgtgaagctcggttttgttgctttagaaatgttctaggggatatatagaacaggtctggaaggtttgagtttaattggatttgatttggtgaagttgtgaatttttgaattctgcctgcgaggaaccggaattccggttgtgcatccggaattccggatgggttttgaaaattcccagaaccggaattccggttggacaaccggtctgccggttgggtgattttcagaaaccctagttttcctcgtttttatgttatttggggtattgccatgctttttatcgatagggaaacttttagttcctagtt

SEQ ID NO: 287645 - DNA, 682 bp, Cannabis indica
ttacctcaattctgaattcaggtgtgccggtcaacctgagtggaacgaactactcggcggtttacaggctcctaaaccataataatcacaacactgataagtgacacgctaaatcacttcctgtggacttaaactagaaactaaaagttttcctatcgataaaaatcatggcaataccctaaacaacacaaaattgggaagaactagggttcccaatttttccccaaccggcagaccggttctacaactggaattccggttttggaaattcctggaaggcccaaccagtcgaccggttgctgatggcttccctgaaccggaattccggttcagtgcaggaactttccaaaatttcatatctcattcaaatcaaacccaattcataccaaaccttccagacctgttctaaataccccaataaatatttcaaagcatcaaaacaacccaaaaatcacagatacgaaaaatgccattaaagctccaagctttgagttcaaaactcaagcttggctaaaccccactaacatgcatccaaacctgcatgaatctactcaaacatgcataatataacctctgaaaacaacaacaatcaactacaacaagcatagcaacagatttcaacaattcaccatcaaaatcaagatttaactcaaaactttatacttatttaaaatcaactaaa

SEQ ID NO: 287646 - DNA, 463 bp, Cannabis indica
ttcattgggtgcagcggaataatatgtctccttccacttagatccctaatccttgtatcctttctgtcgcagagtattatcaagatctgagcccgaatgtccttcttattgaatgtctttcttcacgatcttcctcactatgattgaggtactactttctgtgtgtgggcactactctatcactaagaggttcgaaatattcaaggaagaagaaggagaagaaggtggcagctaggtataaagagaaggctcatgtttttctctgaaggaaacaagatgtcaaaagtcacttttttctgaagccgtcactatctatttatagcatgccacatagggttaggttttaattatttggcattaaaataatgaaaatataaaatgataaatcctagaaaggtggccagccatggctagtggatttgggcctcactttcccaattttgctgttttatcatttctgcat

SEQ ID NO: 287647 - DNA, 552 bp, Cannabis indica
tcggacataggcgtgtctgaagttgcgtgaacccttgtccgcgagcgcataggtgttgctcagtttcagatattttcatccaaattcaaaaaatcataactaatttataaaaaatccaaattgagttttgtaaaagcataaattcattaatttttcgtactttccagtaaaaatatttctagaacaaaacaaaaaatttacaacatacattgcgatttccatacaatcatcaaatatgcacatcaaccatcatgaaaccatctaaatcaacacaagtatcattttaaatccatatttcatgaaagtaaatcattaccatggctttgaggctagttattggattatggttttaccaagttctagatttactaccatgtatgttgtttaacatcctaaatatgaatttccaaaacaatggaatttaaacacatataaagtttaagaaaccttacattgtttgcagcagaattaaatgactcattcgctcagatctctaacccttgtatcctttttgtagcagagtatcactaagaactgagcccgattctcctt

SEQ ID NO: 287648 - DNA, 559 bp, Cannabis indica
ccagctggctagttattcctcctagattgatagttctagatatatagttgacttcagtagacttatatcctatccgaaagcgtcttcagctagggtctgtgatcctcgagcccggaagctcattcatgttcccggaggccttagtgctcatgctgacgtggagacttcgctaaatgaggatgattaagttagttattttctaactaacttaacaatctcgtttcttgcagtcaccgactttaggatcttgatcctaaggctataaataccacctagactcaacacttgaagacacgattgagatacgagtttgagtactctgttcatatgagattgagagtttgagagataaaagattgaaaggtagagagtgaggtacaaagaaaagagagagagattgagtttgggtttgtaagaagaatcttctgtagatgaagaaaaattttgggtgtaaagtgtaagagttgaaacactttgtgaaaactcattaaagaatctcgtctcgactgtattgtacctattcttgctcaatcaaataaagaaggattacagtggtgtt

SEQ ID NO: 287649 - DNA, 735 bp, Cannabis indica
gcctggtcgggggctcacggctagcaaggggcgttattgcccttgcacaagtacttcagggatgtggcagacttctttggcctctgcccggcctagattactctaaaggacatcaagtatttgtccgctctcttcgtcctctacgcttcccaaggatgggatgctccttccccccacgaggtcgcgtggttcttcgacctgaagtctacccccaagcaaggcaggtcggggtacttctacttctctcagccaggcttcaagtggttgagcggcacggaggacaaggccatcagcaaaatagggcattttgttgatgagtacttcatggtgaaggatccgagcatcacccggactcggtttcagtagattctgacatatcaccgtcctcccctcacccttgctcttagggatagagctcaaaaacttgcccggttgccggaggaagacaggaatatcatccagttgacctccgatgataatctggtgaagtatgggctttaccctgaggacttttctcctaagtccgtggcggggaagaagaggaaatctgatgctggccggcctgaacgagctcataaggagaatgagctcattcaacttaagcgtgaagctaagttgaagggaggtgccagggccaagcagtatgctcaggagcctttgaatcctgaagatgaagtcgaggctgaggctgaggctaagcaggtgaccccattgaagaggaataagaaactcccg

SEQ ID NO: 287650 - DNA, 632 bp, Cannabis indica
ctcgcacatcagcccacaatcgctcgcgcaggggtgtgcatgtgctcatttttttgtttcagatattttttgatttagaaatcattttcagtgaaacaaaattcaaattttagaagaattttgtgtagttatcaaattttcaaataaaaatccaattatcagaataaaattaattttattaattaattaaaattagttttagatattagtagcttttgaatttgaaattttgatttttacacaagctagcattatggttaattttgatttttttttgttttatttattttaattgtaagatcaaatattacttattttattattaaaattaaaaatgatcttattttgatattaaatattaataaaacttaaaagtaatccagttaaaatttcaagtttgctaaccatatcatattttcaaatttttttatttttttaaaatatatttaattaaattaaattataagattagaaaatgttagttttgaaattttatcttattggatatgtattttaattaaaattttatttttgtcaaataacatgaaattttgaaaaattttaattttggtttgaatagaaattttagggtttggtaactgttgaccgaggttttcggcaactattaaaat

SEQ ID NO: 287651 - DNA, 561 bp, Cannabis indica
ggtccccaagtcgaggatccacatcttcatcctcgccttgggaagtttcctacttggaaatgttttttcccttgtttgggctctagttggaggatattcccttcttagccttggccactgaaaggttgtaacattcccgagcagattgctggttccccctaagacaacctaccccattcttggttgggaacttcaggcacgagtgaaatattaatgtgatagcttttaagtcatacaaggctagtcggccaaagcattacgttaaaggctgaaggaacatccaatattaggaactatgccatgatagttatgctcgtcggagcttgtccaaacaatgagggtagccgaatttgtcctagaggtgcaactccttgattggagaaaccatagacaggctggagccatggagttagatccttgagctggagccccatcttctcataagcagtcttcaacaaaatttttgaagaagtcccattatcaatcatggttctagccaccattttgtttgctatctggacttcacgaccaacgggtcgttttgcggaaatctgagattga

SEQ ID NO: 287652 - DNA, 791 bp, Cannabis indica
ggagttcacttatttgaaagtgttctcttatttttttgtaagtggtttgacactaacgggagtagaatggatagtgacggtgttattactagcatctgcgtcaaccgacagtggtaccaaaatgaaccgttcatacttgcatctcaagcaaaattgatctactacattcctgatttaaagaacggtaaagactggctgattgtaaatgagtacataccgcgcaatgtttgggacttcccggacacggatggggagacaccctttgtacaggaaaacaattcagctgaaaccgagttcgttgttcaacttccacagttggatgatgttgactatgttcgccatgatgtcgacccaactgaagttgcaaacatccatcgtgtgaattcacagcctcaacaattagatgatttcattgtcgatgatgacaacgagggtctaaataccgaagaagacaactccttagaattagagagtgacagtgatgataatgctgtatatgtaactgatgatgaggatgatgaattgtaattgaaatagtgttttaaataaaataaaaattacaacccttcttctttaatatgtttgcaatatgttagtttattttaaataaacaatatgtgttgtatatgtagtatgtctacaccaggtggcagcagttcgaaaaagaaaggcgtcagaggtaaatacaagggcaagaatgttgaggaggagctctccaaaacacaatctgccaagttaccgattgaggtgcacgcagagactggcacccccgtaggcaaaaacggaaaaaa

SEQ ID NO: 287653 - DNA, 287 bp, Cannabis indica
ttgttagttaagcctacttgtaacgccccgatttctcgagacgtcacacttactagtccgttttaaaaccatttataagaaaacaataaactaatttattgaaaataactaaagcatgagatctcattattttaaaacaaaaatacttgattcatttataaatttttaaacattaacttttacaaaagtaatagagccgtaatctttaaagaaatattctcaaaccaaaacatcgtgacaatcccctaacatgtaatccatgtctcgagctcgccaccctcactgta

SEQ ID NO: 287654 - DNA, 384 bp, Cannabis indica
atcttaggaaagttttgtacagttgtagattcgaccttgtggctgtctctagggtttctatgttctataaatagaacctagagagcagccattcgaataagctcttctagctttctattttttgttatttttcttatttgtgagaagagtagttttctttttgtgagaacctagttgttcatctaggttcttagtgtttttcatatctgttcttactctatcttagagtttgttagaacgacttgattgaacaagagagtggtcgttcgggagcagacttgttcaagccttacttcaggaggaagtaagcacgcacactcaaagacgaagggagttcgctgttggaggtgtttcaaaagtcaaattcataaagtgcattacaaa

SEQ ID NO: 287655 - DNA, 568 bp, Cannabis indica
ccatgaggcttgggagaggtttaaagatctgatcagaaagtgccctcaccatggtatagagaagtggatgctggtccacaacttctacaatgggttggtaggaaacacaagaactttaatagatgcagcagctggaggagcctttatgaggaagagtgctaatgaggcttatgatctattggaggagatggctctaaacaatcaacagtggccaactgagaggagtcaatcaaagaaggtagctggtgtgttagaggttgatgccatcacaaagttgacagcacaggttgaggcattgacaaagataattgcagggcaagctaaacaagcccaagttgtgtgtgagttatgtgggggaagccatcacttttcagaatgccaagctgatgtggatgatttgccaatggatgaagctaaagccattggaaactattcacagaacaacaacaacaactatgggttcaaccagggtaataaccgaagaaacagtgggttctatcagcaacgaaatcagaaccagaatcagaaccaacagtttaatcagcaacaaacctctggtggaaattct

SEQ ID NO: 287656 - DNA, 518 bp, Cannabis indica
cttagtatgttagtattgtgggacggtttattagacattgagaatgtcgggattggctgggaatttagaatttcccaaaatacccctttagtgttatttatgttattttagcatggaggggcaaattggtcattttgccccattgttattttgtcctttagtggacttaatatttgggaaatatgtgttttactatgttatttgttggctgaagcaaaacagttatgttggtaagatccttgtagctcttccttttagtttcttgaagaattttgatgaaaagatgatgtttgcatgcttagtttaagttgttgttgttgctgtgattttgtagttgtttgcagaagtttaagtttgattaattgaggttaattaagctgcttgtgatgcatgatagttaggttgttagtgttgtggaattttttagttcaaaactatggttttcaaagtgaaagttgagaaattggtggctgtagttgttgcatgagttagggattggtttctgcagtttttatatg

SEQ ID NO: 287657 - DNA, 888 bp, Cannabis indica
gatgtcgtagtgatcgttgaggaattatactcttgatttcctcaaaacaaagtttaatgttatagatcctctctatgaagaagttttagcaattagcagtgtgcttagcagcagaaaagatctgtatgtgggctaccagaaaaagctgatatctcttaaggagtggcactttgactgaggatgaatctttctgctttggggtctcccaattgtctcttctctgtttctgtttttcttaagtaacttcttaatggaaatctttgacacaagaaagagaacaaagtgccacaaagatttgcaaaagttaatcacacttgtgatttagctctttattatagactatagggaaatacaagattagctagagtaacaagaaaagtaacatattagcaaccaaaacatatttgttgactgtttttaatacacagtttaacagaataaaatgaagagtaacttactaatctaggagtagtgttgcttatcacttctggttcaacttagattttgtgtttctatgttttgtatccttctttgttttggaccttctgcttcgttgtgaaggctggctgccttgtaggggtgttcataaaataaccgatccaatccaatccgcacgatctaatccaatccaatccgcaaagtgcggatatccgcacttgtgcggattggactggattggaaaattcaaaatccgcacttatgcggattggatgttgattgacatgtaaaagtaatcgattcaatccaatctacacatatttataacaaaattaaaaaaaattatatatacaaataacattttaatgtaaagaaaatagtaatttaaaagtctaatacatataatacaattatattgtaaaattttatagataaaatgtatattctatt

SEQ ID NO: 287658 - DNA, 817 bp, Cannabis indica
agcaagggatctgttctttcggtttctgataatctgaataccgagaacataagcagcttcacccaaattctctattttgaattgagtgtcaagtcattccttgatgtcagtcattttcttgatattgttactaatgatcaaaatatcatcaacataaaggaccaggaatactaccatttgattatccttgagttggtaaacacaaggttcatcttcattttggttaaagccgtaggtcttgattatttcatcaaaccttttattccgggatcgagaagcatgcttaagtccaattgagtttgcaaactttcctttcttgccttggaagaacatagccttctagttgctccatataaatggttttttcaagaattccattaaggaaaactgtcttgacatccatttgccaaatttcataatcgaaagcggctgctatggagagaagaattcggatagatttgagcatggcgactagactaaaagtttcctcatagtgcacactttctctttgggtataacccttaacgaccagtctagctttaaaagttttgacttcgcctctagcacctcttttcttcttgtagacccacttacatccaattggacgatagtcatcaggtgtatctacatattcccagactttgttctttttctatggaatccatttctaaatccatgccggttgaccattgtttctgttcgaaacttgccattacctatttataggttaatagatcgtcatcaataccgtaaccaacagccatattgatttctaccatccaagccataacgagatggtttagtagaaaccctccca

SEQ ID NO: 287659 - DNA, 590 bp, Cannabis indica
tgatttgtaaatagcataggaatatgttatttaccttgtatgacttgaaggaattgtgcttaaattggtattcttaaaattaattgggcataggaatatgttaattaattagagaatcaaaccataaacactttggaaaaaggattatgacattttaaattcctagttgacattatcaatttacaacaatactcattagcaccattatatcaactttgcatttttaggccaatttaataattctagcttgttttcttcatagtttgtgtttgttaattttttacatattctcatcactttattttatttttgttgaaaccaatttgtgagtaattagttttataaattaatttccaattttcaatccctgtggagacgatactcgatttatcactttattacttgttacgattgcgtacacttgcgtatacaattttcacaacaatgcaaaacaatcttaccatgaaaaaatattttgtcaactaacttgccaaaaaaggactttacaaatgcaattttcttaacattctttttgggtattcaaaacccactataaaattgcatcaataataatcatttttaatgattct

SEQ ID NO: 287660 - DNA, 576 bp, Cannabis indica
ctatataataatatagttctattaagcacgtaattaaattattttcatcgttttacccttcttgggttaaaattactaaaatgcccctggctcaccaacggggtcttaatatgccataaatcatattaattcacagatattgaactatataataatataattcctcaactatttataattatctaattagggttttgctaatccatttcttaattccaaagtattacagaaagacttcttccagtagtctaacatcaaaagtctttagacataacaccatgctaaattacattgaataagacaaaaacaaagtctaagaaggaaataaataaaatctagacaatcgatcacaactagcaaggacgcgtggaaaccaaaggcaaaagaagattaaagacgcatgtcaatcgtaaatgctagcaatgacaggtctgttggaaattattttaccaggatcttagatctactcacaagtatgtttattaacacactaaatataaactttctaaaacgatgaaataaacacatataaagtttagtaaaccttacgttgagtgcagcgaaatataatgactc

SEQ ID NO: 287661 - DNA, 614 bp, Cannabis indica
ggaatattttaccaggatctagatttactaacaagtatgttgaattaacatcctaaatatgaatatctctaaaataataaaattaaacacataagagtttaaaaaccttagattgtttgcagcagaataatatgactcctttcgctcagatctctaacccttgtccctttctgtcacagggtattatcaagatctgagtctggatctctttctctccttcgagtttggttaccactgtcgtccgcactatgattgagtacttgacttgctatgtgtggtcatgacattctatcactatgggcgagttggatgaagaacaattaaggaggtttcgaaattagtatagaaggtgtctctcatctactagttgtcagagaatgaaaactagatttggtaggttgaagtcaatagttggatgagatgagagcatcatgttccttttatagtgtatcaactcgggcttaggtttgaattatatggattaagaaaaaataaaatattgggcaacaaatcactagagtggccgaccactaaaggaccactttctagttataattttgccacttttatttcaaccagtttattcttctttcaataataccatatttttaatt

SEQ ID NO: 287662 - DNA, 637 bp, Cannabis indica
tgtatttcttttatgtattttttgttgatgttgtttttgtattgttctttagtgttttttggtttttttttttgtgctattaaacagtttatagcattattagttttccagtaacttatggccttgttatgaacatttgtttaactgtttgttttcagttatttttaggttgtttaatttaatttcttagttgacaattactattttaattttattttctgcatattgttgttaatatattgctttgaagttgctcattttttaggatgagcatattggagttgttttttaaatgttattttttggttttttcctggttgcttattttttgttttgcattttagttgttacttgcaatgtatttatttagttgttcaaatttgttgcttatgtttttttttccctctttcaggtccatgctaagagctcagaaaagtatgaagactttgacttacccaaaaaaaaatccttctaaggtgtctttttttgtgtttttttatagtacatttctgtttttcccttttctattgtttcatgtcatttgtcagtgatgataatcatttttgtgttgtcgacttctttttcttcttcctggttgttttcaagctgttgtaccatttctgcagccacaagcttt

SEQ ID NO: 287663 - DNA, 1003 bp, Cannabis indica
  modified_base (57)..(57): a, c, t, g, unknown or other
aacctcttcgatgtccaattgcccatattagaaaccatgctttcaactccattttanactcaaagttggcccacttactgaagcagtagaaactgtgtcattccaaacatttttaatgccgtagaaatagctaaaaatctcaacagtaggctccccatgtgcgtactctttgtatatcatgaaaaatccaaggagaaactctataactatttggggttaattgtaatggaaatacgtcatagcgggtcatgatggctttaacaaagtggtggaagggaaccgtgactccacagtgaagtatttgaatcgaaacaactgcaacttcaggatttaataatctcaaggtttgtgaagggaagatgtggtcgctgcctcgacactggctttatacatcttgtttgaaataaatttaatttatgaaaataaaccaaatctgatggccttattctcaatttgaggtccacacagataatagagtactcactgagggttgcatgctcatcagagacccaacctcttctttgtcacccgtgtcttcctctccgtgagtgggcaagtcgaagttttgtcaacttgctcaacttcaccatccgagacaacccttggatggataaaaattctctaggtagatacattggactcacatccttgcacttctaccacgacttgtataattaactccctaatcatgtgagctatatcctccataggtaaggatgtttgtgcagtatctagtagtgacatgggtatgaagatatctctcctttaatgctaatccttgaatgctcccctcttagattcgtactccttactatttgaacaattgctcatctgaaagataggaaatctttttagcgtgttgtgcgtgcgattaggaaaaaggggtttccctcacacttatgtatttataaatttaaagtaaaggaaaaataaggtattacgtcgaaaaaaccgatagagttctaaagtgaaaatctatattcatatgcgagtatttaagttg

SEQ ID NO: 287664 - DNA, 628 bp, Cannabis indica
aaatattaaattaaaatttatatttagagttatctaaattagaattttaattaaataaatatatatatattaaaacaaatagattaaaatatatatcaaataaaaatacaactctttaaaataatgagctttagttataaggatattcaatctccattgttggttttacatgattaatatttcaatgggatctcgagatgctagacttcgtcccccatatggatggtcttacattgaacatttaacatcgtaaagatctcgaaagataagtattttgtaagtttttatttctattagactctcccttacgatgaatacttagagataaatttataaactatgacataatggtggaagctcataaaataagaataacactgactctcgcctaccgggataacgttagattcttattttgatcgaattaaatgttgctagaatggtgtccattttagatgagttgactactctattcaatgaatgatatctttgactctcgcttactgggacactgtatcagtttgttgaaaatcttggaaattatttaagatatgatatttttttttatatatttttacatgtctttattacttgctaaatgcttaataatttctgaattgtgtatgaa

SEQ ID NO: 287665 - DNA, 54 bp, Cannabis indica
tccaaggtgtaagaatacctatcgttgattatcatgccagtctaactccagtga

SEQ ID NO: 287666 - DNA, 448 bp, Cannabis indica
aacctacttcactacggatgaatatctaacatattcaaactcctctaatagctttataattagtaaaaatttgttggtcaataatgtacctttagctagcaatcaatgatcaccgatattttgattcattttctaataacaatccacaacctacaatattaaatacaattcaaaaaaaagttcaaattaaaattaagtgagaatagtaacaagtaactaataaatatataactagtgactacatacttatataattacacattatttagcactacaattaatttatacttactatatattcttattacattacattactcctattaccatttctattacattacaatgaaccaaacacctaattaataattttagttcatgaatgtttcttactaagtattaaaaatttctaacaaaaactatataactcattacattacattacatt

SEQ ID NO: 287667 - DNA, 565 bp, Cannabis indica
atttgaaaattaaatgtttaatttttagtattatttggctgaaataagggttatgtaatgggggtttaattcatttatccaaaaatttcaaagtttagaaaaattagaaaattggaaaacctctcttttctctctctctttttcggctgaaggcttggggttcaagggctagttttctttcaattttcaagctagtttcatccaatctaagtgttcttctaatccttggtaaagtctctaacctttcttgttgtaatttcttgaaaaaaatgatgaaaaatgatgatgcatgcatgattaattgaggttgttgctgctgtgttttgttgatgttttctgtggttcaaagcatgtttaattgatgttaattgagttgtttgaagcatgttagttaggttgttcaaagcttttagtttctatgttaaaatatgtgatttttgaatgaaatggttctatttgttgctgtgaagttgctggatgttctttatagttttcagaggtgattatatgctagtttaagtagatttaagctagtggaatgcatgtttaggtggatttgctcaag

SEQ ID NO: 287668 - DNA, 754 bp, Cannabis indica
tacagaagaaactccctccaaaactcagagatccagggagcttcactattccttgtactattggaaaaattgaaggaataaatgcactatgtgatttgggagccagtataaacttaatgcctttgtcagtgtttaaaagattgcagctgggtgaagcaaagccaaccacggtaactctccaattggcggatcgatcactagctcatcctagaggagtcattgaggatgtgttagttaaagttgacaagttcatctttccagctgatttcattgttctggatatggaagaagacagcaatgttcctatcattcttgggagaccattcttggcaactggccaagccttgattgatgttcagaagggtgaattaaagctgagagtccaaggagaagaagtggtctttaatgtactaaaggctatgacatacccaaaggcaagtgataactgtttcttcattgatttgattgatgaaattgtgggtgagaaaaagctgctagatgatcctcttgaactaagtttaactgaagatgaattgacggagcaagagggacaagaggtcatgggttatgtgaaatggcttgattcctatgggcccttgaatagaaaatattttgaggaattgggagcagttccaaaagagctaatgccatctactgaaaagcctccagaacttgaattgaaggtgcttcctagtcacttgaggtatgagtttttgggtaaagataaaaagctgccagttattgtgtcagcttc

SEQ ID NO: 287669 - DNA, 275 bp, Cannabis indica
ccacgaccggccactcgcctttttcaatggcgtacggttgcgaagcgatggtcccagtagaaacgttattcccgtcccacaggagaacgacttacgatccagctacaaatcaagctttacttcaagaagctctggatcaagttgaagagctccgggacgagtcacaaatacggatggcagcttatacaaaagaaggtgaacaaaaattttaactccaaaagttaaaaacaataaaatttgctattggggatatggtcttaagaagagtcttccca

SEQ ID NO: 287670 - DNA, 592 bp, Cannabis indica
ccggacatgtcgccagtccagcaaaagcgacgcccgctcgactcggtgaaagccgaggctctggagaaagaggtggataagcttttgaccaacggcatgatccgcgacgtatactatcccgaatggctagccaatccggtcctggtgcccaagccgaacggaacttggcgggtctgtatagattttactgacctaaataaagcttgtctgaaggactgcttcccgctgcccaggatcgaccagatggtagacgccacttctggattcaaattactatccttcacggtcgcctatgtcgggtataatcaaataaatatgcatacggaagaccaagagtgcactagcttcaggaccgataagggggtatactgttacctagtcatgcccttcggactgaagaatgccagagcgacctatcaaagaatggtcaactggatgttcaaaggcctcctgggacgaaacatggaggtttatgtagatgatatgcttgtcaagtccaaagcatgcagtagccatgcggacgacctagaggagtgtttcgaggtagtccggagatatggcatgaagctcaacccaaagaaatgcacctttg

SEQ ID NO: 287671 - DNA, 273 bp, Cannabis indica
tcattgagagctgaagaaagctactgtaaacgaacacttgacttcacaaacatggtggagactagaagtactcgtcagcctcgccctctagaagatgctcaagacccaaatgaggaagatgtagcctcaagagcagctgagggttccgaggaagaagaaggaattccagatgatgactacgagggaaacctcgatgagtatgcctacgacgaaggtagttactcagagttggtgcttctcagacaaaaagctatcgatcacgaagccgagatc

SEQ ID NO: 287672 - DNA, 437 bp, Cannabis indica
cgttttagaagttcatatttggaatgttaataacatacttgttagtaaatctaagatcttggtaaaataatttcaacaattctaaccttctaataaggataattcgagtcattaaacaagggtggtcgattaatggagcttctttctaaaaacattgacatatcataaaagaaaattaatgaaataataatctcaagacctcactaagagtttagtggcaagcttagataccaattgaaatttcaaattttattattaccaatttattatttaattaatcaattaattaaatgcgtaataataaatatggtactaaaatagttattttgtagctacataacacaactctgtgttgggttttatgccctaaataaaactctatttcattgtaatccagattattcaatatcaataaaataacagaagtatttttcatt

SEQ ID NO: 287673 - DNA, 578 bp, Cannabis indica
agtagttcacataatcagcaaaccaaggtacagtagaattcaagagaaatagttgttcatcaggaaattgttcatttatttgtacctcttttgtattctgactttcttccagctctagtcttgacaagtgatctgccaccaaattctcagtacccttcttatcttttatttctagatcaaattcttgcaaaagaagaacccatcgaattagtcttggtttggcatccttcttagtcatcaagtatttgattgctgaatgatctgtatacactatcactttattgccaatcaagtagggtcgaaatttgtcacatgcaaacactatagccagcatctctttttctgtagtagcgtaattcagttgggcatcattcaaggttttgcttgcatagtaaatagttctgaataccttgtcaacccgttgtcccaacactgctccaatcgcataatcacttgcatcacacatgatttcaaaaggtaattcccagtttggtgtagtcacgatcggtgctgagattaacttatccttgagaatctggaatgcttcaagacaatctttcccaaattcaaaaggtact

SEQ ID NO: 287674 - DNA, 759 bp, Cannabis indica
ttttttattattattttatcatttttcttatttttatattttttaagtttagtttaaattatttaaatagttaaaattattagagataaaaattgatgtttttttacttaaaaaatactttttgtagtttataatataaattaaaaacaaaaatatgaactttaaaatgatttatgtggcatcttatgtaaattttaattgatattcttttatccatttttctcattgttaattaataaaataaaacaatcaatatcaatatatttaaaatgattttaaaattatgtttaaattcatggttgtacaacttaaattgttataaaaataaacaggtttatttttcctaaattattactgaaaaaatcatgtcttcaaactattatcgatactaaatattctccaaaattattcaggttaccaagttgtgaccattctcctttttgtactacatggattttattttattttatttttattaaataaaagactccaaagaatgactaaattataataatatgttaaattcaaattttggttatttttcttaatggtttattttacctaaatatttaattaggtaagatttagttaatcacaggaaagaataatgagtgatatatttataagttacaagtctaacattaatcacatttttaagctatgtgggattttttttttaagtaaaaaaaaaactactatagtgaatattcgtattatatagaaatataaaaattcaaataattaaaggtgaacagaaat

SEQ ID NO: 287675 - DNA, 632 bp, Cannabis indica
ttttaaatgtttttactaacaaaaaaaaaaaactataaacttttgggttgagacgttccttttatatataatttttctaaaaataaaatacacggcataataactaataagtatttatctactaaattgtaagagtttacgtcagttgatttgatcgatttatattatattttattcaatctaatataatcgggtaacaaaaatttaagtgcaattcgcccaattaaaaaaataaaatagtaattcgcctaataaaactagtgggtttggtcggattaacccgtccaaaccgaccactaatatttatttttatttttacatgtaattgttatattttagttaattgtaataatacgacaaatatatagattaaattcaaagttcaaatcaacaactataaaaaaatatattagcttcaattttataattttttaaataattatataaattatataatacataaatatatataaaatatataaatatatataaaaaaatcctcttaatcatattagtcggattagttcgaattgattgtgcagtttaatattattttcaactcgtctagtataaagattaagtgagttatatttttattgagtttttcagtttatattttttattgaattatc

SEQ ID NO: 287676 - DNA, 612 bp, Cannabis indica
aaaccagtagctagggacttagataaactcaatttaaccccagaaattgaaccccaaacatttcaaaacctaacagccactaaacctaaacattcatagtgaaactaaactaaaacttcaaaaacttaaaggggagaagaactagggttaccttgctttgattcctcttgaatccttagctgaaaacacaaacttttagctcccaaaaccccttgccccttgctgccttcgaagagagaaagagagaagagagagcttctcttgatttttctttgtttttttcctcaaaagaattgattttttcttaattaattcatggctgaaaagtcatgagctaggtgtcaaaaacttgggcagccacctcactcatctataaacaaaagaccaaaatgcccttagacttaaaactagggtatttctaaagctaggggtaaaatggtcaaaatccataaccccgctcaatcccgataattaattttctctaaaatattccccactataaaatagggttctaaacttactcatgtgattatctagccatccatcgcattttccgttgtcgccgagcaaaaattacaaaattaacatatttcacatataagctaaataata

SEQ ID NO: 287677 - DNA, 690 bp, Cannabis indica
caaaaagggacatgacaaagttttatcagttccatggagactacggccacgacaccaacgaatgctacaacttgaagcgggaaatagaacttctgatcaagaaaaacaacccgcacttacagaagtatgtcaaggccaaccaaggtcagaataaccaggatctgatgcctccgccaatagatggacacttgcaagtcatcattggaggcccgcacatcgctggagacacgggcaaagctcgagaacgatatgcccgcacagctcaatacgagcaagaagaagtcatcctggccgtggaagagaggaagcccaaagttccacgtgcaggagagccaaccataacattcaacgacgaagatgttgtccagataagatttccgcacaacgacccgctggtcgtggaagtccagatagcaaacaaaatggtgtccagaaccatgatcgataatggggcttcttcaaacattttgtttaagactgcttacgagaagatggggctccagctcaaggatttaactccatgccttcagcccgtctatggtttctccggccaaggagttgcgcctctaggacaaatccggctacccctcacagttggacaagctccgacgagcataactatcatggcacaattcctgatattagatgttccttcagcctttaacgtaatgctaggccgaccagccttgt

SEQ ID NO: 287678 - DNA, 717 bp, Cannabis indica
ctactgaggaagacatcaaacaaaatggaagctctgaccggttgattcaggaatatttcaacggtagtgcttcgatcaccttcggccaactgcgcagagtttttgagagctgcacagaagctgatgatgtctacaagttggggatggccttgtttgttatgggcgtcctcactggtaaggaggagaagactgtcgttcctccttttgtgataagaatggttgataaccttccattcttctacgagtacccctggggaaagatttcttacaccaagctgatggaaacttgtaacaaggattacttggatgtgaagaataagatgttgaaaaagattgagaagggagtcactcagaaggaggcaaaatactcagcctacggctatgctgcagcgttgcagtattgggcatacgaggccatattacagctgggcaacgagtatgcagtgaggaggtcgcatcgctttccgagaatggtcaactgggagagtaagccgaacactacactcgggaaggatgaagtgaccagattatttgctaaaaatgtaagtttgttacgctttatgttgaattcatgttaatttccatatattatattaatatatttgttatatttttcagttgacagtgtactccgtgttatgtcctcggccgaacgagattgagtttgtgagttacataaccgggggtcagcctccgttatttgttgacttggaggaa

SEQ ID NO: 287679 - DNA, 607 bp, Cannabis indica
gatagagatgtgcctattatcttgggtcgaccattccttgctaccgggagaactctgattgatgtgcaaaatggggagctcacaatgagggtgaatgatcaaaaagtcacctttaatgtgttcaatgctatgagatttccggatgagatagaagagtgctcccgcataagtgtaattgactcgatagtggctgaaaaatttcacaaggaagcttggagggatgagaaatttataagttcttttgatgagcttgaagacttgagtgaagatgaagacaaccaagttgcttgggtggagccattgcaacctattcctaacttcaagaagccctttgaatctttggagttgaaggaaagtaattttaagcctccaaaaccctccatccaagaaccaccgaagttggagttgaaacccttgccaagccatctgaagtatgcctatttgggggagaatgacacgctaccagttattatagcatcaaacttggtagttgaagatgaaggtgctttgctagaggtgttgaaaaagcataagaaagcaatcgggtggactatggcggacataaggggtattagtccaacgatttgcacgcacaagatacttttag

SEQ ID NO: 287680 - DNA, 806 bp, Cannabis indica
cttgtattgcctcagtttcttgtccatcttctgaataggttccacctgaatgttgtcatcctgaacttggtcatttccttccaagttttcatctccctgagtgttttccacctgttctggttccacctgaacagtattaggttgagtgttccttgtttgcatgtccacagatgtgcctgcagggttagtgtctaaagtaggactagatatagcattattattagtaatacaaggaaataagtcttccttaaaaataacatccctactgtttatagctttaaacccttgtttctctcttacccataatctgtagcctttagtgccttcaggatagcctaagaacacacatttgagagctctaggctccaatttaccaacactctgatgtgcataggctgcacatccaaacactcttaagtttgagagatcaggaggcttacctgaccagatctcctctggtgtcttgaattcaatggcactggatggacttctgttcaccaggtaggctgctgttaacacagcttctccccaaaatcctttagtaagtccagattgcaacaataggcatctgaccttgttcatcaaggtcctattcatcctctctgctaccccattctgttgaggagtgattctcacagttctgtgcctttgaattccaacagagccacaatacctgttaaattcatcactgcaaaactccaagccattgtcagttcttagggttttaaccctttgattagttaaattttccattagggttttccattgtatgaatttagataaagcctcatttttatgtttaagta

SEQ ID NO: 287681 - DNA, 501 bp, Cannabis indica
aaatcacgtaatacgcctaaggtagttagggtgttacaattcgagttgttcatctgaatacccgcgagtattcaagacgtgaaacagtgcctattcaagtatatcatatgcggttatgtcaatttacaggtcatattctatgaaattacccaggtttttacctaaaacacatagcctcataaacattcatccgtacacaaccctcatgcacactaaaaacccagaaaatatagttcccactcaaacagaaaacgaagcatggtgaagattcaaaaaactaaccttttactttgataaatctgtttccacgaatcgcccttgacagtaatatagaatcaagaagaatccacgaataaaggcaaaaatctgggcaatttacgaagatttttcgtgttgttttctctgagagtgaaagaacaaggaagttaaaggaaagtaagggaaaatggggatttttggttcgaatcagggggtttaaatactcaaatcctcattcattgg

SEQ ID NO: 287682 - DNA, 643 bp, Cannabis indica
ttaaggtggaggggcaaaatggtctttttgccccattagtattttgtcttttgtgattttatgaaatgaaaaataaatatttatttaatgtttacttggctgaaatgaaatatgataagtggatatttatgtttatttctttcatttttacaaaaacacttagaaaagaaaaattgaattttcaaacactctctctttttcctctctatttcggctggttacttggggtgcaaaggctgggttttcttcaattttcaaagctagattcaacctataattgtgaactcttgtttgtggtaggtgtttcttaactttctctctttaatttgttggaaaaaaatgatgaaaatggtgatgcatgcatgatgttttggtgttgttgctgctggttattgttgttgttgtttctgtgattaaagtgttgaattcagtaggtttaatgtgatggaattgcatgcttgaattcttgttctagttggttaaatgtttatgtgaaaaagttatgaatttttgaatgaaatggttcaatttgtttctgtgaagttgctggatgttcttgtgtgttttcagaagcttattcatgcttagttaagtagaattaaccaggtttgattgcatgtttgtgggatttgctcaagtttga

SEQ ID NO: 287683 - DNA, 658 bp, Cannabis indica
acaatcaccacaccattacaaattcattagtaactaatgagattgaaattatataagtatgtatatatgtatatattttttcttctttttttttctttttttttctattttttgcttcttcttttttttcaaggggtggcacaccccaaacttaattgtaaatacatatatatttttttcaaggggtggcacaccccaaacttattacatagcatatatataactaaatataatcttgttcctccgctcttgggttgcccaaatgtgattcactaaagccatgacaacccgagacccttcttcctcaagcctcttccaatgtgatggaggtctttgctcgatcaacctcaccactcccaaacttcactccttgaaagtacatcacgtagttctaccaccccaaaaattttcttcttgaaagtacatcacatagttctaccaccccatcggggtacactctcaccaccaagaaagatccatcacaccttgaatctagtcatccatgagtagccttcgttaaagagttagcaaaaatcacttgctgcccaactttaaacattcgagaccaaattttcctactaaacttcttttactttctcttctttgtggtggtttttaggttcaaacgatgtttgtctttgctttctcgcggctcgtg

SEQ ID NO: 287684 - DNA, 496 bp, Cannabis indica
ttaaataaaaattatatttgtgttaaaaataaatttaattaattttaggtttctcagattagggttttggcgtgttgtttacccatttatgtaatgtgactagggaatccatccagcacgaggttttctgttcaggtcggccgtctcacttgaattcgaaaacgaggtaagaatagcatagaacatattgtatacatgaaaatgcatgtatgtgtgatatatatatatatatatgcatgcttgttgtgattcatacactaccaacacttgtacggtagcgcggtatagagtgcattggtataatgtacaatgtttaaagagtacgttacgatgttaccagcataagtacagaaaggtacaaggtgggtgtggtacaacacttagtggtattcggggtacaagataaaccctaccaacactcatacagtgatggtacgtagtgtatgaggtacagtggatgtaccctagtaaaaaacattcttactcatttgttgag

SEQ ID NO: 287685 - DNA, 776 bp, Cannabis indica
actattaatattaataattatatattgttattaattttatgtgtatgtaatgtgaaaatttgtattaattaattcatgtaactttttagaagaagactatatatgatatcatcatgatgatctatatcatgttaattaagctaatatatatagtttgtaattgcttcttattttttgctttttaattagctctatctttgtgctttattttgtaattcatgtaattttatgtaagatatttcatgagtaattattaatatttttatatatatgagtaaataattattctctctctttcttaattttaattatacatgagtggtgtgggatagtacactagagggtgtgggaaaattacaaatatgtaaaaccaaattaactataattaaatcacaaaataattaagaatgacaagattaacaaaagagatgaaccaagaatcggagataaaagttggtagaacatagtaattaaaaccagaaacgaataaagcgttaaaacaataaaataaacaccaagatatataccagttcaagtcttatagatcgatgtgaacaatgactctacccaattctggaataccgtcgaatagtctttattgattgagcaagatcgcaggtacaatacagtcgagaggattcttttatttggattctctcaaagtgtttatctcccacactcctacttaagagtcttttttattttactagaagattctccatcaaaatcccaaaaactcaaatctctctcttttatatgtatctctctctctctct

SEQ ID NO: 287686 - DNA, 541 bp, Cannabis indica
tatatataacttaatatatataaacgtattcttacttttttttaatgttaatattataataataataataataataataataataataataatagtaatatatgataatataatattaataattattttattatttcttagtcactaagaaacctttacttctagggcgctacattaaattctacatactcctaattaccccaatacctatattatcaacttatcaaaatattcccatcaattctatcaattaagcttattatgacatttctggcccccgatcgagtctccaaggttgtcaaacctgaaaatatttttattgcacatatagttcatattacattcacacatactatataattctctgtaatttaaaaatcacgcttatttatccacttatagcaaatttaaaattttatgttgaactaaattagttggattatcatcctattcattacctggttaactcataatataaatataaaccataattattaattattaagcttattgggatattacaattaataagtcagtgaat

SEQ ID NO: 287687 - DNA, 741 bp, Cannabis indica
taagaaagtgaaattttgcatgatttgagattttggttgttgtagttgctgctggtgtttgttattgttttcagaggataaattatgtttagaaatgttgaaataagcttgttttgatggctgttaatagtattaaccaagttttgagttttaaaacataaacttggagctttaatagtgattttagattctgagcttgggtagttgttctattgcttggaaaatgtttattggggtataattttgcaggtctggaaggtttggtaaggtttggagtcgatttgtttgagctttgaacttgtttaggtacatgtaaaaccggttaaccagtttttgtagttgggattcccaacaaattcaggttgtcgattcgtgttagtttcaggtttttggttggttaattccatgctagtttagggtattgccattttaagttgcagtagatagggttttggtttaaaacctatgtcccggatgtgatttagcgtgtcacttatcgatgttgtgatcgatatgatttaggagcctgtaaatcgccaagcagttgttccactcaggttgaccgacacacctgaattcggagttgaggtaagattagtataatgtcatgcatatgttattacatgtttagcatacatgttgtttatgcctgttagattacattgatagcagtaatagtatacttagagttgtactgattactgataaatgtattttggctgaaatactgatcgatgttgt

SEQ ID NO: 287688 - DNA, 587 bp, Cannabis indica
tcgggacgaaatttctataaggagggggtaattgtaataccctggaattaaggaaatggattagcaaagccccaactagttaattgagtactattgtagaattatattattatataatttattatatgcgaattaatttgagaaatgacatgttaagaccccgttggtgagccaggggtattttagtaattttgacccgagaagggtaaaactgtggatttaatttatttatgtgcttatgaactatattattatacattatatctggtgtgtcctttttcaggtgtgttctgacaagttggcgcggtatagtcacaatcgggtatttcgggccgaaccgggttttggggccgaagtacaattttgggatgtttaattggcattttatttttatataagaaatctgaaacttattatttgtgtgtgaaatgtgataattatattttttttacccttatatgcttgaaaatgggaatttggccctaagggtaatgtggtaattgtgcattttgggttatgattcattaaaagggaaatattaagcaaaatgagattttatttctgcattttactccagccctagcagc

SEQ ID NO: 287689 - DNA, 400 bp, Cannabis indica
atttatgtatgattatgatttagtctttttttactgagtctgtcgactcatagtgctatgtttatgtgtaggtaagggcaaggccaatgctaaggaaccgtgagagcaagtcgatgaagattgtacatgtcgaggcagttaggcttggagcgtacgatcctcgggacaacagtgctttttgtaattagtcgctaggcgacaagtattttgtattagacagtaaacttttgtaaagtgttttgtaatcgggatcccgagtatttttgtataaaatattttataagtttaattaaaaagcaaaaattttaataaatcacgatttccataaacatcgttgattagcaacgagctgcacgatacgtttaaacatcacgtagtacgcatatgctagttagggtgt

SEQ ID NO: 287690 - DNA, 309 bp, Cannabis indica
ttgtctgagactattggtacggtagtccgaaccagcatatgatgttcttcactataaagtcttgaactttctttgatataatcgttgcaagtggtttgacctcagtccacttagtaaagtactcgactgctaccattgcgtactgaactccgcctttacctttaggtaaatgcccgatcaggtcaattccccaaatggcaaagggccacggactttgcagctgtgtcagctcgttgggcggagctcttggtatctttgaaaatctctagcatttgtcgcacttcttaacataggctctcgaatcttcaa

SEQ ID NO: 287691 - DNA, 884 bp, Cannabis indica
aggaaaccacttagggttaggttagatttaattagcattaaaatacaaacgaacaaggggaagtcgttgacaagttccctgaagtggtcaaacactttgttaaccacttccgaaactacatgggttctagtgataagccgacattgactctcaggaatgattgtatgaatcaggggaattgtctcaacatagagcaacaaattagaatgataaagccgtttactagcaaggagatcaagaaagccttcttcagcattcccgattcaaaatctccagggccggacggttttggagcaggttttttcaagaaaatgtggccagaattgggagaagacttcactaaagctgtggaaagcttctttcaaacaggaagtatgccaagggatcttcatgctacaatgcttacacttattccaaaggttgactctccctcaaaagctatagactataggccaattgcttgttgttcaacagtctataaatgcatctcgaagcttctttgttcaagacttgctcaagtccttccaaccttagtgaatgaaaatcaaggagctttcatacaagggagatcaatagctcataacattatgattcttcaagatcttttgaagaactacaacaggaaaaacatttcccaaaggtgcatcatcaaagttgacattagtaaagcctatgatacggtgaattgggattttctagaggctttactcaatgcttttaggatgccggccagattcataagctggataatgacttgcttgagagcaacttcttattccattcttatgaatggtagagtgcaagacaacttccaaggtaaaaagggtctaaggcaaggggaccccctctctcccctcctactttgttttgataatggagtatct

SEQ ID NO: 287692 - DNA, 413 bp, Cannabis indica
catgcttctgcaggctttgaaaatgctcgagcagcaacgaaagcccatatacaagttgcatggtacttcgcccttcactacagaagtgcgacaagcccaacttcccaaggggttttgtctatccgaatccctaaagtataaaggtacttctaaccctatagattatcttgaaaaattcaatactataatggaggtggatcaggtaccacagcttgccaaatgccgcattcttgcgcaacactcgaggagaacgcccacgattggtttacccaattgcctgaggcatcaatatcaacatggaaaaccttcgtcgacttatccctcacacatttcaaggctacgatgacctataggccgccttatacgactttggccaacatcaaataagaacctggtgagtctttacaagacta

SEQ ID NO: 287693 - DNA, 216 bp, Cannabis indica
tgaagtttcgaaaaatatcaggggtcgtgcatcaacccacgcgcgaggacgaggggtaaccttcggataacacgcgctcagacacggtttcctgtctgaaaccgaggcttccgcgcacggaaaggctgctagcagcctcctgcgccgaggtttctcggtcatgcatgctgatgcgcgcgaatgcatactgtccgtacagctcgcaattttttcgtt

SEQ ID NO: 287694 - DNA, 567 bp, Cannabis indica
atgtacaatcttcatttgctcgtcctcacggttcctcgaccttagccttgcccttacctacacataaacatagcactgtgagtcgacagactcagtaagaaaagcataaatcatataacatacatatatctcggattatgatcagacgcccatacccctgaccataaccctaatccccgtgtcccacacggttccgagtctcgaacgttcgtacgacggtacttttgacatagtaacagcctatactcggtatgctagtcatactctagccgtaccgatatgatactatatcagcctatactaggtacgctagtcatactctagccgtaccgatgtgataatgtcaaatagtacggtgctattgaccataatatcagcctatactcggtacgctagtcatactctagccgtaccgatgtgatactattaaatagcacaaaagccaacatacatatctaaaggaaaccaaaaagcctaacaacatgcacgctaaacatgtaaatacatatgcatactgttatactaatcttacctcgatttttaattcagctgtgccggtgaacctga

SEQ ID NO: 287695 - DNA, 767 bp, Cannabis indica
agccaccttcccatagaagattgtcgtacaatcaaggtaccaatcacatactccttgcagaatcacttgatgaaatcgaagaaagacgagaaactgcaaacttaaagttgatggcccatcaacaaaatgtagctcgatatttcaacaaacaagtgaaagcttggaaattcttcgtgggagatatggtcctgagaagggtattcctaaacaccaaagacagtacagcaggtgtactaggagctaactgataaggaccatatcaagtggtcgaagttctcgactctggagcatacaaattaggtaagtatgacgaaaaaatgcaactcattcaagtaccccggtattggaatggagaacatttaagaaaatactaccaataaagtaccaggtcgggtgaccacttaaagtactaaatgaacatttgcttttaagtgaatggccttctgggcagactacgcccaaaggtttcgataaaagaaacaaagtactcatgtcgggtgagcaatttgttttatttcatgttaagataaaagatcagattagatcaaatagctttgatgtaagttactacagtaacaaatgcacttttcgatcaataaatgaataaagatagtatttcaaaattcaattgagtcgaaaaaatcagcatgtttataatttaccatacaatgcgtacaaaaggtttggtcaaacccaaaacaccgaacagataagcaatatatttgtaaaaaacaagtgaccaagagtcatacgtctgctcggtcact

SEQ ID NO: 287696 - DNA, 585 bp, Cannabis indica
aaatggtctttttgtccctattagtattttgtcttttagtgtattttattaaatgaaaaataatagttattatgtttattgctgaaagaatccttttacttatttactcttcatagcctcatttcaacacttagaaaattagagaaaagctttcaaacaaaactctctctttctttcccactttcggccaccttggagcagcaaggagctggtcttctcccttgaagtttgcttgtgaattcatctccttttaaggttcatttcaagctaggttagctcttgcaacttctctttgtgttttgttgaattttgatgaaaagatggtgatgcatgcatgaattcttagttgttgttgctgctgtgatcttgtgttgttttctgagatgtaagcatgttgattagagtttaattaagcttcttgtaatgcttgattgttagattatttaaagttatgatttttctatgcaaaaatatgattttcaaagagaaatgtcttgattctattgctgtgatgttgttggggtttgttattgttttcagaggttattctaagcatgtttaagtaagtttagatggatttgattg

SEQ ID NO: 287697 - DNA, 856 bp, Cannabis indica
tttgaccattctgttttgaggtgacagtagtagaaaatacaattttttgccccaagtttttccccacaatagtttttccaaaagtaacttaggaacttagcatccctatctgatacaattgttctaggcataccatgtaatctcacaatttccctaaagacaaatctgcaacattagatgcatcatcagttttatgacaagggataaaatgagccattttagaaaatcggtctactaccacaaagattgaatccctcccacgcttacttcttggtagacctaacacaaaatccatagaaatgtcaacccatggtgaactagggataggtaggggtgtgtaaaggccatttggctgcactcttgatttagcttgcctacaagtgacacacctaccacaaattcgctcaacgtcccgtttcatatggggccaaaagaaatgctcttgcaacatagctagagttttagcaactccaaaatgtcccatcaaccctcccccgtgggactctctaacaagcaaatctctcacagaacaattaggcacacacaatctatgttccctaaatagaaaatcctcatgcctataaaactttccttcagcagtcttttcacaaagagcataaatttccccaaaatcatggtcagcagaatacaactcttttatatgttcaaacccaagcaatttagcatcaagagtagagattagagcatacctgcgagaaagggcatcagcaaccacattctccttaccttgtttataccgaatgacataaggaaaggtctcaatgaactcaacccatcgtgcatgtctcttgttgagtttgtgttggcttttcaaatgtttcaaggattcatgatc

SEQ ID NO: 287698 - DNA, 740 bp, Cannabis indica
tctctctaacatacaattctgccaactgatccactgtaaaggttgttctaacaggcagaaaatgagcagattttgtgaatcgatccaccactacccagatggaatcaaataagcccggggttctaggtaacccaaccacgaaatccatcatgataaactgctaatttctaaattaaactaagcggtctttacaacacttacaacatgctctgtgacagccaagtatatcccaaggtcttctctgtctagaggtttcgatagtacaggaggttttatgagttgcatttttagctcttgaaaagctttttcacattcctctgtccactgaaattgtttatttccttataggatgttgaagaacagaacacacttgtctgttgattttgaaaaaaatctgctgagtgcggcaatctgaccagtcaaactctgaactttctttgttcttgttggcgatttcatatcgaggagggcttgaatcttttctggatttgcttcaattcctcgggcgttgacaataaagcctagaaacttacccgagcggactccaaaggagcattttaagggattgagtttcatgttgtacttcctgaggacattgaagcattcgtctaagtcatctaggtgccccccagccttcttggatttgacgagcatgtcatccacgtacacttccatgtttcgtccgatctggtctttaaacatcttatttactaatctttggtatgtagctccagcgtttt

SEQ ID NO: 287699 - DNA, 707 bp, Cannabis indica
acaccttgaatctagtcgtccatgagtagccttcgttaaagagttagcaaaaatcacttgttgcccaacttcaaacatttgagaccaaaattttctactaaacttctttttctttctcttctttttgggtggttttttagggtcaaatgatgttttgtctttgctttcttgcggctcgtgatccttagcaatttctttaaggggaatcttctttctcaccttcttactatttttgaatttggactcctcaaccatgttaggatccatatctccaattgctaagcattctcctattgcatccggagcacgcataggatgaaagaccttgaatgtggcttgctcatcttgagctctcatggtaagctctcccttttcaacatctatcaaagttcttcccgtggcaagaaatggcctccctaaaatgattggaacttccctatcttcctcatagtcaagaataatgaaatcggccggaaaaatgaacttatccacttgtaccaacacatcttcaattttcccttccggatgagccatggaacgatccgctaattgcaaagtgacggtggttggccttgcttctccaattcccaacttcttaaaaatagacataggcatgagattaatactagctcccaagtcacaaagagctcttccaacatctcgacccccaatagaaattggaattgtaaagctgcccggatctttca

SEQ ID NO: 287700 - DNA, 601 bp, Cannabis indica
tctagtttatgaattttcactatgttatggcttgattgtgaagaaatagtgtttggggtttatttgttaattaagagactttatggagtctaattaataaatattataaatgacaattttatttgatagttattttaattattaaataaatagtttggcatttataaggttgaattgaaaaatatggtattattgaaaagaagaataagtggttgaaataaagtggcaaaattgtaactagagattggtccacttattgtatacggccaagaggtatttttgcccaatattttattcttttttaatccatttaattcaaccctaaccctattgaagaatagtataaaaggaaggttatggtctcattatccaactaatgcctccaaagctaataacctagcttttgatgagacctcttccttcttctttcttcttcaatttcgaaaacactatagcctatcttcacaaatatttttcagccattagtgaatgagtgagtgcccacacacatcaagtggtatctcaatcatagtgtgtaagactgtaggagattccaaacaacaataaggagattcagtgtcaaaggaaggagagaaagaga

SEQ ID NO: 287701 - DNA, 702 bp, Cannabis indica
ggaatcaaggtgacctccgggatcaccttgaccaaaagaaatacgggcccccggtctccatgggaacattaaatgaaggaatcatggcgaaactcgccatactctgaaaagatatcgcccgagtctcccagagacagaaaggcgacgactctgactcagactgtgaggaccgggagccatgtgccgagcacatcctggaagtagagctccccaagaactttaagatgcccaaaatggcagcttatactgggaactccgatccaagcgaccacctgtcgcggttcaaccgtgtcatgacggtcatgagagtcagcaatgacacaaaatgtctgtgctttccgcttactctaagtgggtccgcggaggaatggttcaagaaactggagccaggatccgtgggctgttggaataagttacagaccaacttccggagacagtttgtcgccgaaagaaaggttaacttggaggtcagtgccttgactaacatcaagcagctgcctacggagaccttaaacaactatataaagaggttctgagaggaagcctcgaagaccaagaaagtcgatgacggacaacagcttgcccttctccaagcaggcatccgtacaaggactccattctggaacgaactacaacaggaaggagctgcaaaccttcaagacttccagaggagagtccaaaaatacatcaatcttgaagagg

SEQ ID NO: 287702 - DNA, 535 bp, Cannabis indica
acttgaaagaggtagctgaccgacttattcacaagagcaaggtgtcatgagacaacatagttgtttgaattatgtggaagccaaggatcattaagaatggagacattttccccattagcaattgttctttgagcacatgcgtggataagatcttttgcttcaagaatgctacgccaaatgaaactaggattgtctcccaatacagcaaaaacagattaccagtagcataatatttagccttataaagcctactaaccaaagaatcaacattaaccaacaaacgccaatattgcttccctaattgagccaaattaaagtctctcaagcttcgaaatcccaatcccctgcatgtttatggcgacacaactgctcccagctcatccaattaatacccttactgctacgtgaatctgagtgccaccagaacttggccataagccgctctaactccttgcaagtgtctgacagtaaaagaaaaacattcatagcataactcggcaagacctgagcaatagatttcagcaatacctcattt

SEQ ID NO: 287703 - DNA, 665 bp, Cannabis indica
tttatattattatattgatgtgcttaacgttaattaaatttaattactatttctatttacttttttttttattttattttttattttttttacattttttaaagtaattttttgtattattaatagtgttagataagaaacttaattaattattactttataataaaaaaatttatttttatattatataatttgagattacatttttggttactttctaaaattttatttgtatattatttttgtaactaattaattatttttaaattatattatggtaaattacaatttaaaatatatttatataactttaaaaatattttcgaaactaataagttatcatgtaatagaacaagtcactatttttatataccgataattttatatacctttttgttattttgaaagctaattagttatcatataatataattcaattaacaaaattctaaaataattatttactaaaatttaaaaaatatatatacatataaaacagtaactaatcaatatattagtagctaaatagtttcttttatagcgtaaaaatgtatatttctcacatcttgaaatattcatattaaagagtagatcacattaatatttttttaagttcatccaagtaacgatgtgatcagaaactatttttaaagtttaaaaaaaga

SEQ ID NO: 287704 - DNA, 535 bp, Cannabis indica
acagtctacagacagataagatagagaatacattaattaaaatcataccaaacaatataactaaatctatttagttttttttaaattaaaaagtaagtgtcttagtattatttttaattaatttttatttaaaataaaaataaatatttttaaatcatgttttgttttactatttaatttttaatgaaaatacaaaattttaaaatttaaaataaaaataattattttcaaaaaatttttaaattgtttttattaatattttgaataaaattaacaaatgaaaataaaaaaaaaaattagagaacatatttttattttttgttttaaaattgaaaaacaattagttatacaacacatttttatttttcaaaaattaaattttataaacaaaaattttacttttattttataattaaaaaatttaaaaataaaattgttaccaaacaccacctaagtttctcgttactaaatttatatgtaacgccctaatttatagggagaccacatgtgtgattttataaactagtttaatact

SEQ ID NO: 287705 - DNA, 649 bp, Cannabis indica
  modified_base (607)..(607): a, c, t, g, unknown or other
  modified_base (614)..(614): a, c, t, g, unknown or other
aatcatgccccttgaacttttaaggttgttaaaaatgccccttgaactattgagattgttggatttaaggacttatttcaaattttagtaaaaaagtctaacgtgtatgaaagtttagagggcataacttagtacatgtcaaagttcaagggacatgatttggtagatatccaagtttgagagcacaatttaatacataaataatcttgaaatagtaaaactgaataaattgacaaagtcctaaatccaaaaaattcaatagttcagggggcatgatttggtacatgtcaaagttcaggggcaaaaatcctaattagccttttatttatagaatagacaacacactgaaaagtatgccaccaatagctcatgtcaagacctgaatgatcaagcaatgttaatccaatttctgtaacatgtctatgtctcctttacattcttccattttgctcatgagtgtgtggacaagatagctaaaatttgattccttgatcagttgaaaaattttcaaattgatctccttcatcagcttgcactcccttcattggtaggtaaattgcttctcaactagtcttttaaatcttatgaaaacttcaaaagcttgagnttttagngttaggggaaaaattcaagagaatctgtaatcatc

SEQ ID NO: 287706 - DNA, 669 bp, Cannabis indica
agagatccaggttcaaatcttgataatactctgctacagaaaggatacaagggttagagatctgaacggaaagagtcatttaattccgctgcacccaatgtaaggtttcgtaaactttatatgtgtttatttcatcgttttagaatgttcatatttagggtgttaatcaacatacttgtgagtagatctaagatcctggtaaaataatttctaacagtaccttcattcgtcgactaaaatcgcaaaccccgatacgataccatgcaatatttataaacccaattgataccactattcatgcgactgaggcaatcaaaattggctgtgtaattacctagacctcaatccactctagaagaaagaagcagaagaagaagttgtagaaatctttggtaaatcacaaatttgaaacctctgcactcagcgactgaagcgactgaaattgtaattttcgattggaaagtagcgattgagaatccaaatcgttctttatgccttcaatcgtcgactccaacccagcgaaaaaaatcaattgacctccgagacttcttcatcacaaagctcaccttatagtcgttcagattgggatagggagagtaaaatggaagagtcggttggttttttaaatgagtgaagtgtcgcacggtcggtgtaaatgagttagggttt

SEQ ID NO: 287707 - DNA, 778 bp, Cannabis indica
taatcaattataattcttaagttagactatgtctatttgtgaatttatcccttattaagggcgaaactgtaaagaaagagtttatagggtatatttgttaattaagggactttgtttagtgtaattaataaatataataaatgacaatattatttaataattaattatagctattaagtagttaaaattgacatttaaatgattgaatgtgaaaattggcagtttttgagaaaatgggatacagaaatgataaaacaggaaagttccaaaagtgaggcccatttccacaagccttggccggcaacatgcataggttttatcatttaatattttcattattttaatgccaagtaattcaaccataaccctatgtggtattctataaatacaaagtaatggcttcaggaaagtaacacaattgcatctcattctttttagagaaaatcctaagccatagccgccacctctcgctctctttcttcttcttcttctttgtttcgaaatccctaagtcatagagtagtgcccacacacagcaagtggtacgtcaatcatactgtggaagattgtgaagaatctagattcaacaaagaaggacattcgggctcagatcttgataatactctgcgacagaaatgatagaatggttagagataatgagtgaaaggagacatattattccgctgcaccgaatgtaaggtttctcatactttatatgtgtttacttatactcgttttagaagttcatatttaggatattaatcaatatacttgtgagt

SEQ ID NO: 287708 - DNA, 629 bp, Cannabis indica
cattcataaaagtgggtatattttaataaaatattatataaggatattttttgttattagatacaaaaaggagatatttttcaatttcttccgttaattttagggccaaccctagaagtactcctagaatcaatgagaaagaagatatataatagtaaaaatttcattatataaaaataataataaaagatgaattgtgatacgaaacatggttttaagtttttttttttttttttttgtattaatataacttgaaaattatgcaatattacataataccattaattatttgtaaatatatatatgggatatgattttgtcccgtaatgtactttcacggaatgtattccgtggtacattagatggatctcagagtacagtaaatgagtgttagggtacgtttctactttttaaccctaattactcctagattaatctcaaccgtcagatcaaatactcccttatctgacggttaccgtacatcacggattacaatccgtgaaagtacaataacgggacaaaatcatatccctatatatatattatttaagaaattaaaaaagaaaaaagagaataatactatactattggcacacgtgcaaatagaacttagaatatagtaaaacgtc

SEQ ID NO: 287709 - DNA, 619 bp, Cannabis indica
atggttctttgtatactggctccctttgaagacttgcgttctcaggaatcagctggtgttctcgcaacttcgcagttgtacacagtaatcgccagtcgcgatcttgtaccggaaggctcccgaggatttcagctgtctctctgcgagtcgcgtcaagtgccggtcgaactggtctatctgcgagagcaagaaagagcgagtaagcaaaggatctcaaaagtaattcagaaaatgtctaagttaaaaaatcacgcgacatactaggtctgcgattaaagtcagttctaatcccagggactttaaagacataaaaccacttcgatttccagtcccccatgttcgataccattccttctactccattgatctcagaagtcgcccatttgctaaaacagtagaagccattatgaagacctacactttttatgtcgtagaaatagctgaactcttctactgagggagccctatgaacatattccatgtacatcgcatagaaggctagggcagtgcgataactgtttggagttagctgaaaaggtgatacatcgtatcgcctgagaatagctgcaatgaaaggatggaaggggaccgataccccacatcggagaatgggtattga

SEQ ID NO: 287710 - DNA, 541 bp, Cannabis indica
ggtgaactgcttgtctagacttgattttctaagcctctgaggattagggattttcacatggtgatcaatgctaattggtggagactgttgtggttgtgttgggctatcagtaaccttctctgatgttggtgttggggttggcattggttgagcttcattctccttttctccatcagctagttgtggcagttcaggaccatcatagtttttaccgattctcagggtaattgctttgcagttttttttggggtttacttcagttgtgctaggcaaattcccttgaggacgggttgctacctgagttgctagttggcccatctgagtctgcaggtctttgattgaagatctagtttcagtcatgaattgaagcagtaaatctgtttgcaaactagaatttccaccagaggcttgttgctgattaaactgttggttctgatttcgttgctgatagaacccactgtttcttcagttattaccctggttgaacccataattgttgttgttattctgcgaaaaatttccaatggctttagcttcatcc

SEQ ID NO: 287711 - DNA, 320 bp, Cannabis indica
cttctactggtgtatagaagtcaagtgatgattcccttcgagcttagctaaataaaagtaaatggatgagctcttgtttcagtgactatatcttagatcactaaaacatcatttacaggtagctaagtgttttaaggggccaaatacattgaggggtgaaaacggtaaatttatcccatctcgatgtaaatcatctatatagaggatctttgatcacattaagattataacgatggttaaatgagatagcatatctatatcgtggaacatatagaatgctctatataagtctgagagtgcaattccaagttctaagagtg

SEQ ID NO: 287712 - DNA, 510 bp, Cannabis indica
agcttgcacttctccaagcaggcatccgtactgggactcctttctggaacgaactgcagcaagaaggagctgctagccttcaggacttccaaaagagagtccaaaaatatatcaacctcgaagaagcccaaatcgtggcttacggaggatactatcccaccggaatagcagggtacatgcccggagtatcgccctcgggtactaccccgaccgcaactccacaagcaagtggcatacaattctctgctacccccggatatagccagggccaagccttggcaccagcatcatcccattttggcaacccgtccggagtgaatggacaagctccttcacactctgctccggctgctagcctggcaggcccttcccagggttcgaggagtaaaagatcctccaagggcagcacccggacgggagagaagcgccagaaaagggggtacaccccccagtatactcaatacacggagttgtcggactcccaagagcgtgtgtactttgctactaggc

SEQ ID NO: 287713 - DNA, 582 bp, Cannabis indica
ttgagtgggagaattttaaaaattctaagcccatctttatttggatgacactagtgatagcttactatgttatggtcatgataggaactttagaatatcactgagatagtaaatctaaccattcatatgaatagaaataacttatcagaattttgaggataagataggaaaatttgcaaagtctattcgaatgacttgggcgaaatacctaatcttcatgaaatattttatggtatctctaatgattactttatcttaagcaagtattttacattaatgttaacactaaaatgctatgttgatgacctagtctagaaggaacttacagtttcagactaagataatatgtcacaacaagatgtccatgagaaccaatagtaagaggttaaatgtactcctatgtacgaatttaaccgaactgctactattgagtggcaaccatctaagatgtaatcgaacaaggaacattaggagacaattaagaaaaatatctgaaagtgacctatatgttagatgataagggtgtatattagaatccttatatctacaacaactcataacctattcgagatggtggttact

SEQ ID NO: 287714 - DNA, 566 bp, Cannabis indica
aattctcctaaccttccttggtttattatgggtgatttcgatagttatcttttatatagtgataagttggatagtaatttccattccagtattgatatggagtcttttgctaacattttagataaatttagtctctttcctctaccctatgttggaaataaattcacctggaaacacgactctacttatgagcgtcttaattgggttgtgggctctgatcattggtgtgatttattccctagtgatgtcctttatcatttacccttttatggattagaccatagagccttgaaggtcctgctccatgaggacagtactacttgcccaaaattgttaataaaaggttctgttttgagaacttatggctcgattaccctgtcttgtattctattgttaggaggtcttggtataataatcaacttttcaataccaataatggggctttatttattttttttgacaaacaacaggcttgtgtttcttctcttacttcctggaatacttcggctaataatctttttaaaaccaacataaatgctcttgataaagctatcactgacctccta

SEQ ID NO: 287715 - DNA, 533 bp, Cannabis indica
atatatacacatatattcccatacaaaaataactattaaacttaaaataattaaaatattcaaaagatattcaaccttgacattatttcaaagcagtttcgaacttgaaatagaaaacatgttattacaatgaataagtatactgggcctcaaatgcaggctttgcatgttgctctgcagtttcgaggtacagaaccttttttattaccagacgagaaacggttctcccgtcttcttccagcgttgctttttcttggacgacctataggctccttttccacacgtaccccaactttcatattcttgatgtgttctgggagaacccaatcatccccgtcactagcaagattgatgtcatcgtaaatcttcttccacgtttcttttgaataataaggtgagcaaagtgtgtgcacacttgtattcgttttcaatgtcgcggcacatgcatgaaggcaagggagcttcaataacgaaacacgccgcaggtgcatgttctttcaactaggttcacatcaccacctctttcaccgtta

SEQ ID NO: 287716 - DNA, 509 bp, Cannabis indica
gtaagtacatctagacctactgaagaagctaaatcaatttctatccttaggtctggaaaaattattgaaaaacctgattacatacctcaaactgatgctgaaataaacaaagactcattgaaagaaaatgaaaagagtcagcctgaaagttcacattccaaagactcggttgaagaatcgagtcaaactttaccgttcattccaaaagctccattcccacaaagattgctcccgatcaaaagaggtagtcagtatggtgacatcttagaggtattcaaacaagtaagtataaatatccctttcttagatgccattaagcaaatacctgcctactctaaattcttgaaagatttgtgtactgcaaaaagaaacacaaatgttccgaaaaaggcatttttaacggaacaagtcagctccataattcaatataaaagtcttgttaaacacaaagatccggggtgtcccaccattccttgtacagtaaaacctctatttaagaatactctatt

SEQ ID NO: 287717 - DNA, 523 bp, Cannabis indica
atatgattcttttactttcatcatttttatcatatttttttaacactctctctcttacgaaaaaaattaagatcgctccttctatatttttttattttttacataattaataaaaaagtagtatattttttatggatgttttgtagtttattcaaagttgatttatcaatgattttcatattttaacaagattgatgtcttgttatttttttgttgatttattataactgtctttttttgttatttttatgttgttgtttaggtattttatatttgtttaatagttatttttctgttatttttatgtatttttttttgtacagctgttatttaatttatgtgcaattttttattttgtatgttttcagtttatttcagacaaagcttttgttgtatgtatgtgtattttgttttgatatttgtatgttgttttttagttatttttaagtggtttccattattttttttgaacaatttattttttagtttttttttttttaattcatgtgtattttttatggtg

SEQ ID NO: 287718 - DNA, 528 bp, Cannabis indica
gatttccaatgaaagctgaattgtccatgagagactcctcaatgttttagcctcgcccaggataaaaccagcgagatactgcgagtacgacctaagtcgaatcgcataactttaactcacattatacaggatggatccaactcgcatgtgtcaggacatatgcgagtatcctctctatacttctgcgaaagcatagagatcaactctctatgatgtgatttggtcccaacgatccaatagccttgataaaccgatatagactcgcatgtctaggttctatcagctcgacatgcgatgtctacaagaggcaattacctaagggcgcagacgttccaaacgtactgatgaccctgcgagctcaacaacggaacatgaacagtcaactcgcagatgcggaagacgcatacgttgatggacttagtaactgtcgttcatttattaatgttaacgttgcttgggtttaattattgcaattcaatatgtaaataatggattaacaatgaatgtgatccttgtgtaaccgattgg

SEQ ID NO: 287719 - DNA, 828 bp, Cannabis indica
agtggtggctggagcaaatacttggagagactagatccataccatgtatagggtttatgttgggtaaagggtacaaaacctaaaatgtctcttgaagagagaagcctccatgtcaaaaatagaagaaaaaggaaagaaagaattctgccatagaacaagaacgagagaaaaaagaagaaaaaggaagagaaaagaggagatggacaacaagatttcagcatctaccttttggaaaacttctcctctattgttgtttgttatttaattctttctttttttcttttctcctctctaagtctagcattcaaactccatggttgaattttacattgtaatggtggtttataagttagctatgagctaaactttttatggtttgaattgttgaagaaccctatgttttagtttagtaaatttcttatgcaaatatttagtaaaaattctcatgttcattcaagtgtgctttatgttaatttcttgatattgattggccaccaatagctcgatgttgagttatatttaattctagaaaggttaaatgtaatgaacttaacttggatgacacaagtttttaatcttattagattagattagagataacataggaatatgttatatccttgtgtaatatttgagaactgtgcttggaaatggtattcgcgagcttaattggcataggaatatgtttgattaggttcaaagattgattgcataaaatttggaagagttttatgcactttattggagttcttgtcaacctgggatttttgctaacattttgctgcagcaaatcgcacagtttttgctaaacatagggagattcaatag

SEQ ID NO: 287720 - DNA, 773 bp, Cannabis indica
cagttcttggtttatacttgatgtcgaactgactcaactccatcgaccacttcaataacctccccgatgtttctggttttgccagaacttgccttaaggggtagtttgtcaaaacttcaatactgtgagcttgaaaataaggtcgcaattttcttgacgatgttatcaaggcaaatgcaaacttttccatttggggatagcgcgtctcggcatccagtaatcgcttactgacataatacaccgggtattgccgtccttgatcctcgcgtattagtactgaactaaacgcatattccgacactgctaaatagatggacaggacttcaccggtcattggttttgacaagatcggaggttgccccaagtgtgtttttaaagtttgaaaagcctgctcgcttttttctgtccactggaaccttttgttgccttttaaaatctgaaaaaactccttgcacttatcaaaagatcttgatataaagcagtttaaggctgcgactttacctgtgaggctttgaacttcctttggtttggttggtgatggcatttccaccaatgccctgatcttcgcaggattggcctctattcctcgctgattaaccatgaacccaaggaatttcccagagccaactccaaagaaacatttcagggggtttagccgcatcttataccgtcgtaatatatcgaacatggcctgtaagtgggcaatatgtgttaggttttatgccctaaataaaactccatttcaaattaatctattttattcaacatcaata

SEQ ID NO: 287721 - DNA, 168 bp, Cannabis indica
ttgagtttaaaaataaaattttttgctattagtaatctattatagcatatcataaaagaatagaatgtaactagttacatttttaatataatactattgaataaccaccaatatatttatatgaatttatatatatatatatatatatatatatgagtgtactttaat

SEQ ID NO: 287722 - DNA, 388 bp, Cannabis indica
cgtttttgagaaaatagaaattaaatttgttaaaattacaaaatcaagtgggcccattatctacaccttggccggccacgtgtttgacttttttaaattgatattttcattattttaaatgctaaataattcctaacctaaacctagtagttgcctataaatagaaagtgatggctcagtcaaaatcacatacttttattagttatctgacagaaatttctctcttcagaaaaactgagccttccctattttcttctattggccgaaacccctcttctcttttctcttcctaaatttcgaccctagtgaaagagtgagtgcccacacacaacaagcagtaactcaatcatagattggaagattgtgaaggatcaaactcaaagagaag

SEQ ID NO: 287723 - DNA, 432 bp, Cannabis indica
ccacgcccaagcctgttgaacacgcacttcgaataagggagcccatttcacctgttcggccatctcatccctttgctggaaaagggaaggttgttatgtctgagataaactcgatgccaggtgatgatggacttctgactttccgggcgggcaatcactctgcgctttacttcttttacaacttcttgactttcatgctttgtattttctgctgggctttgctaaccacgctgtttttgttctgtgtagacatgtctcggcagatgctcgacgctctgaggaagaggatgggcggaagttctagtcgcctcccctccagccaagaagcttaagggcagagagggtcttcagagaagagaccttctggagaggttattgacctttccaaggagctgactgctgcaaatccttcactcccaatctgccaagtct

SEQ ID NO: 287724 - DNA, 781 bp, Cannabis indica
taacaatggtcaatttgaagtggattatgccttttggttggtttttgctgtttttattctgaataatttgaataacataaaagtaaaaggactgaaactttttacagtttttattggctcattgacattcataattatttattttttgagtggtattgttgaacagctcaatttttgtgttgtaattggcattggtggagatggagtcatatgcaaagaaattttttaattagttgtagcttaaagctttatcaaacgatttgtagttggcttacttaaatttgaagctgcccttaattgtaaattatgcagctgtgacacttgtttcatagctcttgagacttgtctttgctttatcatttaagctgtaaaccaaagcaaagacgaaagcatttgtgtgttataattcgttttgatattattgtaatttttttgtgtttattacaataaagataaatgaatataatgtttataagcaatgaaaatcaatagtaagagagtcattctttatatttgtttatttaatttattaaatttaggaaagggaacttgattaaataagggcgcgtttggaaagccacaatataattggatttgtgtgtaattggaggtaattacacaatttgtcatgtttgtctgaccatgtaattacaatgttactgtgtaattgtaagtaattgagggtatccaattacactttccaattctcatagcccccatgagaattgaatgtaattacactgtgtaattattaaaaacttttcatattaaacattagcta

SEQ ID NO: 287725 - DNA, 816 bp, Cannabis indica
gagtttaggtggcattttactattctttcttcctatttttcttttctattttttggcatattctcttattttatttgtaaaaataaactatacatacaaagctaaaagtcccacattgtttagagatcttttaggtgttatctaagtaggttataaataatacttttatttttcaacacttttttgtctaagaaatattattttttatgggtgatttattaatatcttacctaataaattatatttattgatttctataagtagttatttatcttttaataattaaattttttataataatttttaattttaatattctagatttttatattattgtttgttcgagttaaaaatatttttttataactaaaatattttctcttaaattttaatttgttcaaaagttaaaaaaatatattttgtaagaggtgacacacttatatgactatatatttgagcattttttatcatatttttttattttttttatttttttgttacttttttattatatcaattttagaatacaaaacatacattcatttttttttattattattatattatcatttttctgatttttatattttgtaagtttaatttaaattatttaaatagttaaaattattagaaataaaaatagcatttttttacttaaaaaatctttttgtagtttacattataaattaaaaacaaaaatatgaactttaaaatgatttatgtggcatcctatgttaattttaattcatattcttttattcattttctcattgtttatgaataaaataaaacaatcaatatcaatatacttaaaat

SEQ ID NO: 287726 - DNA, 874 bp, Cannabis indica
caagtaaaatatcatctacataaagaacaagaaaaaatatgatgactcccactgatcttcatataaatacactagtcaaacttgttctcgatgaaacccaacagtgtcacaaccttatcaaacttcaagtaccactggtgagatgcctgtttgagaccataaatggatcatttcaatttgcaaaccaaattgtcatttccattttcctcgaagccttcaggttgagacatatagacttgctcactcaattctccattcagaacaatagttttaacatccatttgatgcaactctaaatcaaaatgcgcaactaaggccataataattctgaatgaatctttagtggaaacaggtgagaaagtttcagtgtaatcaataccttctctttgagtaaagcctttagccactaaacgcgctttaaacctttcaatctgtccctttttatcccttttagcctttaaaatccacttacaacctattggtttaaaaccatcaggtaataaaactagctcccatacaccatttttcttcatggagtcgatctcatcatccgtagctgctaaccattttgaagattgtggactattaagtgcttcactaaaagtgacaggatccacaaaatgatcaatatcatattctccttctccaagataaacaaaattatcatgacactttgttgacttcttttgtctctgagatcttcttagaggaggtacttctggaataacttctctttgttgatcattgttttgaataacatcttccacaactggaatttcttcaataacaggattctcattaacaataggagcttcatcattaataggcccttcatcaataataggaccttcatcatcttcgatatcgggagcaa

SEQ ID NO: 287727 - DNA, 913 bp, Cannabis indica
aatgcacattgtccccaatgtgtgaaaataaaccagggtgagagaaacttacctgagccccttaaaaggggtttggcggcggtggctggtcataagggttgaaacggggtggcatgggaaaatagtttggatcatccacaccgatattcatcctcgtgacaagtgtgttcaattgagccacctgctgctcatcgaagatactcctctgggccatgtaattttgcatatgcatgttctgctgaatcagataattcagctgattgtgagtgtactgcatggcagggtcaagaggcccgacaagacgtggtggttcgatgtcctcacgttcctcttcttctcttgccggaggacctccttgaactggcggttgaccatgaggatgaggaggtttgaagcgaagaacagtcgccaagttaatagggcgctggggcggtacctttgtatcatatgagtactgtggtactccatgtttctcacagaggtcagtgattattccagccaaccccagtcctccaccggaagatccctcaaccataatgtcaaaggtcgttcgaacaatatcccccacattcaaattataccctttcataataccgtaaacccatttaagtctgtccatttgagcatcagaaaaatgcttgttggggagcatccttgcactaacaaagtaaagccaagccttggccactgggttgagttcacatcggtacaattggtatggtactccactaagctcatggaacctaaggccaggataccctagagtctcagccatatccacataattcgtacttctctcatagaattgttgtttcaattgttgttcttcataagtgaaagtttggagatcataaagggcatgaatagcgtctacggtagcaggcactctaacccccctaactctaactttgcc

SEQ ID NO: 287728 - DNA, 536 bp, Cannabis indica
ttcttctttaagtatccgtggggcgagcgcgcttttcgtaagctgatggagacattaggaaagaatatgcaacattacaaggataatgttgacaagaagaaggggaagaagattgctcaggaggcaaagtacactgttagtggctatgtacctgcctttcagtactgggcatacgaagcaattgagaagttggggaagaagtatgcccactgcaacgggaccaagttccccagaatgttgagctggaaaacaccggagggccagcggaaacaagatgtcaaggcaaccgacattgcactgttattcaacagtcgggtatgtttctttactgttctgtattttatttaaatttattgaaaatgaacattcgcgacattgttcgcgatatgttagcgacattatgcgatgtcgcaaaagaaattgctgcatcgcttatcgcgacatatgtcgcgacatgttatcgacatgtagcgacattgtgctgctttttacaattatcataatttttgacttcttttcacagtttttaatattct

SEQ ID NO: 287729 - DNA, 626 bp, Cannabis indica
atgtgaaaatatggtgtatttttcaaccatgtgaaaaaattacaatggtaatttttgacttgaggcatatgcacatttttaactatgcatttaatgcaagattgatttttgtgtcttgttcatacatccaaggaggcctataaatagagctccatccctttcatttgttcatcccatcacaactatcacaagctattccaagagtgaagagtgaggctcttgagagaaaaatagtgagaatacctcttagtaagagaaatctaagagagtgagaaaaagagagttcctacaaaattatgagaaatattttgtagagagatggtgagattgccacactagtgagtgtgagagatttgagtgtattcctcaagtatttgtcaaaacttgagagtgtaatattgtgtacccattattattgttatagtggaaggtttgtcgtggtttttattagccacgagataatttcttagcgtgcatttagtccgttgattattattcataaagtactatttacattggaagatatccaaaaattttgaatatgctctgtgattgcagctttgactgatctttcacatcagaaaggaattttggagtccccattgtattttcccgcaaatattgat

SEQ ID NO: 287730 - DNA, 863 bp, Cannabis indica
aaatttatgattagaggacatgaagatgtgtggatcgaagatgactctcctgttctctcaggctctagaccagtcctcactagacagcctcaagtgtaccctgatacttctacagagtctctaaatacagcatcaggcatatcaggtgacaatcaagccagtgccagtggtccaggaagaggaaatgaagttgatagtgccctgaccaacgaaccccaacaagtcaaagtacataaaaacgggcccccatcctgggttgagaaagctcatcctcaggccactgtcataggaaatccgaatgataccatggtcactagacgtaaactgcagaatttgttagcctttgcctgctatctgtcacagattgagcccaaaagtgttcgagatgcattgttagatgagttctggttggctgccatgcaggatgaaatgggaaatttcaagagactgggtgtctggataatggtccctcgaccagatggtgcaaatgttatagggacaaaatggttgtttaaaaacaagtctgatgaatttgggacagtgactcgaaataaagcacgacttgtggctcaaggatatagtcaggtcgaaggcatcgactttgatgaaacatttgcacccgtggctcgattagaatccattcggctacttcttatcattgcatgctttttgaagatcaaactctttcaaatggacgtcaagagtgcatttctcaatggggtaattcaagaggaagtctatgtcaaacaaccacaggggtttgaagatccacatcatccacaccatgtgtacaagctcaataaagccttatatggactgaaacaggccccacgtgcgtggtatgatagactcacctcatttct

SEQ ID NO: 287731 - DNA, 501 bp, Cannabis indica
gtcaagaataatgaaatcggccggaaaaatgaacttatccacttgtaccaacacatcttcaattttcccttccggatgagccatggaacgatccactaattgaaaagtgacggtggttggtcttgcttctccaattcccaacctcctaaaaatagacataggtatgagattaatactagctcctaagtcacaaagagctcttccaacatctcgaccccctatagaaattggaattgtaaagctgcccagatctttcaatttgggtggaattttacttttcaacatagcactacatccctccgtcaaagcgaccatttcaaactcgccaagcctccttttctttgtcaaaatatccttcaaaaacttcacataagttggcatttgctccaaagcttccactaatggtatattgatgtggagctactttagaacatcaagaaatctccagaattgaccatcgtcttgctgcttcttgaatcgttgaggaaatggtagagctgg

SEQ ID NO: 287732 - DNA, 528 bp, Cannabis indica
cttgaagcacgtcggggccctcgtcttcctcctcgcattgattaggctacggagtccaacctatttctttgtaatcatatctcttttttttttttattacaaccatttttcttttctttgagacaatcttaatttagctgtttgttttctaaggggagacaattattatggcccgtccccaagccctttgtatgttacatatatattttttttagacctgccctttgggtcaggatgttttaaatacatatgtttactttgataagtattctttttgactttctttttacttttggcctgttttacatctgtacgtgtggtatgccttagtaccccccttagtggcatgaaaactttgttttaaggcactcaattttatttaaaatttaaaggttgcatacattttggcggtacaaattctttaaacaaagcttaagtttacatatttggactattggtaatactccggagatgatcggcattccaagcccttggcacaatggttccgtccatcctttttagcttata

SEQ ID NO: 287733 - DNA, 465 bp, Cannabis indica
cgaatgttggacaagattcgttgagagttagtcttttaaaggggatcactagactgagatggagttaagacgaggttgcttttcttcatgggaatactggacatcctagagaggagacaatgatggttgcttcgagttaagttcaaagatactagaaagacaactaccacatgcaattgtagaaaggcgcaacaaagtggttgaaattcattgggcagtccatactgtatgcttggtacattgggtcgagtttgcctgagtgacatcgtaagccgcaggaggcgcttttgttgaaaaggaagcttgttgccatgggtgtggaagtagtgcaggggccgccagattcttgttagtcacgatagtggtcgagagttgatgaccgagatggtgtcaagagggacgcacatggagaccaaggggggagaggccgcaattgtcagaggatgattgtgttgggttttatgc

SEQ ID NO: 287734 - DNA, 685 bp, Cannabis indica
tcacattacttgctcgcattattgtgttaaagttgttcaaatgtgataccagattagtggttccatcatatgacaagacatgcgggttcttgaatcccgaaggaaaaggggtattcattatgtctggattatacggctcaagctccttgtcaaagtcgtatccagataatttccctaattcccccacttgatatctcctgacttgtcctccagctcgtttatccacaattggattggatcctcttgctttggaccaagttgttggcgaaggtcgggtttcttccgattcaagtgctctcgcagatccagttgggagtaattactggcagatcttgtcttactcacagatcgcgtcctactcataaactttgtctttgagtggctcgcggatttactggttgccatactttctagatcattagctcagtgagtactttctcctcttcgagttgatcgactatgggttcttgatcgcctcgaagtcacacttgcttctttacgctcctatacccttccctcccgagagcggtttgtcatatttcccccatcagggtcttacgagtcctcgctctatgagtttgggaagaacgttggtgatttctagcaggtgacctccattctcccagttgagtcccaagatcctccttattttcatgagggatttctcgttcatcagtttccggtt

SEQ ID NO: 287735 - DNA, 773 bp, Cannabis indica
gataatcagcgataaagtatacttacacatattggataagtgttatgtcctttctaaggcattcacaaagtatgctagtatcagatgtacggagtatacatcggattggatcgatattgaacttggataagatattataaacttaccattatatctataagtcaatatcacttagttgatcttagttcaatatatcttaatcctgatatggttaggttcgatctcaattgtattatttatgttcttagagttgttcgtgaaagctaaccaatagttcaagcaaatacttacatcttgggaacattatagtataattgagtgggagcgctaatcatagatatagaatctatagcttctataagtatcagaagtgaaacgataatttccttccaagttggcttaatagagaaaaataattgagatcgcatttcagtaattatattagtttactgaaatatcatttacatgtagctaagtgttgtaaggataaaatacattgaagtgtagaacggtaaatttgtccctattcgatgtagatcatctataggatctttgactatttagattgtagcaatggataattcatagcgtatctatatcttggtacataaagagtattttatataattaagagtgcaattctgaatctatagtggcgcgagtaattaataagttagagaatttgcttggtaaattctagatctgcttattggaagcttaattatataggctcatggtccccacactagttgagataatactgcttgcagact

SEQ ID NO: 287736 - DNA, 109 bp, Cannabis indica
catgcatggattcaacaaggaattaataagttagtggatttacttggtaaattcttgatctacttattggaagctcggttatataggcccatggtccccatactagttg

SEQ ID NO: 287737 - DNA, 665 bp, Cannabis indica
tttgcacctctttggtttttgttggcgagttcatatccaggaaggcttggattttctctggattggcttcaattcctcgagcattgacgatgaagcctagaaactttcccgagctgactccaaaggagcattttaaaggatttagtttcatgttgtatttcctaaggactttgaaacattcatccaggtcgtctatgtgcccccagcctttctggatttgacgagcatatcatccacgtacacttccatgtttctgccgatctggtctttaaacatcttgttgaccaatctttggtatgtagctccggcgtttttaagaccaaatgacatgactttgtagcagtagagacccatatctgtccagaaacttgtatgttcttggtctggcggatgcattttgatttgattgtagcccgaataagcatccatgaagcttaatatctcgtgcccgacagttgcatcgatgagctgatcaattcttggaagtggaaaacagtctttagggcatgctttgttgaggtctgtgaaatcaatacagactcgccatttcttgttcggcttaggtacgagtacggggttcgcgacccaagccgggtaaaaggcttcaatgatgaagttgttgttgcgtagcttttcaacttcatctttcagggctactgctcgtt

SEQ ID NO: 287738 - DNA, 602 bp, Cannabis indica
tttcatgctaaagatggaacctcaacggatttcgatcatggaataaggtgagaggaaaaattgtgcatttgtagcacatattggaaaagatataaattctcctcatagaaatgctgagaaagcacttgctgatcttatgaaccaaccagcacatgttgcaagaaggtttgtaaacttcacatcacaagaaattgctgaaaatagacttcgcttgaaaacttcaattgagggaattagatggcttgcatttcaagcatgcccttttagaggtcatgatgaatctaaaacatcaattaatcgtggaaactttctagagttattgagtttcataagttcttataatgataaggtagcagaagttttggataaagctccacgaaatgccacatatacatcaccaacaacacaaaaacaagttttgcatgtcttggggaataaagtgaggaatgcaattcgtgaagaaattggtgatgcaaatttttctataatagttgatgaagcacgagatgaatctaagaaggagcaaatgtcaattgttttgagatttgttgacaaagatggttgtgtgcaagagcgtttttttgggcttattcatgtcaaag

SEQ ID NO: 287739 - DNA, 644 bp, Cannabis indica
cgctaacgttaacttttttctagtatatatatatatgtaataaaagtaaaagaaaaggattacacaaggaatgaaccctaaaatgtaaggactaaagctatttaaatttgagtattttaacacaatattcatttttagctataatgaaaacaaaaaatatttgggaaatttacttcatatacttatttttttaactttttttttcaaatttatggtttgggttctaaagtggttgcagcgctagttgcagtaggagtttctattacgatttttttttttttacaatttaagttgcagcgctagttgcaataggggtttctatgtagaatttcgtaaaaatgcaaaaaaaaactgttttgaagtgtaaaaataaaaaaaccccaaaaattaagtaatgaagactatctttataagattttaaccaaaatttttaatcaaattaaataatattttagaatttacaatatatattattatgaacatactttgatgattaaattaatgaatttttttcccacaatgctaaatatatgagtgattgtggggtgcagaccataaacaaataatcaaagaaagcttactatgacaaggatcgaagaaaaaaaataaaaagctgttaaaaaatagagtttaaattaataaaa

SEQ ID NO: 287740 - DNA, 678 bp, Cannabis indica
tttaacgaaaatgcgctttttacatccatttggtacaagataaaattcttgtggcatgcaaaagctaacaacattctaatggactcaagtcttgctaccggggcaaaggtttcctcataatcaattccttcttcttgattgtaaccttgggccactaatctagccttgttacacacaatgaccccatgctcatctaccttatttctatagacccattttgttccaataaccaattgatgtgacggtcttggaactaactcccaaacattatttcttataaattgatttatttcttcttgcatagctagaagccaaaattcatcgacttcagcctctttaaaattctttggttaaatttgagaaatgaaagcaatgaaattacacaagtttctaaggaagtttctagtagtgacaccttgagaaggatcacctagaatttggtttataggatgagcacttttgaatttccactcatgtggaaggttagaattcataccttgactttcatttgccttttccacgggtggttcctctttgggagtttgtgaaggagcattggaagtctctccaatttcaagattttgaacctcatctcccaaacctacaacatcatcatctaaactttggcttgtaggcgagttagtctcatcaaaataacatgaatagattcttcaacaa

SEQ ID NO: 287741 - DNA, 675 bp, Cannabis indica
ccaagaagaacaagtaagagatacataccacaatcaagagtttctaaaatgtgatgaatcaagcttgaaaaacccagcctttgaatccccaatacccagccgaaaaagagagagagctttgagtgtgtgagttttgaaatttcctttctaatttgactaagtgtggaaataaaggaaaataagatttttaagccaaatataccactttacttcagccaaataaacacataaaataaacatttattttccaaataaaaagtcactaaaagacaaatccaccataaaatcatgtaaatcatactaaagggtatttttgggaaaataatttcataattaatcacaattaactgataatttccaaattaactaagcgagctttacattcaataacgtaaacacgtcgcaggtgcatgttctttcaactaagttcacatcaccacctctttcaccgttaggtcccctaccaacgttatacaaattggttcctttcattggatgcggctgaaccttacattttcatgaatttttgccaagttgttttcaaagagcgtggccaaaggggttgtacatttgtctgtattttggaggcgatcaacgaaccacgattgcagtgtgaacctaataaattcaaccaaagtagttattggatatttcctatagcttctatctggcgaa

SEQ ID NO: 287742 - DNA, 729 bp, Cannabis indica
attaatcctttaatatttctctactataaatctatgcatgtttttttttcgaaaaaaaaagaataatttagcagttccaacaaaaaaaaaaagaaatttacaagtggctcattgggaatgcagtaaatacagtcattaatacatcactgttagatacaaggttcttggtaagacttccccaaaaacaaaaattagcgttaataaatgggtcaatttgtaagtttttttgaatgggaatggatgatattattaaattaaatccgcaatcacaatcgatttgagagtactaggaagagtactctctgaaaaattacgatcagaccaataacaagagccacgagccaaacaatgggcagccttgttagcagatcgcttaacatgagaaatagttacattaaattaaagaagacaataaaactttgcagtcttttacaacaattccaaacattgaaggcatatcagtttgactttgcaaattgcttgcaatatataattacatcattgtataggtttttacattaaaatattagaaatttttcttaaattatacttcttctttttctcttaatttaataggtcatttgtccacttgatttacaaagatataacctatggactaacaaattccaactttgatactccccacattgagctgactaacattatttagaaaaaaaaatcaaaatataaatctgaaataacaagttaaaaataaagtatgaaaaatat

SEQ ID NO: 287743 - DNA, 530 bp, Cannabis indica
gtatgtagcatggcagggtccatctgtttcagcacctcaaaatgcctatcacattccgtcttgttccatgcgtaagctgcaagccatatttgctggttgcatacatcagtcttaaacttgtgaacgacattcatagtaatatgcttgaagcatgcacagtggcatgcttctgggaaaacaacatcaacagcatgttcaatgctttgatgcctatccgatatgaacataagattttcaacctcaccaatggcttcctttaacttccgcaagaaatacttccaagagtcatgattctcactgtcaacaattgcaaaggctaccggaaacaattggttgtttgcatcgtacgcaacagcaactaacagtgttcctccatacttcgtcttcaagaatgttccgtcgatactaatcacaggacgacaaaacttaaatcccttcctacaagcatcgagtgaccaaaacagtacttgaaccggttatcctcgctgacaatgtcagtaatagtgcctggattcttctgttccagcatg

SEQ ID NO: 287744 - DNA, 452 bp, Cannabis indica
tgtacaatcttcatctgctcatcttcacgattcttcaactttagccttccccttacttacacataaatatagcactgtgagtcgacacactcagtaagaaaagactaaatcatataacatacatatatcccggattatgatcagacgcccatacctctgaccataaccctaatccccgtgtcccacacgatactgagtctcgaacgttcgtacgacggtacttttgacatagtaacagcctatactcggtacgctagccatactctagccgtaacgatgtgatactgtatcagcctatactcggtacgctaatcataccctagccataccaatgtgatactgtcaaacagtacggtgctattgaccctaatatcagcctatactcggtacgctagtcatactctagctgttccgatgtgatattgtcaaatagcacgaaagccaacatacat

SEQ ID NO: 287745 - DNA, 930 bp, Cannabis indica
gttttttacacatgagatgttgtgctcacatcatcaacttgattgttgtggaaggtctaaaggaaaagagtcattcaatttcagctataagaaatgccgtgagatatgtgaggtcttctcctgccaggttgaaaatatttaaagagcatgttgagaaggctaaaattgaatgcaaaggtctcttgaaattagatgtcccaacaaggtggaattctacttttctcatgcttaatactgctttgaaattcaaggatgccttcaatagttggttgaaagatttgaactacaaggcctattttgaggagtttgacaaagatggaaacaagagggacgggccgcctattgaatcagattgggagaatgcaaaggtctttgtgcgattcttgggagctttccacgaaatcactatgaagtttagtggctcaacatatgtcacttcaaataagtacttcattacgattagtggaatacaacaacagttgtataagttgtcacttgcagaaaatgaagacctattattagtgagcatggctaagagcatgaaggagaagtatgataagtattggggaagcattgataaatgtaacgaggcactcttgattgccttagtacttgacccaagatacaagttgaagtatctccaccattgcttccgtaaattgcatgacccaatcacgtcaaatttgatggtgaacaagattgaaacaagtttgagaactttgtttgaggcgtatggtgggtatgagcaattacaacaaccatcatcagttccagcgagtcaaggtgaagacattactagtgttgatactactactacattctcatcagattcttattcatttctttcggatgacatgcatgttgagtttctgtgtaacaccctaactaacataggcgtattacgtgctttttaaacatgctgtgcagctc

SEQ ID NO: 287746 - DNA, 614 bp, Cannabis indica
taaaaataaaacacttacaaataatacttatctttcgagattctacgccattaaattgctaatgaacgtttctccattagggagaattactaactaaaacaagaactatgtaaaaccaacaatgcagatcgaatgtctcttgattaaagctcattatttaaaaaaatatatgtttatttaatcatttattttaataataaaaattttaaatttaaagttggtccgaaattaattgaaaattattttccaacgttaatggaattttaaatatttaattttcaaaaattatgtataaatatatataaaatttgaaaaataaataaataaataaaaatataataaaatgaaatttgaaaattatctaatttaagttggtccaaaagaactaaatttccaacttaaattattttcaaacaaaatttaattaaataacaaattaagttactaaccacctaatttgaaaaatattctattttaaattgatccaaaattaacaaacattcaacttaaaacaatattccaagaatctttcaataactaattcctagaattcctcaatttaattatgaatttaaaaatattcaaattcaagttgattcaaaaattagttataa

SEQ ID NO: 287747 - DNA, 733 bp, Cannabis indica
gtttcaactctcacactttttgccaaatagtcttcttcatctatagaagattcttcttacaaaatccaaacacaatctttctcttttctctgaacctctctctctctacctctcaatattttctctcttaaactctcaattcttagtcgtacataaaatgataagcgaaggtgatatttataggtttaggatcaagatcctaaagtcggttgatgccagaaataaggttgtttagttagttagaaataactaattgaaccacctcctttttgagcgaagtctccacgtcagcttaagtaatagggccttcgaaaacacataagagcttctggactcgaggaccacggactctcgctgaagatacttctggataggataaagtctattgtagtcgactatctagatcttatcattccaggagggaaactagcaggagttggaactcctttccaggaaagggctagtatcttaaaggctgaatccagagaggacaagacagacatccgggaactctttttcagatttggttttcattcctcaagactccttttgagaccgaaaaccatgagtgaacaacttctagaaataacgagtgcggttaacttttcatttggtaagaactataccacaaaaggcttctcacgggactagagcatgggtacaatgtttacgagaagtgtatcaagagtcaaacctaaattgtaatattcaaataaaaaagtaacattactat

SEQ ID NO: 287748 - DNA, 980 bp, Cannabis indica
tgtatgatatcaatacctcaaaagtattggaattacttaacatggatcttatgggtccaattcaagttgaaagtctaaatggtaagcgatatatttttgtgtgtgttgatgatttctctcgttttacttgggtagaatttttaagagaaaagtctaacccttttgatgcttttaaaaaactttgtttgagattaagagttgaaaaaggatgtaatattgggaaaatgtttcgaattcagagtgatcatggtaaggagtttgagaactcagtttatgatgacttttgtaagtctacaggtataactcatgaattctctgctcccaaaactcctcaacaaaatggagttgttgagaggaagaatcgaacattgcaggagatggcaagagtgatgttaaatagcaagaagctgacaaagcgattatgggcagaagctattaacacagcttgctatataataaacagagtatttattcgtccaggtacctcaaaaacatcctatgaaatttggaaaggtaaacgtcccaatgtaagtcattttcatgtttttggatgtgtttgttatgtttctagagatcgtgagcatattggtaaatttgatgctaaaagtgatgttggtgttttcattggatattccttaaacaatagagcttatcgtgtttacaacatgagaactcaaactgttttggaaacagctaatgtggttgttgatgattttaaagatttttcaaaattttccacagaatccgagatagatagctttatggatactccatcagaagaagcaaaagtagattctgatgcagcagaactcaattctgatgatgccaatgaagaatctgccactgcaactgagactggagaaccagaacagcctatctcgactcatccaaacatcatcactgattctatccagaaggaaccaagcaccagagtgaaactaaaccatcccaaagatctcattcttggaaatcctgaagaa

SEQ ID NO: 287749 - DNA, 718 bp, Cannabis indica
acatgattcaaaaactaaagcatcatttcttaaccgtttttggattgttcttattgctggttgttgggaaggataatttgaggaagtggaatcactttctctattcttctcaactaagcttgaagtagtaggattgtggagctatgaactttttgctcttcagattgaacaattcccagcttagctgctttctggaatttcatgttcatcatgagcaagtgtgaagtattactctgacaaggagtcttcttcacacctacgagttcattcctaaaggcatattctagatgagtgttgggatgcgggttgtacatttttgacactacaaatatcaataaacaaaagtaaatcatttggttcaataaattcatacacaagttcagaaaataacaagtaatcagatatgtttgcaaaaataactaaaaactaaacatatttattattttccaaggtttctaacataatgaaatgcagtgtcccggtaggcgagagtcaaagataacattagttgaatagagtagtcagctcatctaaaatgcataccaatttagcaaccttttattcgatgaaaatgagaatccaacgttgtctcggtaggcgagagttaaggttattctcattttatgagctatcaccattgtttcatgttctctaagtttatttcttagtagtcaccgtatgggagagtttaatagagacgaaaacttacaaaacactt

SEQ ID NO: 287750 - DNA, 738 bp, Cannabis indica
ggccaagctgaaatttctaatcgggagattaagatgattctagagaaaacagtgcaaagatcaaggaaagattggtcaagaaagttagatgacgcactgtgggcatacagaactgctttcaaaacaccgattggcatgtccccatatcggttggtgtttggaaaggcttgtcatttaccggtggagttagagcatagagctttttgggccatgaagactcttaacatggaactaaaagctgcaggggagaaaagactgttacagctgaatgagctagatgagtttcggaacgaagcctatgaaaacgcaaagatatacaaggagagaactaaaaagtggcacgatcaaggtctaatacggaaagagtttcaaccagggcagcaagtgttactctttaattcaaggctgaaactgtttcctggaaagttgaaatcaagatggtcgggaccattcacggtggtcaaggtgtttccttatggagcggtggagttaaaaggtgaaagtccaacaactttcaaagttaatggacagcgtttaaagctctacttgggaggtcagtttgaccaagccaagtccgccatgatcttggcgccactttgaagtgcaaggctcagcgtccagctgtatgacgataaacacagcgcttctgggaggcaacccaagtattatttttcgttagacttttgattatgttttagtatgctttagtattgttagtattttcaatttttagattag

SEQ ID NO: 287751 - DNA, 608 bp, Cannabis indica
ctgatgtgccaactcttggtttcgcaggctgttcagattagatggacgctaggcggaataccaggagccagggcaactcagtagggtcaaatcagggtcaaggagctcagttttccccaagtgttaggggctgaggtagaggtcctaggggcaaggctcgtggtcgggatgatgttaacccgcctcaggctgcccatgccaaccaggaagcctagaattgggaagttaggtttcctgaaatgcaagccagattagaggagcaagataatgagattcagagattgaggcagcagggtgctcctgcggtgcctgtgccagaagttcctgtggcacccgcccctgctgcccaggccgagatagtagtagcggcaaacattatggaacccctgtatgaaaggttccgcgagcagacacctccgatttttctgggaggtccagacgtcatggaagccgagtagtgactatcattaattacgagaatattgaattttatgagtgtgacggaatacactacgcagtttgatcagttggcgaggttggcctcgggaatagtgccaaccgatttcagtaagaaagaaaaatatctttgatggacttaatgtgaagat

SEQ ID NO: 287752 - DNA, 533 bp, Cannabis indica
aaagcatacctgtgagagactttctggtgtcaatgctaccagcatagtctgaatccacaaacccagtcagttcctcttgtgagtttgacttatttccaaaggtaagtcctatgtcaagagagcccttgacataccttagaatccatttcaaagctgaccaatgttcttgtccaggatcagcaatgaatctgctgactacacttaaggaataggccaagtcaggcctagtacacaccatggcatacataagactaccaaccccattagcatagggaatgttgtccatgaatgccctttcttcatcagttgtgggagactgatctttggtcagtttgaagtgtggggctagaggtgtctgcacaggtttagaatcactcatcccatacttctcaatcaccttttccaggtattgtttttgagatagagtgatagtatttggtctttgtctttgtatgtcaatgcctagaatcttcttagcttcccccagatctttcatgtcgaattcatcattgagttttgtttcaaattatttt

SEQ ID NO: 287753 - DNA, 436 bp, Cannabis indica
ggagtgtctaaagataaaaaaaaaaaatgggcagcttaataaaaatttgagagagtgagccaatgttctcacatgaggtcacttgcacacactgaagaaaaatcttggttcaaaatcctgtaaaaaattccttgtttattgtctttctcaagtgtgtgtgaatatgtggattggtagaagttgtctcattctttttattaagtatggctcattgtgaagttgaatgaatttgttctttgctcaaatgatcattgctcacttgttaattgattaggccactcattgtgtttcctctttacaagttgaacatgttaattcttgagatatatcatttggcatgtttttgattgaaataaaaataaatctcatttgtagcatcattcgtaatattgtggtgatctgattgttttgctcagtcaaatctcttcactttttt

SEQ ID NO: 287754 - DNA, 517 bp, Cannabis indica
atagattgtgacatttttatgtgattagtctcaataattaaatatgtatatttatatagtaaaagtaaaaatctctaaatcaaaatggctacatttatatgcaaaagtaattagaaattgaaaaaaaaaaattagaaattaatcacatctatatatttatataaaggaaagcacacaaatgtataggtggctctctagaattttttgtttttatttttctaattttttgagaattttatattaatgtgctaaaaaacatgagtactcactaatcttacttttgttaataatcccacattgtttataaagtaaagtggaacattacatatacactataaaataagtcctttcttttgttatttttattttgtcctaattttttttttcttcttggataattgattaaattaatcttatttaattaattagttagaaacttttttttaaaaaaaaaaaatcatctaatctatagtgtgtgcttatatattttattatttatatatatttatagaaaaaa

SEQ ID NO: 287755 - DNA, 604 bp, Cannabis indica
gctagggcggccctggactctaagtctgcttggtgagtttcctctaaggatctcaccttggcaaccatctcgtccaaggcttccctggcctcccggagcttccgtttggcctttgcagtaggctcaccctccgccctcagctcctcttgatgcttggcctccagcctgtctctccgcagggcctcatcccggatcatggcctccgcctgggcttccctccgcttggcctcctcctcattggccttggcagcagcctcccggcgctcagcagcctcctggtaaagctgcctctccgcagtaagatcctgaaggaccttcctgacttcgttcatgtccccaaagtcagacagaacgaagccatggttgattatgttcttggagaggcggccagcttcagcagcaagctaaacaacaacgcaagtgtaagaaagaatctccaaaaagaataaggggaaaagcaaaatcacgaagcacttaccacagtgagggagtggctgagatcctggacctggaagatggagttcagggaggcacaagtagcgaaccgcttaggcgcgcaccgggtaagctgagaagcaaactcgccagtcatctccgcggcgaa

SEQ ID NO: 287756 - DNA, 499 bp, Cannabis indica
aattgctagtacatacgcacttggatctataaaaatcactgggactgaatttgttaacccaatcctacattttacaaagaaagtaaatataatgaatgggcatatgaaagttgcaaaactataatacaactacaaaacaactataaacaaactaacaaacaggagaaattttttaaaaaacaataatagaaacatagatataaaaccaaacatagtataaatagcaaaacatatagaaaacagaataaaaacataaaaataaaagaaagtagtagaccaaccgaattaaactccttcaatatcaatatccatgatagttctaatttttacccattaatgatatataaatggacaccaaaccaactagttaaaaactatttcaatacaaacacacatagaaaggtgttaaaactataaaataaaactatgaaaaaactataaaaaaaaaatagaaaactgatcaaataaagaaactgaaatgaaaaacaacaacacatct

SEQ ID NO: 287757 - DNA, 756 bp, Cannabis indica
agaaggcttctaatgtccatcaagcggacgatgatgatgatttttaaactgagaaggttgtctcggaagttgttgcaaccaaaaaaaggaagtctgttagtgatgacgctagtgcgtcaaagaagagtaaaactaaggccgctgtgaaggattctaattcggtatgtcttgttgttttcttatattttttggttgatatgtgtattgtattgtttaaataaattttattttttagttgtatgaattttgatctctttgtttgttttaatagtttttttttttttgcattttcctttaattgaattgtgttttatatttgttaggaaaaagtgtgcgaatctaatgttgttgatgatgagaaactggttaatgtcattaagaaagataaaaagaaaccagtttctaaatcccatggcaagaagaagagtgagactcatgttgatgctgctcccttggtaatttttcttatcaaaagaaactggtttcttcctttatgatttttcttgtttttaggttttctgtttatagttttatcgttcgtaagttatttttgttttgtgtaatcatttggagcttctgtattttctattgtttatttttttattagcgtatttttaagtaactggtttctatatttaattttgatcttagttatttaggtaattggtttatgtgaattaatttttaatttaattattttacgtaactggtttctctatattagatttttgctaagttgtttattgtaacatattt

SEQ ID NO: 287758 - DNA, 527 bp, Cannabis indica
gtggaaaaaatattttcgtgtactgctgcccaactaatgaaatatactgcaaatgtgtaattttaaaaaaataaaatagttttacatgcctttcataagtttaattttttttaattaaataagctatgcacaccatgtctaatcattttaaatgaaaatacatcacggtttgcaggaacaccgccgctttgtcgacactaccatattcaatttatcaacgaaaaaatggacaatccagatatatgcggacccggctagaatgaaaagtgcaaaatacaaaaattacactattgtctctatcgaagcaaatgaagattgaaatccaccaatgactatcattagttttcttatctacaatttttagacaaatgctatcttcaattatcaataatttagagattgatttttaattttctttttatcttacacccatttaagtaatgtttctttaagtattggaacatcaatttttaatttatttttggattaacttaagaacatatttaaatcatcaagctttcttaaac

SEQ ID NO: 287759 - DNA, 715 bp, Cannabis indica
caaggtaccccatcatcgagaaacttgtttttctgcctcctgatggcctcaagaaaattaaggccatatttccaagcacatccgatcaaggtactgaccaaccacccgctccggcaagtcctccaaaaaccagaagcatccggaaggctcctcaagtgggcaatggagttaagtcagttcgacttacactacgttccccgaatctccataaaaggccaagccttggcagacttcattaccgaatgcaatgaagccgaggcaaccgcaaatgcgccaacaccatcggtccccacatggagagtatttgtggacggagcctccaatgaaaatggatccggagcaggggtggcaatgatatccccgaccggactgcgactccaggcagccctacggttcgacttctcagcttcaaacaacgaggccgaatacgaggccttgatagcagggctgaggctagcgaaagccgtaggggccaaaagagtggaagtctacagtgactcccagctggtcgtaaatcagatatcgggagagtaccaaacacgcggcgagcgaatggccgcgtatgtaacaatagtccgggagctgctccacgagttcacggactacaaagtagaaagaatcccccgggaaaagaacgctcacgcggactgtctggctaagttagcttcagatagtgaaatcgaagggctgggggtagtaccagtggaacgcttgg

SEQ ID NO: 287760 - DNA, 746 bp, Cannabis indica
tatatatatatattcatactcaattttttatatatacatatatatacattcatattcatattcatcttcatatgtatacatatatatatttatattcatatatataatatatatacgtatacgatcggttcttaatttatatatattttatatatatttatattcatataattccgatcatatatatatatacattttaattcaatctacgtatgtacatatatatattcatattttaattttgtttatgtattgtatatatacgtaagtattgttgtatatatatacgtatatatatattttttatatatgtttatatatattatacgtttaatatatgattttattgcataaaaattgtatgtgatatgtttatgatattttttatgcggtatatacattatatacgtgtatatataaacataaaaaaaattggatttttggtccgttggttgttttatttcattttttttcggtgtttatttcgaattctatatacatcactatattcatatagtattatagatcgatctaaacatgtgaaaaatcattgaaatttgaaaatttattttttaagaactcatacggactagaaattttttattaaaattaaagtccaatttttacgtgttttaattgcctaaaaccgacatgaatctctttatttatgcatggagattcaaatgggagtgattccatgaatttttatcgtcggaattcgttttcctgttcgggtttgggtcggg

SEQ ID NO: 287761 - DNA, 713 bp, Cannabis indica
taaatttttttgggaaatgttttgtgtacctaccttgcatcatacatggagagtttgaattgagttttccacaaggtccatgaatcataaatttgataacggcattataaccatcaggatcaatatttgagtttgggatttctgcacttattattttgtctatatgttctgctgaaggatttttcaatgttgaatgcaagaaaagtagtatgtgtgcatgaggcaattctcttttttagaactcaattgtgtatatacctacaataacattaagaaaatgttaaaatttacatttaaaattgttggaaaaactgtgaaatattttcatagaatatcattttaaaataatttaatttttttgtgaatttaaaatataagaacttacatgcgattatttttccaaatggttgttcatttttcagatcgtgcattagttggttcaactttatttcaaaaagtctgcatatggtattaaccctattctcatcgtctttttgaccaattaaattaatcatgtcatttatttttggccactttgggttgcaagtgaaagtaagaaataaatcaggatatccagcccatttacaaagggccatagcatcttgataattttgtactctatatcggggtcccctagtgtgtgacgaaggtaaaataattgttttttccacttttgagcaatttgaatcccctcgatgagcagcatccattaa

SEQ ID NO: 287762 - DNA, 545 bp, Cannabis indica
tgaacagtctatttcacacacatgtaaaaataaaatagttaggagtgtaatacactgattgaaacttattttcagcatgttaattttttttgaatttcttaaaattaaaaaaaaaatatcttaaataacatacatgaccataagtaaattttttagtaacaaattatttgagatgtgcattgttagatccttggggtatattataaaattttctattatcaaattattaattttactaagaaaatttcagcagttgaagtataaaatattgacttggtagtttaaatttacttcaaataattttatttattgcatctctaatttttttttttaatttaaatttcgactttagttctcttatttttttatttgatttttatttattttagagataatttattaattaatatttttattctactttatttaattagagctcattaattttgtcaaaaaaaattattaactattaaaaattttaaaaaattatataattatacattataactaataattcactgttaattaatttataacagaataat

SEQ ID NO: 287763 - DNA, 735 bp, Cannabis indica
gcaatgttatgcactagacctgacatctgttatgcagtaggaatcgtgagcaggtatccgacaaatccaggataggaacattggaatgtttttaagcatatcttgaagtacttgaagagtacaaggaaattcgtgtcagtctacaagggtggtgctttaaatcccgttggctataccgattcagatttccaagcatgtcttgatgataggaaatctacatctaggatggtgtttactcttgggggtggagcagtggtttggagaagtgctaaacaaaccgcaatttcagactctaccatggaggcagaatacatagctgctgcagaggctgcaaaagaacttgtctggctcagaaagttcttcacaggactcggtgtcgtccctggaatggaaaaaccactaattttgctttgtgataacactggagccatagccaacagtaaagagcctcgaagccacaagagaagcaagcatatagaatggaaatatcacatcatcagagagtatgtgacaaaaggggatgtattggtggaactcgtggacacagaggacaacctagttgatccattcaccaaagtcttggcaggaactgcatttgaaatgcaccgtcagaatttaggattaattgaaatgtactgattgttttatattagtgcaagtgggagtttgttgggttttatgtcctaaataagacttcatttcattgtaatctttatcttttaaatatcaataaag

SEQ ID NO: 287764 - DNA, 472 bp, Cannabis indica
aggttaattaaattagtttaacctaataaaattgattagcaacataattaactattaaaatatatgaaatttatttttcattttaaatattttaaagttaattgttagaaaaacactcttagtttaatgaagttatttctagataaactatttgtatttttcttgtattaattaaatatagaattataactaactagattctttctaaagcttattttaattatttcattaaataattcctattaaagttgtaacttagttatttctaactaattttatctatcaacttaaatttgaatatgttttgaatttcaaaattaagttgaggaatttcaaaattattacttgctatatgtttaataatttctgaattgttggtctaacttggcttgtttatctaatgagataaatataatagtgttagatctcgaaagataaatattgtatatgcgacatctagctgttcatcaat

SEQ ID NO: 287765 - DNA, 759 bp, Cannabis indica
tctctcttctttttcctctcttcaattttgaaataccttgagtgatagagtagtgcccacacacatagtggtatctcaatcatagtgtgtaagactgtaggagaatccaaacaacaaagaaggagaatcagcatcaaggaaggagagaaaaagatccaggttcagatcttgattatgctctgctacagaaaggaatcaagggctagagatctgaacggaaggagtcattatattttgctgcacccaatgtaagccttactatttctttaacatataactctgccaactgatccactgaataggtcattttaactggcagaaaatgagcagacttcgttctaccacaacccaaatagaatcgaacaaccatgtggttctaggcaacccaaccacaaagtccatcgcgatgtcctcccacttccattcaggtagggttaaaggttgtaacaaccctgctggtctctgatgtttagccttaatctgctgacaagttcggcatttcgatacgaatgctaccaaattcttcttcattccactccaccagaagtaaggtttaagatcctgatacatcttggtggtgtcgggatgcaaggaatatggggtactatgagcctcttcaaagatttcattcctgacttccatactatttggaacgcaaaccctagctttatacaatagcatcccgttgtttgacactgaaaaatccctggcttgaccagctgaaacctcttctctgatttttaccaactctggatcagt

SEQ ID NO: 287766 - DNA, 642 bp, Cannabis indica
ctcaaaaacgtccatgcctttcaacagtttctcactttctgtattaacgggtgtattatgggtctctatctatctacctccgtggtggggtttattaatattaagatgactgatgagatgtaatgttgtaaaggcaaatttattaatttaataaatgggacttgaaaaatgtttgggattttcgaatgtaacgaaaaagaacaaaaggcagaacagaacagaacagtacaggtgtttaagtggacgtgtattggggaatagacacactttacttacgattatgaatacgaatacgatgatgatgatgatgaatcaaactactagacacgctgttcacttgtctgcaactcggcaacctttgtcttcttttttttctttcttttattgctaatcttatggatttcattacttactaataataataataaaaaaaaaagtgatgttatttcggaaaaattaatttgtggtttaagaaagtaaaacagtaaaaagttttattgtttacctcaaattttttctgttattattattatttattctcaaaatattttataaacatgtgaacatatctttactttttcttgtatagaaaaaaaaaaatctttactttttcttttttgattgataaataaagactagcgc

SEQ ID NO: 287767 - DNA, 500 bp, Cannabis indica
aacctcaaccaaatcacagagtaaaaacaaaaatttcatgcttaaattcacaacagaatatgtatcccaaaaattagattaacaatactcaagtcaagctccacacttgagcaaaattcaacctagaaatcaagtccataaccatgaacatcaaaaccccaaatacctcatgcttgaacacaacaaaaatcagaacttaaggttagatttcaaacacaacataaccttagaaatctcatatgaaattactagtaaacatactcctcaactcaacaatacaatcaagctaaaacattaagattaacaccaaaatcacctccaattccactatcatgcatccataatttaaagaacatcaagaacaccttaaatcattacgtaaaatcagaaattaataaatcaaaaaggctaaagatcattaccacaagctccttaagttcttcccaagcaagaacatccaaaaagccacacaaaatcaagcctttttttttttttttttt

SEQ ID NO: 287768 - DNA, 568 bp, Cannabis indica
tggaagcttgattatataggcacatagtccccacactagttaagataatactgtttgtagactcagttaattggtttgaattaatcaattataattctaaaattagactatgtcttatttatgaatttttacactaagcaagggattgtgaagaaaagaggttttatgatttatttgttaattaagatactgtagtgagtctaattaataaataagttaaatggtaattttattttataattatttttaattattaaataaatagttttgacatttaaagaattaaaattagaaaatatggcattagtgaaagaaaagataaattgttgaataaaatggtaaaattgtaactagtggggcccacatcctatggtcagctacttaaggagaaatttagccatttatttatcattttttaatttcatataattcaaacctaaccctagaaggattcctataaatagatagtgataggctcttaacctgatacaccacatccactcatacattggctctcttcagtcaaatttgtcaaattaagaaagagtcttctctctctctctctctc

SEQ ID NO: 287769 - DNA, 582 bp, Cannabis indica
tggaaaagattgatgtgtggtagttctgaaggtgaacatactcttgtgcaaaactctgaaattcgcaacattggaggtcaattttcttcatttggtacaaggaccctattggatgcaagaggtggacttgatccaatttgaagcagtattgaggccaaaccccttctgatgggggttcaggtaagtccttctcaccttgagtataatagcacattggggacaatgtcatatttagtttggggggagagacttaaaattattaaaatttttaaattctgcactttaatttctgcattttaattttctgttttagtttttcaaggaatggcaataagcttgacgatagttgtatactgctgattagtgtgatgtgttctgaaattgtaaaataactgtgtgcttgattctgttaactctttggattagtttggatgcttagaaacctgtgtttatctggaaatattcaatctgtaaaaattgttataattgttttactatggtttgtggtaagattgacaggatagcttagaacttgcatgtttattcttttgagacgaaatccttgatagtgttcaattggaa

SEQ ID NO: 287770 - DNA, 503 bp, Cannabis indica
aaataagataaatgcgaaaaatgaataatggaagagctgattcgaattgttgctctctaggtcctatttatagaacatagaaaccctagagacagccacaagatcgaatctacagctgtacaaaactttcctaagaaaaatacgatctacaacatcagatccggaagctgacgtaacaaatcaaaccagaaaaaggaaacttgctataatcaggtccgatcctcaattaatacttcctgccataaacagattagatattctgattgtattaagatacaatcgaatttaatgaggataaggcatttaatcaaggtttcctttataaaccaactttacataagagaaaagattctcttacaagaaatttccaaacaaaggaaagttcagcattaaaagcatctttcctaacaaagaaaagagcaactaaatccgaatatacaaggtaagaaatcggtaataaatgcaattcaatcttaccactaaataaaaaatattttgtcaac

SEQ ID NO: 287771 - DNA, 556 bp, Cannabis indica
gaattgatcatatatttttcaatcaaaaaaacaaaaaaaatgaagtgtcattcgtcaaaaaataataataataataataaaaaatcttaaaataacaagattaataagtaatcaaaaatggtagtgttataattttgcttaatcaagttattgaattaattaattcaaattttaagttgtatcaataagaagttttccaatctagttttctgtacaaggcataagcaaagcagccatatatatatatgatcaatccattttcgtttgtaattataaagtcatgagcttaatttgtacataaaactagaattattactttaatttaatttgttattgctttcggggtatgtatgttatacttaatttatctcactcattacttcactctcttaaagttaattaattctcttttactaataaataaagaattcatgaatgatcgattaaagaagaaagaagatgaagaagaaaaagaacattttagttaccatcaagatttctctgaaggatgccttttttgtttccatacttaattactacttaacttcaacacaca

SEQ ID NO: 287772 - DNA, 649 bp, Cannabis indica
cattgatactttgtcaaactctctcacttaggggtggcaaaattgattttgacatgacacacgaacacgatacgaattttacgggttagggttaggaaaattagatgtaggttaaaattagatcgacacgacttgacacgaaataaaaacgagtcaaatacgatacgattcgcttaacacgaatttgaatacgatttttttttaaaataaaataaaagaaaaaaataaaaagaaaatgataatagaactaataaagatatgtacatattaataattacaatgttaaatggcacattaaggtgccaaacaccacaaaatatagcatattattattggtacatttcaatataagtttctacaaattttaatttaataaatgatttaaaaaattattaattgattattgtgtatgtgaatcagtatggtattgaacaccttaaggtgtcacataacaataatggcacaaaaattatttacaaaaaaagtattacaaagtgttaactgagattttcaacaactaattaattaaagttgggcaaaatgattagaagagtttatgcaagtatttttacgtggttgggacattaatcagccttaatccacgagtcagtgctatttaatatagtggtgtttctttacaaggaatatt

SEQ ID NO: 287773 - DNA, 501 bp, Cannabis indica
caggagcacccggggatttggaatctcttctattgctggacaacaggtaagacagtagtttgcacgtagagtatgcgcagtggcgcttatgttgaatatgatatatgtgagttatggtaaccgggattagggttattaccctaataggaacggtttgttagcctagggttattaccctagtgaaatatgtgtataaatgccatgccatgttaattgaaatgaaatttaaggattatgcgctcaaggcataatcaggttggactcggtacacataaccgagatgaaccacttctaaggccttaatgtatttagacgtgtgagagcaacacgtggttctacgtcacgtagatttaattagatgtgtgggcgcaacacataggtctacgccacgtagacataaatgggcatgttgatatagtgattaggtctgtgctatacagacatatgtaaatgagcatattatatttattgtgatttatactgtcttgctgggcttggctc

SEQ ID NO: 287774 - DNA, 484 bp, Cannabis indica
tgacttgattatttgaaaataaatgttatttatttgattatttggctgaaatagattaatggttaaagctttcattttattcatttttctttcaaaacttagaaaatagaaaaattaaaaaactctctctttctttcctctcattttcggccaccttggagcagcaaggaattggtcttctcccttgaagttttgattgagaattcatctccttttaaggtccatttcaagctaggttagctcttgtttttccttctttaatttgttgaaaaaatgatgaaattgatgtaatgcatgcatgataaattgaggttgttgctgctgtgttttgttgttgatttctgaggtttaaagcttgtttatttgagttgatttgaactgttgtgaagcatgatagttaggttgagtaaagttatgatttttctatgttaaaactatggttttcaaagagaattggttagattatgttgctgtgatgttgttg

SEQ ID NO: 287775 - DNA, 1146 bp, Cannabis indica
ccagtgatgctacgctcttcaaggactaaatagggaccaagtttgccttgtcacttatattgctgcttaacaattgagccaacgcgtctgcagttgtattctcttctcttggaatttgtctgagaccgtagcttttgaattgtgcgagcaggtcgtgtattttgcacagatatgctatcattttttctccccgagcctcgtattagctggatacatgatttaccaccagttgtgaatcattgtagatctcaatgtgttcggccttcatttcctgggctagcttaagtccagcgattagagcctcgtattcgtcctcgttgttagaggccttgaatccaaacttgactgcagcgtgcaggtgttgccccccaggtgtgacgagggcaattcctgcaccagatagttaatctgttgccgacccatccacatgtagtttccaggtcagtttgtcctcattattacttggctgtggtactgactcgggattgctttctggtatgccttcttttttgcttgtgcactctaccacaaagtcggccaaggcttggccgttgatagctgttcaggattggaagttgatttcatactgacccaattctactgcccacttgagtaaccgtccagaggcatctggcttttacaatatttatcgtagtggttggtcggtgtatacccgaacagggtgagcttggaaataaggcctcagcttccttgttgctagattaaggcagtaggcgagcttttctatcaacggatatcggccctcggccttgatgagtctcttactaatgtaatagactgggtgccgtacgctgttctcttctctgatcagcacggcacttacggcatgctccgtgaaagctaggtatatccccaactcctctccgtccagaggtttagaaagtacgggaggttttgcaagctacgcctttaaatcttgaaaagctctttcacatgcttctgtccactcaaactttttgtttcctcgcatgatgttgaagaatggaacacatttgtccgttgattttgacacgaatctgctcagtgcggcaattcgaccagttaagctttgcacctctttggtttttgttggcgagttcatatccaggagggcttggattttttctggatcggcttcaattcctc

SEQ ID NO: 287776 - DNA, 570 bp, Cannabis indica
gttgctggtgcaggcggcgcaggcggggtgaccggagaagcagaagcagagccacgagagggcttcttggacggttgggcattcttagttttggccattttcctttgaaaaccctagaacacaagcactcttacactttgaaaaagttagacctttgagagaaaaaaaatgaaaagagaagagagtggtgatcgtgggtgaatgggtggttgagcatatataacatttcaattttaattacccaataagaaaaaaattggaaaaaggaaagtaacttacttaccttaaatcaccacgtggggagagaaaaaaggaaaccaaaaaaggtgtttttcaaaaatggtcaatgtttccttaaatggaaaaaggaaaccaaatatccccacaaaatctaagaatttaaaaacccttaccaaaaccgaaattgccaccaaaatggaaacaaaaaaataattaattatttaagtacaagtttcctatacacaccaaaaagaccaaatctccacaaataaaggaaaacattctaaataaaaaaaaatacaattaaaacatgtttccataaaatgaaaa

SEQ ID NO: 287777 - DNA, 554 bp, Cannabis indica
ttgctatttttatccccctcttgaagccacaattgtttcgatcgttgacgccagaacacctccttctgagtaagaacttcaaaaagttctgtctcagcttccttatatttagaaatagcatcaggatctctaccttgcttccaccgtctcacctccttcttccaatattttatacgagaagcaaaattacccgaataatcttttccccaaaccgaaagagattccccacaccgttgtattttctcttggatacccgccagattatactcctcccaacactcctttaccacctgataacacagaggttcccgaagccagcaattttcaaaacgaaatttgcgactcccggaagctatattatgccgcaccaaatcaagaaaaatgggacaatgatcagaagaagatacctcaagattaataagtttagcccgagggaacagttggagccatctgtctgtcaccagagcacgatctaaacggacctctatccaattatcggttccccgacttttctcccaagtgaactgatgtcccacaatgtctaaatcaattaa

SEQ ID NO: 287778 - DNA, 607 bp, Cannabis indica
agaccaagacccaggacgcgaacccacacccggagcctgatttggacctaaactgaaattcagacccgaaccaaaacttggacaaggactcaaattccgacccgaacacaaacccaaactcgaactataaatcacaaatggaactagaaccaaattaggactaggaccaggaccaggacctaaacccaaacccgaacctagatcaaaaccttgatagagacctacactcgaactgagactgggactcgaactgagactgggactcgaccctgaacctagaccgagacttaaacccacacaataaccggaccaggattaagaatcaagatagggacctgggaaacagaattaggacatggacctattacccgacaaagacccgaacttgaaactagtacccagctcgtgacccggcaccgaaaatggaaccagactcggatgcgagattgggatccggatctggacccagagcttggtcaaaacctgtagtcggtgtctagatttgggacccagcccaagacccgaaccccaacgaggaccagaacccacacccggacctgaacacagtcccaaacccaaaagttgacccgaacccatacccggtgac

SEQ ID NO: 287779 - DNA, 544 bp, Cannabis indica
gaattcgatcctgcttcccagaagccaagaccccacggctgatatgtacattgctgggagacctctgactcatggcgaacacagcttctaacttcctacctgcaccacgaagcacccgtgagtcacaatgactcagcaagaaaagctactatataaaatcatagaaagtgccagcaaatttcattacaatgtaatatatataccaataggtcatacatactcaaggcgcataaataacttaatgtctatgagagcacacttattacgtaatcaagtatattcatagttatttataatcaacaatctctgtgtttcatacaacctcctaaacatttatcattataaatactcaccttcagtgcttcataaaacactctaattcacacattaccataactccataatctcagtgcttcataaagcactctaattcacgcattaccataattccataatctcagtgcttcataaagcactctaattcacgcattaccataattccataatcttaatgcttcataaagcactctaattttacatctct

SEQ ID NO: 287780 - DNA, 715 bp, Cannabis indica
aatgatcgcaacaatattctccatgacaaggctgctcagaaaccgactgaaatatgggcaaaagctgcagcttactgctgtaattttcagcagcacttggcagctcaatcccctgctacaatgtctgctactagtgctgctatctcatcctgctggcagccccctcctctgcagcaaaataagatgaatattgatgcagcatatgatgaatcgaaacataaaattggtgttggtgttattgttcgaaattctaatggccaagtgattgttgctctttccatgccctttatggggaagactcagcctcaagagatataagctaaagccttattttctagtcttaagtgggcgcatcaatatagcatagcctttgatttcattgaaactccttaatcttggcaaactcactcaagtgtccttcactaactttatctcattttcatgatttggttgatagacattgaaaattatttattcctctctcttctgtttgtgtgtctcatgtacgtaaagatgtgaaccaagctgcttatggcttgctaaacaagtattagtgttggatagtaattatatgtggtttgaaaaaattacttcaaccatcctttttgtctgttgtaaatgattttatctaatttataaatgtggatctttcttaaaagaaaaaaaagtacaaaatgtattaactaattaagtaataaagtgtattatacttttt

SEQ ID NO: 287781 - DNA, 732 bp, Cannabis indica
tagaggccattagcgaaggggcgaaactcgttagatcccctaggagaacactaccttaatagtctgaacacaaaaattgtagaaatcaaaatatgaataaattagcatcatcaacaaaaggaaaattaaagggaaaagacttaataattacgtgacaaataattattgattgaattaaaaagttaagattataagattaattcaaattattattcatatattgattctaaaaagagtaagaaaaagaaacatcatttctttgtgcccaaactctttcggattttacaaactctttgatattaacaaaattgttgctttaatttttcatcacactggaaacatattgttttagctctattagacaaccatattttccctcctaaaaagtcattttttttttataattgaaagatgtgatgtttgagtaattacatgtatcgtgtagttgaagatttgatgttgagtaatttacatgctgtgtaattgaagatttgatgttgagtcattttcacactggaaacatattgttttagctctattagacaaccatattttccctcctaaaaagtttttttttttttataattgaaagatgtgatgtttggtgtaaatttacatgtattgtgtagtttgaagatttgattgttgagtaatttacatgctgtgtaattgaagatttgatgttgagtcattttttgtttttattttatagtatgtttttttttttttttt

SEQ ID NO: 287782 - DNA, 667 bp, Cannabis indica
atttgaccaacacggattcataacatcttcatggtaatggtagttggttgttcacttttattattgaaaaattgtaattttgaatactttattgtaatcaagatgtgaaaaattgtaatgtggttcctacaaattaattagcaaatataaaagatttcctctaattttaatttgtacatactcactaaaaaaaccaattgttgtcttatcaatatttaattttctgtgtacgtcccacagtgtactcactgacgttaaatggagtatttcctatactttaaataacgtacgtcagcgatttcacagtgtaacgtcaaatcaaactcagtacatgcagatctcatgggattccctgatttgagttaattaagatactatatgcaaacacgaaacctacctatattacttaaggagatttaatatttgttgggctctaatatactaatatgacatttttcttattaaaatttggacaaatcaattaggtcagatttaatacgatagtagtccctatgatagtattacccaacaaaattaacaaaactaagttaattaactatgatagtggtaccaacaacgattatgatgtcaaattttaataaattattgactactgaaatgagtggatgtcatatcacatttttaatttcaccatttaaaccatgta

SEQ ID NO: 287783 - DNA, 427 bp, Cannabis indica
gtgccgttctttatcgaccttcccatgatgagcgtactccgcttcatctaggaactggatatcacaaacaatctcattgcttcatttctcttgactggtcaagaaaatttccagtcatggaagcgtacaacctctataaatattgctgcctaaaacaaaaccctcttcattgaaggcaccataccccgtcctcctccaaatgatccttctccctctgcgtgggacatttgcaacaatatggtcatgtcatggattcttcagtctgtatctcgtgagatcgctgctagtatcatgttcaaaaccaccgctcgtgagatgtggactaaccttcacgactgttttaaccaaagcaatggtccccgcatcttacaactaaaaacctccgttggtaatgtcaaacagggtgataatgttggaaattatttta

SEQ ID NO: 287784 - DNA, 506 bp, Cannabis indica
tctctctctctcctctctctctctctctccgttaatttcttaataaaacaagattaaagattcaatgtgttaaggtatataaaaataccgtggacatacatattacaaccaaatgccttttaaaatttagagtatctacacataagctcaattttagggtgactattgtagaattacccataaatatttatttattttcttatattttttattattttattattaataattatattaattaataatttttaagagtttttttttaaaaaaaaaaacgtggccgtttttttatatattaaaaaaaactatagggtgattctataatgcacacccttttaatggatgtactgatgcacccttaacttgtttcggcatctagaagaattttttagtctaatttttttttcatattcatgtacgttatatctatttaagatatcctacaaaattttgaaaaatttggaataatttacaatatagaaaacaatgttcaaacagtctatttt

SEQ ID NO: 287785 - DNA, 828 bp, Cannabis indica
aggcgagccactccgggcatacatcagcagattcatgacggaagcgaccaaggtgtcacaggtaaccgaggatggaaagttatctgcgatactggggggcattgaagtccttggcgaactatggaaggaaataaggaagaatggaccggtcgactcaatcagtgatttcctcgaccgggccgaaggtttcatcaagctcgaagaagccattcagcgagcagaaagtgagcaaaagccgaacaaaacgaaggctccttctactcgaacatccgcccagcttccccaatattccagcaactcaagtggcaagcgttcaggcaacaaccacaagcaagggaacgggaagaagggaaagttcgccgaaaaacccggacagactccccgtgatcgcaatgaacacactgcattcactatcctaactgaggatatagaaagtgtatatatagcaactcagtcgctaattccgtacaagaagctcgggcccatgaagaaagataccagcaagagggacttgacaaaattttgtcagttccatggagactacggccatgacaccaatgaatgctacaacctgaagcagaagatagaacttctgatgaagaagaacaacctgcacttacagaagtaggtcaaggccaaccaaggtcagaataaccagtcatcattggaggcccgtacatcgatggagacacgggcaaagctcgggaacgatatgcctgttggaatttatgccctaaataaactccaattcaatgtaatccattttattcaacatcaataaataaacagaagtatttttcattcatttgtgtatgttttggttcatct

SEQ ID NO: 287786 - DNA, 1154 bp, Cannabis indica
gtgagatagagggagagagagatgatgcagagagagagaatattgtgaggggggtatttttggggttttgaaaaaaaaggaatagtttttttaggttttaaatttttggtttagggaaatttttttttgattttctaagtatagaaaaacaaatttccctaacagtatccattaagaacaaacaaagtctactagaactctatcatgaggacgacttaacatatttctatgtattgattttcagctaataaccaaacatttatatatatttatatatatatatatatatatatatatatatacctaattaattaatcttatctacaagaaagaatgcagaaacttcgtctgtccggctcaattaatctcaacaagccaatattaaatacaattatatatgtataataaataaacacaattagacacccaatagtaaccaatacttttttataagtagcacttttatgattagttagcgatatttcttttaaaattatttttttagagcattgctattagacactagtggtgcccaacacctttttataagtggcaccccaccattagttagcgatatttcgtaaaaactatattttagagtattgctattggacactggtagtgcccaacaccttctataggtggcaccctacgattgcataaagatatttcttaaaagctatttttttaaattatcttagactcgattcttaattacaccaatagcagtatgaaactcgaaaaaatgttaggcgccagtagtacattttagtaatttttatttgtttttaagttatatggaacctgatacttaattagagtataatagcaaggagaatgttaccagtaatctacttactatttctctaaatgaacctattaactcattaatgataaagtttattaattaatgaaaaaagataattgaatcatggaaccaaaaagcaactgatattatatatatgttttcttgtgttatttattgtgagatttagcttacttagttcttaatcatcaagcaactgtaaaggtagttagaacaattgggtttcctaattgcccgagtcctatataatagagtcttaggactcatttttggaagtaatcaaggtttagacacacattgtaatgagatgaattctctctattagtta

SEQ ID NO: 287787 - DNA, 711 bp, Cannabis indica
aaatgcaaaacacaatttcacctatgccaaaagtataacataagagtttattaatttaagttcgacccatccaagattataaaaataatctcttaattacaatccttttatttaaaggaaataccctttgattccaattataatgacattaaataattaaaacaattagggaaaatttggagtgaatttggaattgcagctgaactcagtccatttaattaaccgagctgcctacataccttctttatgaaggatcaagcctagttcagaatacggtattttagaatttggatataaggattccggtagatgaccactttcaggaatcctttgctattttgaaaatttagaaaaattcctaggtgtatgaccttttatggaattttgagagttgtgttttataccattttgcggtatcggggactgcacttagtcttagcaactaagttgcctacgtatccttttataggaatcaagtcaaacgtagttccgacaatctttgtgaaagttaattcactttgccattttgaggtgaatgacctcatttagcattttgagataagagaacctcacttgagattttttgaggtaaaagacctcatttgagaattttgaggtgaatgacctcatttagaatttgatgaggtgaatgacctcatttggaattttgaggatttgtgattgtacttaatcttagcaattaggttgcct

SEQ ID NO: 287788 - DNA, 150 bp, Cannabis indica
tttaaaaataaaaaataaaatgagaaataggaagcatagtggccggccatggaataaggaaacaagcctctcacttttgcaactttcctattttatcattcctagtttcccattctccaaaattgccaattttctcattcaaccacataa

SEQ ID NO: 287789 - DNA, 447 bp, Cannabis indica
ctggaggccaagcaccaggaggagctgagggcggagggcgaggctactgccaaggccaaacgtgagcttcgggaggctagggaagccttggatggaatggctgccaaggtgaagtccctagaggtagttcaccaggcagacttggagtctagggccaacctggccgtggagctaaaggagctcaaggacttcaaagatcaagccttgaagaaggctaagaaagatgagctcctttctcccgtctcctgcagccggtgcgtcaagcgtttcgacgatggcgtctcatggcctggtctacaaatggccagaacatcaagctcgacttctaccccaaacccgcggagatgattgctaaattccaggagaagatgaagaagctcgatgccatgctggaggcacgcattggtcctcgccttcctcctcgcatcttcactttttttttttttt

SEQ ID NO: 287790 - DNA, 490 bp, Cannabis indica
gaaataaacacatataaagtttaggaaaccttacattgggtgcagcaaaatataatgactccttccgttcagatctctagcccttgattgctttctgtagcagagcattatcaaaatctgaacctggatctctttctctccttcttgagcccaattctccttcttgttgattggattcttcatagtcttacacactatgattgagataccacttgatgtgtgtgggcactcactctatcactcaaggctgaataatatgaagaagaaaagagagataaagtggcggctagggtataggaaaaaaagcttagaatttttctctgaaggaatgagatgcatcatcatcatttcctgaagccatcactacctatttataagtaaccacctaggtttaggttagaattaattagcattaaaataatagaaaaataaataggaaactacactaagtgtggccgacaatggattatggattgggcccactttgcaa

SEQ ID NO: 287791 - DNA, 834 bp, Cannabis indica
gaagcgtataaaggaggagctttatgcacaagcgaagagaagttacactgatacacaattaaggaacaaatacaatctgttaagacaaaagcacaaggatttcaagtctttactgaaagagactggcataggatttagtgtagtgactggacaagttactgcgccagatgaagtgtgggataggcttattcgggtaaaaaatattttcaaatgaaaacttattgcttgatttttaataagtgttggtatatttatcattattattttattttatgtaggttaacaagtcagctaaaaaatttagaaaaaagggttgtgtactttatggaaagttatgcgttatttttggtgataccactgcaactggttccaatgctcatccttcaactcggagtccttccataaatcttgataatgatgatgatgatgctatgtcaaagagtccatctattaggaatcaagaaagtagttttgatgaggatggtagcaaaagaagaggtaaatcaacttccactacgagttctcgatcggcaaaaaaagcaaagttctcactcgcattagcagaaacattaacagtgtataatgaaaccgcaaagcgaaagatggaagtgtatgagaactcaatgacatcgacaaaacatcacttattggatgagtgtatcgaagctctcaatcaaattgatggaattagtggagaagtatatgcaaaggctattgagaaatttgagagcgaggtgtctagagcattgtttctaaagatgccagaacatagaagaattgattggttgaactatttgaagtgattttttcactttgtttaacctttacacttta

SEQ ID NO: 287792 - DNA, 683 bp, Cannabis indica
gagttgactacaatgagatattctcaccagtagccaagtacaagaccataaggataatgctatctatagctaatcaatttgacatggaaattgatcaaatggatgttactacagcttttctacatggagacctagaagaggagatctatatggaacagcctaagggatttgagattaagggaaaggagaatatggtctgcaagttggttaagtccttgtatggactcaaacaagctcccagacaatggaatagaaaatttgatgcttttatgataaagcatggctttaacagaagctatcatgatacttgtttgtactacaagggagactctataaaagatgtcatctacttattgctttatgtagatgacatgcttattataagtcaagaaagggctaaggttgaaatggttaaggatctgctcaagacagaatttgaaatgaaggaccttggaaatgctaccaagatccttgggatttctattctaagagacagggataaaggaaaactaatacttagacaggaagattacattgagaagatcatagataagttctctatgagggatgctaaggttgttaagcaacctattactagtcagtacacactttctaaggaacaatgccctaagcagaaaaggaaattgaatctatgaaggatgtacctgttggaaattatttta

SEQ ID NO: 287793 - DNA, 506 bp, Cannabis indica
gaagagaattataagggtgtgatggtaattttttttttcaattttactttaataatagataaggttggaaactaaggttttcaatgaataattgaatttttgttataatgaataaatgagtgattcaattatgcataatagaggaaagcttgagattgtacttttgttactaacaatatttaatacatcaataataactaccaaccataaactcaaatataataactagcaaccataagtactaaacactacaatttgttctcatccatgtcctcactcatatactaaaaagaacaatgtactttctaatcatcaagatcaactacgtaaggctcctgcaaaaaaataaaaacagaaaaaagtattaataataaaaataaataatttatttgataaattacaaaaacttaactaattaccattgttggatcaacatcattatcttcatcattcactgttgctgttaaaaaaaaatattaattctaattaagaaataaaaaaatgta

SEQ ID NO: 287794 - DNA, 671 bp, Cannabis indica
gagttagtcgacttgcaacaaaagtgcaccaatcaacatggtcgatttcgggatgcttttcagggacttgtgccagtcgtcccacatccttctcttccacagcgggcattatgatgtcttttgtcatcctattcttgaagtctttcattaacttcccagcaaggatgagacaatcatgtttgaaggaatccggcacaatgaaccccgtctagtttgaaggaaaacaaacacggttagagtgaacatttgaattaataaaaacaaataaaaattctaacaaataactgcttacttgtatatctttccaaactttattttcagagtagggttgacttctttctaatttttataggacaaccctatcgtctgacgacatctgactcctaaagttgatacgagcttggcatagcttttgccgcagtattgtcctttatcattaacctcaagggccaatcttttgccttgatccattagcttggatatttcattcatttgcgtaggccctcgtgtaggtattactgttggacactctgcctctgggtctgaatcagatcctgaacccgagttggccatatctacaccattaacaaacaaaatttaaagttagctatatatatatatataacaagtaatctatacgaaatataaatgcataaacaaattgttaagta

SEQ ID NO: 287795 - DNA, 674 bp, Cannabis indica
catttgattttcaaagttgattgttgagaattgcttgaagttgggtgtgaattgaagctttggaattgtggattcttgagcttggaattaggtaatttcttgctgagtttgtgtaaagattattggtgatttctcttgctgaaattgttatggaaaaagcatgatttaagttgtatcttgcccttgtgattgcatgttcttaagtgtggttataatcttgatgaattgagtgtgttaatctttggatttaagttcttgagcatggattttgattctagggtattttctagtattgaatcatgtgttattgtgatgttgtgttggctggaaaattgtagaaatagttgaaggtgatgctcttgttcaaagagttggatgtgccatgtttatgcatgattttgagttggcttttgcaatctgaattctggaattttaatgcatgtaatatgttaaaatgagtatctattatgtgttaataattctataggtcaatttgtgaattggttgagaatttggagtgattaggttgagatttcttgctgaaaattcgaagtttgcttgctggtttctgggttctgcacccagatgccgcggcatgctctgagcatgccgcggcccgcccctcttggtggaacctgggttttgtcccaggtgccgcggcatggtctgggcat

SEQ ID NO: 287796 - DNA, 636 bp, Cannabis indica
tcttcttcctcctttacttcttctaaaaagttttggtcccgtgtgtggtctcctactattccccccaaggttaaactgtttatctggagaatgatatccaatgttttacctgttgcaacttctcttttttctcgaaaagttcttgattctcctctttgtcctatatgtaaactagcccctgagagtgttaaacatgctatgctagattgctccagatccagaaaggcatggagatcttccaggtttgtttcttattatgatagtaataagcacatggatctaaatgacttttttattgggtttggtttttgatcaggataaagattctcttggtattctgtattgtttttttgtgggcactttggaaccaaagaaataatgtcttacataagcaattttctatttcccctaaagatatttttgattggagtcttacattatttttgccagcatttagatgcgcaatcaaaacaggtgccaaggccacgttcagattgtaactcagcacatgcaaggattcaaccatcttgttctaatggttttaaactcttcacagatgcagccacggattctcatagaaaaagacatagtattggtgtggttcttttaggatggttgtaacagagtaaaagcagg

SEQ ID NO: 287797 - DNA, 533 bp, Cannabis indica
attctaggctcagtctcttctatgtattcatctgatggtgcttctactatattcaaacaactctcataactttcgttatttgagttattatccttaaaactctctgaatcctgcgccattaaattatcacatagagcttttaccatgtccgccaatcgattaatctcttttggaagtgatagtatatcctcctcttcttcaattggttggggtgagtttggacaataaggagggtattgatgactccaaccttgaagtgatggattccaatgccaatcataatcaaaatctgccatatcattcaacagatttattgcttcatggcctctccttaacaaaggctctccagtaacctctgctccataatccacccaactttttgtttcatcatcaagtccattataaaagagccacgtaaaacatccacttgagaaagtgggataacatctctctccaagctctttaaatctcctccaagcagaatagaatgattcattgtgttgttgggcaaaatcctcaagatatagcatctg

SEQ ID NO: 287798 - DNA, 795 bp, Cannabis indica
aaaataccaccggcagaatgcagtaaaaatcatataatataataaacaccctaataattaatagtctaacttacataagaaaagcatgactgaacttatataaaaggtactattaaatttaaagtgcaatttagaagaagagaaatttaatataataaatatagaaatgaagaacaaagagaatcaatatattagaaaaataaaaattacatgaacttacacttgagtcttgccaaagaaattagcctagaaaaggcattgtctttacaccaaaattaataaagtaaaataaagaagaaggaaagaaaaagataaaattttggtataataacactactaaaatctgatgcttgttactctaaactagtactatttatagagcctcagtctgcctccagctgatgaattttttcgtgtgaaaaataatggaaagtgtggcttcaaattcggaagaaggtgggaagttgagcttatgcgcaagtggggagacatgatgatatgatgcgcatggagtaagtggagcagttgtttggggttcgctcgtcacaattgatggtggactacatgttgagttgggctataccaacttaattccagcccatgaattgagatccaagtgacccaagtgataaatatgcatataatgatttaagaagtacacgtgtggattttgttgaagtttatcacagcttcatttctttgggctttcaaaacctttttaaatattaaaaacataatacaaaagttaaagtaataatattattttcatttctaataaaattttcatttaaaact

SEQ ID NO: 287799 - DNA, 576 bp, Cannabis indica
gtaatagtatatatatatatatagtccagccaagatgagatcagggtttcattcttcttcttttggtaactacgaactagtactatatattgttattatatatatatatatatatatatatataatatatggttcagtagttactcaaaatctggaaactgcaggagttagtgtggattggattcaccataaaaagataagaaataagaaccataataagtagcatataataattaattatttaaagtaaatcatgtgtgatgtatagtaaacttgtacgtattgatatgtaattaagtatagtaattgctagctaggcaaatagtaaaccaaattaccatgcagagaggcagaatattactatgtgggacccaattcactcaactcaaacatcaaactgtcttataacatctcaaccttacctgctcctgtcccaccatcacaacacaaaccctattatacctcaatccctcatatatatagggatatgattttgtcccgtgatatacttttacggaatgtattccgtggtacattagataggtctcatggtacattaaatgagtgtcagggtac

SEQ ID NO: 287800 - DNA, 548 bp, Cannabis indica
atataaagtatcaggaaccttaagtttaagtttcaacttatctaaccgtaccatttcgccattaccaactttaagtttcaactctccggatttcaaataattccagttttcaagcaattgcaatgaacaactgacatggtttgtagatctagaatcaagaatccagatgaatttatcattctctaaaatacatgattcacaaactaaagcatcattgcttaaccatttttggattattcttattgtgggttcaatctgttgtgaaggataatctaaggaagtggaatcactttctctattcttctcaactgagcttgaagtagtaggattgtcggagctatgaactctttgctcttcagattgaacaattcccagcttaattagctgctttctgaaatttcatgttcatcatgagcaagtgtgaagtgttactctaactaggagtcttcttcacaccttcaagttcattcctaaaggcatattatagatgagtgttgggatgtgggttgtacatttttgacactacaaatatcaataaacagaagtaa

SEQ ID NO: 287801 - DNA, 906 bp, Cannabis indica
ttttctatgaattaaaataggaataattatgtcataataattaaattggattattttaagtaatttcaattcaatatagattgatttgattataataaagttttaccataaataaatatgtataaaaattacttttttgggataagtacaataaaggaatttgtaatattttaaaaatggggacattaataatgaattaatatggttgattttgtttatttagggaaagattatggaattaatgggtcattaatgcttaataattaaggttattttgtttcattgtattgaattacactaatcattgataatcaaggttattgaagtacattattcgttgcttactttattattgcgataattttcaaagtaaattttgatattctatggatgggagcattgcaggattttgttattactagattacatatcaaaatctttaggttttagggtagtaatcctaagataatgatgaagtaaaatacaagagttaagttgctactagccaaagggtctccctttggctagttatagtattttatatggggatctagtttttcaatttttgagttttgagttttgatcggattgattattttctaataaaaatttttggtttttgatttgttttcagtttattcatattcgttagctttggtgacggctatcaccaatggggaggtgtatttcaacaagttaggagcgttgtttgaagatgttatagctttattgtctaaatttccgggggcagttttgtcccatgtggcccgctctgagaatttagcggcccatggcttggcaaagcatgctctgcggttagacgatgagctatcctggttcgaggaggttccagcgccggtggcggacgtgggcgtcgtaaattcatgagtgattttaatcactttg

SEQ ID NO: 287802 - DNA, 534 bp, Cannabis indica
cctgaacccagtcccaaacccaaaagtggacctgaacccgtacactctgacccaaaattggaaccaaaatcagaagttgacagggactggaactaggacttggacttagaatcataatttaaattggacctagatccaaaaccgtaacataaccaggaccccggctccaaatcagacctagaccagaattgggagccggacccggatccccacccaaacctagacacgggacccgaacccgaacctgaactcagactcaaacatggaaccagactagggacaaagaactagggtcgggaccttgaactacaccccagccttgatcccaaacccaaattcagaaatgggacacgggacctgaacaagaactagaaacagacctagacccgtgacagtgatctgaatcttaactcgggatacgcgtaacagggcctggaacaggccaatagtcggtgtctagatcttggactcagactaggaccagaacaagactaggaccgtgaccaggactcggacccagacctagaactgaac

SEQ ID NO: 287803 - DNA, 922 bp, Cannabis indica
ttacctcctcgagccctgggaggggcctgccaggctggcggttggagcggagtgcgagggagcttgtccatttatccctgagggatttccaaaatgggatgatgcgggggccaaggcctggccctgactatatccgggagtagcagagaactgtatgccgctcattggtggagccgcggtcgggacagtacccgagggcggtgctccgggcatataccctgctatcccggtgggatagtatcctccataggccactatttgggcctcttcaaggttgatatacttttggactcttttctggaagtcctgaaggcttgcagctccttcctgttgtagttcgttccagaatggagtccctgtacggatgcctgcctggagaagggcaagttgttgtccgtcatcaactttcttggtcttcgaggcttcctctcggaacctctttatgtagtttttcaaggtctctgtgggcagttgcttgatgttagtcaaggcactgacctccaggttgacctttcttgcggcgacaaactgtctccggaagttggtctgtaacttattccaacagcccacggatcctggttccagcttcttgaaccattcctccgcggacccgcttagagtaagcgggaagcacagacatttcgcgtcattgctaactctcatgaccgtcatgacacggttaaaccgcgacaagtggtcgcttggatccgagttcccggtataagctgccatttctagcatcttaaagtttttggggagctctgcttccatgatgtgcttagcacatggctcccggtcttcacagtctgagtcgaagtcgtccccttttgtctccggaagactcgggcaatatcttttcggagtatggcgagttccgccatgattccttcattgaacgtccccatggagactgcgggtctgt

SEQ ID NO: 287804 - DNA, 1180 bp, Cannabis indica
ctttgattatgttctgctacagaaaggaatcaagggctagagatcttaatggaaggaggtcattatattctgcttgcacccaatgtaaggtttactaaactttatatgtgttgattttcattgttttagaattaatattagggtgttaatgaaacatacatggtagtaaatctagatcctggtaaaatatttccaacatactctagccgtaccgatgtgatactgtcggatggtacgaagccaacatacatatctaatgtaatctaacaggcttcctaacatgcacgctaaacatgtaaatacatatgcatactgttatactaatcttacctcgattctgaattcaggtgtgccggtcaacctgagtggaacaatctgctcggcgaattacaggctcctaaatcataataatcacaacactgataagtgatacgctaaatcacttctcggggacttaaacttgaaactaaaagtttccctatcgataaacaacatggcaataccctaaataacacaaaaatgggaagaactagggttcccaaatttgccccaaccggtagactggttcgtcaaccgaaattctggttctgggaaaaattcctggaagccaactggtcgactggttcctacaggcctccctgaaccggaattccagttcagtgcaggaatttttcaaaattccataacttgaccaattcaaccccaaaccacctaaaactctccagacctgctccaaataccccaaataacaattcaaaagcaacaaaacaacccagcatgcacagaattaaaatccaccattaaagctccaaggtttgagttcaaaactctaacttggttaaatccaactaacatgcatctaaacctgatctaatccactcaaatagacatgaataagcctctgaaaatagcaacaaccagcacagcaagctaaacaacattttaccataaaaaccaaagttttgagtctaaagctttacccacagttaaatcccaccaaacaataacaaaaccagcttgaatcctcatattaaaacataattaatcatctggaaacaacaacaattaatcacagcaaccacaatagcaaaaacaccaagcatgcaaaactaacatttttcttacaactcaagaaacttaaaagaatagtcatgagcgagcttggattatactttgaatt

SEQ ID NO: 287805 - DNA, 661 bp, Cannabis indica
tgtattttatgatggggaccatccagctgggttcttgcccaaccgttatcgtggtctcttttattttgatgcttggctctgccaagcgttccactggtactacccccaactcttcgatttcgctatctgaggctaacttagccagacagtccgcgtgagcgttcttttcccgggggattctttctattttgtagtccgtgaactcgtggagtagttcccggactattgttacgtacgcggccattcgctcgccgcgtgtttggtattctccggatatctggtttacgaccagttgggaatcactatagacttccactcttttggctcctacggcttttgctaatttcagtcctgctattagggcttcatattcggcctcattgtttgaagctgcgaagtcgaaccgtagggccgcctggagtcgcagtccggttggtgatatcatcgccactccggctccggaaccattttcattggaggctccgtctacaaatactctccatgtggggattggcggtaccggcatattcgcggtagcctcggcttcgttgcattcagtaatgaagtccgccaaggcttggccttttatagaaattcggggtatgtagtgcaagtcaaattgacttagctccattgcccacttgaggagccttccggatgc

SEQ ID NO: 287806 - DNA, 732 bp, Cannabis indica
gcgactatgttcacgataacgcgacatcgtctagaaaagttaaggattttctgttaaacgtgtttttcacgacgtgttgtcgacatactagcgacataattagcgatattgaatttagtacttaggtttcatgatttttatcgacttgtatgtgtgtttggcgacatgttttgcgatatattagcgatatataacagttatacataggactagttttgcagcctcttttttgtgtttagcgattcattagcgatatattagcgacgtatttggcgatttgatcaggattatgtttagcgatgtatagcgacatacagcgacatgtttcgcgacatacttctaacaaattttttgacaattttgcagatggctcctgaacttaaacttccaattacctctcatttcacgggacgtcttacctatcggggtacagataggttcagatatatcaaggccaagtttactgagatggatttggttgagacagtgaaggctagtcctttcggacacttttgggaagctggagagttaactttctctggcgcgttggtccacagcctcctcttacgaaaaatgaaagtggacacagaaaaggaggatgaggtttggtttcatgtagggagaaatgacatgagattcggacggatagagtttggactcattactggcttacctatgagtagtgcccctacagacgaggaaatacacgccaagtccaacgaccatctagtt

SEQ ID NO: 287807 - DNA, 525 bp, Cannabis indica
gaaaccaattaagtcccaaaatagtctaccgagaataagatcgaatacaaaaaaaaaaatgaaagcacataattggaataagtaaaaattgttataaatagtattaattatgtggatgtccaaatcttttatttattaccattaatgtaatcaacattccctttttcttagtttccctttctcttagtttcttaatatttgactcttgtatgtgtataaataggagatcacctattggaataaaacactcagaaaattctcatctcttctctattttctttctctaaattataatattacataatactaatatttcataacacgttatcagcacgagcctctaaccaaggtataacaatatttttgttatgtgatctcgaattgcttcaaagtcatgatacactaaatatatatatgtatatatatatactcatctgactgaaacacattcgagttagttattttttttaatgaatttaatattttatacaatatatgtctatgctttatatatatctatataga

SEQ ID NO: 287808 - DNA, 529 bp, Cannabis indica
gtttcgaaggttttggctaatcgtcttaaagtggttctccctattgtcatctcggatactcaaagtgcattccttcctggaagattgatctcagacaacatccttgtttcgtttgagattatgcattatcttaaacgaaagacaaagggtaagaatggcttcatggctcttaaattggatatgagtaaagcttacgatagacttgagtgggggtatctgcgagctgttcttctgcgtatgggcttcgatgggagatgggtgaatttgatcatgcagtgtgttttctcggtttcttactccatagttcacggcggtcatgagctaggtcctattgttccaggccgtggggttaggcagggagatccgttatcctcatatttgtttatcctgtgctcagaagcttctccgctcttattcggcattatgagacggttggtttgattcatgggtgtaatgttgctagaggagcaccgaaagtatcgcacatgcttttcgccgatgatagttatgtgtactgtaaagctaatga

SEQ ID NO: 287809 - DNA, 542 bp, Cannabis indica
aagggaacgggctccggaggaccagaacccatccgggaccgacctaggaaatctcctaagtttgaaaaataaaattccttcaaacgatccccccaccgggtcgagggcatcctaaacctatacagacgctcgtcgaaccctacgggcctacgactggcatattcgccaacagaaggaacataatgaattaccaaaggagacttaccgccggcgccggaagtgctggcaccaggagccccagtgtttggctctggaaccgaaggctgtggcctgggagcccttctctccgatgaatccccaatgtgaaggggcttcccggcaatcgcctgacttcttctctccaccgggctccccacacggagcgccctcccggaagccgcctgggccttagagtacgccttctcctgggccttccggtagagatactcctggtatttcttctctgccgtggcgatgatctcgtcccggaaggtcttctccgcgaccggcgccctcacattgggacagatgacccgggagaggttagagtcctccacggattg

SEQ ID NO: 287810 - DNA, 547 bp, Cannabis indica
tttactaatccacattactagagcggtcattacaatttcggtcacctccggcgtctgtttgatgaatcgtcttcaccactaaactcagctcttcgaggagacaacctacactaaaccatttttccaggttcgctactttgtccggtgacatttttgtagctccgcccctttctggtgactttccggtgacatcgtgtaccgttttgacaaacggttgtgatgggtgtgatctactcgtcgaggtggtcatttgatatatactactcctattttcggtgacatttccggtacaccaatttttaccgccaccgattgttaatgtgcaccgcttaggtgaggcttcagaaacccaaattattaatatagtcatattatatgtcgttggactcggttttgaatgtagaatgcgataatgataattatttaaccatttggtggtataggtgagagtaatatgtaagtttggactaaacaattggagctcgagacttaagagcttacgatcgtcttttggaaaaaaattaacgactcaggagaggtagggact

SEQ ID NO: 287811 - DNA, 842 bp, Cannabis indica
ataatattacatattttattttttgagacaggaaaaaggaaaagtgacagaacaaagtgaatatttatagttaagacttaagtttcttaattatagattgcaaagcttattgagtatcaaatatttatcaaataaaatttgattttggtataaatgtaaaaaaataaagaaattaacgccaaaaatatattagtttaagtctgatagatcgatgtgatttatggatctactctaatttcaaaacatcacaaaaatctttctttattgattgatgagcaagaataggtacaatacagctcgagataagattctctgttgagttctcactaagtttttcaactctcacacttgcacttaaaaatcttcttcatctataaaagatttttcttacaaaattcaaactcaatttctctctcttttctctgcacctctctctctacctctcaatttttctttcttaaactctcaatctcatgagaaccgagttctcaatctcatctcaaaataacaactcaatgtggtatttatagacttaggataagatcctaataaagtgggtggctgcaagaagtgaggttgttaagctagttagaaataactaacttaaccaactcctctttgagaaaagcctccagtctcaacgccaacttaagtattagagccttcgggaacatatatgagctttcggactcacgaactaatgacactcgctgacgctttcggataggattgagcctgctgagtcgattatccggaactaccattccaggagagacaactacctactagactccatcccacagtgaggctagctttcattccactcagctgtatccaggact

SEQ ID NO: 287812 - DNA, 650 bp, Cannabis indica
tttctgttgtggattcagaaaacaacaactcatggcaatggtttttcacaaaagtgagagaaacatatgggattagagaggaacagtgcttgatctcagatagacatgagagcataagtaaggcagcttgtcaagtatttccagaaatcacacattgctattgtgtataccacctgttaagcaacctaaaagcaaccttcaagaagaatgcaagcaagctggataaaccattcttcgctgcagccagagcatacacagagaggaaatttgaataccatatgagcgagttggacagcttggacatccgtgtaagaccatatttacaacaagttggataccacaaatggtcaagataccactgcaaaaacaacaggtattcaactatgacttcaaacattgctgaatctctaaatgcagcaaacttggcagctagagagctaccaatcacaacactgatggagtcattgagagcattgattcaacaatggacatacacaaacaggaaaaaagcacagaaaacaacaacatttttaacacctacagcagaaaagaaattagtcgacaactttgtggaatcattgacagaaaatgtaatgacatgttaaatattttagttgcattatagtttctttatagtttgtttttcgttg

SEQ ID NO: 287813 - DNA, 675 bp, Cannabis indica
ggcgcacaaaggcttagacaaatgtttacaagttatctggtccacgtcgtcccctatcgacgtggtccacgtattttgggcgaattctggagacaacaatagtgaataaaaagtggagtactttaataattttatagatatattataaaaatatttataatttatatttaatttaatatataaaacaataaaaaaataaaatatatgtactttatttaaaatttaataaataaatatctataatttaggattcttttactaataattaaaagttagtttttttttttttttttgaagaaatatctcaaccaccaaaacaattagcgcaacaagcacattatcaaggtgccaatgaggatatattcaaagatagctttagcaataaacaactgttgaatacaactaagattatctaaccaccaaacaatacaattatgtgtcgataaagcaagtttagtcaaggtacgagcaatatcattacaagtagggatgtacagtgatcggtttggacagtttatcctatatattctctaacccaatttaaagttcggattgctaaaatttaagtgcaatctgcacaatttaaaaaaaaatctataaaccgaccaacggtttaggcggtttggtcgggttaacccgcccaaaccggctaatttttttttttagttttaaagt

SEQ ID NO: 287814 - DNA, 653 bp, Cannabis indica
  modified_base (48)..(48): a, c, t, g, unknown or other
agtatgctagtttcagatgtatgaagtatacattggactgggacgganatttgagcttggtgaagatattataatcttatcgtgttgcttttctaagtcaatatcactggttcatcttagatcaaaagatctcaatcctgaaatggttaagttcaatttgagagtgttatttgtgttctttgatttgtagctaagcctaccttttggtccgggtaaaacatacattttgggaacatgctagtacaattgagtgggggcgctaaacatagatatggaatctatagcttctatctggacatagaagtgaaattatgatttccttcgagcttggcgtaaaagagataaatggaagagctcttatttcagtgattataatgtttactgaaatatcatttataggaagttaagcgttttaagaataaaatacattgagtggtgaaacggtaaatttatccctactcggtgtaaatcgtataaagagaatctttgattattgcgattagaacgattgttaaatatttatagcgtatctatatcatggaacatatagaccgttctatataactgagagtgcaattccaagctctatagtggtgcaatgaggaattaataagttagggaatttacactgtaaattttagatctgcttattg

SEQ ID NO: 287815 - DNA, 541 bp, Cannabis indica
cgtatcgcctgagaatagctgcaatgaaaggatggaaggggaccgataccccacatcggagaatgggtattgagactaccacatcctctgtgggaataatcgcagggttgggaaacggaagatgcgccctctgagacggtttgggtcgctgaaacgcaagtcgcagcaaatttaacctcacaaaggtagtgaaatctgatttggaaaccctcgaaatcagatcttcacacgcgaagggctcattcggctgggtatcgtcaaccgagtctgtcccgctcccttctgcctcctcttcatcctcgcctgactcgcgaactagggtcgtccagtcatcatccatctcctcgacctcgacgtcaggagcatgcctcgagtgtataaggtagtcgcgggccgacaccgtggactcgctgtctcgaatgtcgatggtcccaggttcggtgagttcctgcaccatcctttcgatgtctgcagaagacatcgggccaagatctattggtacggcctcctcttttgaaatcgaggttgggagaaagctgtc

SEQ ID NO: 287816 - DNA, 1006 bp, Cannabis indica
atagttaatccaatatatacaatataatgaccattaacagtcgttcattttttttttagctattttttgtctctattactatgaagagaaaaagaaattatgattatatagtgtaattaatagctttaatatttagactatttgtggtatttattgatctattatctatcttaaaagaatacttttttttacaatgcaagtcaactaattatttaaaacacagaaattggagacaaattgtaaaaagagaatctttccaagtcgattgatgtggctcctgtcaacgctaagctataattcttttcttaattatatatagatatatacttgttgtttaagttttaattagggtagtttagaactaatcacttgctgggttcacatgctttttgtttttcataaatatattttaaaattatcaatttattaatactcaacttctaggggaatagaacacataaattaatatatatatatatataaatacaaacataattaaagttatttatattaatcattaacaactgtatataatgccaaacaatattgagtaatgatcacacatactacaatttccaaaatttaattataattcataattagctttcgttttttattactttgaatatacatatgatatgactaattacaaaacatatatattatatatattgaaagaaaactagctagtacgtagttgaattataattaaattattacttgataatcatcatcatcgatgtgtatgtataatagtaacccctttatatataatgtttatgtaataattcgaattaagtcaacatcgatcaccacttattgattaagtagtcaattatatttgtatatgtgaaatttgaaaatgtacactacaaatatatatatgcttgacaacgttgaaagcacaataaactgaaagcctgataattttttttagtcataacataattttttttgtgactaaatgtgatttttagtcacaagaaaatattacttgtgactaaaa

SEQ ID NO: 287817 - DNA, 512 bp, Cannabis indica
atatccatctaaccctaattaaagtgtttagttactcatgttcaatgaagcacaaatacacatattaactgatagaaaagagatgaaaaatacagaagagaagaaaagaagaatgctgaaaaatcctgagcagtatgtcttcaatattgcagctgatctccttattctgtatctgaactctcactttttctctctgagattgcttgcttaaatccactctctactgctctttatataggtattcaggtccctcaaaaggtggaaaaccgcactgtttaaattccattcggatttgaaatatctggaaaaatctcacgccagcttttccagatatttctctctgttgacaaagaggcgggccgcggcatgctaagtccatgccgcggcccgtgtggccattagattgcttccgtggacttcttccaagtaggcgggccgtggcatgctaataccatgccgcggcccgtgttgatctctgcacccaacttccacttgtttctatctttatccga

SEQ ID NO: 287818 - DNA, 470 bp, Cannabis indica
gaagactctttaacatggaactaaaagctgcaggggagaaagactgttacagtctgaatgagctagaggagtttcgaaatgtaagtcttatgaagaacgccaaaatcttacaaggaagaactaagaagtggcatgaccaaggtctagtaaggaaggagcggtggagttaaaaaggtgttggtccagcaactttcaaagtatggacagcgtttaaagcttaattgggacgtcaatttgaccaagccaagtccgccatgattctggcgccactttgaagaacaaggctcaacgtaccggctatatgacaataaagacagcgctcttagggaggcaaccctaagttgttttctttaatccttccagactttttgattatgtttttaatgtatgctttagtattttttagtattttcaaattttcagattagtaccaagacattatttctatttagttgaatcgtgaaaagcgt

SEQ ID NO: 287819 - DNA, 532 bp, Cannabis indica
accgtcgtacgaacgttcgagactcagtaccgtgtgggacacggggattagggttgttgtcaggggtatgggcgtctactcataacccgggatatatgtatgttatatgatttatgtttttcttactgaatctgttgactcacagtgctatgtttatgtgtaggtgggcaaggccaaagctaaggaaccgtgaggaccagcagatgaagattgtacatgtcgcggcggttaggcctggagcgtatgatcctcggaacatcagggcttttgtagttagtcgttgggcgacgaatattttgtaaagaactagtaaacttttttaaagtgttttctaaatgggatcccaacatattttgtatgctatgttataagtatttaattaaataagccaaattttaattaatcacttttttcattaacctcattgattagcaacgagctgcacagtacgtttaaaatcatgtcaacacgcctatgatagttagggtgttacaacatcaaagaaagttcaagacatcattgtgaagaacat

SEQ ID NO: 287820 - DNA, 911 bp, Cannabis indica
gaggtatgaattattttgggagaaaataagacacttcctgtcattgtggcatcttccctatcttctgtagagacagacaagctattacgggttctaaggaagcataagaaagccattggatggactttagcagatattaaagggatcagcccctcaactgtaatgcatagaatcttaatggaggaaggagtgaagcctaccattgatgcacaacgaagattaaatccaccaatgaaggaggttgtcagaaaagaagtcttaaagtggttagatgccggggtagcgtatcctatttcagatagtaaatgggtaagtccagtccaagttgttccaaagaaaggagggatgacggtggtgaagaatgaaaagaatgaactcatcccaaccagaactgtcacaggatggagaatttgcattgactaccggaaactcaacaaggccacaagaaaagatcactttccactcccattcattgatcagatgttagacaagttggcaggtcaagagtactattgtttccttgatgggtactcagggtatcaccaaatagctatagcaccggaggatcaagagaaaacaacattcacatgtccatatggtacttttgcttttcgacgaatgccatttgggctgtgtaatgctccagcaacatttcagaggtgtatgatggccatattttcagatctaatagaaaaatgcatcgaggtgttcatggatgatttttcagtgtttggttcatcgtttgaccaatgtttaagcaacttggaattggttttaacaaggtgtgaagattctaatttggtgttgaactgggaaaaatgccatttcatggttacggaaggaatagtgctgggacataaaatctcgaaagaaggtattgaggttgacagagccaaagtatctacaattga

SEQ ID NO: 287821 - DNA, 712 bp, Cannabis indica
ctctctctcttttcggcccccttgagcagcaaagaatcttagtgtttccttggtaattcaagctattttaacaagatttagtgacctcaaattgttggtaagattcttatagctttcttctaagtttcttaaattttaagaaaaatttgatagttgcatgcttcctaatttgatgttgttgctgctgggtttatgggatgttttctgtagtttatataggtttaaattgaatgaattaaagcaggtttgatgcatgttagttagatttaaccaagtttgagtttttgaactcaaagcttggagctttaatggtgaattgagattttagttgctgtagttgctaaagttgttggatgttgtttacagagggttaattatgagttattatgttgatctatgcttgatttggttgttgttttgttgtttgagcaagctttggagttttgaactcaagcttggctcattaatggtggttttttattttgtgcatgctgggttattttattgatttcgaaatgttatttggggtatttagagcaggcctggaaagtttgaattggtttggggttgatttggtcgagttatcgaattttgaaaaaattcctgcactgaaccggaattccgattcagggaggccattaggaaccggtcaccggttggggcttccaggaatttttccagaaccgaaatttcggttgaggaatcggtctac

SEQ ID NO: 287822 - DNA, 449 bp, Cannabis indica
gtttttctgggaggtccgaacgtcatgaaagtcgagcagtggctaacggtgattacaaagatactgaactttatgggtgtcaccgggaatgacagcgtggtgtgtgccacctttcagtttcaagaggacgcgttagtctggtgggacatggtgtcccatattcaggatgtcaccaccatgacctgggaaaggttccatgaactcttcaacgcgaaatactataatgaggtcgttagaagtgccaaaagaaaagagttcgcacacctgacccagagagaaaatatgagtgtgacagagtacactacccagtttgatcggttggcgaggttcgcctcgagaattgtgccaaccgatttcagtaagagggaaaaatatcaggatggattaaatgtgaagatcaagcatgaccttatgatcactacggatgacaagactgttggaaattattt

SEQ ID NO: 287823 - DNA, 592 bp, Cannabis indica
ggttcacaattttttcggaccccacacggggatccaactcgtcttcttcagccatttctggctcaatggtttcccggaccatcagtacgggtaggtgggtggcaacgttgtagcattgcctcgcttccccctgatttcctctcaccgtacctatcccagcttcctgggtggggaacttcaggcacaagtgtcgtattgatgtgactgcaccaaagtctaccaaggtcggtcggccgaggattgcgttgtatgctgtcgggcagtccaccaccacgaaagtacagtacttgaacgtgctctggggggtgtctaggcacaaggacactggaagtctcactttccccattgggataagtggtgttccattaaaccctgtgagttgggaaccactgggtgagaggtctcggtccgtcaggcctattgcagtgaaggcctccttgaaaagtaaattcacggaactcccgttgtcgatcaggaccctggccaccacattattggcgatgggagtctctatgaccaacgggtcatggtgaggaaaacgcaccgtcttagcgtcttcttccgtgaatgtgatgggttgatccatcagtcg

SEQ ID NO: 287824 - DNA, 539 bp, Cannabis indica
gcaaactcatgttaaggagtaccgccaccgtttcttcttctcctctgggttccgagcagtggagcacccggagcttttcacggagtggataaggattcctccctatgagcggaccgcgcctacgcaggtctttctccggagggcccaggtctttgcaacttatgaccgggcagaacttgatgtcggaggcctggtcacgacggagaattgccggaaggccaagctcatcctgccgcaccaatcagtggaggactctaacctctccagggttgtctgtcccaatgtgagggcgcctgccgcggagaagatcttttgggacgaggtcatcgccattgccaagaagaagtaccaggaatatctctaccggaaggctcaggagaaagcttactccaaagctcaagtagcttccgggaggccacttcgtgtggagagcccggtcgagaggagtagccaggcgattgctgggaagccccttcgtattggggactcggctgagagaagggatcctaggccaaagccttcggctcaggagccgaaca

SEQ ID NO: 287825 - DNA, 176 bp, Cannabis indica
aatccaaacacaaggaaggagtttcgggctcagatcttggtgatactatgctacaggaaggagtcatttaattccgttgcacccactgtaaggtttctcataacttttatgtgtttatttacattgttttagaaattcatattaggatgttaaaaaaatacatggcagtaaatcta

SEQ ID NO: 287826 - DNA, 456 bp, Cannabis indica
aaaaaacttattctccttaggattagaaaacctattctacttaggattagaagaggaggtgatttttctgctgcgtcaattgatagtattttggctataactctctcaatattactcagaattggacgattcaggatgttccggaaagataaaagagagatctagaatttttatgttttgactttttccaaaatataaacaaaacatagtcgtattcaggcttgaagtttcagctttattttcttgcacaagtttctctattttaaatatcatatttttgtgaggtattttttatctttttcccatctttttcctctgatatttttctaatcttcttttattttaaatatgcaaaaataaaatattacaagcgtaaaaatactctaaacatgattaaaactcaattaaaaatatactaaacttaatctaaaattaatactaaaaataacctaacaa

SEQ ID NO: 287827 - DNA, 639 bp, Cannabis indica
cataaaacccaacaaaaacatataggtttgctctcaaaaattttatcaattcagattttacttcgagcaataaaccttttctgatctttagctttctggtcgggatatctggatcgatctcgatctcttctaactcttctacaggtccaacattgttgcttgggtccccaagtcgaggatccacatcttcatctctgccttggaaaattccctacatggaaatgttttttcccttgtctatgctctggctagaggatatttccttcttacccttggccactgcaaggttgtaacattccctagcagactgttggtttcttcttagacaccctaccccattctttgttggaaacttcaggcatgagtgaaatactgatgtgacagcctttaagtcatacaaggttggccggcctagcattacgttaaaagctaaaggaacatctaatatcaggaactgtgccatgatagtcatgttcgtcggagcttgtccaacagtaaggggtagacaaatttgtcctagaggtgcgactccttgaccggagaaaccatagacaggctggaggcatggggttagatccttgcattggagtctcatcttttcataagcagttttgaacaagatattggaagaggctccat

SEQ ID NO: 287828 - DNA, 720 bp, Cannabis indica
cgagtcatgactccgggaccccccccaaggcggaggagtatacagtgcctcatggcattgtgctgactccggtccccggagatgaggagaggcaggagcttcggatagccaaatataattatgcccttgacgagtacacccgggggcacgctgaggtggaggccttgaggagggtcttacgagaggagttgcaaaactctcttaacgaggagaacttccggaatccgtgggatctgaacatggaccccctgacggactggttcaaccgtttcctcgggcccaccttggccccttttgcctccgagatgaccagtgagtacgtctcccatctgactcgattcccgcctaaacggtacgctgcttgtgcatccttgaactccgtctaccaggttcaggacatcagccatgccctggctgcggtaagtactttgtgatttatttctttcctcaatattttacttaaggctttcattctcactcttacttccctttccagattactgcggagaccagccgcctttccaagaccatagttaatcatggcttcgtcttgtccgaatttgggggcatagacgaggtcgtgaagatcctgcaggacctgtctgctgaaaggcgggcgttccaggaggaggctgagcgaaaggaggctcttgctaaggcgaagctcgaggaggaggctaaacaaagggaagcccaggcggaggcgatgctccgagagga

SEQ ID NO: 287829 - DNA, 903 bp, Cannabis indica
aaagaagttgaaatcgcgaagaagcatattgctcagcttcaagaagacgttaagaaactgaagcaggatgcgtcttccaaagccaaggaactagaggaacttcgtaaggccaaggaacaggtcgagcttgaagccaaggcgaagattgaagagatgtctcgcgacctggaaactgagaaggagaacggcaagaaacagtacgaccaggcggtttcagactacatctatactactctttccaagattccagactttgacttctcgattcttggagcggaagccgcagaaatggccgaggcttttcgcgctatgtcacccacaccaactcaaggtggtggagggaacattctcgaggagactgaagtcgcggaggtggaggaggtcgagaacgaggtggccagtaaaggcgcggatgaatctgttcctgctgctcccaacgcttgatttttctcttctatgtttgaactatttttcttttgaatttgctagttagttttttatgcggtacaggggtactcgcactctgtacttagacatatttgcaatttattttggacaaattcatatcctcgcggggataattaatgtttaacattttcgcagtacacgggtactcgcgtttttatatatatatattcgactttaattacagcttggtgtaataagtagaaaatcttacaagacttgacaaaatttgtttaaacttgaagaattaacaaatatgaggcatttcctttatataatcaatagtacattatggcatatatactcccctatacttaggatttttttttttataaaaaatgtctaagtataagtacaaagcgaacataatttaataatgcgagtactattgataatataattttaggctttcgccattccaagctcgtggaatcgcag

SEQ ID NO: 287830 - DNA, 1026 bp, Cannabis indica
tttttttgtacgtgtttgtgtgagagagtttgtctttcttcattttgttacctaatgataatggtttcagttaactttattgtttagcatttatattttgttattacttctcatattgtcgaaattagttttatagggtttacaagttcgaaagtggtttcattagttttgagggttctgtcatgggttgctctattttatgatgttattgtatatgttatgttttttatttaaaatatcatattttgttgtattaaatttatatttatgtaaattaggttttttattatcatatttatttaaatatttctaaaaagaaagcttcaatttgattcgctgacataaccatttttggtgaatttttcttttcagatttaaggttgataaaaatagcaatctcatattttctcacattagcatgttacctaattataacttataatagaaagttacctattttgttagtattaattttgtaatgttccaatctatgatgctagtacaacaaatgatccatattcatacatatatatctaattttatttatagtaataatgctaagtaatgataaatttagtagtaacagatttaattatttaataactcaattttattgccacgtttatcgatgaatgaagggatataaaaaaaattacatttcaaatactaaatatagttatgttagaaaaagaaatattatgaatagtatttactatatatgtcatgaatgaatctacatatataaagaacaaagtaagacgagaagagatcattcttacttatttatttaatattgaaagaaacaatgggatttagagagataattgtgattatgctaatttttgctatctctctttcatcaaatacgtgtgagggactctctgaagacaaattagtaagaattaaaagtcatttgttgaaaagccagatcggagataaggaaatctcagttgtggcgacatgtgcatcaagtgataatacaataggtcccgtaacactccacccttacagcaacaatatggaatt

SEQ ID NO: 287831 - DNA, 727 bp, Cannabis indica
tactcaagaagaagctgcacgacccctatctgaggtgcacggcggattctgtggaaatcatgccaccgggcaaagcttatctaagaaaattctaaggcaaggttacttctggccaacggtgattgaagattcaaaagcctatgttaagaagtgtgacaaatgccagagattttcaaagatacctcgagctccacctaatgagttaacttagatgtagagtccgtggacctttgccatttgggaaattgacttgatcggacaattatccaaaggaaaaggaggagtgcaatatgcagtggtagcagttgattactctactaagtggatggaagccaaaccactcgcaaccattacatcaaagaaagttcaagactttattgtgaagaacataatctaccggttcggaatgccgtacaaaatagtttcagataatggcaagtagttcgacagccaatccttcactgacttttgtgcaaaccatcgtatcatcaaaagtttccttgcagtgccgcaacctcaagcgaatggtcaagttgaagcagtcaacaagaccttgaaggatacactaaagaaaaaactcgaagatgccaaaggaaattggccaaaagagcctcctgaagcagtcaactgagaaaacagcaaccggacaggcaccattcgctatggcgtacggatatgaagctatgctacctgtacaacttgagccaccttcctacagaagattgac

SEQ ID NO: 287832 - DNA, 742 bp, Cannabis indica
acccacgtcctcaacgtcaacccggacatgccaccagtccaacaaaagcgacgccctctcgactcggtaaaagccgaggccctagagaaagaggtggataagcttctgacgaacagcatgatccgcgacgtatactatccggaatggctagccaatccggtcctggtgcccaagccgaacggaacttggcgagtttgtatagatttcactgatctaaacaaagcttgtccgaaggactgcttcccgctacccaggatcgaccagatggtagacgccacttccggattcaaattactatccttcatggacgcctacgccgggtataaccaaataaagatgcacacggcggaccaagagtgcactagcttcaggaccgataagggggtatactgctacctagtcatgcctttcggactgaagaacgctggagcgacctaccaaagaatggtcaaccggatgttcaaaggcctcttggggcgaaacatggaggtatacgtggacgatatgctcgtcaagtccaaagcatgcaatagccatgcggacgacttagaggagtgttttgaggtagtccggagatacggcatgaagctcaacccaaagaaatgcacctttggggtcaaatcagggaagttcctaggcttcatcgtcagccagagggggattgaggcaaacccagaaaaaatccaagctctcctgagcatgccatcccccaaaaagcataaagatgtgcagagcctaaccg

SEQ ID NO: 287833 - DNA, 761 bp, Cannabis indica
gtgttagtctacaagggtggtgctttaaatctcgtaggctatacggactcagattttcaggcttctcttgatgacagaaagtctacatcttggatggtttttactcttggggtggagaagttgtttggagaagcgctaagaaaagagcaatatcagactctaccatggagcccgagtacatagctgccgctgaggttgctaaggaacttgtttggctaagaaagttcttctcaggacttggtgttgttcctggaatggaaaaaccactagttttactttgtgacaacactggtgctatagccaacagtaaagtgttgggaatattttacaaggatcaagatttactaacaagtatgttgattaacatcctaaatataaattctctaaaacaatgaaaataaacacataagggtttaagaaaaccttacatagattttaacggaataatatgactccttcgttcaagatgtctagcccttgattcctttctgtagcagagaattatcaagatctgaacctggatgtctttctctccttcgggtttggttaccactgtcttactcatcatgattgagtagttgacttgctatgtgtgggcacgtcactcatcactaagggtttcgaataagtgaagaacaatgaaggaggtgaaatctctatagaaggaactctctcatctaggtttggttgaatagtcaagttgacattaattcaagtggatgagatgagagcatcatgttccttttatagtgtttcaacta

SEQ ID NO: 287834 - DNA, 595 bp, Cannabis indica
gtaaaataattccaacatctcactgcttttcatgcccttcttaatgatgttcatcttttagtgtccaatttcccacgagcacagatctctcatgtttatagatctgctaataatgaagcccatttgttggctaagtttgctcttacggtggatactgaatgtatttggttggaggaaattccacctccacttatgactgttatgtaatttgtgttcaagttaatataatagtcttttactcaaaaaaaaaaaaaaaacatttaatctattgaagaaaattatttttaatttatcatacaatgtataaatagtaagtattttaatattgttggatttattctcactcataatattaatgaatgatgttatattaataattattttatatttatatataaatttaaaaattaaccattattataaatattgaaagtttgtatttagattaaatcactatataattcccccatataaaaccattattcaaatacatactatatctaaatataatattactcaattttaaacatttagttattttgttttttttatttatttacaagtgttttcttttaatttatattttttttattat

SEQ ID NO: 287835 - DNA, 517 bp, Cannabis indica
tccactgtgctgacgacacaataaacaagaatattaatgtgataagggtttggatgaatttacaaataaaataatatataaatgataacatgaaccaaatgacacattaaataagtgatgaaaatacttttgtctctttattgatatttaaataacagagattacattgaaatagagttttatttagggcacaaagcccaacatggattgcaccttgagtactattaagtgttgtaccaaaaataccttgtaccttctcgtacaagtgctggtaacaccacgatgtactttcaaacatcatacactttcccaatgcactctgtaccgcaaccgtacaagtgttggtagtgtatgaatcacaacatataagcatgcatatatactaagcatatacatacattcgcatattcatattacacattatatcatgttcttaccttctttccaaattcaagtgtgctggccgacctgaacggaaagtcttgcgctaaatggatgccctaattacataatgaaa

SEQ ID NO: 287836 - DNA, 1019 bp, Cannabis indica
gccattcacttagaagcgaatgttcaatagtactttaatgtggtctacccgacctgagtactttgaagtggtctatccgacctgagtactttgaagtggtctacccgacctgagtactctattggtagtatttccttaaatgttctccattccagtaccgtggtactagaatgagttgcattttttcgtcatacttacccagtttgtatgctccggagtcgagaacttcgaccacctggtatggtccttcccagttgggtcctagtacacctgacgtgctgtctttggtgtttaggaatacccttcttaggaccatatctcccacgaagaatttccgagctttcacttgtttgttgaaataccgagctactttttgttgatgagctaccaactttaagtttgcagttgctcgtttttcttcgatttcatcaagtgattctgcaaggagtatgtgattggtaccttgatcgtacgtcaaccttctgtgggacggtggctcgagttcgacgggcagcatagcttcataaccgtacgccattgcaaatggtgtctgaccggttgctgttttttccgttgtacggtatgaccatagaacttcggggagttcttctggccaatttcctttggcatcttcaagtttcttctttagtgtatccttcaaggtcttgttgactgcttcaacttgaccgtttgcttggggatgtgccactgcggagaagcttttgatgataccatggttcgcacagaaatcagtgaaagattgactgtcgaactgtttgccgttgtccgaaactattttgtacggtagtccgaaccggcatatgatgttcttcactataaagtcttgaaccttctttgatgtgatagttacgagtggttcgacttcagtgcacttagtaaagtagtcgactgctaccactgcgtactgcactccgcctttagctttaggtaactgtccgattaggtcaattccccaaatggcaaagggccacggactttgcatttgtgtcagctcgttg

SEQ ID NO: 287837 - DNA, 623 bp, Cannabis indica
aatccatgccttttgctgcccttcaatatcaacatagaccctcttgtgattctcatgactccattccttgttttgtattcatatccctcatcatcaagggttccaagggatattaggtttctctataagtctggtatgtgcctgactttggtgagagtcttcacagtgccatcaaaacttctaatagcaatagatccaatcccagttacttggcacttgtgatcatttcccataactacacttcctccattaatctcctcataatcaataaaccaatctttgttaggactcatgtggtatgtacacccactgtccaagatccattcatcacaattcttttgctgcagaatattgcaggcatcaccacttttctcactagtgtagcaatcatttatcacagcaaagagatcaccatctgagctgtatgtttcatctaccacagcatttgagtcatttgacttctcttcttcatccttttgtttctttttcttgttcttgatttcccagcagttcttgatcagatgactaactttgccacagtgatgacatttttttgtctcattaggtctagacttggatcttgagtgacctctaaactttgagttgtgccttcttggatttct

SEQ ID NO: 287838 - DNA, 653 bp, Cannabis indica
aaagttgtgctcatgggagtgttggtatgtttggctttctcaagaccaaactttttcaccaagttctttgcatacttgctttgagtgacaaatgttccctcatctgattgcttcacttgaaaacccagaaaataagtgagttcacctaccatgctcatttcaaactccttttgcatttgggaaacaaaaacctgcacttcagagttagaagtagatccaaaaacaagatcatcaacatatgaaaaaataatatgaaattgaatgtgtgtgatgaactgtgttttaagaacacttcctctataatcatgagagtgtaaacactcagatagacgctcataccacgcccagggtgcttgtttcaagccatacaaagcctcgtctaaaacatgatcaagaaggtgggaatccttaatcgctccattttgttgtggggctttaggagcagaaagattatgaaaaataccataagatttacagaatttaccatacacagtattttcaaaatcttttccatgattactcttaccacgaactatcttaccaatgttgcaatctttttgaacttttaatttcaagcaaagatacttaaaaacatcaaaagtatcaatgttttctctaaaaaattctacccatgaaaaccaagagaaatcatc

SEQ ID NO: 287839 - DNA, 631 bp, Cannabis indica
ggttcctagagcctcatctttgcttttcgccaaatacacccaaaatttcctgctgaaatcatcaataatactcataaagtagtgtgctccacctttggttggaatcctagatggcccccaaaggtcagaatggacataagctaacctttctacagtggtgtgttctgcctttttgaacttcaatctacacttaaatgccccaatctgaggtgacatagccttgcttgactgtgtttggttgaacccaaaacaggtgctgcacaacctgagattgtctttccatccaagaaatacaatccattactcaaccttcctctcaacacagttcctgtgccttgtgcaattttcattacaccttcctcaactttgacaacataccccaatttatcaaacataccaatagagagaagatttcttttgagatctggaacatacctgacctgctgcaaggtcaacatgacttcatcatgattctttaacaagattgttcccacacctttgatctcacacgctttgttgttcccaagaagaactgagcccccatgactctctgaaagagtcctaaacagtcctttgtttggtgtcatatgaaatgaacaccctgaatctagaatccaatctccacttgaat

SEQ ID NO: 287840 - DNA, 503 bp, Cannabis indica
taaaaaacagaaaaatgacagcgacactaacatgcttacagcagagaaaatcttgctctttcacacttggtctagggacgaaatttgctctcagaattagatgaaatggaagtgtaattggcagtagtgaataggccttgaacttgtgtgtgaacagaattttacatgctatctatgtccttaaaacttaccaagagtaattcgatcaaataagtgtgcaaatacttcccaccaacaacttgaatttctataacaactacctttgatcctcaagtttaaaggtttgcttccataagttgaattaatgcaatcctctccactaatgtagcttagttttacaacttagatcaaaaggacttgactaggcttgaaatgttaggcttgggttagggtatggtaaaggatgtatttaagctagctcaacacctaatcacttcacttgtcaaaaaccgagcctcttccttaagaattttttttttctcttgaccctcttccctaattca

SEQ ID NO: 287841 - DNA, 603 bp, Cannabis indica
ctgtatgtttttctttggtcaaattttagacttttatgatcttctcctttaaattggaaaaagagcaaggcccaaaaggtcattaagctagaccaagaataatataagagtaacatgtatatatatatatacactattgcctttcgagaatcttgtaaatttatatatataatatgtgtgtgtgctataattactaatgacgacttacataagacccttttcatacattaatatttgtgttatgtaattagctttagaaattgaaaggtaaaatataagaagcatgtcatgacatggactttttgaaggattattgctatgggtactagtgatgtctagggacgatcttgggtataggcgagttagacctgtgcctagggtccatttattttaaaggctcaaataaaaaaaaattagtcttttcaaaaaatatacacattttttaataattttaaaaatattattatcttatgtaagggccaaaaaaattaacttatagctatgtcaactcaagtaccagccctacagtggtgtctagcacttcttataagtggtgcgatattatctaaaagctattaagttatatgagacccgatacttaat

SEQ ID NO: 287842 - DNA, 871 bp, Cannabis indica
gcataaaacccaacaccaaccactacgacacatactgcaaaagccaaatgcttcaggacggttactcaagtgggcggtagaattgggacagtacgaaatcaacttccaaccccgaacagtaatcaaaggccaagccttggccgactttgtggtagaatgcacaggcaaaaaagaaagcataccagaaagcaatcccgaaccagtacctcagccaagtaacaatgaagacaaatcgacctagaaactacatgtggatgggtcggcaacagatcaactatctggtgtaggaattgccctcgtcacgcctggagggcaacacctgcacgctgcggtcaagttcggattcaaggcatctaacaacgaagctctaatcgctagacttaaactagcctgggaaatgaaggccgaacacattgaaatctgtagtgattcacagcttgtggtaaatcatgtattcggcgaatacgaggctcggggagaaaaaatgatagcatatctgagcaaaatacacgacctgctcgcacaattcaaaagctacgatctcagacaaattccaagagaagaaaatacaactggagacgcgttagctcgattggcaagcagcaatgtaagtgagaaggcaaacttggtccctatccagttccttgaagagcctagcatcactggcacggaagaaatcgaaatgatcgacaaatccccaaactggatgacgccaatagaagcctacatcaactctggggaactctcagataaccgaaacgaagctcgaaaaatgagaaggaaggcagcactgtatatcatagtagaaggggtcatgtacagaagaggattctcgatgccattactcagatgtgtcacacaagatgaagct

SEQ ID NO: 287843 - DNA, 720 bp, Cannabis indica
aacataattttttttgtgactaaatgtgacttttgttacaacaaaatactacttgtgactaaaacatagtctttggatacaagttgtcactaatttaattttagtcacaacaagtattatgactaaaaatacatttatgcacaacaaataataatttttgtgactaatactttttgtcactgacattttattcacaacataaaaataataatttatacacaactttttcacagtacttttaatcacaagttttattgtgactaaaagtaagattttttgtagtcaacttatattttagatttgacgatgttaactacacctaaatatatattttagattctagcaacaagtttactaaaaatgcgaatataataacaactatttttgcaagtggcaatgaaatattattattcaatagcatatatatcattgtctttatctttgtacaagtagtaatactattatgccatttttttcttctcaatctctccctttcccaaaacccactttcaatattttttaaaaaataaataaagaaaatacccaactttcatttcaaattggggaaaaaaatagttcttatccttatattatagacctcactttattttattttatttttctatatatttttctaaggaaatagtagcaccacaattatgtttcattgaaccaaactttaggaatttttggttggtgtgtagtgtagaatcatgaact

SEQ ID NO: 287844 - DNA, 624 bp, Cannabis indica
ggacaggagaatccacctcaggccccggtcgattgggaacaaaggtttgctgagatgcaaactagaattgagcaacaagaagaggagatccgacgactcaggcaacgggatgctcctgtcgagcttcccccgcaaccgcctgctgcggttcctgcaacccctgcggtgccagctgagcaacatgttgctggtaaccgtatggagcctttatatgagagattcagaaagcaagcacctccagtatttttgagaggtcctgatgtattgaaagctgagcagtggttgaccgttattgaaagaatattaaatttcatgggagtggtcggaaatgacagagtggcatgtgccatgtttcaattctaggaagatgctttgatatggtgggaaataatatctcttacaaaggatgttgccagaatgacctaggaggaattccgggaattgtttaatgctaaatactataatgagggagtccgcagtgcaaagcggaaagaattcgttgagttggtacaaggcgagggtatgtcagtgactgaatacacaaccaagtttgatcgcctggctaagctagcttctggaattgtaccaacagattttagcaagaaggagaagtacttggctgga

SEQ ID NO: 287845 - DNA, 664 bp, Cannabis indica
atctatataaataaatggcttggattatatatttttgttgattatgctcattgaaaaatatctacatgcaataaaatatgtctaatttcttttttaaattgaaaattttcatttacctctaagaaaataaaacaaaacaaaataaagtacctattgtttaattaatattattttgatatggcgatatttatcttgaaaccaattctttaaatataataaaaatggtactcaaattgtatattttgttttcaaaatttcaatatctttaaattcttatgcaaagtaatggttttacaaggaagattaagtacttaataattattaccggtaagtgattttagtgacattagtttataggtattttagtgtggcacgagtgtatcactataattaactaattgcttatttattagatttttcttttaaattcttagccactcgcagttgtcttttttttttgttttttttttttttttttttcttgatttaggcccgtggcccctccggtgtaacatggttgaggtatgtggttttactactgtgataatcttgtttaagttactttaattagtcttgtttcagtgatataattttgttttattttattttcattattggttcatcttttgttcttcgatgcctcgtcatcaaattgttgttaata

SEQ ID NO: 287846 - DNA, 862 bp, Cannabis indica
tattatggggaaaacaaaaaaagtgtcatatataacaaattaggttaagtataagtttaggggaaaaattatagggtaatgtaagcatattaattcaaatttccctaatgatataattagccacaacttttatatttttagtcacaaattttgttgtgactaaaagtaagattttttgttgtgtggtctacccattgcactcttagaagttggactcatcattccattcaccagccattcagcaccttgttggatctagtcacaatcagacttagtaagattcccttatctctctctctctctctctctctatctgccctcctctctctctttctctctctttagatctagggatttctataaatttattttgcaattatcaagatctgtgtatagctgcaaatatttgggtattattgtgttcattattttcagatatgagaaaaaataattgttgtggggaaattaaagttagggttttcagatttgagttttggattgaagttttgtgtatatatttgtgtgtgtttatttgtttgttggatttgaattcgtttaaatttggttttagtatttaatttttttgtgtgatatggatttgaaaaataggttgtggtggtagtttcggtaatggtgggtggtggtgtttacgatggttatggatggtggtggtgtttacggtggtttcggttgtgttggtggtggtgtttacagtgaaaatggtggactgatagagagagataagatgaaccaatagaaaaagaaagaaaataaaaaaaaagaaaagaaaaagaaaaagaaagaaaggaaaaaagaaagaaaaaaaaagaaaataattttttatttataatttttttaattt

SEQ ID NO: 287847 - DNA, 780 bp, Cannabis indica
actctattatcacatgaacgttgcaaattattttaaaaactaatttaaaagtttgtaatattagttcaactattttttttcttttttgtaattattaattgattttagtaataatttttaaaatataattttttaattattttttattaagtacatggcaatgccgtgatattaatggtctaaacattcacatctgcattttgtttgtcatgtgtaataaaatttaacaaaagtactacttcacaacattgataatagtttgagaactgtcaactaaaaaaattaggagtcacaatacataggtcatagttcggaggcaaaagtcatagaatttattatactaaattttttagttccaactcttttttaattaatttaagggtaaatggcggcaaaacccccaatattttcgttttggtttcactaaactcccaaaactcaaatttctgcgggtaaaccctcaaaactcgtattctgttagcaatttaccctttccgtccaaatttaactgttaagtgctaggttggcttgtccacgtggacacaatatacacgtagcacaattttattggtccacgtaaataattatattaaaaaattaaaaaaaataaaattaatttaaaattaaaaaaaaatataaataataaatttgttttttcttttctttctttcttttttttttcttttctttctttttcttaatgccctttctctctctcgctcgcatgtagcaccgtagcagcaagcagcagcccaagacccaggtgccatctctctcgat

SEQ ID NO: 287848 - DNA, 906 bp, Cannabis indica
ggtaaaataattattagatttatgctgcttttaaaaattaaaattttattttaagtatttataccgttatttacaataaatattgttggggacagaggggaaaaaattgccgaaacggtgtcgtcttagaaaggaggaagaagagtaataagaaaacgcagcgttgggttgttgattttctggtaagtgaaaatcttcatttctttggttccctctcagatctgaatctattctctccatcaaaacgacgtcgtgaaaaaacatcatcacagcaacaatggtgctcgtttccgccgcccgcgattacgtcaatcggatgcttcaagacatctccggcatgaaagtcctcatcctcgattctcacaccgtaagttccattatattacattttttctctaatagattatgatcattctacttagtttctgtttgtttcccaagaaaaatgatggtctctgaatatgattatgttcatctaatcaattaacttaccttttgtttttttccctattcattttgattaagtacaagttgatttgggatcattatatgctgtatttagtattctctaatgtgaaaagtgaaattttcatgggtattttcgatgagcgcgttataattagtgaaattgagaaggagcaacatttatttattatttagtactttttttttcctttctgtaaatgaggattgggtaatggcgatgatgatctgttctattcattgttcttggtttattaaaccaattatactatcatgccactaatgatgcaattgtgaaaagaaaagaaaaaattaacggtttcatgtattgtctgtagacattgtagaattgtatttttgtttggattttgaattaatgagatgcaggttagtatagtgagtgttgtgtatctacagtctgag

SEQ ID NO: 287849 - DNA, 760 bp, Cannabis indica
aaaatgtgaattaaattggaattggatttataccagactagattagaaatttaagttgtcggttaggcgggattggtttgaaattaccaaaatacccctaagatttgatattaagctcaagggttataagaagggtaaaatggtcatttggtgtgataagttaatgttatgttttatttgttttggatggctgaaataaattaagtggattaagttatttatttaggtgtttaactacttatgctatttaaggaaagagataagttatataagtcaaattctataggaaaagtcaagagcatcactttctcttcctctctctttcggctccaaggaaaaccagcaagaaacttgagggaatctcagctctcttcatcaaattcttggcaaaaccttctgccctaggagttagtcaagttgaggtgagtttggtaccattttcctttgatttctttaagttttaggttaggttttggttagggtttcaagaaattcggggctggggtataagttaggattagaatctgttcttaggtttggtttaaagcttgtataggtttgagtttgctgaatataagggctgcttaacttggaaatgagttgaatgaagttttatgagttctagttcacttgggaatacaattttgagtaaatggatgagttgtggtgttttgatgcattggttatgttgtgtttatgatattatattgatctggagcagttggacaggtttggtttagttttggttcgagtttggagg

SEQ ID NO: 287850 - DNA, 1164 bp, Cannabis indica
aaatcgtttccaatatgaacttacaatatttgtagtgcagataaatttcccagaaatgttggcagagttccactgaagtaatttaagtcaatcttgctgcaaacatgtataatattattagtaacaactcatgaagctatctgttagcattgaccaactgaaactactactaataatcataacatagaagtattgttcttgaaatttgaatcatacaaatacaatagatatggcagtgctgtgatttcctcaggaatcactccatgtgcgtccaaagattgcactctcctggagaaacattataattagttagaatgtacaataatttcaatgcattttcctatgtgttttttttttttccacaaaaactaagtatggtcaagcattaatgtttactctttagccttatgcatatattattatgtatttgctttttatttttcctatgaaaaattgagcaaaaactttacaatatttcaattgaattagataacataaaagagtacctagaactcttatggcatgtttactaataagtaatgggaatcaatagtaaggtaatcattctcttacatttgtttacttgcattattaaaattaggaaagggagaagttgattaaataagggagaaaagaaagggggaacttcccccaccaattttgtaaggaatgccattaagggtaatggatttttattatttttattttattttttaatattaaatatataatgacaattttgtcctttaaaatatgtcttgcaaaataactaccatatcatatagtttaactcaaaagggcaatttagtcaatttaagtattccgattacgtttcctaataaagtaaacaagataaatcacaaatattccatttctaaaaaattttagtgaacaacatattacaaatattgatttcgattatttttcatttattctgttacatttctccattaatttattccgattctgattactgtatagtaaacgtgccattaatacagttagtgccacatgattataatcatattttcatgaagtttcattattatgcactcatctttttcttttaatatagggtaaatagtggcctaagtacccaaagttttatgtttgtaagcggcataaacctaatgtttatttttagcggcataagtacacaatgtt

SEQ ID NO: 287851 - DNA, 561 bp, Cannabis indica
actgcttgtaagactcagtaaattgatttttagtaatcaattataattctataattagactatgtctagtttatgaattttcactaagcaagggcttaaatgtgaagaaaagagatcctgggtcttatttattaattaagagactttataagtctaattaataaatatattaaatgacaatattatttaataattaatttttagttattaaataattggaattggcatttaagtggttaaattggaaaattggcatttttgagaaaataagatgggaaaatgacaaaatggtaaaattgcaaagtgggcccattatccaacccatggccggccactatgcatggattttaccatttatttttctattattttaatgataattaaatcttacctaaacctaggtggttacctataaatagatagtgatgactcacacttaaagattgatgaaatttcactttcagataattttcctgagccttctttctattaagctgaaaccacatgctcttctttcttctcttcgtaatttcaaacctagagtgatagagtgagtgccca

SEQ ID NO: 287852 - DNA, 565 bp, Cannabis indica
catatgcaataaattgtcaaagaatttaactaaattttgttgaagaactagaagattcttctcattgctaatttataaggctcaaaaaaagaatgtgcatatattttgcacatagaaagagtgaaagaatattttcatatttttttaattttaaaagaaaatatatgtagtatttcatttagtttgtcttttatatttgttcataagataaaattatattgataattatttttctaatataatttattttaataaatatatattaaattatttttgaagaaaatatttaaattatatttcttgagccattgttagatttttattgtacagtttcttatcgatgtgataagatcatatgatcatggatttataaaatttgtaaatttatgtatttctaattatatacgtatgactcattcttagaaataaaataagtttataattactgaacctaaagttcaatgtcatatagtatatatggatttaaataaatattgattcattgtgatatattgaaatccctacaggtgtattaatattattagatatcacaatttttaaaaat

SEQ ID NO: 287853 - DNA, 749 bp, Cannabis indica
ctctccttctctctcaactatgctatgtttgacgaagattagaccataaagctactttgtttttctctttggccaaacttttcaaacgaataatatatatacgtatacatatacatatacatatatatatttcaattcatttaaaataatatttagtaacctttaatgtaaaaagtcacatacattgccatttattgattttctacaaattaactaaaatttgagattttattttgtactcatataataatcttaatttctgttttttttttttcatgtttaaatgttaatttcaaatcaaaactcttatctttttgctcttttttattttattacttttaacatagtatttattgtagtagcctaataagttaataactattttttttttaaatatgttttaataatttacagtcatatatgatatatatatgtactgtatttattttatatatatttagtaccataaattatatcttggcaatttttacaatgaattcaatttacatatacgttttttttagccattattcttaagtgtagtttactttttttatgatacaatttatctttttcttttaaaaaaaattgctagaaaatacactattttttgtaagataataaaggagctatatactttcatgtgttaccaccactagcttggagagataaaaaaatactgaagtaatgtattacattctatattattttgttgaaagtatacaatacaatactattttattctatta

SEQ ID NO: 287854 - DNA, 454 bp, Cannabis indica
tagtttcaagtttaagtccctgggaagtgatttagcgtgtcacttatcagtgttgtgattaatgtgatttaggagcctgtaatttgcgagtagattgttccactctggttgaccagcacacctaaattcggaatcgaggtaagattagtataatgtcatgcatatgtttatacatgtttagcatacatgttagttgccatcagattaacatattagatatatgttaggcaaatttggtatagccgtcagattagcatatcagggcaacagtgaggtgtacatagagttgcaccgagataccaacagatatatgctaggctatcagatagtatggattaactgctaccacattggtacgactagagtaccgagtataggctggattcgcggttaatcatactttgtcatggacgttcctgatttagttaggtttatgttcaggtgtatgggcgct

SEQ ID NO: 287855 - DNA, 788 bp, Cannabis indica
acctaaacctagtagttgcctataaatagaaagtgatggctcacaccaaattaagtagttaagcaattattcagtaattcaggaaacttcctttttcagaaaattgagccatcttcttttctctctatagccgaccctcctcttcttcgtctcttcaatacaatttcgagataccctattgaaagagtagtgcccacacactacaagtggtacctcaatcatagtttggaagatcgtgaagattccatatcaaagagaaggacattccaatgtaaggttttcttaactatatatgtatttattatcgttttagaaagtttatatttaggatgttagaaagttcatacttgtgagtagatctaagatcctggtaaaataatttccaacacatacgacattactatcgaccataatatcagtctatactcggtactctagtcatactttagtcataccgatgtgatagcttcgatctcgtacttgagccaaacatacatccatcggtatctagtacaactctatgtatactgatattactaccaatgtaatctaccaggctcaacaaacatgtacactaaacatgtaaacacatattcatatcattatactaatcttatcgtatttttgaattcaggtgtgccagtcaacttgagtaaaactgctgctcgacgatttacaggcccctaaatcacaatattcgtaaaatagatgagtgtcacactaaattactttttggggacttaaaattgaaactaaaagtttctatatcgatggataatatggcaata

SEQ ID NO: 287856 - DNA, 596 bp, Cannabis indica
ggagaggggaaaaaacctctccatatagatagctctgtcctgattgggtatcacgtcccatttcaggattatggccttgaatgagaatagtgcgattgtttgttattttattggagaaatagtataaagggcggatttgttatgttactattgatataattaactatattgagctatattttaatttaatataattattataaagaactgttaactatttacaagacactaccttttttattagctgtaaatttttaaatttagtagaacgtgtaattttgttgctcataatgtggctaagtgggtgttcacccaccaattgtacggttccattttgatttcctcagtatcggaagaactattttgtattgaccaagaggtctaactggtgtttgatccgtttccatcattaatgcatgaatacgctaatttttttttttttaaaaaaaactatttacaagccactacctcttgatattttattggacactgcttaattatataattctcaaattcaacaatgatgcgagtaatttacacatactgctaaaaagtaatgatatgtgtatactataaaaattttacttttagtcaca

SEQ ID NO: 287857 - DNA, 891 bp, Cannabis indica
actttttgatgaacaagaattcccttcaaactttccctccataggccaaagtcccctgtcccattgaacttctcaagttcaaatcttgctgatcctgtcataactggttgcagatgagtcttgattgaatcttgattcttgacttcctcaattggatcttgaacctaagctctgattttgttgtaattccagcggaaataacattgaggattcaatcataaaatctgcaataaactcacaactttgacagcaataatgaacataaaccaattaatcaacacaatgaatcaaaccagaaatcaatcaaagaacaacacaagattttatcctggttccggtcctagagatcaacatgatccctagccatactccagctgagaaacatcaccaaaacttcagtaaaaagactctgataaattgctttagagaatcaatttccacatatagaaatagattttaggctttatacaaaagtgttggtaggatgtcatttattttagtcatgaagctttctaattcatccaaatagagcgtttaaaatcttccatgaaaagtattttaatagctcattaatataaatacattggcaaaagtttatgtggtgtaacttttcctagagacaatgacatgagacattgtttctgttatatgactttatgaattcatggctatagtaatgtgaagtgtagatttttgacataattacatcttttaatgaggaattgatgtttgcaatgtctaagtgtaatttttcggtaagcgttaatatgttgttgaaaattttaatatatatttatatatatatactagcaaaaagctacgtgcgaggcacgtatactaaattttatgttagattttttctatgttatttgaaagtgatacaattaaaaa

SEQ ID NO: 287858 - DNA, 390 bp, Cannabis indica
ccaacactcatcttacgtgttgtcttttgtagatgaaccttggtgagccttgggagcctgagcatcaaatcgaccaggaactgcttcaacttctgcatgaagcccaccctcatcttcgtgctaatccttcttctgattctatacccagccatataatgatggctcttacgaagaagactacacatctggctgacgcttctgatccccaggtggctcggcttgccaccctgctcgacgctgaacaggatttggcagtcccaatggaggaggaccgtgagggggacgctgaaatctaggaggttgaggaactggacgaggcacgtccagcagccctcccgctgctgagggagaggaggagattgaacccccaatgtaaagaccgcttagttt

SEQ ID NO: 287859 - DNA, 518 bp, Cannabis indica
tttcagcttgtcgtttcgtgtcagtttcaggtttctagttggttgtttccctgctagtttgggatattgccatattaagttacagtagataaggttttggttttaaaccttagtcccggttgtgatttagcgagtcacttatgtgtgttattatcgatgtgatttaggagcctataattcgccgagcagttgttccactcaggttgaccggcacacctgaattcggaattgaggtaagattagtataatatcatgcatatgttattacatgtttagcgtacatgtgttattgcctgttagattacattgatagcagtaatagtatacatagagttgtactgattactgataaatgtatgttggctgaaatactgatcgatgctgtcacatcaatatggctagagtatgactagcatattgagtataggctgacattatggtcgatagtattgtcgtatgaacgttctagactcagtaccgtgtgagacacggggattagggttataatcaggtgtatg

SEQ ID NO: 287860 - DNA, 506 bp, Cannabis indica
actagaaccgaactaggactatgacctagaaacccaacccaaaaaaacctagatagagacctaaacccgaacctagactaggactcgaacccgaagctagatcgggacccaaacccgcacaataatcaggacctggacccagaatcatcatatggacctaggaaatagaactaggaccgggatctagtacccgaccaagacctaaacttgaacctaggacccagctcgtgaaacggcacccgaaatggaaccagactaggacccgagattgggaaccagatctggacctagggcttggacgaaacccatagttggtgtcttgatttgggacctagcaatggacccgaaccttgacaaggacccgaaccaacacctggaacctagtcccaaactcaaaagttgacccaaactcgtacactaagacccaaaattggaaagaaaaccagaagttgactgggactggaactaggacttggactttgaatcataactgaaattggacctag

SEQ ID NO: 287861 - DNA, 744 bp, Cannabis indica
agtaactcgaacaccagaaaagaggaatctaacgtgttacacagaaactcgaaacagaaattcccagaaaactcaaacatcaaacccagaaaaagcagatgaacagtaaagcatgcgatgtacacaaacaataaactaaagtacaagatgcgaagaacttacataaagcttgagaactgggcgttggtgttgatcgacggtaaagagttgattggcagcgacgaaggaaaagaagtaagaaatctatggtgtttgaaggtttctgtttctcttggaaaacttgagaaagtttggcgaaattctgaaagtaaccaaatgaaatgagaagggtggcttttataggccaaaacacatgtgaaacagctgtgatcagctaccatcgaacggctgggaaggcacacgattcgaattcccaagatccaacggttggattggatcgtcatcgaggcggtggaaacgcttgagtgtccgtctgacacccattaatgcgccgtatcaatcaatggacaagaaacgaatcgacgcctgcaaaaagtgaatcgctgcagtaatggtgatcattaaatacaccctcacgcgcccaaagcacgtgccaggaaaccgaggagccaaccggaggcatctaagcaagccttgttcacttcacaattaaacaaggcttggggggtaaatgttgcccctgattttgcccaatatacgtggaccaaccgtacaatgacacgtggacgcaaagggtttagcatt

SEQ ID NO: 287862 - DNA, 1070 bp, Cannabis indica
aaataactccgatgagaaaaaaaaagaaggcgttaagacgaccctcctcggcccaaccctagacactctaagactcctttttacaaacctgcctccctatttcgagtcaagagatagaataaatagacacactcccattgcactgagtcggggcgctcgtagtgactgagggggtcgaagaccaagaagtgagttatttatcagccaagcattcttcttacggctagatccaatctcctggtccctgcggaaaggaaaaagaatttcacgttcttcctttcggaaagggaggttttttttcctattgattgcaactttctccagaccttcgggaaaagcatgaaaataaaggctcgaatggtacgatccctccgtcaccccagaatgaaaggggtgatctcgtagttcttggtctgtgaagatacgttgttaggtgctccgttttattttcccattgaggccgaacctaaacctgtgctcgagagatagctgtccatatactgataagggatgtatggattctcgagaagagaggagccgtggtggtccctcccggaccgcccggatcccactagtgaatagaaagttggatctacattggatctcacctgaatcgccccatctatcctcctgaggagaagtttggtttcaaaccccggttcgaacaggagagtacgctatgttaatgtgccttggatgatccacatctcagggtgaagtgcttatcatgaacacattgaactaggaaaatttaaatggtatactaacttttactatttttttacaaaaatactgtgagccgatattttttacatttttactgtgtttttttataagtttcatactgcattatactgtgttaagttttcactattgttctactggtggttttttgttgttctactattgtttttagttgttctgtttcgcgttctactagtgttttataaaaacacagtatttttgaaaagatttccgtgtgacagtatttttgtaaaaatttacccaaattccagtatttttgtaagtttaacttgaactatgcatgtagcttagagcccttatagccc

SEQ ID NO: 287863 - DNA, 630 bp, Cannabis indica
aatatattgtaattgtatagttcttttttataggcctatttgggtgctatttggatgtaatcaaattgttccttgtgctaatacaaattctgattcatcaaaaaaaagaacaagtcttggtgggactatgagcttaagaatgatactagctggtattggaggaaattatgccatctaaggggcaaattcactcgggaagatatagaaaaggcaggggcaggaaggcataaattcaattcgactttattgtataatagcagccttccacaaacccagtttgacttcaacaaatgtatctggaattctctcaacatgccgaagcacagattcattttttggcaagctatcaatgctcaatttttaactcgtgacaagtttgagcaatttcagatcaagcttgacaacatcaattgcccggtttgtgagttagtagcagagagcaatgctcattttttttttactgcaatttttctcagcaggtgatggcaaaagtctgttcgtggctgggcattagctgttgcaaaccaacacaaacaagaagcaaatggtccacatctctatgttggctgccatgatttacagcatatggagcaacagaaataactgtctcttcaacaattactcgagtac

SEQ ID NO: 287864 - DNA, 551 bp, Cannabis indica
tactcatcaacaaaatgccctatcttgctgatggccttgtcgtccatcccgctcaaccacttgaagcctggctgagagaagtaaaaataccccgacctgccttgcttgggggtagacttcaggtcgaagaaccaagcgaccttctggggagaaggagcatcccatccctgagaagcatagaggacgaagagagcggacaaatacttaatgcccttgggagtaatttgggtcgggcagaagccgaagaagtctgccacatcccggaagtacttatgcaagggcatcaacgccccttgctggccgtgagcccccgaccaggcacacatccccttatcagggtttgtggcacgattgtcgtgggcgggaatgtggcaatctatctcgcccaggtatctgtcctcgtcgagagtgcggaggcgtgcctccaaaatcttggacggaggacttacccacctggcgcccaaggcgacccctgcctcctgtgaggaaccgcctcgagcaacgctcctcactgacgtagtctacgccctcaaccaggacgtctccgtcac

SEQ ID NO: 287865 - DNA, 503 bp, Cannabis indica
tggttgttaatttttatcaagtttggagtttgaactcaaagcttttggctttaatggtgaaatggtgtttttgctactgtggttattatttgtgtttgggtttattttctggatgttagatatgttgttttatattgaattaagttggttgtggtggctggttgttgtgttagccaaactttgagctttgaagctcaaacttggagcttccatggtggattttgattgtgtgtagggttgttttgttgcattgaaaatgttctttaggttgtatagaacatgtctggaaagtttggagtggattggggttgatttggtcaagttatgaaattttgagcaattcctgcactgaaccggaatttcggttcagagaggcctgtaggaaccggaattccggttggcttccaggaatattttcccagaaccggaattccggttggggaaccggtctaccggttggggcaaatttgggaaccctagtttttcctatttttgtgttattt

SEQ ID NO: 287866 - DNA, 532 bp, Cannabis indica
gggaccatgggcctatataacttattaattcctccttgcaccactatagatttggaattgcgctctcaattatatagaacgctctatatgtttcacaatatagatacgctacgaaaaattaatcatcgttctaatcctaataatcaaagatcttctatagatgatttaaaccaagtagggacaaatttaccgtttcacccctcaatgtattttattcttaaaacacttagcttcctataaatcatattccagtaaactaatataatcactgaaataagagctcttccatttatctctattaaaccaagctcgaaggaaatcatcagttcacttctatgtccaaatagaagctatagattccatatctatgattagcgctcccactctattatactatcatgttccctagctgtatgtgtgacccaaattaaatggtaggctctgactaacaacttaaagaacacaaataacactcttgagatcgaacctaacctagtcaggattaagaccttttgatctaagatcaaccagt

SEQ ID NO: 287867 - DNA, 622 bp, Cannabis indica
ttaaagatttttttttttacatttttacagttttctttaaaaacaacaagaaactacataaaagtaacatgaaaataatatttaaacaataacaaaaaataacgtacaaataataaaaaatcaacaatacattaacaagagtgcaatataaaaagactgtattttctgtaaataaaattaaaaaaattgtaaaaatatttaaaatttcatcaaactgcatttttataatattttttattgtttttgtgtatttgcgaaataattgcataaataaagggaaacttacaaaaatactgtttttttatcaaatattttcaaaaatactggaacacagcaaactttacatttttactgtccaagcccatttttatttcttttatactgcccagccccaatatatttacttttatactgtaaacaataacaaaacacaaacaacacctctccttcgtggttggggacggacaaatcaacactggaatctttgaaacaccaggaaaaaactataaaatctggcaaagagaaacaattactaaatcaacaacaaattattgttttgtagtgttattttactattgttttaatatgaaaaaaatgccacgtaaatgaaatattgtgaaaa

SEQ ID NO: 287868 - DNA, 659 bp, Cannabis indica
agagttagataaagtctttaaaagcaaaagaagtaaaaaagtcttaaaaacttacatcgttcccaagccaaaacctcagagtatgtagttcgaggaaccaagacgaatggtatcaaccggtgaagcactctctcgagtacttgttcccaatctggccgagtacccaattgtgaaaagtcttgagcagcttccgatcaaccactctaagtgggtccgcattcacgagtgtcgaagtagctctagccttcttcttcatttcagtgtactcagcgaaccacctaggccgccttctcttcctccggttctccatgacttctggagctatctctaacacctgcacctcagaatcctgagtatccccgatgctggtgatattcgtcttctcaggtgtacagaacatgtcatcatcatccggtgggtaatcatttgggaaaatgaagtcatcttccggtgaccgagcctcctcttctggttgtggctgtggctgtgaatctgctgccagccttccaggatcttgtaggagcgtcattatggtcttcaactgatccataatcgctgtttgtcctcttagcagagcggcctgccattccctcaaagcaatctgccccctctccacagtctccaaccttgccaaaatggcagggtatactggatcgcga

SEQ ID NO: 287869 - DNA, 1055 bp, Cannabis indica
tatttattttattaatatttttataccaactcttgttttttagtatgttattttgatgttgagaaaatatagtataatgttgtagcaacgttttaaacaatattttttcagaacaagtaactaacaacggtttgtgtattcgtaaaaaaaaaaaaaactaaggcttttttctatttttactacttaaaaacaagtttttttttttttattttttttgtttcatttgtaattttacggtaatctacatagaaacccctattgcaacagcgctcacaacctaaattaacaacaaaaaaatcgtacagaagcccttattacaactagcgctgcaaccactttagaaatgcaaaactgtaaatttgaaaataaagttaaaaaaatagtatattgggtaattcccctatattttattgaaatatatctacttttgtgagtgagttgttcaatatacttcttactttttacttaactctagcacataatttacgagtattgggcatcatctataaaagtgtatatatctttaaaaatataaaaataaaagtaaaaattaatacatgtaaaataaaatgtatatacaattgtaatttcttctattaagtatgtgcttagagctcacttagcctaagggtttatttttttttcggattttaaaaaataccatatttttttctaaataagatctcaaaaatattgttttttttttcatatgaaactatatttcaagaccagccctagtacctaacactttctaaatgtgtcatattatgattagttagcaatattctttaaaagttattattacattaaattatataaaatctatactatattgcatcaataacaatattataccttaaagaatattaggcaacattaatatattttatcatattcataatgtccaattatgtacgagaataggttttatggttaacaatttatcgcaattatgaaattaagatattataaaataggatccaatattacattaattacactaataatataacactttatatattgttagactatattgcctcatttttagtaat

SEQ ID NO: 287870 - DNA, 504 bp, Cannabis indica
agagaggttcggctatagtctataggataggagctcaaccggccatagtgttaatggaccccacttggtattttgcatttttgacaattttcatttttgacaattttcatttctagtttttcaaaaacgccaatttttcaattctaaccatttagatgccaaaactaattatttaataaataaattattaaataatattgtcatttaatataattattaattagacataataaagtcttagaattaataaataaaacctacaatttctttttttcacaattttgcccttgcttattgaaaattcataaactagacatagtctaattttagaattataattgattaattaaaatcaattatctgagtcttacaagcagtatggtctcaactagaatggggaccatgggcctatattactgagcttccaataagctgaaccagaattgaccaagtaaattccctaactcattaattcattgttgcatccactcttagaacttgaaa

SEQ ID NO: 287871 - DNA, 693 bp, Cannabis indica
gcagctagagagctaccaatcacaacactgatggagtcattgagagctttgatacaacaatggacatacacaaacaggaaaaaggcacagaaaacaacaacatttttaacacctacagcagagaagaaattagtcaacaactttgtggactcattgacagaaaatgtaaaatctcttaaatttttaagttgcattacggtttcttaatagtttactttccgttttatatacataataaaaattttataaattgacttaattcgcaggtaaagccaataaacgagaccacgttcgaagtcatagaactaaccagatcatgggtcatcaacctcaaggagaaaacatgcagttgcaaccgattccaacttgacgagttaccgtgtgctcatgcgcttgctgttataaaagagatgaacttgaatgtttacaactactgttcaggttattacacgacaagaacatggcttgaaacatacagcggctcaacatatccggtacacaatcacacaacatgggatgtaccacaaaacataaaagatatcattgttctgccaccaaaccagaaaataagatctggaagaccaaggaaacgaaggtttttatctgaatgggatacaaaaaaaacataacaggtgcagcaaatgtggtcaacacgggcacaaccgaaagacatgcaacaatcaagcaataaaa

SEQ ID NO: 287872 - DNA, 584 bp, Cannabis indica
agtatacctgtacagtgcatttacaacctaaaccaaccagaaaatcacagaacaaaccaataaattccaacttgccattaatgacctaaacttgagtttcaaagctcaagcttacccaattccatttccacctttcaaaactattaaccagagcttacaacaactcaaaactaacctagaaatcagattacataagctttaaatcttaacagcccctattctcaaaaaatcacatgctcaaccaagcaaaagttaaaaactaaagaagggttcccattaaagcttaccttagcttgaatctcccaaagttctttgctgaaaacactaaaaatcaacagctcttccccttgaattgccccagccgaaagagaaaagagagagagaggaggttctatttgatttttctttaaattttctaaacttattttttttttcaaatgaaaagggaatcactcactaatcctttgctgaaattaatgagggtgctaggtgtcaactaatgggacagccacctattccacttaatagcaaatgactaaaatgccccttaacttaaaactagggtatttctaaaactaggggta

SEQ ID NO: 287873 - DNA, 581 bp, Cannabis indica
aatgttgtctctttttcgttccgctactaataactgaggggctatcatcattgctttcactgctgtgtgtctggtttggtttgtccattgttttagagagatttgttagtgcatagtaagtgcttgataaaagtagtcagaaaaattagtgggaaaaaagaagggaaatgcaaaggtggtcaaggtttaatatgcaattctcatgcattattatcttaaattaggattttatgagtgcttcaagaaaatatattcgtctccataggctataagtaaataatttgtcctggtaatgcttaaacacacaagtagtacacatacaacatacacaaaattcactatcattttattggaaaaatatgtccactattattgttttttgttttattataattcttctttttagtatgaaatttcttgaaaagtattcaaaagattgccctgatttaaatatatttatgataacagttgtccccgacaacagggccggccctgaaatgtagtgggctatagggtaaaaattattttttgggccctcatttagaaaaaaaatggtatttttcaaaatcagcaaaaaaaat

SEQ ID NO: 287874 - DNA, 604 bp, Cannabis indica
caaccaaaaaccagcaactaaaaatcagccttcaacaatgaatttcagccccaaaactcatccatttcaactcaattcacaaccaaaacttaaatccattaaatagattttccagtaattaaatcaaaagcttaaaacacaattcatgcattaaaaatccaatggtaaaaaccccaaaaattcagattaaacatcataaacttcaaagctccaacttaagcaaaatcaccaagaacttcaagctcaagaacttgaacttgaacaattaatttcaaagttcaataacagaataaaaacacaataaaattccttttaaattctgtctaaacctaacccaacatcaattcaaaagatccaagtacaaacatgctcaaatcaacaagaaaacaccaacatgcatctcaagaccatcccaacctatttcatgcttttcaaccataaaatcacagcagcaaattcattaaatttcagcaatagaaaaactacctcaagcttcaatgcaatgatcaagccacaactcctcaaacaattcttcaatttcaagcttgaataccaagcaaatcaccaatttttcaaccaaatacaaagagagatagagagagag

SEQ ID NO: 287875 - DNA, 743 bp, Cannabis indica
gtacaatggtctaaactgctcaatacttgagtcggcctgtcataatgtggcatcatcatattaagtgtatgggaatattttatggagtttcccataaaacttaacgaaggagcaatatgcttaattaacatattttttaaaaaaaatattaggcactaatagtgtttgacatcatgataaaatagcaccttataataaatagttatcaatattttataataattattaaattaaattatgtaaaatttgatatttacgagtgctatactaatgtgtagtatatttttgtacaagtcactttgtgtatgcccttccatggaagttatataaaataaatgaaggcagaacacaaccaaccaattacctcatgtccaagaattaatattgacaagtacacataatgcatgtcatgtaataatcaatataaaataaattggtggtttataatagatacctgacctattataaaccaccaatttcagatatgaatatgatgatattgaaattttaaaatgtgagaatgaccatgaaaattttgttatttatcattttactactctcatgtaactttcaattcatcctgttttttttttttttgtagacaatttcacacttactactctactatatatataagcctagaagatcatatatatatatatatatatggaacacttcttaatgggtaatacccattgatgggaactaaaaaaattaataaggtaataatctaataacctttt

SEQ ID NO: 287876 - DNA, 202 bp, Cannabis indica
ccgccaaatcttcaatgcaaaaaccaccgcggccaactctagatcatgagtcgggtatcgctgctcataatcctttaactgacgcgaggcattcacaataaactacaaatttctcgttggccgaaggcaaagctagtactggagcggtaataaatctctatttcagctcctgaaaactagcttcgcacttgtctgaccagac

SEQ ID NO: 287877 - DNA, 731 bp, Cannabis indica
atccaatcatctttaaaagatgatcctgcaacataaacttccccattttcataacagtcactaaaatttgcattttggtgatctgttttactcttagggtttctggattctgaattgtaatcagttctttgtccattaaacttgttctttctgtttttgttcaagaaatagcaatctttcttgaaatgtccaggtttcccacagttgtaacatccttctgtgtcttgtggccctttagaattagatctgcccttgttctgtcctctgtttggacccctgctatggctttgactcctcccttttccatgccaaggcttcttctgagtagatctgcctctactcagatttagttcaccattagagccaccattcctttctgacttcatctctaagtccttagattttaaggcagagataacctcatcaagagtgattgaggttcttccatacttaattgctgttttaacttctctgtaagtttctggcaatgagttaagtatgatgatggcttgattttcatcactaagagcctcattttcccctgagtttgcaagctcaatgtgcattctcaagaactcatcaagattttgatctaaggacttggattggttcattttgaacccaaaaatcctttccttgagataaatcttgtttgtcaaagatttctgttgaaattgctcttctagctttttccagatctttgatggagtctcttctttatctaccaatct

SEQ ID NO: 287878 - DNA, 608 bp, Cannabis indica
ttacccaggtaaccacttttctttaaatatcactttcgatttcttcacttatttctatgtaaatttttatacagattttgtttgttatttaagttactagtttaattgttataagagttttaagtcaaattccctaaaaatacaaaaaaaatttaaaagaatttaaaaaaactcttatataattataatatattctcaaatattttaatttaataaataaaattatataaacttaatatttaattacactaataaaatcgcgtgaaggttgttaagcatatattgtgctaacatttcactttatatttttatatgctgactacaagattaattatttgggtcaatcgagtgtcttgagagataggggagctgactaattgtttatttatattattattattatcattaatttttaatattcagttaaaaaaattaagttttgaaagaaaattaattatcttttaatattttaaaaataaatattaaaagatcaatgaagagctgccacgtagattcctgataaaacttgtacaaaatattattattgcatattaatgatgccaaactaaaactatgttccaattgagaaaaaaaaaaatcttatttta

SEQ ID NO: 287879 - DNA, 402 bp, Cannabis indica
ttcttgataccaaaagtgttctatcatcttattctttacaagatgatcccactgcctctgttgtcttaacacaaccgaagaggtcaataccatttagttttcttagacataattcacggtaccttgtcgtagtgggagagtttcaaggaactcaccctattatgacttggaagacaccagtgattaaaatccattgttagcttaaacaagtaatggattgtcaaaataataaactacgaaataaagccaagagaactatggtttaatccattcatatggaacaaccaaaagttttctattacaaggacatgaaagaaaatttcgttagtaagtctatttaatggacttaacaaaacttcctgttcctagtattatatgtttgagtttatctaaacctatggc

SEQ ID NO: 287880 - DNA, 614 bp, Cannabis indica
actaatgcactttgtaccacaactgtacaagtgttggtagtgcaactagcacataagcatgcatatacacttaacatatatatacactcagatattcatattacatattatacacatttcttaccttctttccagattcaagtgtgctggccgacctaaacgcaaagtctcgtgctagatggataccttaatcacataatgaaatcgggtaaatcacatgattaaaatcctaatccgggaaacccgaacccacaactctaggttctgttatactctctagggattactctaactcaggaaataggaaaacacccaactatggcactgaaatggacgagaattgagaaaatagcttgttcggggatcgcaccaaaactggttaccggctaaccggttttacgggtaccggttataccagttacccggtttataccaattcaccccaaaaattttatattttgctcaaaactccaccaaatgtaacgaaaccttccagagtacctaattagggtatacacaatatattccaactagtaattcactgaaaaaacacactaaataaaattatgccattaaagacctaaacctgagtttcaaagctcaagctttctcaa

SEQ ID NO: 287881 - DNA, 829 bp, Cannabis indica
agagatagtaattaggaattaacaagtgggtaaatatatcaacaagattctcttccctatcttctcattttgattaacttctgtctatctacttaagtttctagaatttttattctgtttttaatcttgaaaaatattggtttgccaaatagaatcataaatttagtctagtggtattcaatccaattccctgtggttcgacctcacctgtgtgagtttactacttgattacgtgcacttgcgtactatttataattttcgtaacaagtttttggcgccgttgccagggaattgtttaaagattgatattgcataagattacataaaattcttactttggtttatctttcttgctaattgctaacctttttctttcaatattgtctttgtatatttcaggaattgaaggtgtatgcgacgtcaaggacagggtgtcatattgccggtcgatcctgaaattgagaagacttgtaggaaaaatagaagaaataagaggcaagaaagagtttcagcagctgctgaaacagaagaaatcatggctgagaatgctaatggtggtaacaatggaggcaacaacagtaataatggaggtgccgttgaagatcaagcaaatggccacagtcagagagattacattatcccaactcttacaggggttcagtcttgcataatgccacccgccgtagatgccaacaattttgaaattagcctgccatactccaaatggtacagtcttcagtccaatttggtctacttccccatgatgtccccaatctgcacttgtcaaacttcatggagttatgtcagactttcaaagtcaatggggtta

SEQ ID NO: 287882 - DNA, 635 bp, Cannabis indica
tcttctttcttgaaattcacatttggatcccatgccttcatgatgacaggtcttcgattgaaaaagatgtatccaccctccaagatcagatctctttctgtcatggaatggaacctgatgataaaaactccctatgatagcaacttcaccctatctatcttatccttccaaactcttttaacaaatccctccagtacatgtaatggaggattcgcaccaagcacataacaaacaatggaagcttgccaaaagttaatttcctcctcaatatcatcaagattaatcttcactttgtttacactctcagactgtttaaacgaagtatctaaattgcgcacaataccagatctcaaaacaggagggattggggatttaccttgtttcacttcactgttacattggttattggcgtggaggaagtgaataaagtccttctgaacatcatcctgcctttgtatagcttttaaagacgatctgggagacaaaggttgctggaaaagatcgaccacagcaggatcgtcatctgcagtttcctcttcctccgagacctccagcggttcgactccagtatcctcacatcgagccccagtcacaatagcatcctgagtcgattggaactgcttcttcttcgattt

SEQ ID NO: 287883 - DNA, 742 bp, Cannabis indica
tttatagttatatgcatgaggtcacttactttgttttttcgcacattaaccacgctgaaaagatcttctatctttcagatgagcgatctgtcggatagccagatgcttggctcaggaggcaatgcgtttgatggagataaggaccaacgggaggacagttttatcccaacttcgatctcagaagaggagatcgcaactgccggagatgcagaattaggcccgatgtcctctgcagacattgaaagcatggtgcaagagctcgctgaaccaggaactattgaaatccgagacagcaaatttacggtgtcagcgcgtgattatcttgtccattcaagacatgctcctgacgtcgaggtcgaggagatggacgatgattgggcggccccagcccgagagtcaggcgaggaagaagaagatgtggaaggaagtgggaccgattcggtggaaaacactcagttgaacgagcctttttcatgcgaggacttggtctcgagggtcaccaaatcagatcttaccactttcacgaggctaaaccttctgcaacttgcttcttacgacctaaacctactcagagagcgcacctttcccttaccaatcctgcgatcattcccacagaggatgtggtaatctcaatacccattcttcgatgtggggtatcgaacccttttcaccctttcattgcggccattctcaaacgttacgacgtgtctccttttcaattaacccccaacagttatcgcac

SEQ ID NO: 287884 - DNA, 674 bp, Cannabis indica
taaatatatatatgaatagaattatacgagcaagacataaccaggttagactctgtaattataaccgagataaaccttactaaggccttattgtaaatagacgtgtgagcgtaacacgtaagtctatgcgactgttgtgaaaattatatacgcaagtatacacagtcaaacaagtgataaagtgataagtaagatcatctccacagggattgcaaacaacgtttgatgtaaaaccaactaatttcaaattaaagtaagaggaattaacatggaaatggttgagtaacgattcaaaattaaaaatgacatgaattaaacttgctaaaattaaaactactactgctagaaaaattgcttgcaagataaataaaaatgtaatatgataaaaatggcttgaatatccttctagtcaggttttttttctaggtgttatagcatcagttcaacattactctagcattctgcacagaggtaacaaaaattcctctaagcttgtgagaattttccaacactcacaaatttaattccaccacttagctcaatatattcctatatcaaaccagcaagcagaatactattcaaacattaattttataagttatgcaaggtaaatgaaatattcatattccacttacaaagaaaaacctaaagctaggttttcacttgctccattc

SEQ ID NO: 287885 - DNA, 567 bp, Cannabis indica
tgggttcaaccagggtaataaccgaagaaacagtgggttctatcagcaacgaaatcagaaccagaatcagaaccaacagtttaatcagcaacaagcctctggtggaaattctagtttgcaaacagatttactgcttcaattcatgactgaaactagatcttcaatcaaagacctgcagactcagatgggccaactagcaactcaagtagcaacccgtcctcaagggaatttgcctagcacaactgaagtaaaccccaaagaaaactgcaaagcaattaccctgagaagcggtaaaaattatgatggtcctgaactgccacaaccagctgatggagaaaaggagaatgaagctcaaccaatgccaaccccaacaccaacatcagagaaggctactgatagcccaacacaaccacaacagtctccaccaattagcattgatcaccatgtgaaaataccctatcctcagaggctcagaaagtcaagtctagacaagcagttcaccaaattcctagaagtcttcaaaagacttcacattaacattccctttgctgaagctttagagcagat

SEQ ID NO: 287886 - DNA, 691 bp, Cannabis indica
ctaggtccagaatttcgatcccattctgtgtcttggtccgagtcaaggtttgtatctggatccctatctaggtccaagtctttgtttgggattaggtcccagatttaggtccaggtccgggtctgggtacacgaccgtgtccgtcgccgagttctagtctcagtttgggcatgaggctaggtctgtgtttggttctaggtctgggtcagcgccctggtcacagtcctagtcttgttctagggtcttggttcaacaattcttgttcaggttctatatttgggtcccatgtctaggtctgggtttgggttttgttcttcgtctgggttctggtcctagtctgagtactagatctagacatcgactactggtctgttctaggccactttacctgaatcccgagtcaagatctggatcactgtcacgggtcttggtctggttctggttcaggtcccaggtcccatttcaaagattgggttcgagatcaagaatgcgatgcggttctaggtcccgactctggttctgtgtcccttgtctggttccatgtttgggtctgagttcaggttcgggtttggctccccagtccaggtttaggttgggatttgggtccggctcccaattcaggtgtatgtctgatttggagttcgggtcctcgtccggttacagctctggatctaggtccaatttcagttat

SEQ ID NO: 287887 - DNA, 394 bp, Cannabis indica
cacaaccttccacactatgattgagataccacttgatgtgtgtgggcactactctatcacttagggatttcgaaacaaagaagaagaagaaagagagagagaggtggcggctcaggaattttctctgaaaggaatgagatgcaattgtgatactttcctgaagccattactttctatttatagaataccacatagggttagggttgaattacttggcattaaaataatgaaaacattaaatgataaaagctatgcatgtggccggccatggcatatggaaatgggcctcacttttgcaactttcctgttttatcatttctgtatcccattttctcaaaattgccaattttcacattcaaccatttaaatgtcaattttaactatttaataacta

SEQ ID NO: 287888 - DNA, 659 bp, Cannabis indica
gagtagcttaggttcggatcaatgtcaaatgtcaaattgtcgccccgtttataaacccaatctctaccatcaaactcccaaacaccattatacataacacacgcattaacagttgaacctgtcacatacatttaaaaaaacacagttataatttacaacaaaaatctcaccgaaaaaaaaatcttaattaatcattaataacaaaacaataataattaattgataataaaataataattctaataattcataataaaacaataattaataattcataataaaacaataattaataattaaaaaataattattaattgataataaaatataattaataattattactcaaaccataaaaaatataacaataattaataaaacaataattaataataacaataattaataataattcataattgataattaataaaataactaaaaaaataaattaaattcttaaaacattaactaaaataacaattaataactaataattattaataaaaaataattacataacacaaatattaataaatacaataaaaaataaaattaaatacatacaataataaataaaaaaataaataataaattaaaaaataaataaaaaataaaaaattcccgtagggtccgattggtccgaccatcggacccca

SEQ ID NO: 287889 - DNA, 751 bp, Cannabis indica
agtagggactcgagggggcgtcgggcccggttctgtccatccacttcggcctgtagtgcacgcagttggtcctggatcgcagtatattgatcagtggtaagcttgatgattccctcggataccactgccggagtgacagggggaaaatgcatggttgctggtggtgtggacgtgtccccgacttgagggtcagttgtttcagggaacaggttgagaggtctgatgttgctcctccctactccgccattaacgacatccacaggcggtgttccagctccggacaacggtacgttcatcattccaatgttgatggacccgttgttagcacctccgtttgtttgatttccagccatgatggtatttttacttaaagtgaataagattttaattctcgatttcccacagacggcgccaaatgttgtcgagtgaatttcgcaacaccagattatatgatactattagtaacaagaagaaatttacgtgaagaacaagtgcgagtattcaacctagaatggcgagtactcaaactgggaatgagaaatgattaacaaaaaactggaaataacaatgagacaaagaattatagtggttcagtcagatcacggtctgcttagtccactgtagcaagagtttcgtaggtgccatttcacggtggatcacccctttatatacaaagcagatgtccaattagttatacaaggattgcattcattgccaatccgttttttacacattgaattacaataattaa

SEQ ID NO: 287890 - DNA, 619 bp, Cannabis indica
ctgtataagagagtggtagacttggccttaattgctaaggaggccgagcagcaagtaatgaaagatcaggctgcaaaggatgccgtcacggcatcaaatcttcctgccagcggtaatatctgtaaggggaccgacagtggaaaccctgagcacaaacgaaaggccgaggcttccggagctttagggggaaatagaaagtttcggggaaacagaggtggccgtcagggtcgcgggtcctcattccgatcatatcccgaatgttctaaatgcaagaaacaccatcctggtgagtgtcgagccaaggcatgtttccaatttggcgtggtgggccactttatcagagactgcccccaggctaagaaagaggagcctaagaagaatactgcacagaacccggggcgacttttcaccatgactcaggctgacgctgatgctagtccgtcagttgtctattaatggctgttcatatcactactacaatgttagcctttagaggcagttttttcaccgccatttataaaaagggaagctaaagggtttgaaaatacctggtatgttcgaaatggacatatagaggcggtttttttaataaaaaccgtaggtataaaattgcattata

SEQ ID NO: 287891 - DNA, 851 bp, Cannabis indica
tatataaccggttctattttagttataatcggttttgagttatttcgtgttattgatttttattcattataacactgttacagaaccggttctattttaattataactggtttaaattattttgtgttatttatttttattcattatgttacagaaccggttatattttaattataaccggtttgagttattttgtgttatttatttttattcattatgttatagaaccggttctatttttattatatccgagacatttgatccccactttttttttaaaaaaaaaatataaccggttttatgaggtattatgtgttatgaagtattttattgtgaaactagttttgtctttaatttatatttcagtgttttaggaactgatttcttctttgtttttaattgtaatcggtttgagttattgcgtgttacttgtttgtattcattatgttatataaccggttctattttagttataaccagtttgagttctttcgtgttatttgtttttattcattataacactgttatagaaccggttctattttaattataactggtttgagttattttatgttatttatatttatttattatgttacagaaccggttatatttcaattataaccggtttgagttattagtttttattcatataaccggttatatttttagttatatatgagacatttactttggtgacttttccagtgacttttccagcgacgttgacttttccggcgaattttccggcgacgtgacttttccggcagcttttccagtgccggtgacttttccggcgatttttttcggtttcagtaactttttcgacaaaacttattgttgttttataa

SEQ ID NO: 287892 - DNA, 149 bp, Cannabis indica
tagggataaaattactgttacaccctttcaatgtattttatccttaaaatacttgccacctatccaagcttactttaaccaatgccctggaaaggacatagcattaatccaaggtgcaagtaaactatgttatagattatcttatcagt

SEQ ID NO: 287893 - DNA, 754 bp, Cannabis indica
aaagaaactaacaagtaaattttattctgaaatagttaacataaaaataaaaagtaatacaacagtattacattgatcaagcacaaacctagaaaaaatctacttaataaaaaacaaatacaacagaaactaattagtataccaaccaaaactatagccaaaaatactactaaatcataaactgttaatacaacagaaactaattagtataccaaccaaaactatagccaaaaatactactaaatcataaactgttaataacatatacattaaaaataaaaaatacactagaataaaataaaaaagatatgttaatgtcatgtcattaaaagaaaaagtaaaaaaaaaaaaataaataaaataaaaagaaaaataatataaatgaggtagatgaatgttaagataataataaaaaaaaaaagctagcttatacatacaaaataagaaaaaaaaaaaaaaaaaaaaaaagaaagggcagcgtacctaagtatatacctgccaaaaaaaattgtaaaactaaaggtatatttaacacttaaaaccattaacgttagttgtaatatattttttaaatttttgtttctcgatgtaattttttctaattaatattatcaaaagtttaagagacaaaattattaattattctatttaaaaaggaaaaacaaaaagtttgtgataagcaaatttgaagaagattacggtttggtcaaaatagctaaaagttggagaattttacttttaattttaataatat

SEQ ID NO: 287894 - DNA, 598 bp, Cannabis indica
aagttagcgccgtttaatctcgaaagataaagtattttttgaagtttttttatattagtattgatcaccctaatggtggcgactgtataagacttacataagtatgaaacaatggtggaagctcataagatagaatagccttgactctcgcctaaacgggactgttgcccctgattttgcccaatatacgtggaccaaccagacagggacacgtggaccaaaagatcttaacatttgaattatttgctaagtctttatgaaggaaggcagtatccgggacttgtttcccggagaaggcacccggagccccctatgctcccggaggcctaaataacatcaaagcatctccgcgaggtgtcaggcttcccctgagcagtcatctcgcatttaatgccgcatgggaggaaacgtgttgggactgctacacgcaataaagtctgacggcacaacccccaatctgcacctgcgaagtaatgatcatttaagtctattgacggctacactgcgaagagtcacgtcagtcaaaagacaataaggacattccacataaaagccctacagcacctagggatttgaccatgcattacccatggtatat

SEQ ID NO: 287895 - DNA, 1162 bp, Cannabis indica
tgatggacgagattgttgtgaatacatttacataatagcaaaattttgagctcataaagttatacatttattgtgtaacatatgttgcccaagtggaagattgttggattcactactacaaatatcagaattcgcgacgatcctaaaaacgatttctttcagggaccgtcgctaaaaaaattaagtaactatttaaaaccgttgggaaaatttagtattcccgatggtttaaaatcgtagtaaacaaaataggcgatgttttttaataaaatgagatttttcaatggacccttataggcgacggtttaaaatcgtcgcctataagggtccaataaaaaatcgtcacctacttctcgccacatttcccacgtgaccacatgcttttttttttctattttccacatgccctcctatttcttctccatttcccacaccctaaaatgaaaaatcttaactctccaaaaccccacccatgcctccgcaccatcgccctcctctctcgttgtcttcatccctctctcgatctccctttcttctcgtctctctcgtccatcgatctccacccaaccctcctcccgtcggtctacctctactctctgtcgcatatgtcaaaccaccaccaccaccctcccgtcggtcgtccctctcatctccgtctcatacatcgaaccaccaccacctccccttcgtctccctctctccgagctcagtatagattatttatttatttttatacttttttatttattatatatatatttattttattattgtataaatttaatgtgttttaaagttaactgttattgtaataaaattaattagttgttttattttaatttaggtaaaattataaaactaatgcaggaaaaaataggagaaaatacagattttcttttctgagaaaaatctgtatttttttttacattctcgacagtttaaaaccgtcgcctataacagggtataggcgacggttttaaaccgtcaggaagtccacattagtgacggtacctattttgcccattttgcgatagtcgtataagcgacagttatagaaatcggcgggaatactttaaacgactgtttaaaaacgtcaagaaaaactatttttgtagtagtggatctataattttaacaagctatatgatacaagataagatgt

SEQ ID NO: 287896 - DNA, 638 bp, Cannabis indica
accacttcaaaatctccacatgttatccctaaaagtgtgccatccaatgcttctgcaaaagttccatttccccaggctctgagacctgctgggagaaatcttgaaaatcgaggagaaatccttgagcacttgacacaagtgaagattaatcttcctttgcttcacgtcatcaaacaagtgccagcctatgctaaaatcatcaaggatctttgcactgtaaaaaggaagcatcatgtcaaaaagactgctttcttgactgagcaagttagtgcggtaattgaacaaaagacaccgccgaaatacaaagatcctggctgtcccaccatttcttgtcaaatcgggactcatgaatttagtcaagctttgctagacttaggagcgagtgttaatctcatgccttattctgtctactcgcaacttggtcttggtgaaatcaagcctacttctgttgtcttacagttggctgatcgttctatcaagaagcctcagggtattgttgaggatgttcttgttcaagttgacaaattctattaccccgtagactttctcatcctggatactcaatctgtggttaacaaggagtcaaaaatctctatcatacttggaagaccgttcctcgctacagctaatgcccttat

SEQ ID NO: 287897 - DNA, 800 bp, Cannabis indica
atcattaacaaattgatatgttctagacttaaataaattcatacattatgtaaataatgatgaaataaatcatgtgaaccatgcaacattaaatgttatttctgatctttattaataagtaaatctgattatattgaaatgagttttatttagggcataaaacccaacaccctctgtgtcacccatcaaaccccaccaggtgacatccaaacaagccacccagccctccgtgtcaccaattgcaccccctaaccaccagatctgaaccatctcgctagagaagaaaataactccaattgatgaagaactacagacactgcaccaatgccgcaacaaaggaaaagccaatctcatagcaacccccatgatctagagaaaacatgggttcaaactagttcacaagctccaagatccgtaaattcataggagaatcaaagaagaaccaacatcaaacattatctcgtagtgtaatctcttacattaatattttttaattttataaattaattaattaattttgaaaattgaagctagtttttttttatggtacaagtaatgttatagcttattaactaattgatttaaaaacttaaactgaaaaaaaaccgagccgggtcaaacctaacccggtttgtcaagactaacccgtcccaactcaaataacttgttggggtgaggcaggggataattcgaggcaaaaatctagctcaaaatgcaataacgaattacagagaagagagagagagagagagagagagagagagagagagagagagagagagagagagagagagagagag

SEQ ID NO: 287898 - DNA, 528 bp, Cannabis indica
tcaaacctttatgtttcttttgagatttttccaaattaccaaaataatttgttttaaacaaatttttcaacgtgaaacatttaggtctgatatgtccttttctaccacaaaaatgacaagtaggaacaaatctttttacctgagatcttactctttttcgtaaattctagagattttgcggcagcagaaacagcttctgctacgacaggctgtgagactgttgcagcagacttcacatttgtagcctcaggaagattcgttggaacactaaattttacaaacttcgtgattccagaactttccataccattcgatccaatgccagcaaaacctctttgacctgcattctgagctttttcaaaaatagaagatccaggattaagcatttgaacatttttcttaaaattttcaagttccttctttaagagagtgattttttcatctttagcacaaaaatctgtctcataatcttttattttcaattcacacatgtcaatttgatgagacaattttttattcaatttattc

SEQ ID NO: 287899 - DNA, 622 bp, Cannabis indica
ggacatgaagcttccatgcaattttccatatcttaatctcaaaatcactagtattagtgatctctgaatggtgcatcaaccgatatgcctccctcacagtatagaaaccatgaagatccttatgccaataccaagtgtcaatgggagtctcctgatcaatgttggttcgaaggataatctctttatctcggtcattgaatatatccgaaaccacctctagatcccaagcccgttctcctaccaccatgagattattaaccgtccacgtctccataccattagcaatagaagtaacccacggttgagaatcatccgcaagccacagatcaaattgaacactaatgttcgtacctggaccaaccacccgacgagctccctccttaatcaaagcttgcgtttcaaaaatactcttccatatgaagctaggattcggcccaagagaagcactcaaaaaagaaccctgaggataatatcgggccttataaacccgactaacaagagaatgagcatttgtaactaacctccaagcttgttttcccaacatggctaagttgaaatcccttaaatctcgaaaaccaagccccccatgatgcttatggcggcacaacttcctccaactcac

SEQ ID NO: 287900 - DNA, 518 bp, Cannabis indica
attataactatatgttattaattaattaaaaaaataaaaatgtgatttgaaaaaaaaaaaaactacacatgtgtagttattattttttaaaatgatttttttaaaaaaaaaattaatatatattattaagtttataatatttttttttgatgaatcagaaattgtattagctcaaaaacaattgattacacccaaatagcacccaaaggagggcctaaataaaaacaactatacaatgttaatatatttacaaactttgaaaccattgtgtatctctctttgaaactttttttggccaaaacatctcaattctaagcttcaagttggcttttaattccttgagtaaagctgggattagttgttcctctttggtccatagaaccgtatttctcagccgccatatgctgtaaaccaggccggctacagctgctgtgtaaacttgcagcttgaactttgactcctttgatcttccaagccatttaatgaggttgggaagacttgtgtgtattgttctccaa

SEQ ID NO: 287901 - DNA, 509 bp, Cannabis indica
cgtcggttcctttataggaaccgaaggcatagggtacacggtttgctgacacatgtaccctatgccgtcggttcctagccataggattatataagaaaaccctatgcgtctgatcatttcctcatcttcctcactcgaaccaaacagcagccgagccaaactagagagctcgcaaccctctcgccttcccaccgccttcccacccttttctcccccatttctcaaccatttgagcccattttttttttaaaaatcttccattttcgatacttaatcacatacacctaaaaagtttttattttttaccctctttgagtgtcatccgaacccaaatagaaaagtttgggtttaaaatccggccaccattttttcttgagaaatccttgaatctaaacctcctttaaggtataaatatagtttctattcatttttataatttacgttattttattttttgtttttgtaaattatgttttgggtttttttcattttattagtaatattattgt

SEQ ID NO: 287902 - DNA, 935 bp, Cannabis indica
ataattgccagatccaaatactgaaacaaagttttggtattgcaggttgtttcacattatgcaaaacctggtagctttgcttttgcatgtggttatgtccttgttcttgtcactgcagaggtaaataaaagagttcgtgattttgttagtgttcttcatttgtattctcttgtgttttcgtctcaggtgcccttttgttttggttttgctacaagtcaggctacaactgaccagaaattttaaataacaaaatataaaaacaaaattgctctttaatggatggcaaaaaatgcttgaaggaactaattgacccaataacaaatagaaattatagcaagaaaaagaaggaaaatgtttggatggaatacctctttatcttgtcatatcataagaaaatacacgacctgatatgtgaattgtgatatgttttaggttccacatcttatggatcttattcttgccgagctacacaaagcttgcatctatacagttccaaagcacatagtatacacacaggttggcgattggggtatgagtagagtagaggcgagagggagaagtgaaaaggagtgagattgggtttgaaaggtggagaagtatgaagataaataaatggaaaagataaataaatggaaaggttattcatagctaatatttttgtgatattaatgggatttattttattttattttattatataaataaaaagtcattcatgaatttctcataaaccaaaaattcagttatataggcacacttaaaatagaatagatatatagattttgggttagatatttaaaaatttttttctaaatttaaaaaacaaagaaaaaaaaaaatacaaagaataaaaagaagaagacgaaaaagaagtgccgagagatatataaatattataaatatatatatatatatttatatagagagatttaggg

SEQ ID NO: 287903 - DNA, 562 bp, Cannabis indica
actttatattttctttttaaatttatttacgccccccctcactttaaattctgggtccgccactgaatataaatatatatatgtatatatatatatatgaagatgaatatgaatatgaatatatatgtatgtatataaaaaaaattgagtatgaatgtatacatataatcgggattatataatatgaaagtagaatatataaaatatataatttatattacaaatgaagaaccccgtaaaagtatatatgtataaaactcaaaataaatcaaggcagagatatataatccgctctgataccaactgttagacatttatttgtataaactgaaacatacatgattatctataaagtgcgaaattaataaatcatatatgcactataattaaggatcgaagtacctccagccattgattcttgagcttcaaacccacataagctttgatctgcaaaggaaactggttggtgtgagtaatcgagcttcctcgctttctcaactctctttagatagattttgctgttattaacagaatgagtgaggagctcggggaccgagaccct

SEQ ID NO: 287904 - DNA, 572 bp, Cannabis indica
aaatattaaattaaaatttatatttagagttatctaaattagtaattttaattatataaatatatattaaaataaatagattaaaatatatatcaaatgaaaatacaatctttaaaataatgagctttagttataaggatatttgatctccattgttggttctacatagttcttattttagtgagtaataatccctaatagatgaacgttcattatcaatttaacgccgtagaatctcgaaagataagtattattgtaagtgttttattcttagtaacgtccaccctaaagtggctgctagaagtaagacttgcaaggtatgaaacaatggtggaagctcataaggtagaatggccttgactctcgcctaaaggggacaatgctggattatagtcttgatcgaataaaaggttactagaatggtatccattttagatgagttgactactctattcaatgtatgatatctttgtctctcgcctaaacgggacactgtatcagtttgttggaaaccttggaaattatttaagatatgtttctttagtattttcacatgtctttcttacttgcaa

SEQ ID NO: 287905 - DNA, 747 bp, Cannabis indica
atatgtgaatttaattgatttataatatgttaagaccccgttggtgagccaggggcattttagtaattatgacccgagaagggtaaattgatgaaattaatttaattacgtgcttaatagaactatattattatatagtatgcatgtgttgtcttttcaggtgtgttctgacaggttggcgcggtatagtcacaaccgggtatttcgggtcgaactgggttcgggcccgaaatgcaattggattgaattaattggcattttatttaatatttaataatctgaaatttagttggaattaaatgtgtatgaaatgtcataaatacccttgtgtgggtgaataagtgtgcattggccttaagggcattttggtcttttgacctttaattactatgtttgacaaaaattattttcgaggaaagtaaatgaaatttctggttgtttctctctctcactcgacccctctctctctcaaaaccctctcttagtttttcaacttgaatttgggagaaactagtggaattgaagcttgattgttgagaaaattgtgttggaagcttgaggcttgagtgtgcaaggatttgaggtagtttttacagtttttaactttggattccttgctcaaattatttatgaaaagcatgttttaagctgttttgttcttaatgttgcatgttcatggttttgatgtggaatttggtgaattgagtgagaaattgcatcattcatgtttgttgagcatggagtaag

SEQ ID NO: 287906 - DNA, 504 bp, Cannabis indica
ctaacaagtatgttgaattaacattctaaatatgaatatctctaaaacaataaaattacacacataagagtttataaaaccttacattgattgcagtggaataataatgacttcttccactcagatctctaacccttgttcctttctgtcgtagagtattatcaagatctgagcctagactctttctctccttcaggttggttaccagcgtcttccgcactatgattgagtacttgacttgctatgtgtgggtatggtactctttcactatgggcaaattggatgaagaacaatgaaggagggttcgaatcactatagaaggtgtctctcatctactagttgtctgacagagttagaaacaagatttgacaggttgaaagtcttggatgagatgagagcatcatattccttttaagtgtttcaactagggtttatgtttgaattatatggattaaaaaagaataaaatattgggcaaaaatttactagagtggccggccactta

SEQ ID NO: 287907 - DNA, 708 bp, Cannabis indica
cacccaaatattgttaagttaagagcttattattgggctcttgatgagaaacttcttatcagtgatttcatctctaatggtaacttgggcactgctcttcgtggtaagtttctcaattttcactcacccttttgttttttttacttcttctgtcatgtcaagtcattatccatattattgattggggaagtgtaaaattccttgcctaaagtaaaaatatttgaaaagagtcaaaataacataactaacaatcatagttactcttgtttcttttttcaattgaaatagtaactaatcattaaataccaaatcatgatattttttctttcgaaaacaaatgatccttgtggttaagcatttatggctgtcatgggtagatggataggcttgaatgaatttgataatttctttcagcaatcccaaaggtcttctcttttccctatttattttaagtctttggctgtttgtttctttctataaaccagagacatgttcataattttagtactaaatcgggaaacacaaatctatcacctatgcatgagaaaaagttaaaaaaaaattaatgtctaccctttggtaaagaaaatgtaccctttgtcaattcccaatgtaaaagaaaagaaagtatctttgtgttggaatctatttatttaatttgtcaaactctgtggaaattggtccaagtatctgacaaaaattggtccc

SEQ ID NO: 287908 - DNA, 545 bp, Cannabis indica
ttaaatatttgacaaaaattaaatagtgcaaaaatatgtgaaaataaataatattaactttggaacaaataaaatatatatataacatatagttttaattatttaaatacatttaaaataaagaattataaaagaaatatctgaaaaaatataactaactgggtaaaattaagttcatcaatcacctacatagaaaataaattatgctaactttgtgacaaataaaataaaagaatattgatttatttaatgtaaaattatatcacccacaatagttttttaaaccatgtgggacttttgtgaaatgactctcatattactaaaaggataaaaaatatagaaaaatgataaaataaagatatattcaacaaaattattaatgtaaaataaaaaattctaaaaaatatatattatttttatttgttaaaaaacttaaagatttttttaaatttaaatatttgacaaaaattaaataatgcaaaaatatgtaaaaataaataatattaattttggaacaataaaatatatataacctataaatttaa

SEQ ID NO: 287909 - DNA, 699 bp, Cannabis indica
atgtttagtttagatttttgagtatgctgaaaattgatttgggtggtttccatggctggttgacttgagttgcattggatgaagctaaaaattaagttttcttcacttgaacatgtgattttgagttagagattgaattgttgtgttttgaagcttggaatatgttgtcttatggttattatactgctctgtaaagtttgggatcaattggttaggtttggagcaagttttgggactttgaagagctgaaattttcgagtttctgctgttgtgaaccggaattccggatggaacatggctgccaaccggaattccggatggtcaattttcagaaattgccgattttcgtattttagccataacttctcactcgggtgtccgttttagacattctatataccgtttcgaagcttatgaagagctctacagtatgagacatagattagagccaaaagatgtattttattttagggtgtttttaccataagatttggtagaaaaccctaagttattttatgcgggttttagacagtgttttggaatggacccttattgatttacctttatcgtgacataggactcgaaagtgtcgggcatcattccactcaggtcggcccacatacttgactttggacttgaggtaagaaaagtactatataccgtttgtagttaacaattataattgtgatagtctcgatt

SEQ ID NO: 287910 - DNA, 513 bp, Cannabis indica
aatcatcaaataagcacataatccatcatgaaaccatccaaatcaatagaaacatcgttttaaatccatatttcatgaaagtaaatcattaccatgggtcgaaggctagttgtaggaatatgttttaccagaatctagatttactaccatgtatgttatttaacatcctaaatatgaatctctaaaacaatgtaattaaacacatataaagtttcagaaaccttacagtgggtgcagtggaataatagtgactccttccacttagatctctaactcttgaatcctatctgtagcagagtatcaccaagatctgagtccgaatctccttctcttgaaactagattcttcacagctttacacactatgattgagtaccacttgatgtgtgtgggcacatactctaccactatagggtatgaaaatatgaagagaggaagagagaaaagtggttcgaaataggtagaagagatggctcagaaaaatttgactgaaggcctgaatttcatcatcttt

SEQ ID NO: 287911 - DNA, 494 bp, Cannabis indica
tcaccaagatctgagcccgattctccttcttgttgattgtattcttcacagtcttacatactataattgtgaaccaacttgatgtgtgtgggcacttactcaatcactaatggttgaatatattttgtgaagaaaggcttactgtttcgaaattgaagaggaagaagaagaaggaagatgtctcatcagaaagctaggttttcagctttggatgcattagttggataagagaccatagccttccttttatactatcttcaatagggttagggttgaattattaggaatgaaaaactgataaaaatagggtaaaattaaacttgatggccgaccatttaatgggccccactcaagtttgggttttgtcatatttcccaactattttacctatttttcataaattatgtttttacaatttcaaccgtataaatgccagaactatttatttaataatgataataactatcaaatgaaattttcatttataatattta

SEQ ID NO: 287912 - DNA, 714 bp, Cannabis indica
aacaaataaaagtttaagactttccaccacaataattacaaactttaaaatttttatagtataagaattgttccatattagtaaatattaaaaaaaagaactattgtttagaaaaaaaaaataaagaaattcaaattattaaattaatttaaaatcttaaattaaaaaaaatcatatcttttgaaaggattgaactcatgtcattgtacttgatatacaataattttaccacttacaccattattatattattggttgtattgattattgtaggattagataacttgaatattttgtacttttctagctacaattattgtgttaagtagaaaataaaattaattaaaaataaatatataaatttcaaattaaaaaataattaattaaaaattataaatagtcataagataaataagtaaaaaaaattataggtttggagtttgttagttgaacttgtaattaataatattcaagattaattataaataaaatatatattaattatggtgtaattttcaagggttaatttgagccatttgattaaatcaaaggctacaaattattatccctattgataggtaaaaatcacaatacctattgtattaactcccaattttaaatttaaaattttttaatttaacaatttaatagtaaattttttaaataataatagtataagttatttctacgatttgtttttattttttaattatt

SEQ ID NO: 287913 - DNA, 793 bp, Cannabis indica
acataaatttattattatagatacagataggtataaataatccaggtgtagcctatgtataatctctttaaaatactacaattagctagcttcaaaagaaattccggaaaattaagaataaaattttaggacagcttttataagaaataaaataaaattattaagacagctcatgataatgtttaggttagccttgtaaacttgaattatattataaacaagtattatatttatcagaatgacttgcatttaatttctttgtttgtaaatcttatatatgaaatgtggttattttgttgatttaacaaaatattttaaaaatataaaaatatcattattattggagttagttttataattattaattatatttattttagattatttatttatttattttttgaaatgattttagattattaatattatttattttatgttaattgaacttatattaattttaaattaatttaaatttacatgaagattaataaattaggtgtaatattattttattattattatttttaatattaggagtaggtttaattttaatattttaaattttatatttacttttttcaaattttttaatacattaaatattattttcttaaaaaaattaaaaattaaaaagtaagttttctttatcttataaaattttaaatataactaagtaatggtgcaattttagtatgtattatctatgagtatttattttattattggctatttaatcaaatctaataattgatcttatcgttattaattaattttaaaaaattaataatat

SEQ ID NO: 287914 - DNA, 615 bp, Cannabis indica
ggccggccactaaaaggaccaatctctagttacaattttgccactttatttcaactagttattcttctttcaataataccatgtttttcaatttcaatcctataaagcccaaaactatttatttaataattataattaattgtcaaataaaactatcatttatattagataattagaccatacaaagtctcttaattaataaattaaccccaaaatctcttttcttcacaattacccccttgcttactaaaaatttataaataagacatagtctaattttagaattctaattgattaatcaaaaacaattaactgagtctgtaagcagtattatctcaactagtgaggggatcatggacctatataaccgagcttccaataagtagatctagaattcaccaaataaattctctaacttattaattcctccttgcgccactatagattcgaaattaaattgcactctcaattatatagaatactctatatgtaccaagataaagatacgttatgattatccattgttacaatcctaatagtgaaagatccattatagatgatctacaacgaataggcacaaatttaccgttctaccctttaatgtattttatcttt

SEQ ID NO: 287915 - DNA, 1018 bp, Cannabis indica
taagcagcctggtttttataggagcttgctaaatgagcagcctggtttttataggagcttgctaaataggcagcctggttcttggcagaggtgatgggatgggttgtgtgtaggaagagaattgatgagacaggatggttatgtgtaagaagaaaattgatgagacgggatggtagtatgtaagaagaaaattgatgagacgggatgcttgtgtgtaagggaagagaatagggagcaatgatgaaaactgagattcttagagagaaactcttctttccttctgtatgtcctctttatgtgtcctcaaccttccttttataggagttgagtacataacataccctgaatacaacctaccctacatacaacctccttgcactaaccttatcctttaatcaacttgttgatcgataaggttgtatctcattcgtaattaactgcttcacccaagggtttttattaaagacaataacccttcctattatatccttttatttatcaacatttagccccctgtctgtatagagaagattgtattttctttatgcagacaatatactgacactttatgtagttcctcgatacgcgctctatagtcctttgctactttttatggtgaacatcccttgaagactgtatataaatataccttgttgtatacttatttcatatcattttatcctattagaaggcacaaaaaaaatgtcatctgggaatagccatgtttcccatcctacacctctcaatgtagttggtgagttaagtgagcttccttctgaagctctatcatatgtcaatgatttgcgtagccgtgtacgttttctagaacgtacgcttaatgaatctgatgacactaaccgtattagggcatctgaatgtcgcgatcatcttcgtcaccttgacaatcccaatgatcgtttcgatgacctttctctaaaaatgatttctattaggactgaattgctccaaacttcgtctgtaatatctagaaaggaagctgagctaaggtgcattctcg

SEQ ID NO: 287916 - DNA, 595 bp, Cannabis indica
aactaataggggtggagaaatatttggtggatatgcagttcaaagatcattaagttgaatttttgaattgtatccaaacttacctccctagaaattcagtttgcatattgatgaaagtaaaaggtctatgatttgttactagcagttgcctaagtccttctaggaatataccctagtgatagaaaatttcagaatgataaaatgattgtgtacttagtgtaaaccattactagattcatggatgtcctgatcgtgaccttaagaaaagctagaactgttaattgaggtttgcatgtttgatagctattctaagtgattaggggtggaccatcctatggtcattaagataagaaagtgtttgtttcaacaaatacaatttttttaagaatatgactaaatttgaaaataaagtagcaaagtagaagatatatttttttcttgattccaaagtgttctatcatcttattgtatataagatggtcccactacctctgttgtattgacccaatcgaagaagaaaataccacttatgttcttagacaaaattcacgataccttatcgtagtgtaagggtttcaaggaactcaccctgtta

SEQ ID NO: 287917 - DNA, 477 bp, Cannabis indica
gctttattcttcttgatcaaaaaaaagttcactcatgcttttcttatgtaagttaggctattaattattttggtgtatttattatattttatgttgtttactgcaatctgccaatagtggtattttgtcgatttatgatatataatatgatatgctgttaagttagaggtgagattcaatttatgcaagatagattaatttgtgctttagggtcgcaaatgttccacattccagtagttctttattagtgatccgttcagttgagccaatttataaactccaattccatatactgcttcgatgacatatggaccctcccaattcgggttgaacactcctacagatgtatctctcgtatttgaaaattcttgccttagcaccaagtctccaacattaaatagtcttttcttgactcttttgttgaagtatgttgtaactcggtgttgatatgctgcgttggtgatttgcaactcagtt

SEQ ID NO: 287918 - DNA, 669 bp, Cannabis indica
aagatcttccagacctgttctatatgacccaaaataaccattctaaggtaacaaactcacccagattgcacagaaacaaaaagtgccattaaagcccaagctttgagttccaaaactcaaacttggttaaaatcaactaacatgcatccaaaacagttcaaacctacttgatcatgcatataataacctctgaaagcacaagaattcgacctcaacaaacacagcaacaaaactcacaattttactttggaaactcaagcttttgcatagaaaaaccataactcaatcaacctaactatcatgcattactgacagctcaaatctcctcaatttaacatgcttaaaatctctgaaaatatcaacaaaatacagcagcaacaacatccatttatcatgcatgcaatacaccattttcatcaaaaattcaacaaacttaaagaggaattgcttagaagctaacctagcttgaattgaacaccaaagagggatgaaatcacaaggaaaaatcccaagtcccttgctgcaccaagaggccgaaaagagagaggaaaagagagagagttttgaaattttctatttttcttttctaactttgatttttgaaatgaaaatgaaattaaatgtcacttactccttttttacttcagccaaaacataataaaataaaca

SEQ ID NO: 287919 - DNA, 504 bp, Cannabis indica
aacgaagaccagctttgataagttctcggccatatagaattccctgcgatgttaaagatgtccgagggaaatatctgcctttgagaattttggacagcaatgatgatggatgattgagtattcgccaggcttgctttgcaagaagtgcttgattgaagtgaacaaaagaacgaaatcccatacctccatgtgattttgttttgcatagcagcttccaatttttccaatggattctgttgcccgattcagttttcccccaccaaaaatttgccatcattgattcaagttgattgcatgtagtaattggaagttggaaacaactcatggcaaaagttggaattgattgaaccaccgcttttagcaagacttctttacccccaactgaaaaaaaaattattcactccaagtattcattaatctccacaccttatctttgatttctctaaaaagttgctgcttgttcctacccgaataagatggaagccccaagtatttttcatgaca

SEQ ID NO: 287920 - DNA, 804 bp, Cannabis indica
caacaaaagggaaacttgtatatttacctcccaccattgaagatctttaccgtttggacaggtaaatataggggtaaataatttttagttttatggattttttcttttggtaaaaattacaaaatatgaatttttttaagagaaaaattaaagaaaaaaaagttaaaaaatacgtgaaaaacaatttaggtaactagacctctttagtgtaattagttaccgtacaatgcacctcactaaaatgagtgtattgatataactcctaactgtttcggcatctgtaagaaattttaactctaagtttttttttttttattgttgtgtacattatagttatttaagacatcttgtgaaattttgagaaattcaaaataatttataatataaaatttaatattcaaactgtctatttcacacacgtataaaataaaaaagtcacacgtgcaatagattctttgaaccctgttttcgacgtgttaagtttttctaaatttctcaaaattttgccccgatgtcttaaataattataacgtatatgaccataaaaatattggactaattttttttagataccgaaacaaataaggatgcatcggtgtacctatttcaagagagtgtattgtagaatttttcttattgtttttttcgttattttttttaacttttttcttgaatttttttttctataaaataacttttaaactatttttgctacaaattgtataaaactcacaaaatgtgtaatttttacaaaataaaatagtatttttcaaaggacttttctgcaaaggagaaaaaaaaacc

SEQ ID NO: 287921 - DNA, 539 bp, Cannabis indica
ttaaaaacagtagttgcaaaacaaactaaaaactattgagcaaccaaaaagaaacctaattttcttgcaaccaattaaaaatacacttacatggattttaccaacagcctccaagccagccaacacaacttgatcatcatctatttcaagctggcttaacccatcaaagaaatcgtcccccttcaatcgagactcatcgccctttggcttctcaacatccttagcatttttatcactccctccaacagcctcagatggattcacatcagcaggggcaacatcagtaacaaccttgtcagcatcatcagcatcaccaccaactttaaccaactcaccaccatcgtcggagtcggaatcaatattttctggatcaggcagttgcttctcatcatcctcagcatcatcatcatcatcatcatcatcatcagaatcttgagttactaattcatcagatgactttccctgaatcaaacaacataaatgaaacttaaatgaaacagtaaagaaactaaaaaaaaatatgaaaaaacctaaacaat

SEQ ID NO: 287922 - DNA, 444 bp, Cannabis indica
ttacatggcccaagaatttgacttcagtcatccaaaattcgcatttctctttcttagcgtataattgatgatctctcaatgtttgtaatactattgtcaagtgttcagcatgatcctcacgtctcttagaatacaccaagatatcctcaatgaataccaccacaaacttatacaagaaaggtctaaagactctattcataagatccataaatgcagcaggtgcattcactaacccaaatggcattaccaaaaactcaaagtgtccataccgtgtcctgaaagcagtcttagggatatcttcttccctaattctcaattgatggtagcctgaccgcaaatcaatctttgaaaagaactttgaatcaccaagttgatcaaatagctcatcaatcatcggtagaggatatttgtttttaattgtcatctgattcagctttctacagt

SEQ ID NO: 287923 - DNA, 453 bp, Cannabis indica
tttaatttgattcaaataaacctaaatatattaaaaattagtttctctttttgagatttttaaggtttgttttaacaaccctaaatttttaaaatttatttggttagcttaagaataataatttaattatattaatatccatctgttacatggacaatgtttgtttatttatttatattatttattcaaaatttttttttaaacaaacctattatttatttgatctaaattgctatgattaacttgttgacagatccaatgagctgattttaatcatagtccaattatcaatagatcttataaataatttgtaataggtaaattttgtacttctttcatctatgtaaacttagtaacatgataggacccatccaaatcatttgacctgtgtgagcttatatgtttgctattgggcttagatgcatataggaagcccatttaagttttactaag

SEQ ID NO: 287924 - DNA, 675 bp, Cannabis indica
ttcatgtcatggtatgatgttaaaatattgaattttttagtaagaaaaatctaaaaatagttttaaaaattttgtgtcaaataccattaaacttttaaaatgacaaaaaattattttttattatcacttttaaaaactgaaaactgaaaacacaaccaaacagtctctaaaattctcttttgagtttattttatattagagaataaaaattagagactagtacaaaaattaaaattcatatgattgaatggtatgaagtaagaaggtaggttctcaacatttgtgtcaggaaccctttgattgatttatgtataataatgatgagatcattttaggctgcgctagtttgtcaacgaatcaatgtgaatcaaatttttttgatcatcagctttatctttgaatagattaacaaaaattgaacttcacaagacaagtcttcccaacattataaatgttttcattgccaagttggcatttgctgcttggccgacaaattattattattattattattatatacatacatatcaatgggaataattgatagctaacatagcatagcgtagtataacatagtaacagtgacatttaaaagtcagaagcttattgttcataaaaaaaacaaattactagagtttaatttgttataataactatatgtataataatacatat

SEQ ID NO: 287925 - DNA, 548 bp, Cannabis indica
tatcttttctggaatagttgagacttttccttagataagtaaaatctatgtctagaagttgagaagcttctatagattgttattagaaaaatgttggagcatcttactaaagtaagttgctagcactagagtaattaaataacaagatataccgtaagccacaggtttagataaactcaaacctactataatactaggaacaggaagttttgttgagtccattgaatagacttaatttcaaaaaattcctttcttgtccttgtaacagaaaacttttggttacaccatatgaatggtttcaaccatagttctcttggtgttacttcttagttccttattctgactatccattacttttttaaactaacaatggattttcatcacaagtgtctaccaagtgatcataatagggtgagttccttgaaaccctcccactacgacaaggtaccatgactttctgtctaagaatctaaatggtattatcctcttctgttgtgtcaagacaacagaggcagtgtgaccatcctatatagaataagatgatagaa

SEQ ID NO: 287926 - DNA, 696 bp, Cannabis indica
acccggcaccagaaatggaaccagactgggacccgagattgggatccagatctagatcaagggctgggacaaaacccgtagaaagtgtctggatttgagacccaaacaaggactcgaaccctgacaacgacccgaacccacacccgaacctgaacccaatcccaaacccaattgtggacccgaacccgtaacctgttaccaaaaattggaaacaaaatcgaaagttaatcgggactggaactaggatttggacttggaatcataactgaaatttcacgtagatttagaatcgtaaccagacctggacccggactccaaatccgacttagacctgatctggacctagatctggaccgagatcttgacccagacccaaatttggacgcgcactcgggacacgaacttggacctggacccaaacctagacctagatcggggtccagatctggacacaaacctggacacaaattgggacctgaactcaaacacccacacctataataagaccgaaagctagaccaagactcggacctaaactcgaacccagatcaagatcggaaccagggacttagacccagaattgaatccagactcagatcgagattggaactggggactcagacacaacctagactaagatccaggaggcgaacccacacccggagcttgatatggacctagactgaaatcaagacc

SEQ ID NO: 287927 - DNA, 674 bp, Cannabis indica
ctagagtgatcgtcttaagaatataacaaaaactcatatccacccctgaatgtacatccatattcgaatacagatgatcctactttcaagtggatataggcatattatctcttttacagagaatgatcttgtcaaaaccactctgaacaagatacaaatgccatagatatattgttattgtttgatgaatcctaggtttagttacaagaaagagttcttagaatagtccaagtggatcctggtcacagaatacaaaactcataatctatagagtaacatacagtttaaatctattgacagaaaatagatattaaacttgtgaaagttgtactatattgtctaatgtatctggaaactgaaatttaaaatttctatttagaatttaaaatttaaagtcaaagacttaaatttatgccagatgtacaatgagtagttattctttcttggaccaccactactaatctaactctaagtttaggttgctttaagtaaacatatacaagtaggagatttctaagatcgtggatttatatcattttaggatagaataccggaaatatagtcatctgtgccattcaatttcatagaagaatgacatcataagcagatgatttataaaccatttatccaatgatatactatttaagcaaaaagctaagaggaaaaaataaagg

SEQ ID NO: 287928 - DNA, 964 bp, Cannabis indica
attaatactcttccccaaactggatgacgccaatagcaacctacctcaacactggggaactcccaaataatcaaaatgaggctcgaaagatgagaaggaaggctggacggtacatcatagtagagggaattatgtatagacgaggattctccatgccattgctcagatgtgttacccaagaagaagaggcgcaactcttatctgaagtacatgatggattttagggaaaccatgctgtcgggcagagtttatcaaagaaaattctaaggcaaggttatttctggccaacaatgattgacgattccaaggcctatgttaaaagatgtgacaaatgccagagattttcgaagataccttgagcaccgcccaactagttaactcagatgcaaagtccttggccttttgccatttggggaattgacttgattggacaattacccaagggcaaaggaggcgtgcagtatgcagtagtcgcagttgattacttcaccaagtggacagaagccgagctgttagcaaccattacgtccaaaaaagttcaagactttgttatgaagaacataatctgccggttcgaattgccgtacaaaatagtctcggacaatggcaaataatttgacagccagtcctttactgatttctatgcaaaccatggtatcatcaaaagtttctccgcagtggggcatccccaagcaaatggtcaagttgaagcagtcaacaagacattgaaggatacactaaagaaaaggcttgaggaggctaaaggaaactggtcggaggaacttcctaaagttttatggtcgtaccgaacaactgagaaaacggaaaccaaacagaccccatttgccatggcatatggatatgaagctatgctacccgtagaactcgaaccaccatcccacaaaagattaacatatagccaagaggctaatcatgtactccttgccgaatcacttgattaaat

SEQ ID NO: 287929 - DNA, 558 bp, Cannabis indica
tgaggctgaaagccgatacccactaatagagaaactcgcttactaccttattctagcaacacgaaagttaaggccctattttcaagctcatcctgttcaggtctacgctaaccaaccattacgccaaatattacaaaagctgggcgcctctggacggctactcaagtgggcggtggagttgggttagtaggaaattactttccaaccccgaatagaaatcaaaggccaggccttagcagactctgtggtagaatgcacaggcaaagaagaaagtgtaccgtaaagcaaccccgagcccgtacaaacacctcagccaaataacattgaagataagccgacttagaaactacaggtagacgggtcggctacagatcaactatctggtgtagaaattgcccttgtcatgcctgggggcaacacctacacaatgcagttaagtttggattcaaggcatctaataatgaagccatgtatgaagctctaatcgctggcctaaagttagctcgagagatgagagctgagcacattaaaatctacagtgattcacagctggtggta

SEQ ID NO: 287930 - DNA, 394 bp, Cannabis indica
atggcaatattatttgataattaattttaattattaaataattagttttggaatttaaatggttagaattagaaaattggcgtttttgagaaaatgaaaattgttaaaattagaaaaataccaagtggggcccattaacctatggccggccacttaaaatgattttccacctaatattttcattattttaatgcctagtaattcctaacctaaacctagtggttacccataaatagatagtgatggctcacacttaaaatagatgaatttttttgccttcagaaaaaattgagcctcctaacctatagtcatagccgaacctctctctctctctctctttcttcttcaaattttcgtaacccttgagtgatagaatgagtgcccacacacatca

SEQ ID NO: 287931 - DNA, 611 bp, Cannabis indica
tttcgtcagttttttagtgacatatagtgattttgcgtcggtctacaaaaccgacgtataaaccgtagacgcaaatagtattttattgcgtcagtttggaattgacacaaaatatttataccgtcggttcttaaatgacgcataacttgtagcaaaatattttttttttacgtattgcgttagttataaatgaagcaaaggtgtaggtaaggtaaaaaaattataattcaatgaggcatgtaatcactaaataagttagaaaaattatctgcaaaaaattaaccagctaaactttacattaatacataaagttatacagtaacttgattacacaaaggtattgtcataattaaaatgttaattctaagataataaacctacataacaaagtgtaaaccaaagttagcgataaaaagttacaacattaagtaaaacggaaacaatagaaaaaaagaaaaataaataaataaataccaatactgtaaaaaagtactttagtacatgaagaatataatatacaaagtccaaaacacaccaaggcaactgataactatacacatatgtactactataatagtttttttttgctaatatatttggtatatacatct

SEQ ID NO: 287932 - DNA, 509 bp, Cannabis indica
tttaggggttttattcctcattaaattctctttcttttgatatattacttgcataaaattattgagtaaattaggagaattttaagattaaacttttagggtttatatatttctttatgaaattaattttgtgtttttcaattttattgattataatctgaaattgattgtgcatatctaatcaataattgatttaaaatgtttgtacacctttaattttcgaattggatcacatattcgggttactttcttctttagttttcagatttattttagattagatctacctaagtttttgtgtttttacatgaaattaatatcgtagatctattagaaattgtaaaccgatcaaagcccctatttttctcgtccgtttcgttacttttttggtcggaatttcatcccgacccgaccgggtcgctcaagatccgtgttgcagccatggaagctgctggaggttgaagacaacttgctgggatgaagcccactcgcggctgccggagagtgag

SEQ ID NO: 287933 - DNA, 533 bp, Cannabis indica
tgcctctcgtcaattgaaagattatgaacaacgttacccaactcaggacctagagcttgctgctgtggtttttgctctaaagatacggcggcattatctttacggtgagaaatgtgagatttatactgaccataaaagtctcaagtactttttcacccagaaagatttgaacatgaggcagaggaggtggctagaattggttaaagattacgattgtgagattttgtatcatccccggaaggccaatgttgtggctgatgctttgagtagaaagggtctcgggcaggtttgcaccacaatgatgatagcccctcaactagcctctgaaatggttagtgcagggattgagtttgtagttgggaaattgcacattttgtaacttcaatctgatctattggaaagaatcagaaaggcgcaattagaagatcccgagctgattaaggttcgagacgaagtaatggatggtcggcctaaggacttttcagtctcaaacagtggaatgttgttatacaaagctcgagtttgtgttccta

SEQ ID NO: 287934 - DNA, 550 bp, Cannabis indica
atgaaccaaatgacacacaaagttatgtaaatacttttgtttctttattgatatttaaaatataaagattacattgaaatggagtttttttgagggcataaaacccaacaaactcccacttgcactaatgtaaaacaatcagtacatttcaattaaacttaaattctaacgatgcttttcaaatgcagttcctgccaagactttcgtgaatggatcagctaggttgtcctctgtgtccactttttccaccagtacatcccctcttgccacatactctctgatgatgtgatatttcctttctatatgcttgcttctcttatggcttcgaggctctttactgttggctatggctcaagtgttatcacaaagcaaaaccagtggtttttccattccagggatgacaccaagtcctgtgaagaactttctgagccagacaagtctttttgcagcctcagcagcagcaatgtgttctgcctccatggtagagtctgaaattgcggtttgtttagcacttctccaaacaactgctccacccccaagagtaaacacc

SEQ ID NO: 287935 - DNA, 510 bp, Cannabis indica
ttaattaaataatcaaactgggaatattaaaatacggaatttcagattgcaaacatcttttgaattctttaaataatattgtgttatattttgtcaaatactatgctaatcgagttgctcctcaaattgcaagagcttctcgtttaaatgctgattgtattttatattttttgggctctaatatcatgattgatgttcttgtcattgttgaaaccaaaatggtctagctgaatgaaatttttcaattaaaaaaaggcaaatataaaaatttgtaattactattttacctctatgtatttttgtatttttccaaagcttatattttttaggataatgcttcagtagaagtattatattaaaaatgattttatataaagtattttttataaggtgtcattttttcattttatatctatatttagtgtttattattttttttatttttttatataattatttgttaagtaacactatcatttttcttctctcttttctcttctctctctctct

SEQ ID NO: 287936 - DNA, 709 bp, Cannabis indica
ggtttgtctgttggtaatataacgggtaatggtccccatttgcatcgtatcttttcactcttgtatccccatcaccaagagaaaaaatttcagagaaaggtttgatgcaaagtggaagatcataccaattaaaggtcattacaaaatcgattgtatggactccggtacgcttccgctaatctatattctattgtttgattctcttgaattaattatggctatattcagagtttacagtattctaacatgtagtatcagagtatccctaaattagttcttgagaatatatagtagtgttgatcttccattaaattatttttcctggtgactgtggtattatatatatatgcttataccattgaaatttctgcattactgcatgcgattaaaatttacattgtgtatatatattcatgatatgcatgcgattaaaaaggctttacgattgaagtttttcttttatgttctgccaattacgatttatatatactgtcaattatgttttgtggcatatattcataaatcaatcgtgtatatatataaacttctgctttcaatggatatatagtatctgcgattaaagttttatatgtatatatattgttgccatttaagtgttttggcatatgcgattggtatatgccatttaagtgatttagcatatgtgattgccatttaagttttatatgtatataaattgttacagtat

SEQ ID NO: 287937 - DNA, 500 bp, Cannabis indica
gatgactcttcttaatcagtgctagatcttgaaatctcaaattattagaatggtgatgatgatctcaatgttatgttgatgaaaatcatgagtgttgtttggcgaagagaacgaaacaagaaggaaaattataaatctttgatagatagcgagatgaataacttgtagggtataggattttatgagtgtcttctctaagaattgtgttcaggctgaaagaaagagattgagattgagttttatttttcttagggttagaggctctgcatattacgaatgtgatagatttaggttttataatctaattaaacctataaaagaaaataataaaataacccctataatctgatgctaatttaactctaaatagaataattaaataaaaatcttatttgttagatataagttttaaatttgaattttaaaacttagggtttctatactaaacttaacaggtcgtcactttgtagcttaattttgaccccaataaagttaaaatt

SEQ ID NO: 287938 - DNA, 637 bp, Cannabis indica
ttgataatttgatgttgttgctgctgtgattttgttgttattttcagagatttaagcatgttaaattaaggatatttgagctgttagtaatgcatgatagttaggttgcttgagttatggtttttcctatgcaaaagcttgagttttcaaagtggatttgtgagttttgttgctgtgtttgtttaggtcgatttcttgtgttttcagaggcttttatatgcatgtttaagtaagtttgatctgatttggatgcatgttagttgaatttaaccaagtttgagttttggaactcaaagcttgggctttaatggcatttttgatttatgggtgttctgggctgtgtagttgctttagaaatgttatttgggtcatttagaacaggtctggatgttttggcattgatcagattggatttgagcattgtgtgaatttttgaaaaattcctgcgaggaaccggaattccggttgtgcatccagaattccggatgggttttgaaaattcccagaactggaattccggttggacaaccggtctgccggttgggtgattttcaaaaaccctagttttcctcgtttttatgttatttggggtattgccatgctttttatcgataggggaacttttagttcctagttt

SEQ ID NO: 287939 - DNA, 292 bp, Cannabis indica
atattcccgaaattctatcccaaaatgatataaatcctcaatcttagaaatctcctacttgtatgggcaaatcaacttagagttaaattagtagtggtggtccaagaaagaattactcattatatttggtataaatttaagtctttgactttaaattttagattccaaataatttttttacaatacagtttcactttcacaagtgtttaataaccattttctatcaatggattcaactgtatggaatatgagtttagtattctgtgaccaggatccacttgcactattctaa

SEQ ID NO: 287940 - DNA, 557 bp, Cannabis indica
attaagaaactaagaaaaagggaaacttagaaaaagaggaatgttgattacccttatggcacgtttactatacagtattcggaatcagaataaattaaaggagaaatgtaacggaataaatgaaaaataatcggaatcaatatttataatatgttgtttactaaaattttttggaaatggaatggtagtgatttatcttgtttactttattaggaaacataatcggaatgcttaaattgattaaattacccttttgagttaaactatattatatggtagttattttataagacatatttaaaggacaaaattgtcattatatatttaatattaaaaaaaaataaaaataattaaaatccattacccttaatgacattccttataaaattggtgggagaagttctccctttcttttctcctttatttaatcaagttctccctttcctaattttaataatgtaagtaaacaaatgtaagggaatgattaccttactattgattcccattacttattagtaaacatgccattaatggtaataaataaaagatttggacat

SEQ ID NO: 287941 - DNA, 567 bp, Cannabis indica
agaaaaatatcatttttaaacttataatttataaataattaaatatttaacaaaataacaaacttttgaatttgaaaatattatggttaaaatatctataaaaatatctaggttaatttcaaatttattaattatttaatttgtcatataagataattttaatatcatatttcaaataaaaagataaagttatcttttaatttaaaatatgttaaatatcaaaatatctaatcttataattaaataatatataaatattaaagaaattaacaaatttttaaatctgaccataattagaaatatttataattggaaatatttaaaattggaaatatttcaaattggaaatatttaaaattgaaaatatttcaaattggaaatatttaaaattggaaaaatagaatttttggaaacaatcccataaaaaatggatttttggggaaaatcccacaaattgcaatttaggtgctggctgcccaggaggctgcacctgcagcctaggagaggctgctaacaacctcagagcgcgcggatgagggatgttgcagggtcccgtgtgcggcagac

SEQ ID NO: 287942 - DNA, 462 bp, Cannabis indica
cataagttcctaaatctcattacagtttaacatggcatggcatttacacaaaaaatatcactagggtaatcaccctagactatcaaatccgctcgtattagggtaataaccctaatctcggttactaaacaatcatacatatcatattcaatataagcgccactgcgcatactctacgtgctaatcactttcttacttgttgtcctacaatatcagagattctaaatccccgagtgttcctgatcaggtgccggtaatcctagtcacacaaattcgggattttcacacatagggttaacccctgatttcaaacttataaaataatctcatgacatttaaaatttatataattatataaagctcgaaacaagctttccaacgatataaagaactcccaaatcggagttcggaaacaaaagttatgaattttcaaagttcaaactcaaaactgtccaaaaactc

SEQ ID NO: 287943 - DNA, 550 bp, Cannabis indica
tatgccttaattttattatgatagtgttgctaattaagtttaccaagtacagtacactatctctatcgcttctcaatttccactgaagtaattggaataacattttccatgtgtactcatttatgacacataggatgaagagataagataatttctcaagttgcatatctattaataagcaatatttattcggaaaaaataaatactaaataaaaaacgcgtatgataatagtcaaaagtgaacctgcaaaaagaaatagtcaagttgaaaaaaatggcaataacaattatttcattgtgtggtaattattaaaaatagaccaaaatgtaatttaaatcctaaatacttagttgaaacaatatacatttaccctagagagatgaaagaatccctttcaaacaaatatgaaaaaagaatattgaatagattgtaaagggctcgtttggaacgccgtattaggtcgtattgtattgtattgtattatattgaattgtattttatgtaatatttttatataaaactatatgtggtattaacttttatggacac

SEQ ID NO: 287944 - DNA, 533 bp, Cannabis indica
cctaatcccctaaacgggattactaaatagaaaagcgcgggaaatttaaactttatatgcaaatgaaatgaaaataaacttgtaataattttaacattacaaacaaacaaaagttacatgtctcgggatcccaaaaataatttacaaaatattacaagtctgtttccaatagccgacctaagcggcaaaacagacttacaaaaaaaagtcatcacgggtagaccccaacccgcttggtctagtgtgacccgaacatgtacatacatcgcccaactcccctactcatggctgatcagaaaaatatttaccctttcctgcacagcagagcactcgtgagccaagcccagcaagacagtaaaatatatcaataatcatatataattcatcacataaataataatatcatttcatatttatctgtatgacacagacctgcgtgttatgctcacacgcctatttatgtctatgtggcagacctacgtgttactctcacacgtctaattacaataaggccttagaacggttcatctcgg

SEQ ID NO: 287945 - DNA, 298 bp, Cannabis indica
aaaacccttagctacctataaatgatatttcaaggaactaatatcatcactgaaatgagtactcaaccatgcttgaaggaaatcatcatttcacttctatatccagatagaagctatagattctgtatctatgattagcgctcccactaaaattaaactaccatgttcttaacctatacgtcaggggaagaaccatttggtcgactttaactaatagattaaagaacacaaataatgcaactgaactagaacctaaccatctcaagattgagatcatctgatctagaataaactaggt

SEQ ID NO: 287946 - DNA, 606 bp, Cannabis indica
ggtcttttatggtatactataatttaatgggccaactatagtattaagggttctctcatgtgcctctaacacataattaagttgctaaccatcccattatggttatgagtaacattaggcacatagttaatgattgtgtattatggaattaaatctatgattgtattagtccattataataattctaacagaaacttcattaagacaactgccaaagtaatcattcactacagataaatttcatgaaggtggccatcaagaacaactcttgataatgagggtatgaggcgcgactaggcatggcaaattggttatttttgcgggctgagttaggaccccgactcggatgtttggggtcgctatttggatctttggcccggcccggcccgtaaccttttcttttgaatcggcctaacccgacttagttttttttttctcttttgggtcaatgctacctatctcggttcaaataataattaaaaaaaaagaataattatataagtttctattttttgtaaaaaaaaattacatttttacgtttaatttttttttacatttttacgtattttccataaaaataacacgaaaacaataagaaaattacat

SEQ ID NO: 287947 - DNA, 817 bp, Cannabis indica
ccccaaaaaaggagtcctcgccaaaaagaaaagggggacctcgcttcgtcaattataccgaactggccgtacctcgagaccatatctatgcgattgaggaaaggaacggcgtcttcaagaagccgccccccatcaggggaaatcgcgaccgaagagatcccaaaaagttctgtaagtaccacaaagacattggtcacactacccttgagtgttgggtcttgcaggacgagatagaggaactgatcagaagaggaaagttcgacaagtataagagaagcgaggagggacatccccaagcggatggcaaaggagatagtcagaacgcgagtggctcgagaacgcctcgcaacatcttaactataatcggaggaccgcatatcgcaggcgactctcgcaagtcacaagaaaggtatgctagagaagccaaggagaggccgttaaccaatgtgaacaatcttggtgaacggccagagaagctcttcaagaaggaatgcgaggacatcgtctttatggagagcgatgcgagatgggtccaccacccgcactctgacgcactcgtgatagtcgccaatattggtggagacaacgtccatcgcatattggtcgacaatggaagttcggtgaatttactgaatttccaagccttcaagcaaatgggattacaagaaaaggatttgcgacctatgacatcaagcatctatggcttctcgggagatgtcataacaatcaaaggaatgatcaaactcccaatcactttgggaactgccccaataactgccaagtcgatggccgacttcgcagtaatcgaccaatactc

SEQ ID NO: 287948 - DNA, 852 bp, Cannabis indica
gtggtctttacacgtagactacttggccagttcttgttcaatattttctccttgtactttccctaacttctttttcttactattgcttgcacctgcatccgctattttacacatacacactacaaataattaattaatcaacctattaacaaaggaacatttatttaatttaactaattgtgagtttaaatattacaatactttaaagtctacaagtcattataatcatcatcattaaccgttatattattttcattattattattactagtatctccattatgatcactataaacaataaaatcatctaaatcttgacaatgaggctgctcacggtccctgctggtcacttcaattgggttgacatcatcacggacattttttcgacatcttcgagttgtaaaagttgaacgaataattgaatactcaaagagtttatatctcgtatagtcgtgatctcatcatcattctcatctcgaaaatcccaaacattgcggggatataaacattggcaagcttccaattaacttcattcttcaggttgagactataatatattaaatttacactataacgttaagctttcaaaagtaatttaccaggattgaatttgacatttccattctaccaaatgtaactctatataacaaagatttccttgaaatgtgagcgcaataattatcatggttgtttgttgtatggttttcttttaattttaagattttttttttaaaaaaaatgtaaattaggatttttacctttcgaactttgacatgtacgaaattatgtccactgaacttttaaggtcgttaaaaatgtccctgaactattgagattgttagatttaaggac

SEQ ID NO: 287949 - DNA, 901 bp, Cannabis indica
ttagccttccaaaaatcaaagagagctcgaggccggcagtctcaaagcatttaccttctccttcaaacggtctgcctcggtcacctgggcgtccttatcctcctttagccgaagaagaacttgccacagagaactcctctcatcctgaagacgatcaactttagcagataaggtctcgatggtttcctcaaagcgatcagcagccttgaggtcctttgttagcacggtgatcttcttctcggcgacaaacagcttcttgttggcctcacccaactcatggcgaacagctccagtctccgccctggcctcctcagcttccttcttggccaagtccacctccgccctcaaggtgtcggacagagccgcactcttagaagtagcagatttagcccgggagtaggtgtaagccaaattcaaaccggcctgcataaaggaaaaagtcagcatatggagctaagtatgaagagttgaaagggaactatcagaaaaaaagactaaccctggtgagctccttcaaaactccacccaccaacacatccagagatgagtcgttgtcagcaccagccagttgctcactgacctcaggaaccagccggttcatgtagtgagccagcacctccttgcccttcttggcctcaggcagcacgggcacgggtggagttgatgcatgcacctgctcaaggatcctcctgacaagttcggacctagttgttggtggcccagactccttagacttggcagatttgggagtggaaggatttgcagcagtcagctcctcggaaaggtcaataacctctccaaaaggcctcttctctgaagacccctctccgcccttagacttcttggccggaggggaggcgctagatgtaacaccctaactagcataggcgtatacgtgatt

SEQ ID NO: 287950 - DNA, 211 bp, Cannabis indica
taaaataatttccaacaggtatatcatagtagagggagtcatgtacagaagaggattctcgatgccgctactcagatgtgtcactcaagacgaagctgcacgactcctatcacaggttcgcgatggattctgtggaaatcacgccgccggacagagcttatccaagaaatgttacttctggccaacgatgatttaagattcgagagcctat

SEQ ID NO: 287951 - DNA, 870 bp, Cannabis indica
  modified_base (819)..(819): a, c, t, g, unknown or other
atgtaacaatacaagaaacaaagggtatataaacaaggaaatatttgataaaataaacaatatttatccatatcattcatattgtttacctatttccattttgcatttttctatttttcttctcaagaattcgtgtttctctatcagatctagcaagagatccccttgagtgcttctccatcaaaatcttttgccttgtctcttcattttcccatttctaaacacacaacaataggtacaacttaatctctctcagagttttcaagaaacaagaatacaactgaagctatacaagctcaaaccagaggaagaaagatcatgcaaaaccgacctgtctcaaagttttcaaccggtaaagattccgtcccttaattaggaggggatgaagtgggggaagtggcttctcccctttgctccatagtacttcaatctggtggcattgaccaaaaaactgtatattaacatctgtgataaagtatgcaaagttcaacatcattgtcaacttgatgattttatcaatgtactaaaatcagcatgtgtctagttgcattacatggatcactactactcaatccatgctcattattatcttacaatgtcatctaatttcacaccacctaaaaaagaaactaaataaggaatttatgtgtactattcttatatatccaactaaaatattacctcctcaactcactgtgaatgtatgttgttgctttgcagcaccatagctctctttcacaatacgaccagcaaccattctgtgccacaaggaggacccgtctggctctccgtgactgctacattgaacctgaaaaacgngtttacagaactctaagaaacgctaaatggacgtatattgaatcagcaata

SEQ ID NO: 287952 - DNA, 717 bp, Cannabis indica
acgtcagtgaggagcttgctgaggcagttcctcataggacgcatggtgccttgggcgccaggtgggtaagtcctctgtctaagatttcggaggcatgcctccgaactctcgactaggacgggtacctgggcgagctggactgctatattcccgcccacgacaatcgcgccacaaatcttgataagggatgtgcgcctggtcgggggctcacggccagcaaggggtgctgatgcccttgcacaagtacttcagggatgtggcagacttctttggcctctgcccgacccaaattactccaaagggcatcaagtatttgtctgctctcttcgtcctctacgcttcccaaggatgggatgctccttcctcccacgaggtcgcctggttcttcgatctgaagtctacccccaagcaaggtaggtcggggtacttttacttctctcagccaggcttcaagtggttgagcggcacagaagacaaggccatcaaaaaaatagggcattttgttgatgagtacttcatggtgaaggatccgagcatcacccggactcggtttcagcagattctgacatatcaccgtcctcccctcacccttgctcttagggatagagctcaaaaacttgcccggttgccggaggaagacaggaatatcatccagttgacctccaatgataatctggtgaagtatgggctttaccctgaggacttttctcctaagtc

SEQ ID NO: 287953 - DNA, 645 bp, Cannabis indica
tcaacctcaaaagtatgataagtacaagatcctaaactaattatcatccaaaagcaaaaacatgatttgtcaaataagaatgaaacaagattagatgcaagcaaacaacaattcaacagtatagtacaaaaaaatgagaacaaaagagattagacaatgcaaactcccagggattttctgagggagtcaaagcaacttgagtctagggcctttatgaaaatatcagccaattattttttagtatcaacatattctaactgcaaagttttattttcaacaagttgcataataaagtgatgccttatatcaatgtgttttgttcgagaatgttgaacaagatttttagaaatatttatggcactagtgttatcacaaaaaatagttaaaacaccaaattcaaatccatagtcaatcaacatttgtttcaaccataacaattgagtacaacaactaccagcagcaatgtactcagcctcagtagtagacaaggaaatagaatttttttcttactatgccaagaaaccaaattatttccaagaaagaaacaagctccactcgtactcttgcaatcatcaacatttcctgccaaatcaacatcactaaacaagccaaattagaattagtgtctttagaataccagattcc

SEQ ID NO: 287954 - DNA, 455 bp, Cannabis indica
atcacaacttagtatgttagtaaattgggacagttattagacattgggaatgtcgggaatggccgggaatttagaatttcctaaaaatacccctctagtgtgatttatgtgattttggtgtggaggggcaaaatggtctttttgccccaatgatattttgtctttttgtgacttattaattgaaaaataaatgttatttgatcttcaatattggctgaagtaaataggaataggtgtcttttattttcattttctcatttcaaaactctcaatttagaaaaagatagaaaattttcaagaaaacactctctcttttcctctctttctctctcggctggaaggggtgttccaagggctgggattttgattttcaagctagcttcaacctaaattcaagtaatctcttgttgtggtatgtctctctagctttttctcctttgtttcttggaaaaaaa

SEQ ID NO: 287955 - DNA, 749 bp, Cannabis indica
aatcagagctaaccctagctcatttgcaccttcgaacattcgagagtttctcaaactctctctctttctctctgccttctctctggttctcaaaccctagaaccagagatccttctcgatctattgatcgatcttacccagaaaccttcccagaaacaacccaaaacacacacacacaaatatcaaacatagatcattaggttagggttagaaaaagaacaccagagattatagaggttcgccctaaatcaggggtacatcctctttgagctcgccttgaagatcgacctcagatctttcactatgaagcatgaatattacaacaggtaagaaatccaagtcacagatcgactggtatttctaggtttttctctcttgtgttttctgtgtttatttctctcttgtttttctggtttctcacactaacacttttctgtttcttgtgcatgtacttgaaaaacatctggagctgaagaactttctcagatctggtaacctagggctttttgcatctggtatattttcatttcttctcttctgttccttttatagttgtagttctagggttgatcacagaactaggagttagttacaacttcggttgtaactaacaactagttcttgatccactagaggcgaagccacctaggatctgatggtctgttgtattctgtttgcttttatttgtaattttcacttcatctgtaaaactgtaataataaaggttacagtgaggtctaattttaaca

SEQ ID NO: 287956 - DNA, 645 bp, Cannabis indica
tagtaattaatcaatatttattctttaaaaaaagaaaaggtatagctgagtttaaattttaaattcctagattttatctaatcaattgaatatatacggtatggttttactattcaatgaaacgatgaacacaaatttcattctctacttctttctctccacttagataactcctaaatctctcatagcctctatcacaccaggtaaaagcttttactgtctcttaatgtcggggttggatgcaggtttttcgtaagtatgttttattttcatttccgttttcagtgatctaggtaccgttttaaagataatttaatgttctacatttttcatgaagaaactatttcctaattctgattatttcgatgtcaaaaaattcatgttttacactgactttcgaattacagtttttttaaatttcttttcgatattgccttagtaaaagtgtgatatctctctcgatatctattattttcaagcgattcttatactgttagaaagataattcaataatccatattttctctgaagaaacctttccctaattcggagttcttaccagtcaaaagttagtatctttactcggttatgatatttcgttttaagttttatttcagaaaatgtgtcttcagtaaaaattcaata

SEQ ID NO: 287957 - DNA, 200 bp, Cannabis indica
ttctatataactgagagtgcaaattcaagttctatagtggttcaatgaggaattaataagttagggaatttacttggtaaactctagatctgcttattggaagcttggttgtatagacccatgctccccatactaattgagacaatactgcttgtaagacttagttaattgattctaattaatcaattaaaattctaaaa

SEQ ID NO: 287958 - DNA, 398 bp, Cannabis indica
accagacacctgctgttgagttggagtaatgaataggtataagattaatccaggagaggtacattggaagacaatcaagtaaatcttaagattaggaaggggaactatatggtagtaaataagggtgtgtttaaaactcttagactacaccacatcagattttgagacttgcctttgtgctagaaagtctgctgataagatggtgattactttgggagtggagtagtcattttggagaagtgtaaaaacctatccgaaatctcttagtctactagagagagactgaatgttaaaagttgcaggaaagatacttattcagtctaatgaaagttctatacaattgtggcaccgttccaacctgtcttaactactagcattatttcctgaataaccaaaag

SEQ ID NO: 287959 - DNA, 1077 bp, Cannabis indica
taatagtgtttcaaagtggcgatagtctcatcaaccaaataatctttgtttattggtttcataattactccactataaatatgaaattgactcttagtaattataaaattatatttactgaattttactgcagtgccattgatataattaattccagtaattagagtaattagccctccatatgttagttcgtaattagttttggtcaaattatcattttacttttctaattacttctttatcctttagtaccatcaattcactagtggaagtataatttagatcccatctaaatttacgcgcaactttccaatactagaattaacacataaagggaaccaatattcgatcagttaggaaagtcaagatttcataattgtagatcatcttcccatccatcgacattattagatttctaaaacagaagttgtaaaattatcttctctgataaactttaacgaatgaatcaaagaaactaataacatgaatatgaacgatttaagccgatctactattgatcattgttatgatatgacatgaattaggtctttatgataaatggcgtgttaataaagataactttattcatatcggtccttgtacatatattatctctattatatactaacacatttacttttaatgtcatactacatctgtaatctgaaccaagattacttgcaccgaagaacaggcatcagtgaactatgctagcaaccattgattaaagatttcataactttaatatattgctggttattttattcattgttaagtggtcttagttttttgttacagctacaaggcacaatctcatatatgaataaggaatttttcgatatttatataaattattcaataataaatattaataatttaatattcaagcatataacaaaatgttcaagactctttattaattacaaaaatatccttataggtgtttcacggcataaaccccaacacttagtttattttttgaccttggggaagttcttttggaaattttacttgatatatatgctcgggtgattcccagtgatccactagctagtgatgactaggtgacacccgggt

SEQ ID NO: 287960 - DNA, 676 bp, Cannabis indica
acaaagcttttttacgtggttttgcagttaaaattctgcatagtccacgagtctatcttattatatttctctgatacaaaattagggtttttctctcaaggattttccgtccctttttcagtgtattctgcccctatttatagttacatagggaggcagttaattacaatcagattaatatcccataacaatattcccctaaaattataggatttgattacgtctcacgtaatataaatgctattattatttaaaaatcacacagctgttatttatctgcttttaccgagtcaatgttgacgtggatttagatacgctgcaaagtgtatctcgctgggtcacctcactaggatagcaacaataactccgatagcgagctgaagcttttcccatatctttctgaggttgataatgtaaataccttcgtttctcctattgaagacataacactctatttgacaatcacagttcttggtgacaaggtgaacttcagcagccaacatcatttgaatgtcagcttctatctgagagagctgactcgacagagcagtagatctcattgaaagatgtctggagctaattagtgaaggtaccatgagtatccttcctatagcgagatggatgcctcgctatcgttgtttgtataatgtatattatacgctaagtgttctaactg

SEQ ID NO: 287961 - DNA, 525 bp, Cannabis indica
gagcgtgactgagtataccacccagttcgatcggttggcgaggttggcctcgggaatagtgccaaccgatttcagcaagaaggaaaagtatctggacggattaaatgtgaagatcaaacatgacctgatgatcaccaccgacgacaagaccacctatgctgagatggtggagaaggcactgcgagctgagggcgcagttggatgtatgtcagagtcggctagtactccagtgagtggcggggctcctacccctcctgcatcaggctttagcaggggaggtagtggttcggccatggaccagaagaggagaacatccactgcatccggtggcgacaagtattttgattagtcagtaaacttttgtaaagtgttttgtaatcgggatcccgaatatttttgtataaatattttatgagtttaattaagaagcaaaaattttaattattcacgatttccataaacctcgttgattagcaacgagctgcacagtatgtttaaaaaatcacgtaatacgcctatgctagt

SEQ ID NO: 287962 - DNA, 538 bp, Cannabis indica
ttccttcatttaacgtacccgtggagaccgcgggcccgtatcttttttggtcaaggtgatcccggaggtcaccttgattcccattgatttgatttctcaaatcaacgggaggacatctctgtcctcttcttcctctacctccgggctcctggtgcacggaaacgctttttcggtcctctcgatcctgagggccaagactccctttttggagcttgcccctctgcggacctttccctttagggaaatctgagcggacctttcgcggatcctgcgcctttttctttcgcccaggggtagaggtagggtttttcttttggttcccttcagcgggataccttatggggctaggctccctagacttttgctgttgggtgctaggcgaggattcctctggttccttgccgagtccagcagtcattgccttgggatgcacgtggataccagccgcctccatggctttttgcatggccagcatcacttcttgcattttttggttttgtgctttttgggcttcgatctcggcttcgtgatcgatagc

SEQ ID NO: 287963 - DNA, 581 bp, Cannabis indica
ctctctctctctctctctagccctgaggaccgccgaacttctcttcatttttcggaaacccaagccccaagaactaccgagagaacctcttgattcattcttgtgtatatgtttgtcgatagtattgcgattgtgattgttcttctataggcacagtatgctatgcttacactgtctctacgataggattgtgcttataatgtgatagggatacaattttttttcaacatgggcaataatattttcgatagttttacgaatttttggtgattatttttcgatcgtatatataatacttgtttttgtatatatttatatgttggattttgatagacttagtgttggaatatgttttactaggatctagatttactaacaagtatgattcattaacatcctaatatgaatttctaaaacaatgagagtaaacacatataaaatttcagaaaactttacattaggtgcagcggaatattaatgtctccttccgctcagttctctaacccttgtatcctgtctgtcgcagagtatcaccaagatctaagcctgaatgtccttctcttgattctggattcttcaca

SEQ ID NO: 287964 - DNA, 708 bp, Cannabis indica
catataatcatggcttcgtcctgtccgattttgggggcatggacgaagtcaagaaaatcctcaggacctgactgctgaaaggcggctttatcaggaggatgccgagcgccgggaggcccttgctaaggccagtgaggaagaggccaggcggagggaggcacaagcggaggcaatgatccgggaggaggcccttcggagggataggctggaggccaggcaccaagaggagctgagagcggagggcgaagctgctgctaaggccaggcgagagcttcgggaggccagggaagccttggatgaaatggctgccaaggtgaggtccttagaggaaactcaccaggcaaacttggagtctagggccaacctggctgtggagctgaaggagctcaaggacttcaaagaccaagccttgaagaaggcaaagagagatgagctcctttctcccgtctcctgcagccggtgcgccaagcgtttcgatgatggcgtcttcatggcctggtctacaaatgaccagaatatcaagcttaccttctaccccaaacccgaggagatgattgcaaagttccgggagaagaagaaaaagcttgatgccatgatggaggcgcgcatcggtcctcgccttcctcctcgcattgattaggccgctttgagttcaacccattacaaacaggatttcactctttttttttatttaaagccaattatctt

SEQ ID NO: 287965 - DNA, 710 bp, Cannabis indica
gggggctgctagggctgtgattccttgctaaattcaagtgtttttctcaagttcatagtaaatatagtagaggtaatccttgtctagcttctcttcttttagtttctttaattttgatgaaaatatgatgtttgcatgcttagtttaggttgttgttgttgctgtgattttgttgttgtttgcagaggtttaagcatgattatttgagttgaattgagctgctagtaatgcatgattagtggtattgtttaaagttatggattttctattcaaaagcttaagttttcaaagagaaattttgaaattggttgctgtgattgttgcatgagtttgtgtatgttttctgcagtttctaaatgcatgtttatgtagttttaatcaaggtttgatgcttgtaggtgagctttagccaagtttgagtttgaaactcaaagcttggagctcacatggcatttttagtatctgtgcatacagggctgttttagtgctttggatttgttctttagggtatttagaacaggtctggaaggtttggggtgaattggatttgatttgagcaatgtgtgaatttttgaaagtttcctgtgaggaaccggaatttcggttgtgcatacagaattcgggatggggttcaggaatttccagaaccggaattccggttgggaaattttcaggaaccctagactttctcgtttttatgttatttgggg

SEQ ID NO: 287966 - DNA, 432 bp, Cannabis indica
gaataaagggaaatcaataaagcaattggttagagcactcttaaccgctttttttactcttaccctttataatacataatcaaaatttttacttttttctatttttataaccttttacagcccactatccattcgcttctttattttttgtttatattttcttgatatcacttaaataatatattttttaatgtgtataattcatattaataaaataaaatttaaatgttattaatttatgtttaaagaaagaataatgcttttctacatatagagaatcatttaaagaaaatagagatgttttaaaataaaaaatgagtttacatcatctgttgaaagggttatttacttctttgttcttcaactagggtctagtgtgtaagctcggttactgcacatggctcaaaaaaaaaaaaggtctaatatattttt

SEQ ID NO: 287967 - DNA, 627 bp, Cannabis indica
aaaaaagaacttgacacatataaatgaaatgtgacacataaagataaataaaacgtgacacatataatgaagctcttccttcagtccactttgatgagtatgaccaatctttgttctccttccgtgttgaccacggtctcttcttgatttaagactttgtgtactaggctgttaagctcttccttgaatctcttagctcgtgccctagtcactggacccactggaattggacttgatacttggtccttgatgtcctcatcattccccccttctttagaaggatttgtcctcaaatcttcacctgtatcaaatggacttaaatcagaaacattaaatgtagcactaacattatattcacctggcaaatcgagtttgtaggcattgtcattgatccgttcaagtacttgaaatggaccatctccgcgaggcagcaatttagaacgcctttgtgttggaaatctctctttcctcatgtgtaaccatacccaatcacctggttcaaaaacctgcttgtgacgacccttgttagcctgcttaaggtattgttcagtcctcctttctatgttgagtcgggccctctcatggaatttcttcacaaattctgccttcttctcgccatctaaattc

SEQ ID NO: 287968 - DNA, 661 bp, Cannabis indica
actcgcatattataagacgcatacgttgctgtatttagtgaatagaaattgttcttcatttattaatgtttacattttttagcctaattatcgtaaatcaatgtacaaacggattgacaatgaatgcaatccttgtgtaactaactggacacttgctttgtatataaaggagtgatccaccatgaaatgacacctatgaactccttgcaacagtggactaagcagaccgtgatctgactgaaccactatattccctttgtttacttgatatttccagttttcattatccattcacgttcccagtttgagtactcattgttctagattgaatactcgcacttgtccatcatattgttcttattattattattattattattattattattattattattattattattattattcatttttggtgttgcgaaatttgctcgacaacatttggcgccgtctgtgggaatacgaagaagtactttgttgctaatttagagagaaaatcataatggatggaaaccaagtaaacggaggtcttaacaacgaatccatcaacatcggaatgatgaacgttccactgtcaggaggtagagcacctcccgtagatctcatcaatggcggagtaggtcggggtaatgtgagacctctcaacctattccct

SEQ ID NO: 287969 - DNA, 642 bp, Cannabis indica
ttctcatgacatgaaattcttcgaactggtccttaaacatttgtaaaagcatcatccgctcctttagaaataccaggagaaaaacacatggaggactttgtcaaattaacaagctaacctaacgcacactcattccataccaatattactcaaaatatggcacaactgtcaggagatacatacaaaaagaagaaactatcattagcaaacaagtgagagatagcaggaccacttcttccactaggccgcccctaaatactctcaaacactcattcttaattaaaatatctaaacttatttatttatttataaaataattgcttattttattatttaataaaattggttaaatatattttttaataaataaatttaaaattaaattaaattttattttattttattaattaaattaataattaaataatatcaactttaatacaaatttaacaaacaaacatgcatacacatgttgttagatatactccaattgagttgaatgaaaaggtaacaaccatatactcactcacacacaacaccttcttagacccctctactcttgttaataattaaagtaattaaataatattatcctgcacttggaattggatggcaaacttaaaaaaaaaaaaaaaaaaaagt

SEQ ID NO: 287970 - DNA, 751 bp, Cannabis indica
atcacagatcgctctttcgacacgatggtgcaaactcgtagaggcctgttcgacccagcaaactcacagacgctagatctgacgttgcaggacccagggagttcaagggttccacccgctgtcaatcccggacagacgggaagcgtggtgaatggtgagacaactcgtgttactgaaactgcgcctggtgtgcaagagaccggaaacaacggttccgcacacagccaggacgttcataagatgattgttccaccaggcatcaacgcccagacaaccaacggtcagccgtccaatccccggtcacaatctccacttgtgggccaagaggtaggcagacagaccatgtccgggaattcatcaggaggagtcatgctcgatggatccacgcaaaataatggagccattccacctgccaaccaagtgaaccaatcgctaagacagtcaggttcttctgtgttcgataggttgggaacaccccgtgacctaagggacgacctaaacagaagaaggggaacagacaagcagaatattacaacgaaggtgcaatccggagcccatactcaaatccccgctcagaaagacgctgacgtaatccaacccgaccagaatgccaatcaagtcagccagccgtacaggcccagctcgaagaactgaagaatatgtttcatggcatggccgggcagcgtaacaacgatcttgagttagaccatgcacgcggaactcccttatcaccagagatccatctcctgcc

SEQ ID NO: 287971 - DNA, 879 bp, Cannabis indica
cccttaatctatttacattttcatccttacaagtaacgtaaaacacatcagtgccagacttacttaccatccactcaaaattatttttcagtgcataccttcccactacattcttcaattcttccttgtttttgtacaacttgccaagatatatctcccctgaaggcgtaccactaagagatgttgtatacacattattttcctctatgtcttcccttgtccacacaagaggtttgaatttagtagaaacttcaaattcagatacaggagcactatcagaaggacctggccgactgctactagttcctggtgtttggcgattctcactacggggggtcttctttgtcgctctacttggttgcttggagttagttccatcctcaggggaggtacatctgtagccacatcatcatccacacccaaatcaaccacaggatcattgttgtaaaagggagcatcgaactcatctgaagatgaaattcgatacccactctctcatcatctacattagtgccaacttgctcgtccaaaccaacccccagatcagtttctgggacaaaggtcccaacaacacttctaggggttacatttcggggagtctgctccaaattcacattcttcttcaccttagtcacaaatagtggcaacaagttgtccacactcatttttgccttcatgctcaagaacactcgtagttgactatctttcactaaaacctcaggtggaaacttagtgcctttcatgtacatgtaaagaacttctaacttcaattcatacaccaaggggtccacctccaactcctcatgcaaaacttcacgcaactttttcagtgtacagtcaatgtccaatatcaatgtcttactttttgaggaatcaaat

SEQ ID NO: 287972 - DNA, 847 bp, Cannabis indica
tagtagactaaaactgtttttacattttttttgattctgtcgtattagattgtcttcaagttgtgtaataaaaaagtatcaaaattaagctcagtgtcctattttactatttagaaatacaggtccatttgtcatttaacaaacacagggtccaatctgtaacttttgcaaaacacagggtactaaaatggtatttaccccacaaaatattgttaagtacaaccgaaaccggaatagacacaaatgaaatggtctttgtatatatattaagcacatatggcaaattatacatacattaatattatcactaaaaaaattagtctgagttatatttgttaattttaaaagggagaatgaaagtcaaattttttgcttagctggacaaatttggatccaaaatgtgtactaataatagatatcgttttagtaaattatgttctaggtggggcttctgaatgagatcaaatcgtttgaactttgaaacatgttataatatgttttatagcctcggaaatagcatcatcaaaccagtcattttgttttaattcatgcaatacataactctaataataatttgaatatttcttttagaactttatattaatcatacatataagagtaccatactctttgttttcacttttcatctttttcttttcaagtactaccaatctttctactatactttcataaaatccttaattatattatctaaacacttgtatgatattattactatggagtactatgaaaaaaatgatgtattttccatttaggcatgaggaaaaatatgggaaaatgagagagagagagagagagagagagagagagagagagagagagagag

SEQ ID NO: 287973 - DNA, 523 bp, Cannabis indica
ttccaataagccgaactagaacttaccgagtaaattccctaacttattagttccttattgcatccactcagagaacttggaatcgcactctcagtcatatagaatgctctatatgttccacgatatagatacgctataaacatttaaccatcgttctaatctctataatcaaagatcctttatagatgatttacaccaagtagggataaatttaccgtttcactcctcaatttattttatccttaaatcacttagcttcctgtaaatgatatttgagtaaactaaaataaaatcactgaaaaaagagctcttccatttacctctatttatccaagctcgaaggaaattatcgtttcaattccatgtcctgatagaaactatagattccagatctatgtttagcgctcccactcaatcacactaccatgttcccaaaatgtacgtatcaccctaaccagaaagtaagcttaaataacaaatcaaagaacatgaataacactcttgagattgaacctaaccatgt

SEQ ID NO: 287974 - DNA, 678 bp, Cannabis indica
atatttattggtagttgatggcattttgtgcctcctacctatttgttagttgagtgcatttttgtctccttaaccttttttttttcttttagtagttgagtgcatttttacctcctattatcccttctctagtgatggcattagtgcctcctagcttttatttttgtttatcattttagttgatggcatcttgtgcctcctaaaatcttattattattattactactactattattattatagttagttgatggcattttgtgcctcctaactttaatataactatctatcattattattgtatttatttagttgtaattttatttactttgcttaagaaaatacttgaaaaaaaaatttaaaaacaaagcttgttctttcaacataagcaatttttgcttaaaggaaatttggcaaagttcccatccacacttaataattaaccccggggagttgttattaagtcgtgagtaagtggaatcaaataggcctgggaacaagtcaaacaaaaaaaaatgaaaaattaaaaatttaaaaaaaaaaatcaataatctctttgtgttataagtatgctctgtggttgcggtttataactgatcttccacatcagaaatttgtcttcttgagattattgtgtgttacttggtgtttctttgtgaaatttgtgacattgcatgc

SEQ ID NO: 287975 - DNA, 808 bp, Cannabis indica
attatttaaatttattatttttttaataatatgatatacttatgaggtataaataaaactcttatttattaattaaaaagacacatacgcttttcaaaaatttataaataaaaatatttatacttttttaacaatttaaattttttacattttctgattatgtaaataaaataaaataattttaatttttttcgtaatagtttagtgaatataataaaattattatttttaattattttatatttttaacctattcattattctaattctatgtacagtttagtaatcgtgagtattgcccaaacaattattgtaaagtaattttggtatctcaaggaaaaaaaatacttacggtcattctagttcttccaatgcccttttattcagtcattaattaaaactcgattgaaatcagcaacatttattatgtatggccaagaagattattattaattattgatctatgcaacttcaataatctctatatttttttttcctaatttgatatttgagttagaaataaccccacatgcaatataagaaatacaataccttattggtttgaattggaatcccaaatcccaatcctcttcctaatgaaatttcccctccaattgtaatagcttgtaaattcttgtctctacacttaggtaggggtcgaaataattcaatacatagcaagaaacaacagcagatcaatatacaattatatgtcatagatacattatgccaatccaaatttaagccctcctacttaccataatactaataactccaaaataacgtgtaaatacgattatgcactcga

SEQ ID NO: 287976 - DNA, 1317 bp, Cannabis indica
acacaaagcaaaacaactcaaaacaacagtagaacaatcaaaaaacaccagtgaaatttaacacagtatactgcagtatgaaacttatcaaaaaatacagtaaaaaaataaaaaattccgcctatcagtatttttgtaaaaaaataacaaaagttagtataccatgtaaatttcccaaccctaaaccttaagattgtaaatcataattcatctcttacatacttttctttcaaatcactatgccttctcatctcaatgctaaattcataattaagtttatgactttatgtggatgaaatcttgaaaaaggtatttaattataaatatatatttaaaattgatgtaattatcactaaacagaatacaatcgcatgtgaaacgcaatttatttcttagttatatatatgtagtaagtatactaattcatccaaaaaaataaaagtaacaaacattaagggattgtttgtctttataacttaaaattgaaaattagttttcaatttttaaagtataaaatagcttttaaaaactaataggaggcgtttggccaatttttaaaccagttttttgaaaattgagttttaaaagttagaaacagagaaacatcaaaatgttattttctattttcaaaataattttttttagttctaacatattcttttttattatttttgtcttcacatacctagatcccagacctagacttgaactagacatggaccctggacccgaaactagacctgaaccctaactttgacccccgcctctcggacgtggatgtggacgcgtaccccaaactaccgaacccgaacacagaccctaacccgaacgcgggctcggggtggaccctgaacctagaacctgaacacggacgcatacctcggactccaaaccacgaacgggcgaacccacatataaccgagacggggcaatcgccccccttgaaaaaaaaaataggaaaaaaatatatatgcaattttaattagttacgacatatacttgtaataaaaaatgatatttatgaacataaattagctttagtgtaatcgttaaactagattacatatagagtagaggacaatgcttcaattctcataaaaaatatttaatttttttttttaagtttacttttctctttactttacaaataaaaaataaaaaattacgaccccctcactttaaattctgactccgctactatatgacccactaattttttggacaactatatgggcaacactcataaagtttggcctatgatatgatagtattaatatttgcaaatataaattactcatgtatcttaatatatattta

SEQ ID NO: 287977 - DNA, 780 bp, Cannabis indica
agaagagcaagaaattgctctgattcgcaaacgtaaaggcaaaatgattgcccaggaggagcccaagcggcctcggagagctgatactccggcccacggtctcgatggtggggtctctcccatggaagaacatactgcccctcccaatattgtgctgactccggttcctggagatgaggcgagacaggagctccggatagctaaacacaactacgccatggacgaatactcccgggggtatgctgaggtggaagcccttaggagggtcttgcgggttgagatgcaaaacaccatcaacaacccggaataccagaatccgtgggacctaaatttggaccccctgtcggactggttcggtcgcttccttgggcccaccttagctccctttgctgcggagatgactggcgagtttgcgtctcagcttacccggtgtgcacctaagcggttcgctgcttgtgcatccttgaactccatctaccaagtccaggatctcagccactccctcactgtggtaagtgttttgtagtttgcttttccccttattgttttcttttttggagattctttcttatacttgcattattttttagcttgctgctgaagccggccgtctctccaagaacataatcaaccatggcttcgtcctgtctgattttggggacatggacgaagtcaggaagattcttcaggatcttactgctgagaggcggctttatcaagaggctgctgagcgccgggaggccgctgccaaagctaatgaggaagaggctaagcggaggg

SEQ ID NO: 287978 - DNA, 544 bp, Cannabis indica
tttactttcatgtaatatgaattgaaacgatgatttatatgtttttgtgttgatttggatggtttcatgttggtttatgtgttagttgatgaatgttgatgttgtacagtattttttccatgaaaaatattttttcgatttttgaaaatattttatttggattccttgtgaaaaattaagcattttttgttttttacggaactcgattccgataaaaattgaaaaagttatgaattttggaaaattgggatttcgggtatgcatgggtgctcaatcgcgagcaccaggcactcggatcagccccccttgcgcgcgcgtgtgacgagcctcacgcccgtgtgcaccctgcacatccgcccgaggagatgctgcacctgccgagaaaactcggcgtcccaccctgcagctctccttgtccgcgcgcgtaggaggctgcgtgcagcctcctgggctgccttccccaaaagtgcgattttttggaattttttcccaaaaatccaatttttccaagggattgtttcccaaaaattcatttttccatttt

SEQ ID NO: 287979 - DNA, 917 bp, Cannabis indica
tgaaattgacgagatgattccgatagtggatgacttccttcagccgtcattcgaaatggatgataatcctgatgcaaatcaatggcgcgacgaattatttgaagaaattgaggccgagttgtatcctggttgtgattggatatcttctcttaactttttggcaaagttattgcatttgaaagttaggggaaagattcctaacaacatatttgatgaattactgaagttattaaaatttgcttttccaaaggaaaataaaattccatcaaactattatgatgccaagaaaagattgaaaaaattaggattggggtatgagtcaattcatgtgtgcaagcacaattgctgtttattttacaatgaacatgcaaatgaagattcatgtccagtctgtggcactagtagatggataacttcagaaaatttaggagcaaaaaaggtgcctcataaggtgatgcgttactttccgttaattccgcgactgaagagactgtatacttcaaggcatacggcaaaatacatggtatggcaccacagtggtaaatcaaaagatgagggtgtgatgcgacaccctgtggatggtgcagcgtggaaggactttgatgccaaacatcctgattttgctagtgaacctcgaaatgttcgtctcggtttagctgccgatggctttaatccatttggcaatatgagccaagcttacagtatgtggcctgtagttttggcgaactataatcttccaccttggttatgtatgaaagataataattttatgttgaccattcttattcctggagataaatcacccggaatggacatagacgtatttttaagacccttggtggatgagttgaaggagttgtgggttaacggagtagatacgagagattgtcgaaccaacactgtcttcaagttgcgtg

SEQ ID NO: 287980 - DNA, 603 bp, Cannabis indica
tacatttagttcagtttacgattgtttttgcgatcatcatttgataaggctgacaatattgaatgtgcttttattgaatttaatgacatgcaggtgtgattcagctgtactttctggctacgcgctgatgatgttgggcctgtattgtatggctgaagctggtctcttatgcgcattcaagttatgatatgagagcactttccagattaattgaaaaggtattcaatccataaaatttgagctaaaaggaatttttcctacttatattatagaaacgaaatgattgaagaaaataaataaattgagtgtacagggagaagttctacccagttcattgaatgtagattacaattacaacgttagcctcaaaagtttagcatatttcatggttgctccaacattatgttaccaggtattggttcacgctcattataagagaggggtcttccatatgaccttttttttttaagttttatatattactttttaaaatagataagttgagattgaattatttgtccagcttttctgtattgtatatttactacttgtaattgatttttgtttccagttgaattgattatatgatgcattttctttaca

SEQ ID NO: 287981 - DNA, 557 bp, Cannabis indica
tattttgggaatagtttccaatgacttttgcttgatccattggtaaactgttcacatccaccgaacattcctcataggggtgaggacctccacatagctcacaaaccacctgagcttgttttacttgaacaactatcagttttgtcaaggcctctatctgggctatcagttttgtgatggcatctacctcatgcataccagccaccttctttgtctgacttctctcagttggccattgttgattattcatggccatctcttatagcaattcataggcctcgtttgcacttttcctcataaatgccccaccagctgcgacatctataagtgttctagtattaccaatcaacccgttgtagaagttgtggaccagcatccacttctcaataccatgatgtggacacttcctgatgagatccttaaacctctcccaagcctcatggagagattcattatctaactgacagaagttgttgatttctcctcgcagcttagcagactttgctggagagaagatttagacagaaattttctactaagtctgtccatgttgctat

SEQ ID NO: 287982 - DNA, 503 bp, Cannabis indica
accagcagggatgttgcaacccttggaaatcccagaatggaagtgggaagatatagccatggattttgtgacaggactaccccgaacaaccaagcaacacgactcagtttgggtaattatagacagactcaccaagtcagcacactttgttccagtaaagtctacttacaacgcagagcagtatgctgacctgtacgtgcaagagatattgaggctgcatggagttccaaagacgatagtctctgatagaggttcaatattcacctccaagttctgggagagtctacataaggcaatggggacgcgattgaaattaagtacagcatttcatccccaaacagatggacaatctgaacgcaccatccaaatactcgaggatatgcttcgagcgtgtgcactggacttcactggctcgtggagcaagtatttacccctaatggagttctcctacaataatagttatcaagccacaatcggaatggcaccatatgagatgttgtatg

SEQ ID NO: 287983 - DNA, 580 bp, Cannabis indica
aaatgcgatggatggctagtttgatcatatgggtaagtttagaactttatttcttagcggtgaatattttagagaaaataaattatcgggtttgagcggggttatgaaatttgaccattttacccctagtcttggaaataccctagttttatgagtaagggcattttagtaaattgccaagggagaagttaggtggcagctttgagctttaatggaaacttgagtattgatagtttgttctgtgaaattctggttggaaattgttgtttatgcattgtataggtaccctggaagttttaggaaagtttgggattgaattgagttaagagggttggtttttgtgttcccagcaaagaacaggtcgaccggttctgggggacctgtaccaaccgatcgaccggttggtgttccagaagtggagttccggttgggaccggtctgccggttgggggaatttttggaaccctagtttttcccaattttgagatatttagggtattgccatgttgtttatcgatagggaaacttttagtttcaagttggagtccccggaaagtgatttagcgagtcactcatctct

SEQ ID NO: 287984 - DNA, 656 bp, Cannabis indica
agtgctgacctaatagaaatgagcttatcagattttatattataatgtgaattgatttcttctccaaatattcagccagtattgactgtaggaggaagatggtaatcttccaaccagaaggtgaagaaccgttttttttgtcggttcggttcagggatcttgggtcccgataattttggttttaacagccaaagaattgctatgtgattgatgtctagggattttggccgtggtattggataccactcggcctgactctgttcggccagaagacatcaaggtggttcgagaatttctagatatttttcctaatgaacttccgggtttaccacctcagagagaaattgatttggcacctggagtagaaccggtttctaaagcccgttatagaatggctccagaaaaacttaaagaattgaacattcaattctaggagttgcttgacataggatttacttggcctagtgtgtcaccctggggagctcccgtattgtttgtcaagaagaaagatgggtctctacgaatgtgcatcgactaccgagagttgaataagctaacaatcaagataaatatcctttacctaggatcgatgatcttttgatcaacttcaggggaagacggtcttttcaaagattgatctccgatcgggctatcat

SEQ ID NO: 287985 - DNA, 513 bp, Cannabis indica
ttttcttatttttcagaatgaaacatgtctcagtaaaactgtcatatctctttaaatactcatccgattctcgcaatcttggtgcctatagaaagcttattgaatttcccataattcttatgaagaaaggttttactgaatcgaaatttatctatgtcaaaaattagtatttctacgctgtttgttgtaaatcgtttttttatattttctatataagttgtctcagtaaaattcaaatatctctctgaataatgatccgattctagcgatcttggtaccgttgaaaagataattcgattttctaaatattttatgaataaactattcaccaattatttattattctaagtcgaaattattgttttatttctgtagtccgaaatccatttgcttcaggatttctaaaaaaaaactgtttcggtaaaatatttatatctccacattccgatgtctactgtgattcgttactccacattccttctcataaatagtttcagtaaaactatcataact

SEQ ID NO: 287986 - DNA, 663 bp, Cannabis indica
tcaatcttgattgcaaaaaatccatctttcccttttttcctcttgaaagagtgtatgatcccctggattaaaacattattatcttggatgttccggcccgggacaaaagctgctttagtaggacaaatcaatctgggcaggaacactctgattctatttgcaatgattttcgagattaccttataaatcacattgcacaaagagataggtctaaactgggatacttttttagggttggggaccttgggaatgagagtaatatttgtagcattaaagcctctatgcatattccctgattggaagaagtccacaactgcatcacagaagtcttgtcccacagagttccagtagtgcttgaagaagagaactgacataccatccggacccggagccttcaagcttcccatagagaacaatgtttgtctaatttcctcgtgacttgggatcacctcaagctcagactgctctaaaggggagagatgatcatggattaagtagtctaagctttccagagggccctgaggcgtgtttttgaaaatgtcacccagaaaaccagtaaactcattaccgatctcttctttattagttatccacaccccatccttgttcaagatactatccactgagtttcttctattacgaattgttgtcgagtgaatttcg

SEQ ID NO: 287987 - DNA, 554 bp, Cannabis indica
caattcaatctaatccgtactttgcgaatcgtatggattaaattgaattgagtattttatgaacacccctacatatattataaatcaatacaataatataagttcaaaattaattagaataattattgtatttatcacacaaaaaatcaaaatttatattttacccacattaagagtttctagttgaaaacacccctataattatacccttttttataatttctcttttctaatatttcaagaaaactttctctttttttggtcataagtctaacttagtcggagttgtgttttgttattatgatttaatattgagaatgtaagtaaatgaccatatttctaactctatagatagttaatgtccattttttaaaataataaagcaaatgtccttttttactttttaatacctaaaatacccttcattatataaaatgtattatatgttgtattcctttaatagaaattatgaaaaacaataaatcaaaacctctctactgaatttttgtcaactatttttcattatataaaggtattatatattttattcttct

SEQ ID NO: 287988 - DNA, 514 bp, Cannabis indica
attggagacctgaatgaagatgttaatgaataatttatttatgttttgtaataatttagtttaattttgagacaatattttattaggattaatatgttaaagttaattaccttggagacaattttaaattatcaataaattattaaattgttataattatattaattagattttatttattaaatatttatataaataattatttatttatatataggattaatatataaataaatttttataaatttttattaatttttttttattctgacgggtattagcggcggggccccgccgctattgctccgccgctattaatagtattagcggcggaccccttttttggccgctaatactattaatagcggccaagcattagcggcgaaccaatagcggccgaagtccgccgctaatgccctttagcggccagaaaggagaccaatagcggcggaggggtccgccgctaatggtgataaatgttgtagtgtttcccctgttgggttttatgctctaa

SEQ ID NO: 287989 - DNA, 232 bp, Cannabis indica
tgaaaattattcaaatttaaattgttctgaaattaaaatttccagcttataataattttctatttaaaaatatcctgaaaataataatatctaagtatcaagaatgaaatcaacttaaatattcaattttcaatttaattaaatatattaaatacaagaattaaaatatttaatgaaaaaaaattcatatattttaaaagttaattatgttgctaattcaattttaattagg

SEQ ID NO: 287990 - DNA, 683 bp, Cannabis indica
tctaaaagaggtagcctttttagctgggaaaaataaaggttcaaaaagatcctgaaaaattcacctatttagagcttcctcgatagaactggagaacctgtagatgggacatgaagtgcctcataaaaaaaaatgatagcaatcaaggcttagctgaacaaacagagaaagataatgatcatataccacaacgaattaatcagatagaacacataaaaaaaacttcccaagttgcacacattaatatgagaattcaaggctttattaaacaaaaatccaagagagcatcaagaataatatgtgattatccaatgtatttttactcaaccaattctaaaaaatgatatccgttatctatatattttgagtcaacgtgcattttgagaaatgtttgtggaactttcattatcacacatgaagacacataaacaagcaatgaggaacactagacaacatatcatgtgtgtatcatatttcttttgaagcaagggagtacgatgtacaacatgatcaaaaccagcatacactaggacaaaaacatcatcatttctttgtttaaacccaagattcaacagtataaggtttagaagaccataccatagcactaataatagtgaatgagctcttgaaagacgaggtgatgatttaacactcttatttcttttggttaaaacttttggaat

SEQ ID NO: 287991 - DNA, 776 bp, Cannabis indica
tcctcgcaggcagcaaactcaaaaattcataacttgcacaaatcgactccaaatcaattcaaaccttccagacctactccatatgacccaaagaacatttctaaggcaccaaaccacccagattgcaccatagcaaaaattaccattaaagctcaagctttgagttctaaactcaaacttgagcaaacctagctaacatgcaatcaaaccaacataaatctacataaacaagcataatataacctctgaaaacaactaaaaacatcaacaacatcactgcaacagattatacaatttctttcaaaaatcatatattttgcatagaaaaaccatagctttgctcaacctaagattcatgcttcaaaaacaactcaattaaccttaatctaacaagctttaattacagaatctaaccacaaaacacagcagcaaccacaaccaaataatcatgcatgcataacacttttttcatcaaaaattcaacaacttaaagaggaaaagatgaggagctaacctagcttggattaaacacacaaaatccttgaatccacaagaaaagaagagcaagaacccagctgctcctagggccgaaaaagagagaggaaaagagagagtgttttgaatttttttctattttctaacttagtattttttgaataaaaagaaataaaagctatctaatataaaccaatatcatttcagccaaaaataaacaattaacatttattttatttcaattaataaagtcactagaagacaaaatatcattggggcaa

SEQ ID NO: 287992 - DNA, 508 bp, Cannabis indica
agatgggttgagtatatggaagactatgatttcactttgcagtatcaccccgggaaagctaatgtagtagttgatgcactaagtagaaagcctcatggtactttggcatgtttggctcttgaggactggaaaaggacaattacaatgggtgattataacttgtaatactatgaaggggaagaagtagcttgtatctcaaacatagtggctacactaatgctacttcaacaagttaagcaacgtcagtggcaagatgaaaagctaagacttatttggaaccgaatctaggacgatgagcaactagatgggtggacagttaatagtgaagggtatctataccatatggaaaggctagttgttgcagatatccctgatcttagggagaccattttgattgaggcccatagatccaaatttgctgtacatcctggaagtgcaaagatgtaccaagatttaaagagataatattggtgggaaggtatgaaaagagatgtagccagctttgtag

SEQ ID NO: 287993 - DNA, 605 bp, Cannabis indica
ctggtcggaagttgggatcaatatttaggacacgtgaaattacagaaggatcaattccgaccatatcctcatgtgaccaggcaaaaatgtctaggtttgctctcagaaattttatcaatgctgattttacttcgagcaacaaaccttttccaatttttagtttcctagccgggatatctggatcgatctcaatctctttcagttcttccataggtccaacattgctgcttggttccccaagtcgaggatccacatcttcatccccgccttgggaaatttcatacttaggaatattttttcccttgtctgtgctctggctagaggatagttcctttttagccttggccacgacaaggttataacattcccgagcaatctgctggtttcctcttagacaccctaccccattctttgttggaaacttcagccatgaatggaatattgacgtaacagcctttaagtcatacaaggctggtcggtctgacatgaccttaaaggctaagggaatgtccaataccagaaattgtgccgttatagttatgctcgtcggagcttgcccaacagtgaggggtaggcaaatttgccctaaaggtgtgactccttgg

SEQ ID NO: 287994 - DNA, 769 bp, Cannabis indica
accaaaaactaaaataaaaaaaaaaaaaaaagcataaatcctaaagtatcggtagacatggtataaaatttaactcttttttttttccttcaaaatataatctaactaattaaattttttatccaaaaaaaaaatgatactaaaaattatttctaaaaataaaactttatgaaaattaaaaaaaaaatatcagcaacatgcataacgttataaattaaaaaggccaaaattgttaaatcctaagccatgcatataaaaacatttatggataatccgatgcatatatatcacataataatcacaaaaaaattaattaaaaaaacacaacgactcataatattaaattattacaatatcaattttatcattaaaagattaaaaaaattaataacaagtactcctaagtataaatctgattttgttttgttttttgtttttttataatattatttttgtaggttattctcattattaaactagctagtaatctattttattttttttaataaactaaatatatctaaatacaaacaacaaattatattatatatcaaaaatactgattgtccagcaaaacttaattatattacacgatctctatgagttcaatgatcgtgcttgtccttatgacttgtatgcatatatatatactagtaaaaagctacgtgcgaggcacgtatactaaattttatgctaatttttttttatgttatttgaaagttatacaattaaaaattaaagaaaaaatattattagttattatgttgag

SEQ ID NO: 287995 - DNA, 665 bp, Cannabis indica
tttaccgatctaaacgaggtctgcccaaaagactgttttccctgccacgaatcgaccaaatggtggatgccacctccggattcaagctattgtccttcatggacgcatacgccggttacaaccagatcaagatgcacatcggcggatcaagagtgcacaaccttcacggaccgagaagggggtatactgctacctggtcatgccttttggactaaagaatgctggtgcaacttaagagggaatggtgaaccggatgtttaaaggccttctgggatgaaatatgtaggtatacgtggacgacatgctggtcaagttgaaggcatacgcaagccacgcaaatgacctagaagaatgcttcgaagtggtccggagatacggaatgaaacttaacccgaagaagtgtactttcgaggtcaaatcgggaaagtttctgggcttcattgtcagtcagcgggggatagaggcaaatccagagaaaatccaagctctcctaagcatgccttcccccaagaaacacaaagatgtgcagagcttaaccggaaaggtggctgccatgagccgttttatctcccgatccacagattaagtgcattcccttcttcaacatcttgaaaaaatgccagaaatttgaatggtccgacgagagcaaggaggcattcaaaaaa

SEQ ID NO: 287996 - DNA, 524 bp, Cannabis indica
gataagggggtatactgctacctagtcatgcctttcggattgaagaacgctggtgcgacctatcagagaatggtcaaccggatgttcaaaggcctcctggggcgaaacatggaggtgtacgtagatgacatgttagtcaagtctaaagcgtgcaatagccacgcggacgacttagaagaatgttttgaggtagtccggagatacggaatgaagctcaacccaaagaaatgcacctttggggtcaaatcaggaaagttcctgggcttcatcgtcagccagagagggattgaagcaaacccagagaaaattcaagctctcctgagcatgccatcccccaagaaacataaagacgtgcagagcctaaccggaaaggttgctgccctgagccgttttatctcccggtctacagacaagtgcattcccttcttcaacattttaaagaagtgccaaaagtttgaatggtctgacgagtgcgaggaggcattcaaaaaaattgaaagagcacatggccaagcctccaatcc

SEQ ID NO: 287997 - DNA, 202 bp, Cannabis indica
aaataaacccagaaaactcttttccttacaatttcacccctgaatagtgaaaattcataaaatcagacatagtctaactttagaattataattgatcaatcacgaatcaattaatgagtcttataagcagaatgttctcaactagaatggggaccatggatctatatgctgagcttccaataagtgaaccaaatttaccaag

SEQ ID NO: 287998 - DNA, 716 bp, Cannabis indica
atcttgtcaaaccattatgaacaagatgcaaatgccatagatatataagaatgtggttgtggttttttgatgacttaggtctagttacaataaagagttcttagaataatcaaagtggatcttggtcacagaatactaaacttaaattccatacattaacatacagtttaaatccattgatagaaaatggatattaataacttgtgaaagttgaattgtattgtattctggaaactgaaataaaaaaatttatttggaatctaaaatttaaagtccaagacttaaatttataccaaatatacaatgagttttattctatcttggacaaccactgctaatctaactgtaagtttaatttgcctaaagtaagcatacacaagtaggagatttctaagatcgaggatttatatcatttgaggatagaatgtcgggaatataatcatatgcgccattcaatttcttaagagaaaatagaatggcatcatcagcaaatgatttataaaccattcatccaatgatatattatttaaggaaattcgaaatgaataagctaagaggaataattaaaggataatttcgatttaaaataagaatccaacgatgttccggtaggcgagagtcaaagttattcttatttttacacaaaatttataactacaattaataacagaaaacaacatggttcaatataaattcatacacaattcagaaattat

SEQ ID NO: 287999 - DNA, 294 bp, Cannabis indica
ttagaaagatacaacgataagattataatatctttaccaagatcaatatcggtcccagtccaatgtatactccatacatccgaaactagcatactttgccaatgtcctagaaagaacataacacttatccaaggtgtaagtatactttatcgctgattatcacatcagtgtaaatccagtgcactgatgaatcagggacattatcttttgaagcatataatcacaattacattccactgtcttgacatcactgtaattatgaataactatatgttctggacttaacagattttg

SEQ ID NO: 288000 - DNA, 720 bp, Cannabis indica
aaaaaattaaattaattttaaaaataaaaataaaaataaaactttacttttacttaaaaattaaaaattagaaattaaaaaacaatttaaaacaataaaataaaaaccctaattaccttctttctctcctttctctcgtgctctttctctctgagccctacccgccgccccctcctcctcctccccttcttcttcttcttctctgctaaaaaaaacgaagaggaaatagctattttactatacgtatacccaccaaattcagatcttccaaaaatatttatattttataatattattaattaattaaataaatagatatatggttgcatacatattattcacgcccccaagaaaaaaaagcagattgactcaaaaaaaaaaaaaaaaacccttctctgtcctccattttcacacctctcctcacctttttttctttctttctctctctctacaaatggagaactttagatctcgatcgtgtagagatggtggcggaggaagtgggatgcagatggatgtttactacgggaacaaagcagctccgacgagtatacgcaatctgagatgctacagcgccaattacgccgggtcataagcttggcaccggcgaacgaagcgaagatcaagaaagtgaaaagcggtgttggttcgacatcgaagagctggagcttgaacgatcctgagttgcagaggaagaaaagagtggctgggtataaagct

SEQ ID NO: 288001 - DNA, 636 bp, Cannabis indica
atgggtgagcatggtggtatataatgtgataatatatatgatatatatgagttatatatatgtgatatatatgtgatcatgtgtttatatcatattatatatatgatatttgaaatttatatcatgttattttatgtatatatgtgagatatataatatataacatgtatatatatgagtaatatatattatatatatagagcgcaagtgatataatatatattagtgagattaaatatgtagaaataattatttctatgtatttatatgagacatgcatatataatatatattatatatatcatgcatgtatattaaagtatatatatgttatatatgtgtgagatatgtaacatatatagttatataaaattaatatattatgtgtatatgtattatatatatacatgtatattaaagtttatatgttatatgtatatgagatatataacatatatatttatataattaatattatgtatgttacatatatattatattagttggcatagaattattatttgagagctataattcatgcatgggagttatatattaattttgtacattaatatataaattatataatgtatatgataacaatgttgatagtaatataatagtgtttattactat

SEQ ID NO: 288002 - DNA, 643 bp, Cannabis indica
ttttcgaagcatttgtattgagatgccaagcacagagacggtgcgtaacatcgggcatgtgttcaacgatagcctgtttcatggccgcatcttggtcagtaactacaacatttggcttcttatctccatggcattctagaaatttttgaagtagccaagaatatgatggaagcttctcgtggaggaggagagcaaagccgaagatgcatgtgttgaaatggtggttgacgccaatgagaacagtgaggggcttattgtactcatttgtcatgtaggttgtgttaaatcctagtacatcccccaaagctacatagtccacgcgtgagtttccatctgcccagaataagttagccaagcgattctcctcgtcaacctgatagaccacgaagaaattaggatccttctctgcgagacaatcaagaaatcccagagccccttctgagtccgtctctatcttctcttctcgcttcgcaccagcagccctgttgtacacatctcgaagttgacatggcattttctcgtaacctccactttgcaaagaaccatgagacattatgttggcagttttaattcctgcggagttcatcgacctaacttgggcaagcaacccatcggacacaactctatatgatctcaaaaattg

SEQ ID NO: 288003 - DNA, 724 bp, Cannabis indica
atatttagggtgttaatcaacttacttgtgagtagatctaagatcctggtaaaataatttccaacgttaccaccagttgtgaatcactgcatatttcaatgtgttcggccttcatctccggggctagtcttagtccagcaattagagcttcgtactcggcttcgttgttagatgctttgaatccgaacttgactgtagcgtgcaggtgttgccccctaggcgtgacaagggcaattcctacgccagatagttgatcggtagctgacccatctacatgtagtttccaggtcgacttatcttcattgttacttggatggggtgtttgtaccggctcgaggctgctttccagtatgctttctttcttgcctatgcattctaccacaaagtctaccaaggcttggcctttgattgttgtttggggttggaaagtaatttcatactgacccaactctaccacccacttgagtagttgtccagaagcatctggcttttgcagtatttagcgtagtggctggtcaatgtatacccgaacatcatgagcttggaaatagggcctcaacttccttgttgctagaataaggcagtaggcgagtttctctaataatgggtatcggccctcggcctcaatgagtcttttactgatataatagacaggatgttgtatggtgttcttgctaggttttatgccctaaataaaactccatttcaatgtaatctattttat

SEQ ID NO: 288004 - DNA, 450 bp, Cannabis indica
caatgtaaggtttcttaactttatatgtgtttaatttatcgttttagaaagttcttatataggatgttaataaacatacttgtgagtagatctaagatcctggcaaaataaattccaacagtttcatcatatagtttttgactatggtcgctactttattaaccaatgacgagaggaccaaacttgtggaaaagcaagaagatggtatcttccagctaacataactgtaagtactaatagttatattgtattcataattatattggaacaaaattataacatgaacatattggattgtgtagaatgagacgctaccctacaacaatctaccactttatcaacgttggaagaaaatgcattattatgatttatacatgggttctcttgataagtgtaacgaggtatgataatataattctttatttaatttttttcttcaataattacaaa

SEQ ID NO: 288005 - DNA, 513 bp, Cannabis indica
acgaggtcgaacccataaaaattgcgtgagattgaaaaaaaatactaaattaatctaagctaataaaactctaacctagttccaaaaaaggtgaggtttttggtaacaaaataaaataaagtgtttaaacgataaaatgacaatagcagatattttcagtgatatttggggatattattaagggtttagaagccacttaagtgtatataaaaatatttatgttcatattgattctcataatttaatcagtaatcaaactaattattttctaacaaaaaatagattttccttcgctttaaaattataacttctaagcattaaatgtgaaataatttaatgtaaatacaaaaaatcaaagaatattattttttataaaatgtggaaccaaccataaataatttttaactataaaaaatacgtgatattaaagatgaaagaaattattttaagaagcgaaaatcataagcatatgttgtattgagaatcaaaataaaaataaatacttaattaaat

SEQ ID NO: 288006 - DNA, 592 bp, Cannabis indica
ttcttggtccggtggatgcatttagatttggttgtaccccgaataggtgtccatggagcttaatatttcgtgccctgctgttccatccacaagctgatcgattcttggaagtggaaagtagtctttggggcatgccttgttgaggtctgtgaaatcaatacacactcgccattttttgttcggcttgggtacatgtacgggattagcaacccaagccgggtagaaagcttcaattatgaagttgttattttgtagcttctctacctcttccttcagggctagagctcgctccttgtccaacagtcttcgcttttgttgaactggtcggaagttgggatcaatatttaggacgtgcaaaattactgaaggataaattccgaccatatcctcatgtgaccatgcaaaaatgtccaagtttgctctcaaaaattttatcaatgctgattttatcttgagcaacaaaccttgttcaattttaagctttctggccagaatatttgggtcgatctcaatctcttctagttcttccactggtccaacattgctgctcaggtccccaagtcgaggatcaacatcttcatccctgccttgg

SEQ ID NO: 288007 - DNA, 552 bp, Cannabis indica
tttgcttgaatttcctagagagaaaattctcaaaaccagcacgaaacctttgaacactttgccattttttccagttcttccttgcttgctgctatcagtccttctcgtctttactcgactcacatcaggacccccagttcaacacttcactgtaagtttcttgcatcctttggtagtgacatgcttttactcgttctgtttgttcttttctgggttcgcatttgagatttctgggcatgcaagtgtttaagtccttcatgtattctgttttgcatttactgctttagttgtaggattgccattatcatgcctctgttattattgtgcattttcattgtagaagaccatacgctcttcgttcaatggttgtttagggcatagaatagggtctttttctttctgttccccttattgtgtaaaaccaccttctgcgattttactgcacccgacacttgttcagggaatctttctagggtttcccgtgtgacacgtgtccggagggggcctctttccagcggttaggggacccccattccctttttcttgacttag

SEQ ID NO: 288008 - DNA, 1173 bp, Cannabis indica
acaccctaccccgttctttgttggcaacttcaggcacgagtgaaatatggatgtgacagcttttaagtcgtacaaggcttgtcggccaagcattacgttaaagcctgaaggaacatccaatatgaggaactgtgccatgatagttatgctcgtcggagcttgtccaatagtgaggggtagccggatttgccctagaggtgcaactccttgattggagaaaccgtagacaggctggaggcatggagttagatccttaagttggagccacatcttttcgtaagcagttttgaacaaaatgttcgaagaagctccattatcaatcatggttctggccaccattttatttgctatctggacttccacgaccagcgggtcattgtgcggaaatctaatcttgacagcatcttcatcattgaaagttatggttggctctcctactcgtggaactttgggcttcctttcttccacagccaggatgacttcttcttgctcgtactaagctgttcgggcttacctctctcgagctttgcccgaatctccagcgatgtgcgggcctccaataatgacttgcaagtgtccatctacgggtggaggtatcagatcctggttattttgaccttggttggtgttgacatacttctgcaggtgcgggttgtttttcttgatcagaaattctatttcccgcttcacattgtaacattcgttggtgtcatggccgtagtctccgtggaaccgaaaaaactttgtcatgtcctttttgttggtatctttcttcatgggcccgggcttcttgtacggaattaacgactgagttgccatatacacactctctatatctatagttagaatagtgaacacagtgtgtttggcattatcagggggagtctatgcggatttatcgatgaactttcccttcttcccgttcccttgcttgtggtttttgcttgaacgcttgccacttgaattattcgaatagttgggaagttgggcggacgttccagtggaaggagccttcattttgcccggctttagttcaccttctgctcgttgaatggcttcttcgagcttgatgaagccttcaactcggtcaaggaaataactcattgagtcaaccggcccattcttccttatgtccttccatagttcaccaaggacttcaatgccccccagtat

SEQ ID NO: 288009 - DNA, 664 bp, Cannabis indica
ttgcctcactagtgctaggtgaatttccttgagcttgttttgccacttgagtagccaattgttccatctgagtttctagagttttaatagaggctttagtctccatcatgaattggagcaataagtcagcttggatatttaagcctccactaggactttgttgttgcagttgttgttggttttgttggggctgatttctctgctggtagaacccctgttggttgtgcccataattattgttttgagaatagttcccaatggcttttgcttgatccattggtaaactgttcacatccaccgggcatgtgtcatatgtgtgagggcccccacatagctcacaagtaacttgagcctgtttcacctgagcagtcatcaacttcgttagggcctccacttgggctgtcaacttggtgatggcgtctacctcgtgcataccagcaactttcttcgtttggcttctttcagttggccattgttggttattcatggccatttcttcgagcagatcataggcctcgtttacactttttctcataaatgccccaccagctgcggcgtctataattgttctggtattaccaatcagcccattgtagaaattatgaaccaacatccacttttcgatcccatgatgtggacattttctgatgagatccttgaacct

SEQ ID NO: 288010 - DNA, 416 bp, Cannabis indica
tttttatcaaaataaatcttaataataatctaatctactgatgttacgacaaaactggttatattttctgtatctattcgtattaaaaattgtcttaaagttagttatataaaaaaaataaaattgttaaaaattgaagggtcctatttttaccattttggaaaatatagggtctattttgtcatttaacaaaatagaaggtccaataactaatttttgcaaaacacaaggtcgaaaatagtatttacccgttttttttattgtcttatttattaaataaaataataaataaattatttctaggattgaagtaaatttttaattttaaaaaagaagtattttaaaaatataatttaagttacaaagaaaaattagtatagaagattataaaaaaaaaatgaaaggattaataaaaa

SEQ ID NO: 288011 - DNA, 916 bp, Cannabis indica
gaagaaaaacagtcgctctacctcgacctactggaagaaaagcgcgatcaggctcacctgaaaaacgcgatcaggatcacctgaaaaacgcgacttaccagcgacgaaccgcaagatatttcaattccaaggtcaaggcaagaagagtaatgccaaataccaagaacccaacacatgggttcttcggggataattgggagggaccatatctcatcgcaaaaaagattggtgacgctacgtaccgactcgcagaactcgatggtactgcgattcaacgggcttggaatggcgagagcctaaaaatctattatcaatagtactcgcattttctagtttgtctcgccttgtatttatacttagttattttttataaaaaaatcctaagtatagggggtatatactatgatgtactattgattatataaaggaaaattttttcaagtttgaaatttctgaaattttctacttattacaccaagttgtaattaaagtcgcaattttctacttattacaccaagttgtaattaatgtcgcgatcagaatataataaacgcgagtacccatgtactgcgaaaatactgtaaatagatatccccgagaggatataaagtcgttcaaaattaaacataaaggtaaatttgtctaagtacaaggcgcgagtacccttgtaccgcataaaaaaaaaagagagataaagtttaacacaagcaaatattaggaaaagtcaagcattgggagcagtaggggcagatccatccgcgactttgctgacggcttcgttctcgacttcctcgacatccgcagcctcagcctcctcgggaaacagattccctccgccgccttgagtctgtgtgggcgacatggcgcgaaaagcctcagccatttcagcagcttctgctccgaggattgaaaagtc

SEQ ID NO: 288012 - DNA, 607 bp, Cannabis indica
gttgggggccctaactcaaatgattatggagctaataacagaattcttcaccattctattgggttagctgattttagtcaagagctcaaatgcttccaacaaatcacttgtcaacaggtttttaataaaataacttaacatcatatatttaaatgtattattaataattagtattttgaattaattataattatattgtaggtggttgtgaataacttggataatgcacaagagcaaattgatggggccatagctgcagcattagagcatagcaaacctgtgtacattagcataagttgcaatctgcctggattatctcatccttcctttcttcgaaacccacttccattctccttaccagtcaggtatattaatttctttaacataatctatatattaattaacataattaatggacacatacatatctcttaggtaccacccctcctatataagtatagaatagtcccataatcaatacacttttataatatttaaatttgttatgaaacttttttgaggcattaactatatttgatgtttcattaatagtattgaaattaagggtaagttatgatttggtatctagctagtcttttattcaaat

SEQ ID NO: 288013 - DNA, 136 bp, Cannabis indica
aaaagggtttgaatgaatttataaatcaaatagataaacaattgataaggtgaaccaaaacatacacaaatgaatgaaaaatacttctgttattttattgatattgaataatctggattacattgaaacagagttt

SEQ ID NO: 288014 - DNA, 729 bp, Cannabis indica
ctctctctctctctctctctctctctctctctctctctctctctctctctctctctcaccaaactaacccattgaatacatcgagcacctcatgatgaaccaatcattaaaaaaaattaagaatgatcaaatgtcagtatacagagaacagtgggtgtggacctattttattagaacctcacttggtgatcatagtataaaagtagggtttatcatttggtttttccttttgtaatttgtatttttataattaatagacatatggccaaaacatcaataactgtgtcgctaattatcatcatacatttttagattaaaaatccaaattttgctaatatatcgatacacgtcgatatctaaatcgtgttatgttgctatatattcatttgttgctaaatatgcatttaatacttattttatgtggtttatcaataacatagtcattaaatgtcgccaaatattgtgaaaacatatctgagcaataaaacaaccaaatgtcaacaacgtagacatcaagatgttgatagatgtcgttaaacaaggccagctagtagcaaatatataaaaaaattagcattctaacttaatcatatcaataacgttgtcgacacacatcgctaaatgttgttacagcaggtccaaataactaatacaagcaacttaaaaattagttcataagactataatactaacaaaaataatgaaaatactaaaataatgctcaaactc

SEQ ID NO: 288015 - DNA, 607 bp, Cannabis indica
agttaccaatatcatatttaataatttggtattatatatttaattgcttattagtattatataaatttaataataattggtgatcaattttttttttttttataatatgccatatgttattattatataattaatggtatcatataattttttttattaattggtatccaaataaatactaattagtatttaaataaaacaaaaaaaacacattagtatatctaaatgtttaactactaagtagtagtaaaagtatatattttatgctatataatgtgaaatagagtgaaaatttgattgttttgtaaggtcggatttccagataatataataaatttccatattaatataaataaattactaaaaattatttcttttttttttcacttctattttggaccattattaaagttggagaaataatacttactttttttatttgaggcttttttatttttacacttcaaaatattgttttttttttttgtatttttacagaattctacatagaaagcgttgcaacctaaactgcaataaaaaattgtattgaaatccttattgcaattaacgctgcaaccactttagaaacccaaaccgtaaatttgaa

SEQ ID NO: 288016 - DNA, 724 bp, Cannabis indica
aaaaaaaataataaaaaataccgattagtaatatttttataaaaaaataataaaaattaatataccacgtaaattttcgtatatttatcaaagctaaaaagaaaatccacattctacataatttcttaaaaaaaaaaattaaaagaaagcaatcgaaatggaaagaaaagtataaaagtccagcccaaggtggggccatacgcccagaaacaacacaaactagaaatgtctctcgatcatcgaacccaaagatccggacgaacaaaacccaacatcaaccacaaacgaaaagcctccccaaacatacactacgctgacttgggataaacaaaaataaataaatataaatataaataaaaaaataaaaaagttcttcaaaattaaaaacacaacacgaacatattcaacttctgacctggaaacaaaaagtaaaaactaaaaaaccaaaaaacaaaattgaaagatttttttatttattaaaaaaatatataaatcaaatttgggtgttggggttctttctcaatcctattaaacttacatctcatcaattcgcacatgtttgacataatcacacccattcatttaaatactccaaaacaaaacaaaaaaaattaataaaattcaaaaagcaaaaacaaaaacaaaaattaaataaattataattatgaaagttggaattagaagagcgaggagggactgttggattttttatgtcttgaaattc

SEQ ID NO: 288017 - DNA, 505 bp, Cannabis indica
taggatgttaatgaaacatacatggtagtaaatctagatcctggtaaaatatttccaatattgggttcgaccgaaccttttgtacgcactggatggtaaattagaaatatgttgataatttcgacttaatttgaattttgaaataactatctttattcatttattgatcgaaaatgtgtttgttaccgtagtaacttacatcagagctatttgatctaatttgatcttttagcttaacatgaaataaaacaaattgcagaaataagaaattgtactttgaatggtggtcatctaacctgagtaatttttcccttttgtcgaaacctttgagcgtagttcgcccaacaggccattcacttaaaagtaaatgttcatttagtacttagtgtggtcgtctgacctggtactttatttgtagtattttcttaaatgttccccattccaatatcgtggtactagaacgagttgcatttttcataattttacctaatttgtatgctctgga

SEQ ID NO: 288018 - DNA, 732 bp, Cannabis indica
ttttttttttggcagtatactgcctttgcaaactttacataatatatatatatatatatatattataatcttaaaaaacgtgtgcagtgggggggtttttctttttttttttttttttaattttcttttaattaaaattatattatattttaaaggtataaaggtgtgatgtgacttgtgttgtcactttagtgacatatatttttttttatttatttttttaattgaaattgatgataaaaatatgtcacctaaaatatttcaaacttatttctttcactctaatctctcttctccattattctctcttactattcatcatcttcttcatttttttcactctctacttcctcaagttctctctatttctctccatcaacatataacttttttatttttttttttctatgttcagttcttcttcttcatctttcttttcttttcttcttttttttttttttttaattttttgaagttcttagttatgttttttttgaaaatataagagttagtgtggtttttttttgttctaattttctagaactttcttgcaaatatagtgcatttagtattgaggatgtgcacaacatagttaatttttgatcatttttttcttttattgttttatttgttttagtattgttttagtattgttttactgttgtttttcatgatttatttatttgatgccgatttcactgcccttgctccatctcgctggaattaataggt

SEQ ID NO: 288019 - DNA, 994 bp, Cannabis indica
atatatatattttaccaagtcagctaaatcatcctatactatacaatactatacatacacatatatatgacaaatgatcacatgacatggatatacacaactatatttatctcataaaataaaattataattttattattatttattatctgactaagtcatgactcatcactatgttcccactctctttcatgccaaaaaaaaaaaaattataaaaatataaaaatatattttcaataaaaataataaactgtttttcaattatattataattaaattatatttattgtagagttgttttttctagttattttataatttatttttaaatttcgtgaaattaattttttgttatatttttactttttagtgagaaaaaaatatttttataatttaaaaattttataaatatatttttgtaaattaaaattttaaatcgtaaaattataaataaaacataaaaaaaaatatttttcacaaaaataaacaataaaaatagtttttactacaaaaaaaaaataatattcagccaaaaaaaacgttagacaaaatacttgtgacaaacttttttttttagtagtggaacttgaagcttcattgatagaaaagaagtacaaagcaaacaagtccttacaaggaaggtaaagaaccattccataataactccctgtctaatcctaaacctaacttagctaaattatgagcatgagtattctcatctcttctaataaacacaactttaggcctaggattgaaggacaaagagttgtaaacatcaattaaaacatcatcacaaacactattattccaattacatttattaatcttatccaccacagccttacaatccgaaaaaagaacatgaacaggtaaattaatcattttagtccaagccactgcaagagaaacagctttagcttcagctataactggaagaattatcccagtaactggtttcaccaacccagccaccacttgatctgaatcattcttc

SEQ ID NO: 288020 - DNA, 501 bp, Cannabis indica
atcactgaaatgagtactcaactctttatctttgttaagccaagctcgaaggaagtcatcatttgacttctatatgcggatagaagctataaattctgtatctatgattagtactcccactcaattgagctaccatgttcttaacctatatgtcactggaagaaccatttggtcgactttaacgaatatattcaagaacacaaataatgcaactgaactagaacctaaccatcttaggattgagatcatttgatctaggatcaactaagtgatattaaattgaatggatattacggtaagtttatcatatatagttcatgttcaatatcggtcccttccaatgcatactctatgcattcaaccaaagcttactttaaccaataccctggaaaggacatagcacttatccaaggtgcaagtaaactacattgtagattatcctatcagttaaaccatatgtacggataaatcattatttaatcacataatcttgattacttt

SEQ ID NO: 288021 - DNA, 421 bp, Cannabis indica
atgcagttcaacgatcttttatatctattgaactctggattatattcataactccacatgatctctataacacttaggggtggatgaagctattgacatatgtagttcatttggaactctagactatactcaatataccacagaatctctatcgcacacatattttgaataaacatgcatataatataatgaacaaattagcacatattagaacttattcttgatcctaatttttttgttccagttaatattttactcctgtaatagtaattgataccaataaagttctttgtcatagcatcacagtaccttatttgagtgaaataattttaaaattctaagcccatcttcatttggatgacacttgtgataggactttagaattcaattgagaaagtagatctaaccattcatatggata

SEQ ID NO: 288022 - DNA, 815 bp, Cannabis indica
gacttagaccaaaaattgtatccaaactcaaatcgggattggaacttgggactcgcacccaaactagacaaagcccaagactcgaacccacatccagagcctgatctagacctagacagaaatctagacccgaacccaaacttagacaaggactcgaactctgaacaaaactcaaacccgaactcgaaatcaaaatcgcaaaaggaactagaaccaaactaggactaggaccaggactaggacctaaacaaaaacccaaacccagacagagacctaaacccgaaccgagactagcactcaaacccgaacctagaccaggacccaaaccaaataataaccgggacctgtacccaaaatcaggataaggacctgagaaacagaactaggaccaggacctagtacccgacccagacccaaacttgaacctaggacccagctcgtgacccggcactagaaatggaaccagactgcgacccgagatcgggatgcggatctggacccagggcttggacaaaacccgtagtcggtgtctgtatttgggacccagccctgggcccgaatcctgacaaggacccaaacccacaatcccaaacccaaaagtggacctgaacccgtaccctgtgacccgaaattggaacccaaacaggaagttgaccaggacttgaactaggacttggacttggaatcataactgaaattggaaaaagatccataaccgtaaccggactaggacccggactccaaatctgaactagacccgcattgggagctggactcggatcccgaacccaaacatggactcgggacccgaacct

SEQ ID NO: 288023 - DNA, 617 bp, Cannabis indica
atattattcacacaataatatatttatcacattttaacttatacttattatattatcaaataaataacaatcccactagataaaatatgttatacacttgtaacatccttgtaatatttatttaatcaaacaaatattatatcaaaatataatattcctccactttgattgaataaatatacacttttaagaagtcttgcttaggtgctttaaggtaaaaaatctttgtacttgaattttaccttagtgtaattaccacaaaatttgattttagttcaaatcgatgataacacacactgtaacgtcctaatatatagggacgctacgtgtgtgattttataaattactttagcactaatagattaattaattattaaaattcgtgataatattaaaaacttcaccaatgtaaaacactaaacacggacattataatgacactaaaactgtgttttggggatccatgtcataaaagttttaaaaaaatagactatatacaacaacaagccaaaataagaaatcaaaataacgcagcagctaaaacaactcacagcaactcggtacacaggcctataggattgatatgtacattgctggagaaaactgtcacctcatgg

SEQ ID NO: 288024 - DNA, 813 bp, Cannabis indica
taaattaaaaattaataaaacaataaaaattaatacaataattaatcattaataataaaacaataatcaataaataataaaattaataagacaataaaaattaatacaaaagttaataattaataataaaacaataattaataaataatacaaatttataagacaataaaaattaatacaaaagttaataattaataataaaacaataattaataaataatacaaattcataattaataattaataattagtaaaataataataaataataacacaatacaaattaatacaataattaataataaaatataaattaataattaataactaataattagtaaaaaataataaataataacacaatacaaattaatacaataattaataataaaacattaattaataattaataaaaatacaataattaataaaacaataaaaattaatacaaaaattaataattaataataaaacaataattaataaataatataaaacaattattaatcaaaaaaataaaacaatcactaaatacttattaataattaatactaaaacaataattactaattaatactaaaacaataattaataaaacaataaaaattaaaacaataattaataattaataataaattaaaaattattacttaccaataattaattaaaaaatacttattaagtcattaaaaataaattaatacctaaaacaatcactaaataatataataataaattaatacctaaaacaattactaaatcattaatattaaaaaaaaaaaaatcgggtccgattggtccgattggcccgat

SEQ ID NO: 288025 - DNA, 510 bp, Cannabis indica
cacaccttctctttgggtataacccttggcaactagtctagctttaaaagtttcgacttcgcctctagcacctcttttcttcttgtagacccacttacatccgattggacgatagtcatcgggtgcgtctacatattcccagactttgttctttttcatggaatccatctctgaatccatgccggctgaccaccgtttccgttctggacttgccattgcctgtttataggttaatagttcgtctttaataccgttaccaacgaccatattgatttcaccttctaagccataacgagacgattttgtagaaaccctcccactacgacgaggagcggtgatcttctgaacaagaactttagtagtagttttctcagtggtttcaactgaggagtgggattatcctcttcttgagtggaagaggacggaacattggaaggagttatatctgtaagcatttcctctaatacaactttacttttcggtttgttgtctttaatatagttatcttca

SEQ ID NO: 288026 - DNA, 662 bp, Cannabis indica
gtaattatcatcatcgcattctacattcaaaaccgagtccaacgacatataatatgactatatttaaaatttgggattccgaaacctcacctaagcggtgcacattaacaatcggtggcggtaaaaattggtgtaccggaaatgtcgccgaaaataggagtagtatatatcaaaacgaccacctcgacgagtagatcacactcatgccaaccgtttgtcaaaacggtacacgaggtcaccggaaagtcgccggaaaggggcggagctacaaaaatgtcaccggaaaaagttgcgaaccgggaaaaatggtttagtgtaggttgttctcctcgacgagctgagtgtagtggtgaaaacctctcgtcaaacggacgccggaggtgaccggaaaacccgttcaaagtttgaaatcccaaactttgacttgcgatcccgagtcaacggcggcgagaggagcggcgccgcttggggggtgaggtcgccggcacttgggctttcgatttgtccggcgcgttgggtcgggcggtggccggaggtgggtcgccggagtgtggtggttatggaggtttatgggtttttatttttggtattttaaagagagagaaaatgagaaatatagatagaaagtgagggggacgagatgttctgtatatattcaaaat

SEQ ID NO: 288027 - DNA, 531 bp, Cannabis indica
gggtatgttatttaaaaaatttgaatttttacgcttaatttttaaataaaatttaaaaaaatatatatttttatattacatgggttgagttattcgattggttgagcaaaataaaaaagaatgttattgagaaaaaaaaaagataaaacaaaaagttaattaagtttaatttagatatttttttatataaatatatttttgatttagtgtaaaaaaaataatttttgatatttttttaattaggtatctaaattatacataaatatattttttaatttgttgttggatgaaaatctaatagctagtttaacatttttaatatataaattggtaaaatccttttattctgtatatattaaatgtgcaaaacttcaagatggagaaattctaccattattatttattaatatataaatatatatttctgtagttttaataattattacaaaaattttacttttgtcacaacaaaatttatgattaaaagtgaaaaagttgtggctaattataaattattattcttatgttgtg

SEQ ID NO: 288028 - DNA, 677 bp, Cannabis indica
aagagcttttcaagacctaaagccagagctcgcaaaacctcccatcctttctaaacctcttgacggtgaggaactggggatatacctagcagtaacggagcatgccataagcgccgtactaatcagagaagaagacggcgtgcagcatccagtctattacatcagtaaaagactcatcgaggccgaaggccgatatccgttgatagaaaagctcgcctactgcctcatcctagcaacaagaaagctaagaccttactttcaagctcatcctgttcgggtgtacaccgaccaaccactacgacaaatactgcaaaagccagatgcctctggacggttactcaagtgggcggtggagctggggcagtacgaaatcaacttccaaccccgaacagctatcaaaggccaagccttggccgactttgtggtggaatgcacaggaaaaactgaaagcatcccagaaggcgatctcgagtcaacaccacagccgagcaacactgaaaacaagccgacctggaagctgcatgtggatgggtcggccacagatcagctatccggcgcaggaattgcccttgtcacacctgggggcaacacctgcatgcagcggtcaaattcggattcaaagcctccaacaacgaggccgaatacgaagccctaatcgctggactcaaactagcaaa

SEQ ID NO: 288029 - DNA, 701 bp, Cannabis indica
cagcggtcaaattcggattcaaagcctccaacaacgaggccgaatacgaagccctcatcgctggactcaaactagcaaaggagatgaaagccgagcacatcgagatctgcagtgactcacagctagtggtaaatcatgtatctggcaaatacgaggctcggggagaaaaaatgatagcatatctgagcaaaatacattatctgctcgcacaattcaaaagctacagcctcaggaaaattccaaaagaagaaaatacaacagcagatgcgttagcccgattggtgagtagcaatataagtgacaaggcgaacctggtccgaatccactttcttgaagagcctagcataaccggcatggaagaaattgaaatgatcgacacatctccgaactggatgacgccaataacagcctatctaaactctaaggaactcccaaataaccgaaatgaagctcggaaaatgagaaggaagatagcacggtacatcatcgtagacgggatcatgtacagaagaggattctcaatgccattactcagatgcatcacacaaaatgaagctgcacgacttctatatgatgttcacgacggattctgtggaaatcatgcagccggacagagcttatcaaagaaaattctaaggcaaggctatttctggccgacgatgattgaagattcgaaagcttatgtcaagaagtgcgacaaa

SEQ ID NO: 288030 - DNA, 613 bp, Cannabis indica
aaatatatattttattcttatttgtaagatttttgtttgaactgaatttataagaaaatatgatctaaaacaaaattaaatattttttacacgtacagtttaaaatttttcttcttgctttgaattttttattttttttttattttaatttgttgttggagacataaaataactataatttattttaggggaattatcctatatattatttttttttaactttttttctttttaaatttacagtttgagtttctaaagtggttccaatgctagttgtagtagggttttctatacgattttttgttgcaatttaggttgcagcgctagttgcaataggagtttctatgtagaatttcgtaaaaatacaaaaaaaaaattattttaaagtataaaaatgaaaaaaaaaatccctttattttatgaaatttttacatcaaaaatccaatttactcaatttattacaaaaaacccctacacgcttacatcatcattttacctttcctctttcttttattacaattataccacttacacatcaattccatccatgcagccacgtcattgattgatgacttatatcaatcacaccttacatcattcacttatctttttc

SEQ ID NO: 288031 - DNA, 492 bp, Cannabis indica
cattaatagatgttcaaaagggagagttaaagttgagagtgcaagatgaagaggtcaattttaatgtttttgccccaactgacattcctacctgttgcaagattgagatggtgaagggttcttttgttaaagctgataagaagaaagcaaagcctaaagagcgacttcgaacgattcagcgtcgttggaaaagattgatgtgtggtagttctgaaggtgagcttactcttgtgcaaaaatctgaaatcaacactattggtggtcaattttcttcatttagtacgagggctcttttggatgaaaagggtccacccaaccctttctgagagggtctcaggtaagtttcttctctctgcatattactgtatacattggggacaatgtcatatttagtttggggggagagacttaaaaaattttaaattctgcactttaatttctgcattttaattttctgttttagtttttttttttagttaaggaatggcaata

SEQ ID NO: 288032 - DNA, 770 bp, Cannabis indica
atccaagtcattctgcaaggccaattttgccaaggcatcaacattagagttttgttctcttgaaatttgttcgattttaatgtaattgaatttttccaagttcttccgaaccttctctagatacttagccattttcaggcccttggcctggtattccctgagaacctgatttacaatcagttgtgagtcattatggcagatgagattcttgactttcaacgcctcgactatctttaagccagcgatcaaggctatatatttagcctcgttgtttgatgcgtcaaattgaaatctcaaagcatagtgaaacttaaagcctttcggtgaaattaatattaccactgcacccgagccctactcgttggatacaccatccacgtataacttccaagtgtccgcatctcggtgaacaggcagaatttcttctagagttattccttctattaagaagtctgccaaggcttggcccttgatggatgttcaagggtggtatgttatgtcgaactaccctagttcgatcgaccattttatcaatctttcaaaagaatctggttttgatgaaacttgtctcaagggttgatcagttaacacttttatggggtgtgcctagaagtaaggccgtagcttgcgagacacatggattaggcacaaagcgagtttttcaagagggggatacctcaactgtgcccccagtaaccttttacttacgtagtaaataggttgttggtgcttaccctcttctcgcattatagccgcactaattgcatctt

SEQ ID NO: 288033 - DNA, 640 bp, Cannabis indica
ccagggttagtcttttttgatacgtcccttttaacttttcacacttagctccatatgctgacctttttctttgtgcaggccgatctgaagttcacttacacttactcccgggctaaatctgctacttccaagagtgcggctctgtccgacaccttgagggcggaggcgaacttggccaagaaggaagctgaggaggccagggcagaaactggagctgttcggcatgagctaggcgaagccaacaagaagttgtttgctgccgagaagaagatctccgtgctaacaaaggacctcgaggctgctgatcgctttgaggaaaccatcgagatcttatctgctgaagttaacagtcttcaggatgagaggagttctctgcggcaagttcttcttcggctaaaggaggagagggacgccaaggtgaccgaggcggaccaattgaaggagaaggtcaatgctttggagactgccggcctcgagctcttcttcgatttctggaaggctaatccccaggccaatttcgactacttgggcgacgctaaggacatgtaccttgagtactgcgcggcccaagttgcttatggtgggaaagaggcggctgcttcaactttcggccaagcttctgactaggctgttgatgctt

SEQ ID NO: 288034 - DNA, 403 bp, Cannabis indica
aagtaactgatactatatgtttctgtttagattctaatgatctaaaatctgggtcttatatgtaccttgtttaagacaataacaaagtttgtactgacaaaatcaaagaaaaattacagttttataaatattaaatttatatcagttataaatttaaaattattttaggtgcaatatatcattaatcaatacataaacacttttcacttagtgttgtgattcataaactttttaagtatttcatattcacacattgccactcatttttattagttgattatgttttttttaaatttattttaaccaaaagtttcctctttttttttttatctgttgtgataagttcatcccacttatttcaatcttcaaaaagagatatcaaaagtgaagaaaatctatgtgt

SEQ ID NO: 288035 - DNA, 470 bp, Cannabis indica
gtaaaataatttccaacatacaggaatgttaaattccttcatggtgtagagaagtcgtcgaaggaacatgatttcaaaactctctattttttggtgaacgacattaggactaaacacaccaaattccaaatggtggaccaattcgagaagccttcccccacccttgccatgtacgagagggctcttgcgttagcccaactgcctgactataagaaggatctaaacattctaacatccccccgggagttagatgattttgggttcaactttgttgttaccccttctagcagagtacgagaaatcctgcgacccttgggacctccaatgctgggcactgacagccatagcgaaaagcactatgctcgggtcttctaagaaaaggccaattaaggagtgtgactctcttggtgatgatcgctatttgtctttcttattgcatttcttcattattttgcatgttattatatgtt

SEQ ID NO: 288036 - DNA, 663 bp, Cannabis indica
catattcaaatctttctgggtgaaaaagtatttgagactcttatgatcagtataaatctcgcacttctcaccataaagataatgtcgccatatctttagagcaaaaaccacagcagcaagctctaagtcatgagttggatagcgctgctcataatctttcaattgacgagaggcataggctatgactctgtcagcttgcatcagaacacatcccagaccttgtctggatgcatcacaataaaccacaaatttctcttgatctgatggcaaagctaacaccggagctgttatcaaacgttgctttaactcctggaaacttgtttcacacttatctgaccacacaaatctctgatttttcttggtcaattcggttaggggcatagaaattttagagaatccttcgacgaaacgtcgataataccctgctaaaccgagaaaacttcgaacctccgtcacagacttgggcctcggccaattcttcactgactccaccttgtttggatcaaccataatcccattcttcccaataatatgacccagaaaggacacctcagacaaccagaattcacactttttgaactttgcatacaacttgtggtccctaagtcgctgcaataccattcaaagatgatgctcgtgctcctcttctgactgagagtatac

SEQ ID NO: 288037 - DNA, 608 bp, Cannabis indica
tggcgtcactatctatactacggtgagaagtgtgaaatttatacagatcacaaaagcctcaagtactttttcactcagaaggatttaaatatgaggcaacgacgatggttagaactggtcaaagattatgactgcgagattctctaccaccctggtaaagcaaatgtggtagcggatgctctaagtcggaaaggaccagggcaagtttgtgaactaaaggaaatctcagcaaagttggctgaggatatgacgagagcgggaattgaatttgtaattggaaaacttgctaatatcaccatacaatctaatctattggaaagaattagagtagcccaacaaggtgaccttgagctacagggacataaggagaagttagaggctggattggcaagagacttttcatgcttatctgatgggttgttgcgatacaaaaacagaatctgtgtaccggttgataaagaaatcagacaagagattcttgatgaatctcatactacaccgtactccttacacccgggaacaaccaagatgtatcatgatgtgaaagctttatactggtggccgggtatgaagagggatattgttgaatatgtgtcaaaatgcttaac

SEQ ID NO: 288038 - DNA, 713 bp, Cannabis indica
gttagtttctgtaaatattccctagtattacgggtgctctcatgtgcctctaacacataattaagttgctaaccatcccattatggttattagcaacattaggcacatagttaatgattgtgtattatggaattaaacatatgattgtattagtccattataataattctaacattttcccacttggacaatacaatcacgccaccataataatgtctattatctcacataaaggtaatcaaataaaacatacacagcatcatatctagaggatacatatatcatgtatgaattgaccttgtagacattcaattcaaaacaatcatcaacaatcaatctaaacatgcatgaggtacaacaaaattgagattatgcgcattcatctcactttggacctgtcacttccttgaaaaacaacatatatgtataagcatacatatgtaacaacaataaagaagtgacttcattatcataatgcatgttcttaacaaaacacaagccataagcaatccgtacaaaatactagggaatatttacagaaactaactaaaaactttttttatttacttttttatttgtttctttagtattttacatttacacggttgatagctattttgaggacaactgtctgacgcgtgcagaccccacttgctattggtaggaggagaacgcgccaaatagcgcgtttttggagtttttttttttttttt

SEQ ID NO: 288039 - DNA, 680 bp, Cannabis indica
aaggacaaaattgtcattatatatttaatattcaaaataaaataaaaaataataaaaatccattacccttaatggcattccttacaaaattggtgggggaagttctccctttcttttctcccttatttaatcaacttttccatttcctaattttaataatacaagtaaacaaatgtaagggaatgattaccttactattgattctcattacttattagtaaacaggccatcaattttcctctcctttctcctctctcttgattttacatttctttatctccatccaccactctaccaaacatagtgttactatactaaatttgtttttataacctaatgaacattgttttaaaaaacaaaataaaagaagaagacacgacacaatgatttattggcttcattaatttattgttttcccaagcaatgtcgattaatggggtgataatatccaagaaataaataatacaaagtggaaacgttcaaagttgtaatattccctctcaaataataatgataattaaatgatgtatgaaaccaaagtgacacggttttgttttgaaggtggaaacggttgacgtccaattttggtttcaaaagacacgtggcacaagaataatgatacattacttaactaataataaaagggaattaagggaaatttgattttctatacttagaaa

SEQ ID NO: 288040 - DNA, 703 bp, Cannabis indica
cacaaggatttaggaaggttagagttgctactaagcatactccgcaccatgtccattaatgttcggtttcttctttctgcaacaccattttgctcgggtgtaccgggcaaggtgtaatgggcaacaatcccattttcttcaagaaacttcgcaaatgcaccaggtgcttgtccatcttctgtgtatctaccataatactcacctcctctatctgatctcactatcttaatttgcttgttgcattgtttctctacttcagctttaaatatcttaaagacatctaatgcttcacttttattatgaagtaagtagatatacatgtagcgtgagtaatcatctatgaatgagatgaagtatttctgaccatgtgactccatatctggactacatatatcagtatgtatgatttctaatatttcagaactcctatggacaccagttttgacagacttggaggtttgctttcccttaatgcaatccacacaagtatcaaagtcagtaaaatctaaggtattgagtacctcatcttttaccaaccttttaattctatcaatggagatatgtcccaatcttttacatgaatcatctttcataacacatcttttagtgccaacgtgaacatgcataacattattagtggtattattttgtaaattaagacagtaaagaccatcagacaaaataccatttccaacacattcag

SEQ ID NO: 288041 - DNA, 239 bp, Cannabis indica
catagaagtgaaacaatgatttcctttgagcttggctgaatagagataaatgattgagatctcatttcagtaattatattagtttattgaaatatcatctatataacttagagtgtattaaattccaagttctatagtggttcaatgaggaattaataagttgagaatttacatggtcaattctagatctacttattgaaagctcgattatataggcccatggtgttggaaattatttt

SEQ ID NO: 288042 - DNA, 517 bp, Cannabis indica
tgggcatggcactctttcactaagggttcaaatatggtgaagaacaatgaaggaggtgaaatcactatggaaggaactctctcatctaggttgaaggcaatagttaaattgtcaaaaagtggatgagtgagagcatcatgttccttttatagtgtttcaagtaggacttagagctgaattatatggattaaaaaagaattaaaatattgggcaaaaataatataatgtccgtacataaaaaggaccaaactctaattataattttgtcactttttcaaccacttattcttctttcaataataccatattttccaattcaatcctataaatgccaaaactatttatttaataattataattaattatcgaataaaattgtcatttatataatttatcaattagaccatacaaagtctcttaattaataatttgaccccaaacttagtgaaaattcttaaataagacgtagtctaatttaagaatagaattataattgattaattaaaatcaattaact

SEQ ID NO: 288043 - DNA, 531 bp, Cannabis indica
ataaaattggagaagcaattttgaatcttaaaaagtaaagtggtgaaacaaaattgatgagaagtaattttgttaactttggactaatctcaatgaggagataaccataaaattgaagaagcaattttatcattatgtgaattttgtgttatctattaacaaattttaagtataattttgttaataaaggacaaataatggataaaataattctattaatttgtaagtggtatttggagagattatcatgtgatatcgaaaggttcatgataattttgagtgcacattattttgaaagataatgtgtagagaacaaaataaaataaagagatttattttaaagtgatatgtggtattttaactttatggttaaatgtgggggtgagatttgagtttaatcaaatttattgagaaattattgattatatatatgtggttttgaatttaatattctaaattaatattttgctatgtgcatatgtgaaattttgacatatttagtgtcaaaatttggtggtaataatttcaaga

SEQ ID NO: 288044 - DNA, 890 bp, Cannabis indica
tacatttaatcacataatcttgattactttctgctgacctcacttttagccaacgacaatgagtctaattttgtaagcgacaattagtttaatatgaatgaaatataataaagcgaacaaagacacaagaattttatagaggttcagccccgagcagttcggtaatagcctgatcctcgttatttgtattgacttaagaacaaggaaaatggttccttttcttagagctcttacaacagtatctctgattatggattcttagacaaaatctttcgacccttttcccagtgaatatgaatcactatttatagcgctataagcttggagaggaagtatttcccttctagctacaattgatataagcagaaagattgcgtaataaatacagaatacactaatcgtgggatttggacagcttaccatatctctgtaatctgatctcaaagttatagggatttctttgatggctcacgatgtgaaagctgaatttgctaagtgttggcgttctgcacggattgctcactgctcggtctagagggcttcatccgaacaaatgtatgaggtaccctgttcaacctgtgtcttgcgggtaggttcccaaagtcaattccacgtgtcaccatcgtgtgatgccatgtcagagtgcaaaaattgggataacatttgccctcaagtcggtacgggacttccgaagttgcgtgtagacttcatctgagctgtctttgcatttaaatgggtgacacctttcaggtgcgtctgttcgcgactcgatgtgaggctgactcggcgtctcttcgattttcggctaataaatgctctgacgcaattaatgttgggttttgtgccttaaataaaacacatttcaatataatcatatttacttattaata

SEQ ID NO: 288045 - DNA, 526 bp, Cannabis indica
tcataatcctttaactgacgagaggcataagcgataacccggtcggtttgcattagtacacaccccagaccctgtctagatgcatcacaataaacaacgaacttttctttgtcagaaggtaaagctagcactggagctgtaatcaacccctatttcagctcttgaaaactagcttctcatttatctgaccatacaaccgctgattctttttagtgagcttggttaagcgtgttgagattttagagaatccttctacaaaccgacgataataaccagctagacccaagaagcttctaatttctgttactgttttcggtctaggccaatccttgacggattctatttttcctggatccaccttgatcccatccttgctaacaatgtgccctaagaaagacacctgaaatagccaaaattcacatttcttgaatttggcataaagtttgtgttcccgaaaccgttgcaaaaccactcgaagatgtacctcatgctcctcttctaattgagagtacacaaggatgtcgtc

SEQ ID NO: 288046 - DNA, 686 bp, Cannabis indica
ttgatgcaaaatgcttcagtattgtttttgtgttctgcgtcggttataaaatgacgagaatagttttttgtgtcattttataaccgacgcaaataaattactatttgcgtctacggtttatacgtcgattttttaaaccgacgcaaaatctttattagtcacttaaaaaccgacgaaaatactcctttttgtagtagtgataatttgaacacttaaagtaaataacaaatccttcaaaaccctaaagaacgattttaaataaatgaggaggaccttttttgtattttaaaataataaacattttagtaatattttcccatcaatccatatacggtcaaatcagtaggttgtactatctacttgaataacctaaaaaaaataattacgtagaaatatgttattactataaagataccttcattatttgttaattaattatgataaactattttttaaatgatacatgtatattttttgtgtaccgaagggtgcaaagttagttgatattttttttcatctcattttatttttatctttttttgtcaaattaaatagattatttaacttattctgctaattctgttcttaataaaattacagaatttattaaaaagaaaatcaagtaatatagtagtatttatttttttgatctaagtcaaatattgtatgtatagttttttagtaca

SEQ ID NO: 288047 - DNA, 271 bp, Cannabis indica
aacgaaaaaattgcgagctgtacggacactatgcattgcatactgtccgcgcgcggctcaacggaggctggctgagaaacgtcggcgcagaaggctgcatgcggcctctccgcgcgcggctcaacggaggctgtgcgcgtgttgtctgagagacaagccctcgtgcgcgcgcgttggtagatgcacgacccctgatataaagtattagaggaagaagaagagtatgaaatggcggctagggtttacaaagagaaggcttaggttttcctct

SEQ ID NO: 288048 - DNA, 849 bp, Cannabis indica
tttcactaatgcatgggaggaagacttgaatgcaatagtcttctttttcttctcaacttcctattcttcttgagcactcatgaaaatttcatggttcatgagtgagccaattagttcttccaagggaagtgttgagagatccttggcttcttgaatggcaaccacctttccttgataagctttggtgagacttctcaaaatcttggtcaccatatccttttgagtaagtaccttgccaagagagttcaaaccattagtaattgtagtgaagcgagtatacatattagcaatggtttcatccgctttcatcttaaagttctcatattgagtggaataaatttgaattttagtttccttcatagcactagttccttgatgagtaacttcaagcattttccacatatcataagcggtagaggcttgttcaatatttttaaaacttttgattatgcaattagtcaattaatcaagtaaaagcaagtagtatggcaagcaatatattaagacaaataattaaacttgtaaagtaaagagtttaaggattagaaaatgcaaactctcgatttttacaaggttcggtagaactatgccacctacgtccttggtcttcaaagctatggacctagctttgagttccaatatcgagccaagttaacgggcttgactaacccttacaaccgggaaattttcaccaaggtatttccaaacctcttacaatagtttcgcacccccgaggactattaacctctttctcggattgttgaagtgtcaatctcactattaccgggttgtttacaaaaccggtgccaacctcacctcaatcacaatatggaaatgtgtttgatatac

SEQ ID NO: 288049 - DNA, 856 bp, Cannabis indica
atattatcccaataactatttttgttttttgtattttttttagcttactatatctatccttaacactcaacaatatctatcctatgtattaatattattcgaaaattactctaagtatttaaggattatctaaatatatataaaaaatattcttataaaagtaagttaaagaaaacataccttataccaaaaattatgtacttgacttccgataaagtcacttccgataaaatcctaacaaccaagtttaagagaaactaaaatcaaatattatcctaattctaccaaaatttcggcagcataacggctataattgaacgtttccaaaaaatttaaacctattaataacattttcctaacaccattaataaacaaaatttgagaacctttcaaatatgaactttgacattgataatcatgctactaacacgaacatgttttgagtcaaatataaagacctactaagtataataaatgcatagacacatcaattagattatacaagacaagtgcctaaagtaacaaacaaaacaaatgtcacctaatttcacgaacatgttttgagtcaaatataaagacctactaacacgaacatgttttgagtcaaatatgaatgtgttatgtcacctaatttcttacaactagcgagtaataacctagttatttatgttatgtacttttcctttaacatttatgttttttataataaaatttgatccaaattctaccgaaattttggcagcataacggctgtaattggacgttcccaaaaattttaaaagtgcctaaagtaacaaacaaaacaaatataacaatacagaacaaagaaactaacataaacaatacaaaatttatc

SEQ ID NO: 288050 - DNA, 530 bp, Cannabis indica
aggtctggacccaaatctaggtctaggtttgggtccaggtccagcttggggtcccgagtgcgggtccaagtttgggtctgggccaagatctcggtccagatccaagtctacgtctaggttcaggttttgtttttcgtcttggttttggtcctaatctaagtaccagatctagacaccgactactagtttgttccaggccccgttacccgaatcaaaatatccggatcactgtcacgggtctcggtcttttcaggttcacttcccaggtcccatttttgagtttgggtttgggatcgagacagtggtgcggttctaggtcccgaccattgtttgtgtccctagtctggttccatgtttggttctgatttaaggttcgggttcgggtcccgagtccaggttagggtggggatccgggtctggctcctaattcggttctaggtctgatttggagtccaggttatggtctggttacggttctggatctatgtccaatttcagttatgattccaagtccaagtcctagttccagt

SEQ ID NO: 288051 - DNA, 688 bp, Cannabis indica
tggggatcggtttattttcaagggcgacaagctagcccttaggactccattaatctcttccctaaaagatagtcacctaatgaaggcagggtgtctggcattcttggttagcgtagtggatcgagcaatagagacacaactaaatgtggagaatgtgcacatagtctgtgaatttccagaggtctttccagaagatctaccgggactacctccagacagagaggtggagttcatcatcgaattagccccagggactaatccaatttcaaaggctccatacagaatggcacctaatgagttaaaagagcttaaaatacaactacaggagctcttagacaaagggttcattagaccgagttactcaccttggggtgcgccggtactcttcgtcaagaagaaagatggaagtatgaggatgtgcgtggactaccgtgagctcaacaaggtgaccatcaagaataagtaccctctgccaaggattgacgatctctttgatcaattgcaaggctcgactgtgttctcaaagatagatctaagatctgggtatcaccagctgaaggtccggaaggaagacatacccaagacagcattcagaacacgatatggacactatgagtttttggtaatgtctttcggactaactaatgccccagcagccttcatggatatgatgaatagggtgttcaag

SEQ ID NO: 288052 - DNA, 629 bp, Cannabis indica
accctagaaggattccctggacaagagtcaggtgcaataaattcacagaagacgacattgcgcaccagagaaaaagaaagggtagaaaatcgaagtaatctctcctatgccctaaacgaccagtatacgaagaacgtatggtcttttgcaaaaaaaacagtaataaatgcgtgacaagagtaatcctatcaccagaaatggtgaacctagacctgttacgtgaagaatctaaaagtttgcattcccagaagcttcaaatacaaaacccagaaaaaacaagcagataagtaaaagcatgccatgcacattaacaataaagcaaggggtgcaagaaacttacagtgaagtgttaagactgggggtcctgctgtaaatcgaacgaagataaggaggactgacagtagtgaacgaagatgaactgggaaaaattgcaaagtgttcaacagtgtttttcttggtctgggaattttttctctctgggaaatttgagcaaagttggcaagaaatgggaagtaaccgaaatgaaggaaaggtggtggcttttataggcaaaatttcatgaggaacaggcactatcacctaccaatcaaacggtgggggaaacgcacgattcgaattctcaaagatca

SEQ ID NO: 288053 - DNA, 486 bp, Cannabis indica
ctcttatttaaaggacacgtgtattcagatttccaatgaaagctgaaatgtccatgagagacttctcgaagttttagacctcgcccaggataaaaccagcgagatactgcgagtgcgacctaagtcgcaccgcataaccgtaattctcattatgcagggtagatccaactcgcgtgtgtcagaacatgtgcgagtgtcccctctatatttccgcgaaaacatagagaccaactctctatgatacaatttggtcccaacgacccaatagccccgacaaaccgatataaattcgcatgtccaagttctaccagctcaaacatgcgatgtctacgaggggcgattacctaagggcgcagacgttccaaacgtactggcgaccctgcgagctcaacaaacggaacatgaacagtcaactcgcagatgcggaagacgcatacgttgatgaacttagtaactgttacacatttattgatgttaacgttgttt

SEQ ID NO: 288054 - DNA, 859 bp, Cannabis indica
attgattctggtgccaatcatatgacaggtaattcccgtctcttttccacttttcagtctcacagtcccacttctgttgtcaccttagctgatgggtcaacagcttctgttcttggatctggcactattgttcctacacctatgctatctttgtcatcagtcttacatttacctgatttgtcctttaatttgctttctgttagtcaactcactcgtaatctaaattgttgcatctcattctttcctgatcattgtttgtttcaggatcttatgacgaagaagattattggtaaaggacatgaatctggtggcttgtatgttcttgacccacttccgccaacctctattgcttgttcgagtgttgcttccgcttttgaggctcattgtcgtttaggtcatccatcccttcctttgctcaagaaactgtgtccccaatatagtagtttatcttcgttagaatgtgagtcatgtcagtttgccaaacatcatcgtgttagtttgagtccacgtgtcaataaacgtgctagtgttccttttgagttagttcattctgatgtttggggtccttctcctattttgtctcaacctggattcaggtattttgttacttttgtggatgattattctcgtgtaacttggttatatttaatgaaaaatcgttctgagttgttttctatattctgtgctttttgtgctgagattcaaactcaatttaatgtatctattcgtactttgagaagtgataatgccaaagagtacatgtctgctcaatttcaatcttatatgacctctaatggcatgcttcatgaaacttcttgtgttgatacggcacctcagaatggtgttgcagaacgtaaaa

SEQ ID NO: 288055 - DNA, 562 bp, Cannabis indica
atatggtattattgaaaagaagaataagtggctgaaataaagtgacaaaattgtaactagaattggccctttgaagtgtacggccagcaagttatttttgcccaatattttattcttttttaatccataataactcaaccctaaccatattgaagatagtataaaaggaaggctataatccttcgtccaaactaatgcctccaaagctaataacctagcttctaatgagacctcttcattgttctttcttcttcaattcgaaacacttagcctttcttcataaataatttcagccattagtgattgagtaactgcccacacacatcaagttggtcctcaatcatagtatgtaagattgtgaagaatccaatcaacaagaaggagagaaagagatctaggttcacatcttgataatgctctgctacagaaaggaatcaaagggtagagatctgaacggaaggagtcattatattccgctgcaatcaatgtaaggtttcttaaactttatttgtgtttatttacattgttttaaaaattcatattaggatgttaaataacatac

SEQ ID NO: 288056 - DNA, 353 bp, Cannabis indica
tgtcctccaccaccgccccattaaccactaagatggggaatccccaccccattaggggcgggtccccgcggttacccatccccgcggtataaatttccatctctaattggtactatactattttattaaattggtatagaatcttcacatcatttcactttaacaacgcattaaattatacaccaaattagtatacaccaaattctacaccgttagagcatctccaaagagcacaccaaatttagtgtcacactatcactaaatttgatgtcaaaaattattttcactccaatgacaacaccaaaaattatactaaaaaaatattctttaattattatattaattttttaata

SEQ ID NO: 288057 - DNA, 728 bp, Cannabis indica
ctaagtaagggtgctatgacaataattaaaggccacaaacatgaagggttatactacttagatggagaaccagtgactcactgcaacaatgcagtcactagcaatccagaagacctaaaagctgttctatggcacagaaggctggggcatatcagtgagaaaggcctacagatcatgagtgatcaaaggctactgggtaaggacagagtaagtaaagttgatttctgtgaatcttgtgttctaggtaaacatcatagactaaaatttaaaacaggtattcataaaactaagcacatattggagtatgttcactctgatctttggggaccagagaaaactccaacacatggtggaaatgtgtattttatgtctattgttgatgaccattctagaaaagtttgggtatttttacttaaacataaaaatgaggctttatctaaattcatacaatggaaaaccctaatggaaaatttaactaatcaaagggttaaaaccctaaggactgacaatggcttagagttttgcagtgatgaatttaacaggtattgtggctctgttggaattcaaaggcacagaactgtgagaattactcctcaacagaatggggtagctgagaggatgaataggaccttgatgaacaaggtcagatgcctattattgcaatctggacttactaaaggattttggggagaagctgtgttaacagcagcctacctggtgaacagaag

SEQ ID NO: 288058 - DNA, 548 bp, Cannabis indica
ttatttgaattcgttatgatttttttaaagttttgaaaaaaagataggatgatcactcacaccccacgcgcgcggaaccgagtttccctcggtcaggtgcgtgtttggacatgattttgtccgagcgacacgcccaggggtgtctcatatccctttccgcgcacggaaatcatgcaagggactccttgcgccgagttttctctgctgatctccttgtggcgcgcgcggatgagtatgcaactgcataccatccgcagctcacattttttttcgattttcttcgatttttctatgctatttcatgtaattaacttccgatttttggttgtagttttgtatttgaattttactttttcatatttcaaatctaattatcagaaataaattaattagaatttttaaaattaatttaagatattagtgtaatttgaacttgaaaataggtaaaaatctaccttttcacttaatttttatcttattttaaatttgattattttatcttatttttaattttaaggccagtatattattttttttaaattattcta

SEQ ID NO: 288059 - DNA, 652 bp, Cannabis indica
actgaagtttctagctgagtaggcataatttattttttaattaaatgattttttcagttaaaaataaagtaacactagtagtgcgtaaatcttcatctgtgtgttagataatagatgtcacacctggaaaatggatatttttttaaaacaactcacactttagtatcacacccactctcttgaaaaatgtctgcatagggaaagataagttgaggcaaatagaagaattatttaggagatagagttgtgaaatttatgcttcatttacacaatatttttactaaaaataaaaattcaaaatttattcgtatgagttagagatatataaaaatttagacaattaatttctttttgtatatattgtcatattttaacaagcatcaaagatttttttgagacttagcaaaaataataacaatttatgtaggagataaaaataaattgagatctttacttagctaaaaaaaaataataaacataaaaataatttaaattaacttttttgaaaaataatgataattcaaattaaaaattaataaaattttaggggtccttttcatttttacactttaaaacatagcttctttttcttttttttttttttttttatttttttacggtaattctacatagaacccctattgcaactagc

SEQ ID NO: 288060 - DNA, 704 bp, Cannabis indica
taaatgacaaacacatggaatattttgcttccataacgatatttgttataattaaaacatcattattataaatataaattttttgaataaaataaatttaaagtatattgaacagtggtatactggaatatcagacttgtttttgatagtataaattatttttgatcaaaagtgatatcactaaaatatctcataaatatagctttttgagaagaaaagtaattaataaactaaactttgaaaatactaaagtgttagcctatccatacaacataaaaacaaaaaaaaagtgatatcatatggctttattcttattgaactacagttgttttgttgcagcttaagagattgggttggcacgagtgttaggatcttcctttgattctatgattatcatgaacacatatcctagtatcccacagaagaatgtattgaaagggcacccaagatgaacaagccaataaactcataatgcttcctactatactgaggatcttgtatatacccgaaactgggaattctgtcacccatggaatcttcttcccaaatcttactccatagtaagtcccagattcaccaagtaattgatacacccctgaaaaaaatatataacacatgattgttgtttaaatcccaaaattgactcttggtgttaaacccccaatatatatcccaaaaatacaagtctttaataaatagagagg

SEQ ID NO: 288061 - DNA, 534 bp, Cannabis indica
taggaccgggacctagtacccgacccagacccgaacttgaacctaggacccagctcgtgactcgacactagaaatagaaccagactgggacccgagattgggatccgaatcttgacccatggcttggaccaaacccgtaatcggtacacagcctgtgacacgaaccttcacaaggacctggaactgaacccagtcccaaacctaaaagtttacctgaacccgtaccttgtgacccaaaatttgaaccaaaacgggaagttgttcgggactggaactaggatttggtcttggaatcataactgaaatttgacctagatccagaaccgtaaccggacaaggacccggactccaaataagacctagacccaaattgggagccgggcccagatcctaacccaaacctggacttgggacccgaaccagaaccttaactcagacccaaacatggaacaagactagggacacacaaccagggtcgggacctagaaccgcaccccagtctcgatccgaaacccaaactcaaaactgggacct

SEQ ID NO: 288062 - DNA, 905 bp, Cannabis indica
atgacaattaaataagttgttagctgttttttagagtgaaacctattctttgagtttatctctttctctgttcttactctctcttagtttgaagttgttattattgggatttatctttgtttgagactcgtaactaaataattgttatatgcttagagattaaatctagggatttcataatagtttttaggggaaatatatatgtttttaattacctattcctcattttgatttaccattagcattattggattatagactagtattattgtcacataacttggattgatctattgtccatattttcttaccccaattaaatatccgtactactaatatattaataaatttgtttattaaaaaaaattttaacaatagattattatcatgtttgttttttgtgagatggaaatggaatgagaaatataggttcctaaaatcaagaaaccaagaaaaatgataaaagagttatggttggatcagtatattggttcaatgggcctgagaatagggcccaataggagtcctctaaattttttgaatttttacactttttacttttttactatgaggtaggatttttttaaaaataagttttttttttttttgcaaaagtactatatactgtgttaagttttcactgttcttccatgattattttttagttgttcaactgttgttttaattgttctgttttatggttattttataaaaagacagtatttttgtaaaaaaattcgtatgacaataaaattagggaaacttacaaaaatactgcaatttgggttaacttttacaaaaatactgtcacacggaatttttttcaaaaatactgtgtttttataaaacaccagtaaaacacaaagtagtataactcaaaacaacagtagaacactagtaaaaca

SEQ ID NO: 288063 - DNA, 822 bp, Cannabis indica
cccctttagtgttatttatgtgattttagtgtggaggggaaaattggtcattttgccccattattattttgtcctttagtggacttaataattgagaaatatgtgttttattttattatgtgttggctgaaatgtaagggaaataaatattaattcttttgtttattcaaaattccaaagttagaaaaatcaaagctttttctctcaaaattctctctctattttcggcccttggagcagctgggttttgctcctctttctttgtggattcaagatttatgtgtgtttaatccaagctaggttagctcctcatcttttcttcttaaagtttgttgaattttgatgaaaatggtgtaatgcatgcttgataaattgatgttgttgctgctgtgattttgttgttattttctgagatttaaacatgtttatttgaggttaattaagctacttgtggtgcttgatagttaggttgtttaaagttatgaattttctatgcaaaagctatggtttttcaaagtgaaattgagattttggtggctgtgattattgcatgagcttgtatttgttttctgcagctttagtatgcatgtttaggtagttttaatcttggtttgatgcttgtaggtgagctttagccaagtttgagtttgaaactcaaagcttggagctcacatggcactttttgattctgtgaattctgggtggttttgttgctttagaaatgttctataggatgtttagaacaggtctggaagttatgggattgtttggatttgatttgcttgagttatgaatttttgaagttctgcctgcgaggaaccg

SEQ ID NO: 288064 - DNA, 842 bp, Cannabis indica
ctaagatcaaccattgatattgacttaagaaagatataatggtaagtttatgatatcttaactaagatcaatattggtcccttccaatgtatactccatacatccgatactagtaaactttgctaatgccctggaaaggacataacacttatccaaggtataagtataccttattgccgattatcatgttagtttaaatccattgaactgacaaatcatgagaattaaaattttgaacatataattattatattccactgtgctgatgacactataatcatgaacagatatatacatatttttatatgtttaggacttaatagaatttatacattaaacataatcatgaaataaatcatgtgaaccatgcaacataaaaacgacttgttatctttattaattagtaaatttgattatattaaaatgggttttatttagggcataaagcccaacaaactcccacttgcactaatataaaacaaaaagtgtatttcaaataatctaaacaccttgatatccagatcaagtgtagtatgtagtattctctttgtaatgggatctgacgtacaggttgtattcaatacaaactttcctccaccattatattttcttaatcacaaaatccttgaaattgttaaatttctctctatatgtcaacttctctagggatactggattctttacttttggcaactacttctatgttagtcaggaagtaaaactagtagttaataaattattggtactatgccaaaaactgtatagaactttccatagactgaataagtatctttcctacaactttaacattctgtctcactggtagagttagagattccaga

SEQ ID NO: 288065 - DNA, 754 bp, Cannabis indica
attaccaagtggctctcataaaattaattagctttggttgtgtcatttcattaatttaaatatattatctttttgataggtaattttgaaagcttcaaatagttttcttttaactcttatctttttacattagatcatttacatcttattttttattatcttttacactaattttatactattcacactttatttatatttttcatatctaactcaatacttcaaatatcacactaaaaaaattattgtaacgttcaatatatatatacccatagtattcttctttattttattattaaattcaaaggcacttatagtcttacaaaccagtattaattaatattatatttttaattattaaataataaaataacaaataaatattatttaagtaattaatattatattttttaattaaataataaaataacaaaatatattattttaaaacacatgattaaaaaaaaatattatttgaatttaaatttattacgtctaaaattcaattaatttaatttatcacatacaaattatataacatttttagaataatatttaatgaaatacatatttattaaaagttataatttattttttaaaaaaattatgataaataatgtctttttttttttacgtgtacgtataacatagttacagattaaaaaaatgagagtgcaacatatttgtttaccgaaagaagaagaatacaattaatacgtatttaaactaatttctcaaaaaaaaaaaaaaaaac

SEQ ID NO: 288066 - DNA, 498 bp, Cannabis indica
gtgcagcggaataataagtctccttctgctcagatctctaatccttgtatcctgtctgtcgtaaagtatcaccaagatctgagcccgaatgtccttctcttcagtttgaattcttcataatcttccagactatgattgagataccacttgatgtgtgtgggcactcactctatcactcaaggttttgaaaaattgaagaagaaaagagggagagagaggttcggctatagacaataggataggaggctcaatttttctgaaggcaaaaatctatctgatttccaatctctttaagtgtgagccatcactatctatttgtaggtaaccactaggtttaggttaggaattactaggcattaaaataatgaaaatattaattggaaaaagcctcataagtggccggccatagactaatgggccccacttggtatttttctaattttgacaattcaaaaacgccaattttccaattctaacaatttgaatgccaaaactaat

SEQ ID NO: 288067 - DNA, 425 bp, Cannabis indica
ataattttccataattaaacataattaatttctaatttccaaattaaactaagcggtctttacaaacctgacggctctgataccaaaattgtaacaccctaatgctaaggcacactatagtgctttttcaattacagtgctatctttgctcatcaaagattcttctcaaaaaacatgtcaaattgaaacttttataataaatattaaactttataatttacataatgatttacaaacaccgagatctcgtttctaaacttttatacaaaatatgcaaaaatacaatatccaggtcgcacagcgactacaaaatataaccccagatttcccgagagcgaacactccaggtcacgctgccacgacatgtacaacctcatctcagccaggctcattcgtgttcagccttcgcctttcctttacctaca

SEQ ID NO: 288068 - DNA, 177 bp, Cannabis indica
attgatgtttgtgaattttcttgaaaaataattgaatatgtgtttctggaattatttttaaaaatcggggttgagcagcagggctcctgcgcgcgcggaaatcatgcagatttcccctagcgccgagaaaccacgcccaaacaacccttgtgcgcgcgcggacgagtatgcacaaca

SEQ ID NO: 288069 - DNA, 535 bp, Cannabis indica
cccatttgcaccgatgggtctacaacctttgggtagttcaactaactcccaaacttactaggcacttgattcaagatataagcagcagcccttaatgcctcaccccataaaaactctggtaagctagaataaattaacatacaacgtaccatatcaagaagtgtgtgatttcttctttcagcaattccattctactggggtgtacctggcattatatatatcttgcatcaatgccacgtttctgcaagtatctggcaaacgacccggggttccttccagtttcatcataatgcccataatactctccacctctatcagaattgacaactttaatcttctttcccttttgaagctcaacattcgtcttgaaaatcttaaagccatctaaagattcagacttctcactaatgagctcaatatcaccatatagggaaaaatcatcaatgaaggtaatgaagtatttatagccgcccatagcaggtggaacaaaggacccacaaatgtcattgtgaataacttccaatacatctgtgca

SEQ ID NO: 288070 - DNA, 747 bp, Cannabis indica
aaatattaacaaacatattagaccgatagttcgtaaaattaaaatagatattctaaaagaagtttgtagtagcatcgtcctcatcactacctaaatataaattagtgttcataaaatattaacaaacatattagaccgatagttcgtaaaattaaaatagatattctaaaagaagtttgtagtagcatcgtcctcatcactagcatctcgaggaacatccgacccaggaacatccggcatctgtgggtagtatggcggcatttgcgagctggtcatcatctgagatgtctgctgcccatgtagtgtcggcatcatttgagatgtctgctgcccttgttgtgtcggcatcatctgagaagtctgttgtcctagatgtgtcggcatcatttgagatgtctgctcccatggttgtgtcggcatcgtctgcgatgtgttctgatattgctgcccttgtgtcgacatctgaacattttgcggcatctgtgacatttgtggcatccgaggctctgacacatgagacgtctgaggcgactgcgtcatcatattcaacaatacttgcgaattgtttggcgactgaaacacaaactgcaagtatgactggtacatttgactgtgaaattgctcaggacttaacattccaggcgaaggaacaagaggctgttgtagcagttgctgaaacgaagtaggagtctgatgcggctattgaaaacccattgggttaaaacccatttgagagcgagacggttg

SEQ ID NO: 288071 - DNA, 684 bp, Cannabis indica
acaggagcggtaatcaagcgttgctttaactctaggaaacttttctcacaccgatcattccaaacaaacttctgattcttttaggtcagctccgttaagggtacagcaatctttgaaaaaccctcaacgaaccgacgataataaccagccaaacccagaaaacttctgacctctgtagctgacttcggtactggccaatcccgtacagcttcaattttggccggatccaccatgatcccatctttatccactatgtgccccaaaaatgagacacgagataaccagaattcacactttttgaacttagcataaagcttgtgatcccgtaacctttgcaaaaccgctctgagatgcaactcatgctcttcttctgtctcagagtacaccaaaatgtcatcgataaacacaatcacaaacctatccaggtaatccttaaacacccggttcatcaaatccatgaatgctgccggggcattagtgagtccaaaagacatcacaagaaattcatagtgtccataccgagtacgaaacgcagttttcgggatatcttcctctcgaattctcagctgatgatagcctgagcgaagatcaatcttggaaaagaccgtcttccccttcagttgatcaaacagatcatcaattcgaggtaaaggatactgttcttaatggtaagcttgttcaact

SEQ ID NO: 288072 - DNA, 612 bp, Cannabis indica
gtctactgatgagatggtgattcttctgggggtggagcagtgattttggagaagtgtaaaaactgatctgaagtctctaactctaccaataagactgaatgttaaagttgcaggaaagatacttattcagtctatgaaaagttccatacaatttttggcattgtaccaaaaatttattaactactagtgttacttcctgactaacacagaagtagtttccaaaaagtaaagaatctggtatctagggctgaacatcgggcgggtttaccgggtttcgggttggcgggtttcgagttcatgggtttcgggttaaaaaaattgaaaccgaacccgaacccgaatagggcacgggttggcgggttggcgggtcacgggttggcgggtttcggttggtcgggtttagcgggttggcgggttgacccggtcaactcagtcaactcggtcaactctttaaaaaaattaattttttattcaaataattatttttttttatttttttatttattaaattaagcatatataatataacaatttgttcatagtatctactattgaagaaaaaaagcattaatcaatccaaccaacaaacaaacaacctatttatcaaagatt

SEQ ID NO: 288073 - DNA, 545 bp, Cannabis indica
gaacctggtgagtctttacaagactattttaaacggtttaatgtagaggtaacaaaagtcgagaaggctcccgagtcttcgcttgtttgtatgctgataacaggtattttgccgaggaccgacttctggaaggagttacaagctcgaaggccagaatcctcagttgaattcttcgccatggccgaaccccacaagagaatcgagaattctctggcagaattagagaagggcaaagacaagcacaaatcaccaataccgcgttcacgatctcgcagtccccgagggaagaactctagaagctgaagcccgcggagacgtagcccgcggagacagcgaagtccgaagttggccaagtctcctccaaagaaggaatcctcgccgaagaggaaaggtggacctcgtttcgtcaattataccgaactcgcgataccccgagaccatatctatgcaatcgaagaaagaaacagagtcttcaagaaactgccccccatcaggggaaatcgcgacagaagagaccccaaaaaattctgtaagtaccacaaaga

SEQ ID NO: 288074 - DNA, 515 bp, Cannabis indica
gtcaacaactccttgtatactatattatttgatttgggagctacacgttcgtatgtggctacgagaataattgatattttaggtaggcgttgtgatgttttagaaagagggtttggaaccctaatgcctagcggggagttggttatctctaataggcgcattaggtctatgccggttaggatcgaggatagggagttgagtactgaacttatagaactggaattaactaagtttgacatcatacttgggatggattttctttccaagtattcagccagtatagattgtaagcggaaaattcggacttttcagccagaagatgaagatccatttgtctatgtttgatcagttcaggggtctcagatcccggttatttctgtactgagggctagagatctactacacagtggatgtgtaggatttttagcagtggtgattgactccagcagacccgaaacatttgggcctgaggtagtcagagtggtaaaagactttctcgatgtgtttctcgagga

SEQ ID NO: 288075 - DNA, 570 bp, Cannabis indica
gaggcatcgcagtatatcacaaaattttcatcactgaatggcaggcttagaactggtgtagtaatcaatctcttctttaattcttgaaagctattctcgcatttatcagtctacataaacttatctctttcaggtcagtttggtcaaaggagtagcgatcttggcaaaaccttctacaaatcttctatagtacccgaccaatcctaagaaacttctaacttcaattgttgtcttaggtcgtggccaatctcgaatagcttcaatcttcactagatctaccagaattccatccttacttaccacgtgtcctaagaaactcacttgggacaaccaaaactcacacttcttaaactttgcataaagcttgtgttctcggagacgctgtaataccatacgaaggtgttgttcatgagcttcttccgattcagaatagactagaatgtcatcaataaacacaatcacaaaattaacgtggaagtccttaaatacccgattcattaagtccataaatgttgctggtgcattagtcaagccgaatgacatcactaaaaactcgtagtgcccatatcg

SEQ ID NO: 288076 - DNA, 536 bp, Cannabis indica
attgtgaatgtcaatatgtgcgtagtacagtaattaatctagtgtgaaatactaggatttaaagataaatatcggtaattttcacaatataatccaaaaagtgtcatagtaacttagtcaatattgttgtgtttcactatattgcattttaaaaatacttcaacttttttttcaaagttttaaattacatgatttacttacctatgagtttaatgtttaatagattggtaccattttcaaacgttgatgttcaatacactgcatttttgaaaaacagtaacctttctttattttgatagcttttaattgcattatttagaaatggtgaaattgtgtgaacgccagagttattatgtctcattattgtactgtactttaactatgagtttaatgtttaatagattggtaccattgtttataatttttaatatgttggaggtatccatataattgttgtaaaccttgatgttcaatacactgcatttttgaaaaacagtaaccttttttttttgatagcctttaattacattatttac

SEQ ID NO: 288077 - DNA, 713 bp, Cannabis indica
tattcatattacgacatatcgtttatcgcttattaaagactcatttcgttggctaaaaccgaagtcaacattttggtgctttcattgagagaagaatcacagatcgctctttcaacacgatggtgcaaactcgtagaggcctatcagacccagcaaactcacagacgttagatccgatgttgcaggacccagggagttcgacggttccacctgctgtcaatcttagaaagacgggaagcgtggtgaatgatggaacaactcatgttactgaaactgcgcctggtgtgcaagagactggaaataacggttccgcacacagccaggatgttcataacatgactgttccaccaggcatcagcgcccagacaaccatcggagatgcaaccgaattgcaaaatctccgtgctgcgcttggactcatgcagggccacaacgataccttgcatcacgatcaggaggagttacatgccgcagtaaacctcgcatttgacgaacaggggcgtatgttcgccgagtggagagataaagagatggaagcattaatggctcaccatgcagaaatcgaagatcgtagtcggcaagctactgtgctgatacggagagcctatcagactgtaggccagcaggcgccgagcctcattccccttggagaagccgaggatgacccaacggtgaatgcctcccagacaaacaacggtcagccgtccaatccc

SEQ ID NO: 288078 - DNA, 531 bp, Cannabis indica
tttctttcggctgggacaaccaagagcaagaaaccagatttttccttccatttctttggatttaagcaaggattcaaagctattgcaagtgaggtaaagccctagaccattggttatttattttcaagcttttaagttaggttgaaatggtgtttttgagtaataggggctgttaggttttcatatgcctagggttcgaattttaaggtcttgttgagttgattttaagtcctagctgctggttttgatgattggtttaagttttgtgcaactttgaacattgagttcaaagctttgagctttaatggcaaattgattttgattggtttattctgtgaaatactggctgggttttattgtttatgcattgaataggagctctggaaggtttcatggcaattggtgaagaattgagaaacaaatgaaaagctttggggaaactggtgcaaaccggctagccggtttgcagtgccacaaaaactggctagccggttttggcagggttccccgggcctttcattttctcaattt

SEQ ID NO: 288079 - DNA, 614 bp, Cannabis indica
gataactaatcaaattgtaaagagttttatttagggcataaaacctaacaatatcattctcagtttgagactttatcgtcttggttgtacattagacttggttatgtctaccttcgatatttgtagttctatggagcttgaacatgagtatggatgggtactaggtacacgtgatgaacattgaagccttgggtgcatgatccaagactcgtgtcaaaattgggcacgaccaatagcgggtgaaggcggggctcaacactcaccatgtaagggagtatgcagaatgaccgcatattttggtttaggatcttgggttgtatgctatttagggggcgtttggtatgaggtgttcaaaataatttgattataaagaatattatgaaggagaatatgattatagggaaatgtgtaaactgtgtttggttgtgtagggtaatatgtaatcataatcctgttaattaaattaaactgtttggttgagtacatgaatcttatatattaattaaaaaaaattaaataaatttatttattaattagtatatattaaattggggaattacctcatatactggttttttaactttttttttttcaaatttacggtttgggtttct

SEQ ID NO: 288080 - DNA, 598 bp, Cannabis indica
gggaggtatagagatctcttgaacagtcacttcgcatttaatgccgcatgggagaaaacgtattgaaacctccataaatgacatgacagatggcgaaaccccccttttacgactattacaccataatcgatgagtctagtgacggctactatcagtcaagaggggataaaagattatatacacctaactcctaagatacctacggtataggtcatgtatttcctattttgtatctgctaggaatatgtgcccctatgaagctaacacagaaagacaagtgatctattcctagggatcaccccagataaacattataaataccccacaaacagactgaaaaggggtcgaacaatctggttttaaggaataaaagagagaaaataggagagaaatccaccaagaacattctaatactctcatttatacaaaagactcgtggactaaggctcattaatgccccaaccacgtaaaaatcttttgcattaaactttctacagctcttcttatacattatctaattggttgccgaaaacctcggtcaacaaaaatactgtgtttttataaaataacagtggaacacaaagcaaaacaactaaaa

SEQ ID NO: 288081 - DNA, 510 bp, Cannabis indica
aattaactaagtctgtaagcagtattatcttaactagtgtggggactatgagcctatataatcaagcttccaataagcagatctagaatttacttagtaaattctctaacttattaatttctcctttcgccactatagattcggaattacactcttaattatatagaacgcttgtaccaagatataaatatattatgaattatctattgttacaatccaaatagtcaaagatcctctatagatgatctacatcgaatagggacaaatttaccgttcttcccttcaatgtattttatccttagaatacttagctatctatatatgatattttagttaactaatataattactgaaatgaggtctcaataatttatctctattaaggcaagctcaaagaaaatcatcgtttcacttttaaatacttatagaagctatagattctatatctatgattagcactctggcccactcaattagaactaccatgtctttaatctgtatgtcacgaga

SEQ ID NO: 288082 - DNA, 737 bp, Cannabis indica
ttactagcatttgcgtcaaccgacagtggtaccaaaatgaaccgttcatacttgcatctcaagcaaaattgatctattacattcctgatttgaagaacggtaaagactggctgattgtaaatgagtacataccgcgaaatgtttgggacttcccggacactgatggggagacaccctttgtacaggaaaacaattcagctgaaaccgagttcgttgttcaacttccacagttggatgatgttgactatgttcgccatgatgtcgacccaactgaagttgcaaacatccatcgtgtgaattcacagcctcaacaattagatgatttcattgtcgatgatgacaacgagggtctaaataccgaagaagacaactccttagaattagagagtgacagtgatgataatgctgtatatgtaactgatgatgaggatgatgaattgtaattgaaatagtgttttaaataaaataaaaattacaacccttcttctttaatatgttttgcaatatgttagtttattttaaataaacaatatgtgttgtatatgtagtatgtctacaccaggtggcagcagttcgaaaaagaaaggggtcagaggtaaatacaagggcaagaatgttgaggaggagctctccaaaacacaatctgccaagttacagattgaggtgcacgcagagactggcacccccgtcggcaaaaacggaaaaaaattcaacaatatggcgaaatggatgactcg

SEQ ID NO: 288083 - DNA, 626 bp, Cannabis indica
ataatatataacatgtatatatgagtaatatatattatatatatgtagagcatgtgatataatatatattagtgagattaaatatgtagaaataattatttctatgtatttatttgagacatgcatatataatatatgttatatatgtgtatataatatatatcatgtatattaatatgtatatatatgttatatatgtgtgaggtatgtaacatatatagttgtgtaattaatatatatatgtattatgtgtatatgatatatatgtatattaaagtatatatgttatatatatatgagatatataacatatatatttatataattaatattgtgtatgttacatacatattatattaataggcatagaattattatttgagagttataattcatgcatgggagttatatattaattttgtacattaatataaaaattatataatgtatatgataataatattgatagtgtttattactattgatgtggagattattatcatatatattgtgaatataaagagaattcgaaattctttttcaaaagtgatttttatttaaaaaaaaaaaaactgtaaacttgtgagaagttacattctttgagaataaaaagtgataattatctc

SEQ ID NO: 288084 - DNA, 743 bp, Cannabis indica
agttccgcgagcacggtctaactcaagatcattgttacgctgtccgaccatgccatgaaacatattcttcaactcgtgaagctgggcttgtacggctgggctgacttgctcgacattctggtcaacttggattatgtcagcgtctttctgagcagggatttgagtatgggctccgggctgcacgatcgttgcagtattctgctcgtctgttccccttcttctgtttagatcgttccttaggtcatgggtcgttcccagcctatcaaacacagaagagcctggttgccttagcgattgattcgcttggttgacaggcggaataactccattattctggttggatccgtcaggtttggctcctcctgatgaattctcggacaaggtctaccagcctacctcttggcccacgagtggaactcgtaaccggggattggacgactgaccattgattgtccgggaggtattcatcgtcgggtcatgctccgtttctcccaggggaatgacgttcggcgtttgctgacctacaatctggtaggctcttcgtatcagcacggtagcttatcgactacgatcttcgatttctgtatggtgagcccttaatgcctccatctctttgtctctccatttagtgaacattcgcctctgttcgtcaaacgtgagatttactgcggcgctcagttcatcctgatcatgatgcagagtgttgctatgactctgcatgagtccgagcgcggcacggagat

SEQ ID NO: 288085 - DNA, 746 bp, Cannabis indica
ctagggctctgccctagatcagatcacagaacagtatataaaaggaggtgcttttctcagatacaacaagcaataatatacagagcaaaataagagatacaaaaaaagtaaatagtcacagccagagagaacaatagattcaacaacagagaaaatagagccttttggcttagagttgtcatctccatgtgagctcctcctagagtgttcatgtaaaagaaaagagagttttgttagtatcaaaagtgagaaaaacagagagaaatataaagttgtaaatcaaagattgtaacctattatttgagatgaatggattcaagctttgagggcttgacggagaagtagccggttgttttgggcgaactccgagatcaaagttttggtgtcatcttcttaatcactgtttgcattctctcatctcactcttattacttttctggtatttgtatttgtgtatgtgttcatgttcttgagttttcgggtttgatatgttttggccgaaagttaaaggggatttttgggggttcggttttgagtgagtaaagcctttagtgagtgagttttttgggttgttcttgtctcgggttgtagctgcaaagaaaggaaagaaaatattagaataacccataaaactcttgctgccattaaaatagaaaagaagaagctttaagaaatcaaaaccatagaaaaccttaccatttcgtttctgccatttgaagagaaaaataagagagcttgttagaacc

SEQ ID NO: 288086 - DNA, 508 bp, Cannabis indica
ataagtcaaatttatgtggtctattttggaataaagtttatgacttaagggcatgattgttatgattttaatatgtggataccataaggacaatttctatattgatgaggggccaaatagaaatagtcaataaatattaccaacaggtttgtctgttggtaatataacgggtaatggtccccatttgcatcgtatcttttcactcttgtatccccatcaccaagagaaaaactacagagaaaggttttgatgtaaattggaagatcataccaattaaaggtcattacaaaatcgattctatggactccggtacgcttccgctattccttaatcttattgtttaattctcatgaattaattagggctatatacagatttacagtattctaacatgtggtatcagagcatccctaaattagttcttagaatttatagtagtgttgatcttccattaaattatttttcctgcatttggtgactgtggtattatatatatatatgcttatac

SEQ ID NO: 288087 - DNA, 588 bp, Cannabis indica
acttcttgagtaggcatacctcatctgggttcccattgtcaaagccctcaggctattgcatataaatttcctcttctaactccccatgtaagaaagttgttcttacatccatttattcaatctctaggtccatgcttgctgccttttccatcatggctctaattgaagcttgtttaaccactggagagaaaatctcattgtaatcgatgccttctttatgagtgaaccccttggtaactaaccttgccttaaatctggtaggctcattccctgaaccttcttaatgcttgaaaagccatttacatcctactagtttgtagaactttggtttcttcacaacaatccaagttttattcttcctaagagactacatctcttcttgaatggcctgcaaccatgttgcaacatctttacttctcatagcttcttgaaagctagtgggttctaaactatcaacctcttttgtaatcataagtgcatacgaaatgaattcagcataaccaaaatgatcaggggcttttctctgtcttctctctctatctctagctaattgatagtggcttgttcttgctaatttgcattgtcttc

SEQ ID NO: 288088 - DNA, 793 bp, Cannabis indica
ttcatagcatttaaatagaaaaataaaaataatttgatgtgagaaatcaagaataacatttatgaccactaatcaagaatttatgttttagggcttcctcaatcaaaaagaaactattccataatcacaactataatcataattgaaaattaaagagaatagggagaaaaaaagaactagaatgatgaataattggtgatgtaatctccatcttctccacttttcctacaaacacatttgaaaagtctctaaagacgaaccctaaaatttttatttacatatccgtgaaaattcctttgatcaaaattaaaaactaaattcaaaattcaaaaattgcgctcttgccactacaagagtgcctggagcaaaaacccgaaaacggattgtagcttcgctacaaggaacaaatatcttgctgcagccatggctcactcgccacgacgaagggaaaggctggtcgcggtgagaccgtgctacaaagaaaatttgatgccctgatggttcctgggcaatttctgtcgcgtgctcagatcggtactttggccataactctttcaatacagcacaaaattagatgattcaagatgttacaaaaagttgagaatgagaactcaaattttcatgtcgatctccaagtccaattctgcttttaaacttatcaaaaatcataaattatattttagttttgttcaaactaagctctctgatttttcactatttttccaccaaagttatgttaaaactcattcaaatgactctaaaatgcatgattagtcttcaaaaatagtctaac

SEQ ID NO: 288089 - DNA, 788 bp, Cannabis indica
cgtagacctacgtgttgctctcacacgtctatatacaataaggcctcagtagggtttacctcggttttggttaccgagcctaacctagttatgccttgctcgcataaccctattcatgtatatacgtaatccatgtattacgctttcggtggtttatcctggtgatatataccaggtctaacccagttatgtcttatacacataactcttacatacatgcgtgtattcaatatttactacatcatatataatcttagggtaacttgcatactatgtaatcactcatataatacatttctatatactcagataacatttactaagagtgtcaaccccaactcatgctttcactggattcataatattctagggtaataaccctagaccgcattaaaattaaactcaaggtgctagcttaccgagtctagtttaattatgccttaagcgcataattcataatctcaatatatacatatatccaacattgcatagtatttacacaacatatatcactatggtaataaccctaggctattaaaccactcatattagggtaataaccctaatcccggttacaattactcacatatatcatattcaacataagcgccactgcgcatactctacgtgcaaactactgtcttacctgttgtcccgaaataacagagattccaaatccctgggtgctcctaatcaggtgccggtaatcctagtcacacaatccaagatttcacaaatagggttaatccctaatttcactttcacaaattataaacatggcattcaaa

SEQ ID NO: 288090 - DNA, 729 bp, Cannabis indica
cgaccgacccttgacgcgactagcaaggagacagctgaaatcctcgggagccttccagtacaagatcgcgactggcgattactgtgtacaactgcgaagttgcgagaacatcagctgattcctgagaacgcaagtcttcaaagggagccagtatacaaagaaccatccgagaagcagcaagagcgaatagacaagcgtctttctaagcaaactcctcgacaaatttcaggtaattcatctcttgttataaactgacaggtagggtttgacttatacttatctttcatttatgttcgcagatatgacttttctgaagtctgcccccgtcctgaagatcaaaccgaagggtggaacaacgacgacttcgccggttgtcgcccaaaagaggaagagcgatgcgatggctacacttgtcgcagactcttccaagaagctggccaagaccacacaggacaaggggaagaaagtcgtaattgatccacctgttcgagctcgcgacttcctagccatgcaagagaagttcctggctgagattccttatgaggatcttgttacgcgatctgccgaactggccgcgcagtcgatgactctgttcataaaagctgctgctactccttcgaaggaagccgactcgctgaagaggcaaaatgctcattttcaggagaacataaaaaagctgaagcaagaagtggcgaggatggagaaagagctcgaggaactcagcaaggc

SEQ ID NO: 288091 - DNA, 788 bp, Cannabis indica
tcatccgcgactgactttgctgatgacctcgttctcgacttcttcagcttgtgcgccctcgacctcatcaagaaggttccctcccccaccttgagtctgagtaggcgacatggcacgaaaagcctcagccatctcagcggcttctgttccgagaagagaaaagtcgaaatctgggactttggaaagagtggtatagatataatcagacactgcctgatcatactgcttcttcccattctctttctcagtctccaaatcgcgggccatctccacgatcgtcgcctgcgatttcttgacctcaagctccgcctgttccttcgccttgctgagttcttcgagctccttctccttggccttgctgagttcctcgagctccttctccatcctcgccacttcttgcttcagcttttttatgttctcctgaaactgagcattttgcctcttcagcgagtcggcttccttcgaaggagtagcagcagcttttatgaacagagtcatcgactgcgcggccagctcggcagatcgcgtaacaagatcctcataaggaatctcagccaggaacttctcttgcatggctaggaagtcgcgagctcgaacaggtggatcaattacgactttcttccccttgtcctgtgtggtcttggccagcttcttggaagagtctgcgacaagtgtagccatcgcatcgctcttcctcttttgggcgacaaccggcgaagtcgtcgttgttccacccttcggtttgatcttcaggacaggggcagacttcagaaaagtcatatctgcga

SEQ ID NO: 288092 - DNA, 849 bp, Cannabis indica
ttgaactaaaagaacaaaaaagagggagaccgagaaaaataaacaaaggcaaaaaaataacaaatacaatactatattttgtttaatgaaaaaagtaatactgtaaatgtaagaaattttcttacctagtactggaatctgcaaagcataacaaaatctttgattttttcagtacagggaggcatagactgagaggtcttcttcagtagaaccaagatggtggtagatgagtagatgaatcaaaccaaagttcgacgctgagaagccaaatcacctcagtccacctgccccaaatcaccggagcatggccatctagcctgagcaggaggccacgggaaggaaacaatgtggtgctgcgctgagaagaggaaagattgcagcttgttctgggcagaaagttgtcgactgagaggagagattggggctagcttcgattgagagaaagagggaaagggtgttgttggtcgtcggagaagaggagcagtagctccgattgatagaaagaagggagaggcagaggcttcgatttagagaaagagagagagacttcgactgagagagagagtgaggcggcacaatagtagggttttcttttattcaagagagagagaggcagtattcctattttattttttattttactgttttttttttaagaaataaacttttttttattatttataaattattttttatttatttattgataatagttgtattttttttttaaaaaaaaataattatactttttattataaaaaataaagattatgatatagtgacacgttaagtgagtcgggacatatatacccagtcacgcttggcgtgtcactatagaccaatattttt

SEQ ID NO: 288093 - DNA, 837 bp, Cannabis indica
gcgctcgccccacggatacttaaagaagaattcgagatcgttaacaaacttcaacatctcaggccaaacttggacattgccctcctttgatactaatacaccttcaatgaaagcgatcagtccaagcttgtaggcatcatctttatcttcgcacctctcaagttggagcataagggagtccaactgaacagaactcttcccttcaaaataagtccgaactagatggtcgttggacttggcgtgtatttcctcgtctgtaggggcactacccataggtaagccagtaatgagtccaaactctatccgtccgaatctcatgtcatttctccctacatgaaaccaaacctcatcctccttttctgtgtccactttcatttttcgtaagaggaggctgtggaccaacgcgccggagaaagtcaactctccagcttcccaaaagtgtccgaaaggactagcctttactgtgtcaaccaaatccatctcagtaaacttggccttgatatatctgaacctatctgtaccccgataggtaagacgtcccgtgaaatgcgaggaaattggaagtttaagttcaggagccatctgcaaaattgtcaacaaatttgttagaagtatgtcgtgaaacatgtcgcagtatgtcgctatacatcgtgaaacataatcctaagttattgttgatcatatcgccaaatatgtcgctaatatatcgctaattcatcgctaaacacaaaaaggaggatgaaaaaactagtcctatgtacaactgttatatatcgctaatcatgtcgcatatatgatcgcaaacatgtcgccaaacacacatacaagtcgataaaa

SEQ ID NO: 288094 - DNA, 495 bp, Cannabis indica
gattaccagcacctggtcaggagaactcggggatttggaatctctgcctttgcaggacaacaggtaagatagtagttagcacatagagtatgcacagtggcacttatattgaaattgatatatgtgagtaattgtaaccgggattagggttattaccctaatatgagcggttaatagcctagggttattaccctagtgatataagttgaatagatgctatgccatgctaagtgtatgattatattgagatttaaggattatgccatcaaggcataattaggttggactcggtaatcaaaaccgaaaagaaccattctaaggccttattgtaaatagacgtgtgagagcaacacgtaggtttacaccacgtaaacataaataggcatgtgagcgcaacatgcaggtctgtgtcacacagacagatctgaatggcattgttgtttgtattatatgatgagcatattgttgatatgttttatactgtcttgctgggct

SEQ ID NO: 288095 - DNA, 681 bp, Cannabis indica
ctttactttagtttaagttttatgatacatcattggtatgtttaaattttatgtgacattttattcatccttaggtattctaaaatattattcaatataatttgtgagacttacgcgtcaaacgcctcaagacttacgaaattaataactagtaactaagtatattatactaaattactaactagtaactagtcctaattctaccgaaatttcagcagcataacgactataattgaacgtttcccaaaaatttaaagatattaataacaacaaaacacaatttaaaataatataaaacaatcacaaaacatttagcaatacaaaaatttatcacccatccgaccacagtatatgtattcgcagaacctacttcactacggatgaatatgtaagatattcaaactcatctaacatgcatattatctcacccatttgaccacaatacaatatatcgcagaacctacttcactacgaataaatacttaagatattcaaactctactaagcattcatgattaattaataataaaagttagtaaatgtgtaccttgagctagctagaaactgtttaacaccaaataagtcggatccttgtaaattaacctcacaatctacaatgtaaaaaatactacaaaattaaaaaaaaatctttatttaactacttattagttatataattaa

SEQ ID NO: 288096 - DNA, 682 bp, Cannabis indica
aggaggcattcaaaaaattgaaagagcacatggccaagcctccgatcctgtcaaaacttgttctcggagaggacctattcctatatctcgccgtctctgagcacgcggtcagcgctaccctagtccgggaagaagagaaaactcagcatcccgtgtactatgtcagcaagcgcaggagcggagacgcggtaccccattatcgaaaaactagttttttgcctcctaacggcctcaagaaagttaaggccgtatttccaagcacacccgattaaggtactgaccaatcacccgctccgacaagtcctacaaaatccagaagcatccggaaggctcctcaaatgggcaatggagttaagtcaattcgacttacactacatcccccgcatctccataaaaggccaagccttggcagacttcatcaccgaatgcaatgaagccgaggcaaccgctaatgcgttgataccatcagtccccacgtggagagtgtttgtggacggagcctccaatgaaaatggatccggagcgggggttgcgatgatatccccgaccagacttcgactccaggcagccctacggttcgacttctcagcttcaaacaacgaggccgaatatgaagccttgatagcagggctgagattggcgaaggccgtaggggccaaaagagtagaagtctacagtgact

SEQ ID NO: 288097 - DNA, 191 bp, Cannabis indica
caggattaagatcattttatctaggatcaactaggtgatactgaatcgaatagatattatggtaaatttatcatacataataaaagttcaatatcggtcccttccaatgcatactccatgcatccaacccaagttttactttaaccaattccttggaaaggacatagcccttatccaaggtgcaagtaaac

SEQ ID NO: 288098 - DNA, 746 bp, Cannabis indica
tacacatttgtccaaaaattatttcccattatctctaagcactaagggactctcataaaaataactttgggaattatcaaatcttttagagtttctagcaaagtgtttttttgattaaaaaaaataacttagtcatccaaatgagcacattagactcctttatgtagtttttaggtgatcacgcttaagattcacacactacctcatttatctcgtataaagtattaatataatttataacaactatatttcattacttttgaatcttatcgtcaattttgtgtaacatctcttttattacaccaaaatatcataatcaaccaaaagaaagttacaaaataattaatctagtaactcctctccatattacaaagtataggttacaatttaacacttaatatatagggggctaatacaataggtattgtaatttttacctatcaatagggataataatttatagtcattgatttaatctaatggctcaaatcaactcttgaaaattacaccaaaattaatatatttttttatttataattaatcttgaatattattaattacaagttcaactaacaaactccaaacttttttttttactttatttattcttatgactagttataattttctaattaattatttttttaattttgtaaatttatatatttatttttaattaattttattttcttacttaactacaataattgtagctagaaagtacaaataattcaagttatttaatc

SEQ ID NO: 288099 - DNA, 1311 bp, Cannabis indica
aaaacccgtcgcatggggtctttggggataattgggaaggaccatacctcatcgcagataaaattggtgatgcaacgtatcgactcgcaacactcgatggaactgcgattccacgagcatggaatagcgagagcttgaaattttattatcaatagtactcgcattattcgattatgttcactcttgtacttatacttagatatttttcattcaaaagggaaaaatcctaagtataggggggtatatatgcccgaatgtactattgattatatgaatgaaattacttgttaaattttcaaaaattttatcagctttgtaaatattcctacttattacaccaagctgtaattgaagtcgcaaatatatatatataaaacgcgagtacccatgtactgcgaaaatgttaaaggatagttatccccgcgaggatataaatttgtccaaaataaaaagaaatttgtccaagtacaaaagcgcgagtacccttgtaccgcatatataaaaaagagaagtaaaattaaaaaacataattaaacatctggagcagcaggagcagtctcatccgcgactttgctgatgacctcgttctcgacttcttcagcttctgcaccctcgacctcatcaggaaggttccctcccccaccttgggtctgagtaggcgacatggcacgaaaagcctcggccatctcagcggcttctgctccaagaagagagaagtcgaagtctggaactttggaaagagtggtataaatataatcagacactgcctgatcatactgcttcttcccattctctctctcagtctccaactcgcgggtcatctcctcgatcgtcgcctgcgatttcttgacctcgagctccgcctgctccttagccttgctgatttcttcgagctccttctccttcctagccacttcttgcttcagcctttttatgttctccttaaactgggcattttgcatcttcagcgagtcggcttccttcgaaggagtagcagcagcttttatgaacaaagtcatcgactgcgcagctagcttagcagagcgcgtaacaagatcctcataagggatctcggacaggaacttctcttgcatgtctaggaagtcgcgagctcgaacaggtggatcgattacgactttcttccccttgtcctgtgcggtcttgaccagcttcttggaagaatctgtggcaagggtagccatcgcatcgctcttcctcttttgggcgacaacgggcgaagtcgtcatcgctccacccttcggcttgatcttcaggacaggtgcggacttcaagaaagtcatatctgcgaag

SEQ ID NO: 288100 - DNA, 568 bp, Cannabis indica
gcctagtagcaaagtacacacgctcttgggagtctgtcagctccgtgtactgggtgtactggggagtgtaccccattttttgacgcttctcccccgtccgggtgctgcctttggaggaccttttgctcctcgagccctgggaagggcctgccaggctagcagttagagcggagtgcgagggagcttgtccatttatccccgaggaatttccaaaatgagatgatgcgggcgccaagggttggccctgactataacctggggtggtagagaactgtatgccacttactggtggagccgcggtcgggacagtacccgagggcagtgctccgagcatgtaccctgctatcccggtgggatagtatcctccataggccactatctgggcctcttcaaggttgatatatttttggactctcttctggaagtcctgaaggctggcagccccctcttattgtagttcgttccagaagggagttcctgtacggatgcctgcctggagaagcgcaagctgttgtccctcatcaactttcttggtcttcgaggcttcctctcagaacctctttatata

SEQ ID NO: 288101 - DNA, 535 bp, Cannabis indica
tgttaacagttcaggagtttggagggttttaccaccaaaatttgagcttggagggttaagtacaagtggaacgatagttgaaaaagtttaaccgcaaaaaacttttattgttatttagtattttagttggtccaaaacttgtttctttttttgttcagggacaattattctaagcagactagtgtagaagaatttgttaaaaaaccctcactctggggaaatctgaaatcatttgcgggcggatttttcaacaactggagaaaatcttagatttgagttttgaagctcaaagaggtactagctcaaatggtcaagcacctggtttacttaccaacaagatctgaggttcatgtccctactatatatttacatatcaattcgcaataattttttggttcccaatatagtagtgttcggacaaggaacctagtttcaaaaagaattttttttttgagtatagcgtaatggtatttttacaatcaattaatagcttgtagcttaaaggtcttgggttcgaacccataacctctccctt

SEQ ID NO: 288102 - DNA, 503 bp, Cannabis indica
ggaaaaattattaagattataataaatatggcctaaaaagtaaatggcactaaatatgacattatctaaccaatcaaactaaaaatatagcttttttttcttaaaaaaaaccatataaaacattaaaaagaaatttgaatttaaaattcataaaaaataaaaaactgaattaaattaccagaaaaaatattaaaatttccataatctaacaataattattatatatgactaatatagtttatgtaaataaaaataaacttttttttaaaaatttattacaatcattacaacttccttaaataaattaaaaaaaaaactaaaattttttataccattttattataaattttccttttatatttcattgatacatattgattctttgagaaaaggaacaactttaatagttaacaaaaaagagagaaaataataattttttattaatcatagttttatttttattatattttattgaaatctaacattttttttttcattcaatt

SEQ ID NO: 288103 - DNA, 789 bp, Cannabis indica
ataaacagcaattgtgcttgcacacatgaattgactcatacccaaacctaattttttcaattttttcttggcatcataatagtttgatggaattttattttcctttggaaaagcaaattttaataacttcagtaattcatcaaatatgttgttaggaatctttcccctaactttcaaatgcaataactttgccaaaaagttaagagaagatatccaatcacaaccaggatacaactcggcctcaatttcttcaaataattcgtcgcgccattgatttgcatctggattatcatccatttcgaatgacggctgaaggaagtcatccactatcggaatcatctcgtcaatttcaggatcatcatcagcggcatcatggtcattcattgcattagtggcactagattctgcttccccgtggtaagtccacttctcgtaaccagtaaaaaaaccccaatcgaatatatgtgctttcacaacaggtaaagtttgaagcctattgttcacacatcttacacatgggcacctaattctaccatcacaatctttacatttcgaggccatctctaaaaatgcatttagaccatcccaatattgtggacatctacgatttcgcaaagtggtccaagacttgtcgattgtcatctaaaattttatgaagacataagatttaatagtataaagaaaaattgaatgataaaattttatgctattttatgatattttatgctattttattaaaaaaaaattcattattattttaatacttacacaattatttatatattatta

SEQ ID NO: 288104 - DNA, 374 bp, Cannabis indica
atgaatagtactcctgagattgaacctaaccatatcaggattaagatcttttgatctaagattaactagtgatattgactcgaaaagatataacggtaagcattataatatccttactaagatcaatatcggtccagtccaatgtatactccatacattcgagactagtatactgtgccaatgttctggaaagaacataacacttatacaaagtgtaagtacacttcatcgctgattaacacatcagtgtaaattcaatgcactaatgaaacagggactttgtctttccaagcatataaccacaatcacattccactgtgttgccatcactgtaattgggaatgactatatgttctggacttaacagattttgt

SEQ ID NO: 288105 - DNA, 418 bp, Cannabis indica
actttcaagaaattagatggtggatcagtcttgttaggtgacaacaaagcatgcaaggttgctggaattggaacagtgagattgaaactacatgatgatcaagtgagaagcatacaagaagtcaggtatgtaccagatttaaaaagaaatttactttccattggtgaattgattgagaagggtcataccataaagattgatagttctttcaaagtcatgaaagggtctttagttgtcatgaaaggggaacttaagaatgggatttattatctcaagggaaagacaatcactggtgaaaatgacatggtagttaaagggcctgacatggaaagcactagattatggcatcttagattaggtcatgtaagtgaaagaggcatgaatgaattggaaaagcaaggtattctcaagggaaaac

SEQ ID NO: 288106 - DNA, 554 bp, Cannabis indica
attttctcaaaaacgccaattttctaattctaaccatttaaatgccaaaactaattatttaataactaaaatagattattaaataatattgtcatttaatttaattattaattagacatataaagtctattaataaataaataaacttagaatctcttttctttacaatttcgcccctacttagtgaaaattcacaaatcagacatagtctaactttagaattataattgattaatcacaaatcaattattgagtcttacaagcagtatgttctcaactagaatgggggaccatggatctatatgttgagcttccaataagtgaaccgaatttactaagtaaattcctacttattaattcttcgttgaatccactcttagaacttagaattgcactctcagacttatcccatctcgatgtaaatcatctatatagaggatctttgatcacaataagattataacaatggtgtctgaagacacccccctgcgcgcgcagaaatccccacgtgaccacaccctaccgccgaggtttcctcggcccagcctccccac

SEQ ID NO: 288107 - DNA, 550 bp, Cannabis indica
tgatttatgtggttttatggtggaggggcaaaatggtctttttgccccattagtgttttgtcttatgtgagtttattaaatgaaataaatgtttattttatgtattatttggctgaaatgaggtttatgtaatgtgagttgatgtcattttatcaaaaaaattactaagttaaaaattagaaaaaattggaaaagctttctctctcttttccctctctctcttttcggctggttgtggctgtgcaaagggctgggttttgcttggttgattctagtggtttagcaagatcaaagtgattttcattgaggtatttctttgttttagtttcttaccttgtttttcttgaaatttatgatgaaaatagttgatgcatgcttgaatctttgatattgttgctgctgaaatcttgttgttgtttctgagatttaagcatgttaatttgtggttatttaggttgttagtaatgaatgttaattgctttgctcaagtttggaattttttagctcaaaatatggttttcaaagagaattgattagattctgttgctgt

SEQ ID NO: 288108 - DNA, 645 bp, Cannabis indica
atattcaggacgtgcgaaataatagaagggtcgattccgaccatatccgcatgtgaccaggcaaaaacatccaggtttgctctcaggaattttattaattctgattttacttcgagcaacaaaccttttccaatttttagctttctggccgggatagctggatcgatctcgatctcttctaattcttccacaggtccaacattgctgcttgggtccccaagtcgaggatccacatcttcatcctcgccttgggaagtttcctacttgggattgtttattcccttgtcggggctctggctggaggatatttccttcttagccttggccactgcaaggttgtaacattcctgagcagattgctaattccctctaagacaccctaccccgtttttggttgggaacttcaggcacgagtgaaatattgatgtgacagcttttaagtcatacaaggctggtcgacctagcattacgttaaaggctgaaggaacatccaatatcaggaattgtgccatgatagttatgcttgtcggagcttgtccaactgtgaggggtagctggatttatcctagaggtgcaactccttgaccggagaaaccatagacaggctgaaggcatggagttaaatccttgagctggagccccatc

SEQ ID NO: 288109 - DNA, 552 bp, Cannabis indica
acctcaacgcggttttcagagcgcgctcccgcgcccctcgcgacgaggaaacaccccgtgatcccctcgtgggcggtcaaggtgtaaacactcgcactaacccgcctaacgcaccggcagcgactactggagttaatgtcccagcaaacctcgccgcagtagtcacgactcctgcagtcgcagtagtctcgactcctgtagctggaggaattgaccaaaacatgcttttgcaagctttgaaaatgctcgagcagcagagaaagcccatatacaagctgcacgggacttctccttttactgcggaagtgcgacaggctcagcttcccaagggatttcgactgtccgaatccctaaagtataaaggtacctctcatcccatagattatttagaaaagttaacactataatggaagtggatgaagtacctcagctcgcgaaatgtcgcattcttgcggcaacgctaaggaaaacgcccacgattggttcacccaattgcctgagggcctcaatattgacatgggaaacctttgtcgatttattcctcacgcattt

SEQ ID NO: 288110 - DNA, 606 bp, Cannabis indica
ccccgctatactaaaaatactaggatgtgattctagccaaacaccgtgttctaatattgtcggggactgaaaaatgcaaaattataaaatttctatatatgacatataaaaagcattctaaattcaaataaaacaccataaattaataatttagaattaataaataatttccataattaaaccctaattatctgctaatttccaagtttaagctaagcggtcttcacaactatcacccttaaaaggatttcgtcctcgaaatctaacctgaacaactctggatattgggctctcatgtctgattctaactccaaggtggcttcctccaccttgctatttctccagagtactttgaccaaagctatggtcttatttcgaaggaatttatcttttctgtcaggatctgtactggttgttcttcatatgacatgtctggctgcagctcaatattttcatagctgagtacatgagcaaggtctgaaacgtattttcttaacatcatactaatcttacctaaattctaaatttaggtgtgccggtcaacctgagtggaacaactgttcgacgaattataggctcctaaatcacatcgataacaacacgcat

SEQ ID NO: 288111 - DNA, 430 bp, Cannabis indica
aaaataaaatactaaatgggtacttcatcgaaataggagtgtcatctctgtccccgtcttgtttaacatttagggacaaaaagtaattttcgcccctgccccattccctatttagacgagaaattcccaccttattaagagcggatccttgcaaaacttacggagaaaatgtacatcggttggtaaaatgattaagttagtattttgaagatatattttagggtaaatactattttggaccttgtgttttgtaaaagttaccaattggaccttctatttcgttaaatgacaaaatgaaccctatattttccaaaatagtaaaaataagactttgtgcttaattttcaacaattttattttttaatataataaactttaagacaatttttaacatgaacagatacagaaaatataactaattttattataa

SEQ ID NO: 288112 - DNA, 593 bp, Cannabis indica
tcagaaagggaggcaacgtgggaaatggagggagacataaaaagaacaatacctcgaacttttggtaagtctaatttcgaggatgaaatttcctttaaggagggtagaatgtaatatccagtttatacacatatattagtatttggtatattaagtgtgataaattatactgttattattattattattattattattattattattattattattagtattattaattagtgcgtgtgtgtgggtgggaaaaaaatgatatgtatatattaaatagtaatataaataaaaagtgaggaatcagtttagttagtttaaaattcaaaatataaattatattagcataatttttatctgattagttagatttttattttaaaatttaaacctattttacgatatctcatatatacgtatatactctacaaccctagcagccagatagtatcgtattctcatcatctctcaaaattttaatcctctctattgcaccaaatcaattgttctaatcttaagagcttcggcgtcggcaaccgaccactcttatctgatcatcgttctgtgtcttcgaaatcttcaggtaaattcgtagt

SEQ ID NO: 288113 - DNA, 547 bp, Cannabis indica
ttttctggcgcttctctcccgtccgggtgctgcctttggaggatcttttactcctcgaaccctgggaagggcctgtcaggctagcagccggagcagagtgtgaaggagcttgtccattcactccggacgggttgccaaaatgggatgatgctggtgccaaggcttggccctggctatatccgggggtagcagagaattgtatgccacttgcttgtggagttgcggtcggggcagtacccgagggcgatactccgggcatgtaccctgatattccggtgggatagtagcctccgtaagccacgatttgcgcttcttcgaggttgatatatttttggactctcttttggaagtcctgaaggctagcagctccttcctgctgcagctcattccagaaaggagtcccagtgcggattcctgcttggagaagtgcaagctgttgtccgtcgtcaaccttcttggtttcgaggcttcctctcggaacctctttatataattcttcaaggtctcggtgggcagttgcttgatattagtcaaggcactgacctcc

SEQ ID NO: 288114 - DNA, 835 bp, Cannabis indica
ctctctctcttttcctctctctctcggctgtgcatgtgggtgcaaagagctggatttttgctctgattttcaagtgaattctcatccaatctaagcattcttcaagctaggttagcttctcttcattgtttctctgttgatgagtagtggtacgtactttacttgataattctctccaatccgatgtgtactttctataagacacatttctcttgaatatcctacataaagtccatatttcctgcaaaaattatatttaattaattatttaaaaccactaattaataatatatcatatatataataaaactaattaatatatttaaaaaaaatataaaatctaaagcatgtgatattcatcctttgttttgtaataatatattataacataataaagtaccatggtagcttaattagtacaaaaaattactttataaccacttgtaattattagtaaatcactattttatatagtctcacttaattaattaaacctatgaaacaaagcatatatatattatattaataaaatagggaatttggggttattattatatttgttcctaggaagacttttttgactagcatattaaatttaatggtaaaaatgcatccatgcataataaaaacatgatagttatgattctatcataatttttttaaaacttaatatttttactagctgtaaattaaattaaagtttgcaaaacaaacatggggtactggttctcaaaatggggtttttatttatttttatatattttgaaattggtgtactaattttttgaatattattggatgcattggaaaataaactaagttacacaacaaagaa

SEQ ID NO: 288115 - DNA, 569 bp, Cannabis indica
tttatttctttttaaatttttcataaatcctgtgaaaagatgacttcttgataaattatttcactaggaatcgcattaaaatcgcacattcatcgcgcataatatcgccaaaatacacaaactaacaaatctagattagttcacatcgcagaaaaatcgcaccataatcgcacaatgtcgccaaaaatacagaaccaaagcaaactcaaaaacaggatcctgtcgagcaaccaaaaacaagaatcctgtcagttaacatcgcacaaaaatcgcacaataatcgcaggatatcgccaaaaaatacaaaacaaactacaaactagctcctgtcagttacaaatcgcacagtaatcgcataatgtcgcctaaaatcggtaaacaaaccaaaaaattattaatctaggagaaaaaagcacaatatccaacaaccagcaatacaacacatattcatttaaaaattggagaaatggttcaaactcgagctttgcatgtagctctgttgtgccctgaaccgtgacatagcgaacaatgacgaggttccactaccacctgaccactagacggtcgac

SEQ ID NO: 288116 - DNA, 731 bp, Cannabis indica
atcaagagacattcgatctccattgttggttttacatagctattgttttagtgagtaatcctccctaatggaggaacgttcattagcaagttagcgccgtagaatctcgaaagataagtattatttgtaagtgttttatattagtattgatcaccctaatggtggcgactgtataagacttacaaaagtatgaaacaatggtgggagctcatgaaataggaatgaccttgactctcgcctaaacgggacaacgtcggattctcttttcgatcgaataaaaggttgctagaatgtttatcattttagatgaattgacaactctattcaatggatgatgctttgactctcgcctaaacgggacactgtatcagtttgttggaaaccttggaaaataaactatgttaagatttagtatttttataacatatgtgattatttgttattttctgaacttgtgtatgaatttattgaaccaaaaccttacttctgttttattgatatgttgtagtgccaatatgaataaccctcaccccgatccactcctagtcaatgtcttagcaaatgaactctatagtgtgaaaatgcatcctggtagttgcattaactcgcacctattgatgatgaatctgaagttccaaaaggcaaatctacttggaattgaattatcaaaggaacaatgggtacaattcattcttaatagtcttcctccggagtataatggatttgttgta

SEQ ID NO: 288117 - DNA, 575 bp, Cannabis indica
cttagcgaatttagctttcgcatcgtgagtcatctaagaaatccctataacttggggatcaaattgttgagatatggcaagctgtccaaatcccacaatcagtgtattctgcatttactatgcaatctttatgcttatatctattgtaacgagaagcgaaatacttcctctccaaactcatagccttagaaatagtgatgcatgttcactgggcaaaaggttgagagattttacttaagagatattatcgaagaattcatattcagagatattgttgtaagagctataagaaaaggaaccgttctccttattcttgagttaatacaaataatgaggactaggctcttaccgaactgctcgggactgaacctctatgaaattcctgagccttttatattgctttattatatatcaatcgttataaactacttgtcgcttactaaataagactcactgtcgttggctaaaagcgaggtccacattttggtgcttcattgagagcaaaataaagaatcgctcttcattacaaaatctaaccacaagtacgatggtggtacagactcggtaggggcctg

SEQ ID NO: 288118 - DNA, 152 bp, Cannabis indica
tggggcccaatatccatcccatggccggccactctatagcaatttaccatttaatttttcattatttatggcttaagggaaagatgatgcatctcattccttcagataaatttgagcctccttcctacccctagccgaaacctctctctctc

SEQ ID NO: 288119 - DNA, 811 bp, Cannabis indica
gatcgtttcaacttgcaaccagtgtctttcattctccttgtagccttaaggttgagacatatagacttcctcattcaattctccattcagaaaagcagttttaacatccatttgatgcaactctaaatcaaaatgcgcaactaaggccataataattctgaatgaatctttagtggaaacaggtgagaaagtttcagtgtaatcaataccttctctttgagtaaagcctttagccactaaacgcgctttaaacctttcaatctgtccctttttatcccttttagcctttaaaatccacttacaacctattggtttaaaaccatcaggtaataaaactagctcccatacaccatttttcttcatggagtcgatctcatcatccgtagctgctaaccattttgaagattgtggactattaagtgcttcactaaaagtgacaggatccacaaaatgatcaatatcatattctccttctccaagataaacaaaattatcatgacactttgttgacttcttttgtctctgagatcttcttagaggaggtacttctggaataacttctctttgttgatcattgttttgaataacatcttccacaactggaatttcttcaataacaggattctcattaacaataggagcttcatcattaataggcccttcatcaataataggaccttcatcattaataggcccttcatcatcttcgatatcgggagcaatatattcatcaacaatgggagcattaccaactggagtaggatggagactactattatcatcatctcttcgaaaaagagacataggaagt

SEQ ID NO: 288120 - DNA, 455 bp, Cannabis indica
attagttaggcatggtcatatctataaaacttaatttatttataattataaggcaaactgctaagatttatttacatatactttgatttatttttttagattaaagtaatgatatacattagtcactattgaagactgtttgtagtactaattaaatttaattcctcacatataattaaatttaaaatttattcaaacattttcatataaatttacatattaattaaatatttacataaacacaaaataataaaataaataaatttacatattaactgaacatttacataacacacaatcttatttactcttcattaggaagatgagcatcactaataaaagaagaatcatcacaattgaaggaaagatggggcatcataggaagacgtcgatgaagatgataccggcgatggagcatttaagcacatataactcatgtctacttgcaacttctc

SEQ ID NO: 288121 - DNA, 546 bp, Cannabis indica
ccaagccgcggaaagaataaggtttctttggaaaaaatcaaagagatatagtatttttttgtattttatttcttaattcttatttttatattgttttttttatatagtttatagttatatttctatattgaaaaaaaaaaatatatatataataagaataattactatgttccataaggttccataagccaaaataaggcttgaaaaaacccttcttattatatatatgttttttttttcaattgggggagagatggctgagtggactaaagcgtcggattgctaatccgttgtatgaatttttcgtaccgagggttcgaatccctctctttccgttttcgtcaataaccttgtatttcctttcgaatttttcgcgagttccctttttttttagttattttcttatagttaaaagtgggaaatagctaaaaccctacctaacgaactttttaaaattacaagcaaaaaaacaaaaaaataacttctttattttttattttctttctacgtccacggattacgccccggacgtcattagataggaat

SEQ ID NO: 288122 - DNA, 698 bp, Cannabis indica
tgtgctggccgacatgaacggaaagtctcgtgctagatggatgtcctaatcacaatatgaaaccgggtaagttacatgatcaaaaccctaatctcaggaaacccaaaaccataaccctaggttctattatactttctaggggttaatctaactttggaaatagggaaacactcgaccacggcgcggagtggacgaaaattgagaaaatgaacggcctagggaaccctgccaaaaccggttacctggtttgcaccagttcacccaagaaatttcatttcttgctcaatcctccaccaaatgcaaccaaaccttccagagtacctaattagggtatacacaatatattccagccagtatttcatagattaatccaatgaaactcaacttgccattaatgatcaaagctttgagttcaaagctcaaacttgcataaattcaacacaacaccactaaatcagctattagaagttaaaatcaatccaaatgaaccctaaaatttgaaacctaaacatcccaagccctaacagccactaacacatgaaatcacaacataaaaccaattaaaaccttgagaaaacttagttaaaaatgtctagggttaccttaacttcaagggtgcttgatttcttagcttcaaaccagccaaacaccaagatttgagggtgattccctctagttttatctcagccaagagagag

SEQ ID NO: 288123 - DNA, 752 bp, Cannabis indica
aaaaaaaaaatatatactaaataattatcatgttgtatttcttctcaaaataatttagacacctgtagagttggcattgttgttactataggtaaaggtattttgaaggcacctatagtgatgacaatgtggtctctatagcccttaaattaaattttataaaagacgaagtagaaaaatgataaatttttcagatttatgtgttctattgcgactactttataactctttaaatgtcgtcgctgtacatatatattggttcattttattgtggtgttaagtttcatcttaattagctgtaaaatctgtttaagccaaaggcaatttagtgtagttcatggtgaattatatgatgtcgttctgttggctcgagagctgcagttgtaatttgtgccatgaataactaatcttgtaattcgtagttaagcccaaaaatgatattttagagaacaaaatatctaacttatatgtaggtagtcaaaagcttaatggtaacacaacaaattaagttttattgtagggtaaataccggcatatgtactcaaagttttgagtttgtaagcggcataaacctaataattttttttagtggcataagtacctaatgtttgtaaaactgtaattttctctattttcgtcagtatatactccgttttaaatttattaaaaaaagatttggaagtaactgataatacatatttttcgtccagaccaaataatctaaaattttggtcttatatgtgtcctgttta

SEQ ID NO: 288124 - DNA, 423 bp, Cannabis indica
aagggatttcgaaatttagagaagaaaagagagagagaggggcggcatggcttttctctgaaggaaacaatgtgcaaagttataagtttcctgaagccaacactttctatttatagaatgccctctaggtttaggttagaattgtgtggcattaaaataatgaaaaaaataaaatggtaaagggctttgcatagtgggcggccagaataggaaattgggcctcactttgcaactttctcattttgttatttttcattcccattttctcaaaaatgccaattttccaatttaaccatttaaatgccaattctaattatttaataactaaaaataattattaaataatattgccatttaatatatttattaatttagacatataaaatatcttaattaataaataaacctagaatctcttttctt

SEQ ID NO: 288125 - DNA, 616 bp, Cannabis indica
acctgctgttgacgccaaacaattttgaaatcaagccagccatactgcagatggtccaatcttcagtccagtttgggggactgccgtcagaagacccaaacatgcacctcgccaacttcgaagaattgtgccagacattcaagatgaacggagttagcgatgacgccatcagactaaggctgttcccattctcactaagggaacgagccaaaagttggtttatttctttaccaactcattctatcaacacttgggaggaattggccctgaaattcctatccaagttctttcctcctgcaaagattgccaagctgagagctgatatcaataacttcacccagcaggacagtgaatctctttatgaagcatgggagaggttcaaggacttactgagaaagtgccctaatcatgggattgagaagtggctgcaagtgcacaacttttacaatgggttgatgaatgaaacccgaacactcatagatgccgctgctggtggagctttcatgaggaaaagtgctaatgaggcctttgaattacttgaagagatggccatgactaaccaacaatggtcaacagaaagaggtccatctaaaaaagttgcaggtatgtatgaagt

SEQ ID NO: 288126 - DNA, 582 bp, Cannabis indica
gttccacgatatagatacgctataaacatttaaccatcattctaatctcaataatcaaagatcctctatagatgatttacaccgagtagggataaatttaccgtttcacccctcaatgtactttatccttaaaacacttagcttcctataaatgatatttcagtgagctaatataatcacagaaagaagagctcttccatttatctctattaagccaagctcaaggaaattatcgtttcacttctatgtcctgatagaagctatagattccatatctatgcttagcgctcccactcgattgcactatcatgttcacaaaatgtacgtatcaccctgacaaaaaattaggcttaactaacaaatctaacaacatgaatagcactcctgagattgaaccaaaggatgtaaggattaagatctttttaactaagatcaactagtgatattgacttagaaagatacaatggtaagattataatgtctttaccaagatcaatatcggtcccagtccaatgtatactccatacatccgaaacatgaaaacttgtaacaccctaactaacataggcgtattacgtgatt

SEQ ID NO: 288127 - DNA, 507 bp, Cannabis indica
tagaaataactatctagaaaatatctcaattctactaagtatcttttcaagatctggaaaatatctgatttaagttattatagaaagaatctataatttacaaacttaaaattttccaaacatcatttaattaaatatcaaaattaggtggtaactacctaatttaaagatattccctttttaagtttaaaaccaacttaaaataatatcttttaagaatcttcaataactaattcctagaattcctcagcttaatattattatcaaaatatattcaaatttaagttaaaaggaaaaattagtaattactaattcataacttaaataagaatatttaatgaaataataaaagtaagtttcagaaagaatctagttagttaaaattctttatttaattaaatacaagaaaaatacaaatagtttatctagaaatgaaattcattaaactatgtttttcttaaattaatttcgaagaaattaattatgttgctattcaattttattagg

SEQ ID NO: 288128 - DNA, 260 bp, Cannabis indica
cttgtttcagtgactatatatattagatcactaaaacatcatttacaggtaactaagtgttttaaggggcaaaatacattgagggtggaaacggtaaatttatcccatcccgatgtaaattatctatatagaggatctttgatcacattaagattataacaatggttaaatgagatagcatatctatatcgtgaaacatatagaatgctctacataagtctgagaggataacataaacatggtgatacgtacattttggg

SEQ ID NO: 288129 - DNA, 340 bp, Cannabis indica
tgagacatattcctttgtatgtctttagctttgtacttagttccatctgatctgaactttttcttaatgaggtggccagcaacccacagtgtttcttgacagttatcagcatgtctagaatccaggctacatgtgtgttcgttgtggaatacactaacctcaaacatgtcacaacctgccctcttcctccccctcactctccatttgcaatttgaacccctgcaagttgcataaaaaacatcggtcccagacttcttcaccatgaactcaaaattcattttcagtgcaaaccttcccaccacatttttcaattcaatcttatttgtgtacaacttgccaa

SEQ ID NO: 288130 - DNA, 723 bp, Cannabis indica
tcatgatctaactgtaagcgtgttaactgtaagcgtgactattaaccgcctcatatatatatatatatatatacactcatgatctagtgactatttaatgccacatataattaactgtaagcgttcgttttttgtttttttgtttttctttgaaagcttatatatatatactcatgatctaacttgtagccaagtgcataaaataaacaaagcacgttcttgcttgctttgctttccaccacggtcctgactagaattgaaatctgatcagcacctgcacccctcatttttgttcctttatttgttgtgaacatatttcttttttttttttcaaaaagtttattaaagtactgtaatccctaattggcgtctgcaaataattaacaggtattttaacaaaactttatatctttctaatacaatatatatatatatatatatttgtagtttttttttttatttcgcattttgtataagttttggaagtattattatacttgtaggtttatttatttattcgtagtttatttattttagttagttaaatttaattagttctttcgtaattttaacgtttgttttacaacatatatatacatatatttaatttgtaattttttgtcttgtaaaataaatacattgtcatttgtgaaaattttcttatagtgtgttggtatggccctctatatcactattaattcataattattttgtctataaaat

SEQ ID NO: 288131 - DNA, 665 bp, Cannabis indica
aggatagggacctgggaaaaagaaccaggactgtgacctattacccgacccagacccgaacttgagcctaggacctagctcgtgacccggcaccagaaatggaaccagacttcgacccaagattgggattcggatcttgacccacggcttggacaaaacccgtagtcggtgtctggctttgggacccagccttggacccaaacccttgcaaggacccgaacccacacccggacctgaacccaatcccaaacccaaaagtggacccaaacccgtaccctgtgacccaaaattggaaccaaaaccagaactataatccgacaaggacccgcactccaaatccgacctacacccgaattgggagcccgacccggatcccaacgcaaacctagactcgggacccgaacccgaacctgaactcaaacccaaacatggaaccaaactagggacacagaacaagggtcgggacctacaaccgcaccccagtatcgatcccgaacccaaactcacaaatgggacctaggacctgaaccagaaccagaccgagacccaggacagtgatccagatcttgactcgggattctagtaacggggcctggaacagaccagtagtcggtgtctagatctaggaatcagagtaggaacagaacccagacgaagaaccaaac

SEQ ID NO: 288132 - DNA, 592 bp, Cannabis indica
aatgttatctgagtatatagaagtgtattgtatgagtggttacttagtatgtaagttagggttattaccctaagattatatatgttgtagtaaatgttgaatacacgcatgtatgttaaaagttatgtgtatgagacataactgggttagacctggtatatatcaccaggataaaccattgaaagaacgtaatgtatggattacgtatatataagaatagggttatgcaagcaaggcataatcaggttaggctcggtaatcaaaaccgaggtaaaccctactaaggccttattgtatatagacgtgtgagagcaacacgtaggtctacgccacgtagacataaataggcatgtgagcgtaacatgcaggtctacagtagatagaccaatggtgcagtggcaccattaattatgtgttatacatattgagattaaaggttatgcgttcaaggcataatcaagttggactcggtaatcagaatagggccttattgtatatagacgtgtgagagcaacacgtaggtctacgccacgtagatataaatagatgtgtgagcgcaacacataggtctacgccacgtagacataaagag

SEQ ID NO: 288133 - DNA, 603 bp, Cannabis indica
atctgcgaaaaatggaggatctgacgcaaattcgctgtgagaaattcaaaaaaatcgtcccccaatttcaggttctgatccaattgggtcttctttttattcgtaaatcatcccccaatttttaagattaatttttcattttctaacattttgggatttttgtctccttattgaatcttttcaaatctgcattgtttctatcaaaattaatgagctcacatcgttgttgtgttatacggagactaaactatgccatttgttatgtttaaccttcacatcaaaaaacatgttatattctatatttggattatgttaaaaatttgatcttatgaagaatacgtttaattagcttaatgtgttttactatgcagtatattcatatacagtccttctttttcttttctatcttcgaaaggatagttaataaatataatatatagctttttttttttgaaataatatatagctttttttcactctctctaatatgaaataacaaaaaaaaaaaactagaattatccatgcgcgttgggtccacatgagtcaaaaaaatcataaaattatcctttacaaaaatgtacactgatattttttaaaattttt

SEQ ID NO: 288134 - DNA, 689 bp, Cannabis indica
atggtcattttgccccattgatagtttgtcttttgtgacttaataaagtggaaaatatatgtttattttattatgttttggctgaagtaaaataggagtaagtgacatttaatttcattttcatttcaaaaatcaaagttagaaaagaaaattacaaaatttctcaaaaagctctctctcttttcctctctctttttcggccacttgaggcagcaagaaaagtggattttcctcttcaatttcaagtgattttcagcaagttaaagtgtttctagttgaggtatttcttgtctagttttcttcctttgttttcttgaaattttgatgaaaaagatgagtaatgcatggatgattttgatgatgttgctgctgttaattgttgttgttgtttccatgtttaaaatgttgatttaagtatgtttaattaggttgaattgcatgctagttattcttgctctagttggatagatttcttgttaaaaagcttgagttttcaaagagaaattgtgtgaattgttgctgtagttgttgcatgaattagggttagttttctgcagtgttattatgcttgtttatgaagttctaagctagttttgaggcctgttagtgagctttagccaagtttgagtttgaactcaaagcttggagctcacatggtgtttttcaattctgtgcattctgggtgattt

SEQ ID NO: 288135 - DNA, 395 bp, Cannabis indica
tatatcgcattgcctaataagacaagcccatgccattacctggcattcacatatatcacattgcctaatcaggtaagcccatgccatgtggtacaaatatacttttcttacataaagtttcggttcaggtatgttgaccgtcctatatggagaacgatcaatgatcttgggccctatgtcactgttggaatattttaccagaatctagatttactaacaagtatgtttcattaacatctcactgaaggctgaataattgaagaagaaaagagaggtagagagtaacgactagggtataggtagaaggcttagaatttttctctaaaggaatgagatgcatatctttttccagaagccatcactacctatttataggtaaccacctaggtttaggt

SEQ ID NO: 288136 - DNA, 852 bp, Cannabis indica
tacggattgccttgtaatgttctctttgattctggagctactcattcttatatagctactagggtaattgatagtatagataagccatgtgacctacttagatgtggtattgtgacggaattaccctcgggagaaaccatgctatcaacaagaagaatgcgagatgtacctatcataatcgaaagcaaagaactcatgggcgacctaatagagctggaaatgaaggaatatgatgttatacttgggatggattggctatctagtcacggtgcgacaatcaattgccgaaagaaactggtcgtttttgaaacaaaggctggggatcggtttattttcaagggcgacaagctggccctgaggactccattaatctcttccctaaaagctagtcagctaatgaaggcggggtgtctggcattcttggtcagcgtagtggatcgagcaatagagacgcaactaaatgtggagaatgtgcacatagtctgtgaatttccagaggtctttccagaagatctaccgggactacctccagatagagaggtggagttcgtcattgaattagccccagggactaatccaatttcaaaggctccatacagaatggcacctaatgagttaaaagagcttaaaatacaactacaggagctcttagacaaagggttcattagaccgagttactcaccttggggtgcgccggtactcttcgtcaagaagaaagatggaagtatgaggatgtgcgtagactaccgtgagctcaacaaggtgaccatcaagaataagtatcctttgccaaggattgacgatctctttgatcaattgcaaggctcggctgtgttctcaaagatagattta

SEQ ID NO: 288137 - DNA, 422 bp, Cannabis indica
ttttaatgtatagtttttcaaatttcccatatgaaattaattgtagacgtttccatttactaacattttctctacttcaccttttaccaatctaaacaaagtcgcaaagatttacttttttttctatatttttttttgttaaaaactaattatttcattaaaagtagcagaaaaaaaaaaccagtttcatcaacatcatcttgaaaaaaaaaaaaacaatctaaaaataatattaactttaaaatcagtttcatcaacattgaaagaaaactaataatttcattaaaagaataaaaaaatagtttcattatgttattacaaattttttattttaagttactttattattattttgtttataggttcgaaacttacacttatattttatttttaatattggtattcatggtgtgttgttttga

SEQ ID NO: 288138 - DNA, 569 bp, Cannabis indica
attttgcctcaaaagaataagacatgcaagttctaagctattcaatcaatcttaccacaaaccacaataaaacaattataacatatttcacagatcgtcaaattgcatccatacacaggttttacaagcatccaaactaatccaaagagttaaaagaattaagcacacagtttcaaaatttcaggacatatcacaattaacagtagcacacaactatcttcagcttatttaatcgactaacaaccaaataaaaagactaaactaaagcaaaataactaaaaagaacagaataactaaaacaaataattttaagcccctccccaaactaaaattcacattgtccccaatgtgctattaaaactaaagggaaagagacttacctgagacccccatcagattggatcaagtccaccccttgcatccaaaagagccctcgtaccgaatgaagaaaattgacctccaatattgttaatttcagagttttgcacaagagtaagttcaccttcagaactaccacacatcaatcttttccaacgacgtcgaatcgttcgaagtcgctctttaggctt

SEQ ID NO: 288139 - DNA, 675 bp, Cannabis indica
gtataaattacaatgttcgaataacaaactatatgattgttactattagttttcttgctgagtccttgtgactcacgggtgctatgtggtgcaggtaaaggcaaagaaaagcttaatcaaccatgaggtgacagtcttctccagcaatgtacatattgaccacactggcctgcgtgccgagttgccaggagttgttttgggctggctgtatctattgtgtattttgattttgtgtttaaatggttgtcgtatatatttctttagcaaaactttttataacaggatccccggaacacgctttttatgccgttataatgtccgtttttagtgttttactttagtcaagtttttaatattatcacagtttttaataattaattattctatcagtattaaactagtttataaaatcacacacgtggcgtccctatagattagggcgttacagatggtatatgttgcataccatccgcgcgcgtcccaaggggtgatcagccaaagaaacacgcacaaagaggttgcatgcagcctctccgctcgcgcaggggtcccttcagacaagatcagcccatcctgaccgagaaatctcagcatggccttgtccaaaagcacgtgctcccctgaaatcaaggggatccacgcgcgtaagggaggtgtcaccacctcctgattttt

SEQ ID NO: 288140 - DNA, 522 bp, Cannabis indica
aaataaatcaatatcacccttacatattgcacttccactgaaatcaatgagaaatttattaactactatttatatttctttgttccattaaattccttacaattttttctttttttttaatttatttattttctaataaatacttttcaacttttaatcatgtaaagtagtatgtatataaatagagaacaacacaaatcaatctcatattaaaagtaaatattattgatcactatttttattttttatatatataaacaattctctcttatatattttttaaatagattttcattttattttgaaggtctgctataaaaatacacatagagattcatttaattgtggtgctcctttaataatgaaataatatatatatatagggaaatttgaaattgcatgcttataatatcttaaattttttttcctaaattcataattaataaaattggtcaaatatgaccacattattattttcccacaaatacccctctcatttaaaaaactaaaatcaaaagactt

SEQ ID NO: 288141 - DNA, 689 bp, Cannabis indica
atattgtatactttatttttatttttattttatttttaaattttttactttttatttttcatattctttaagatatatccacttttatagatgatgtcctcattataccccttaggttaatgtaaattatttgttagacttaagtgaatggtgatgatatattgggtaacccactgacaaaagtgggtagattttaatgaaatataatataatgatattttttgattaatggatacaaaaaagatgtatttctgaacttatctcaagtttaattgaggttttctatatgatttttctttttatattttttttaatatatagtggtagaaattttgaatataatattttaaaaatataattgaatcgtttttctcaataaaaatattacatatagtatcttaaaattaaattaagtattttttttaaataaataatatctagtaaaagttaaaaaatgatattttaaaaaaatgtatttgaggtctttttgttttgttaaaggattttttaaagaggaatttacatttactatgggattttaaaaattcttatgataaatatggcacatttaagtttgaccaatttatatggtattttttttttttttttaggttctttttatggtatatgatatgtcatatatatataattaggttttcaaatcccatatttaatgtttttatttgttt

SEQ ID NO: 288142 - DNA, 578 bp, Cannabis indica
ttattattattaattattaatatgtctatatatctatatgaaacggtgacatgacgctctaaaatcgtagtaaaattatttttttcctctcatttattctctcagtatttttaatatttaattatatttataaatatttaaacctatacacttatctatatctatgtatgtatatatataatctctttaattaatattatttattatttccttaattcttttatttttttttaattttttattaagctttataatatatgtatatatatctctattttgttttcttaattttttatttttttttaaaaaattaataactctaaatctatcaccacttttttaaatatttttcaatttattaattatatatattgtacatcattttttgtaagattttttttttaaaacgtctaaatatcacgtaatttaaaaataatctctaaaattaacttttttatttttttaaatttattttttttacttttatttaacttattttaatttaattaatgtataactcacatttttcttttctaattttttttttaaaaaaaaaccctttaaaaacttaattacac

SEQ ID NO: 288143 - DNA, 409 bp, Cannabis indica
caagaaattccccaacaggcagaccggttcccaaccggaaatccggttctgggtcaccatccggtcgaccggttggtacaggtcccccagaaccggaattccggttctgtgctgggaacccaaaaatttcccccatgacctcaaatctcaaccaaactttatcaaactctccagtacacctatacaatgcataaacaaccatttccaaccaacaattcacagaacaaaccaacaatactcaacttgccattaaagaccaaagctttgaactctatgttcaaagttgcataaaactaacaccaagcatcaaaaccagttgctagggacttagattaactcaaatgaaccctaattttcggactaaacaaacatcacactctaacagccactgtttaggaaaaacataact

SEQ ID NO: 288144 - DNA, 735 bp, Cannabis indica
ggaattaggtccgtgttcgaccggtccggattaccgttagctgcctgaagttttcatttttactttttgctttcgcttagtacgtagtagtgtttgttattagttaatatgtatatgcatgttagagaagtaggttctgtgataaaattgactgatgttggatgggtggatattatttgtttgtgtatatattgtctggaaatatttatttgtgttatttataggtattaaaaattttgggtttacactttttaagccgttatgctgccgaaattttaatagagaaaatgtaaaattaattgaatgtttaaatgaaataaaattgaaattgaaattgaaaatatgtaattaaaaagtttgtaaaataattacttttttttaaaaaaaatattattagttttaataagttagtaattttaatttaaataaaaaatgattaaaaattaataaatgattgaaaaaaaaaatttaaagaatgtaatatataatttaaaatgtaataaagtatatgataagatattgtaaaatagcataaaattaaatttgtattatcttttcttgatctctttggttatacaccaaagataggatttaacaaatgtatttgtattatcacatagtgataatttttttttttaaaattttacacatgcacgaaataccttagacccgtttagagaggcggagtcagtaaggactcttaaatacgcttctccaaattataataaagtgttg

SEQ ID NO: 288145 - DNA, 488 bp, Cannabis indica
attgtcaaaataatttttaataaatatgcatttttattgagcatttaaattatttttattacattgattttgtgcatttaattactcttttttttctatggaaagattccttctcagctggtctctttttggtttaggaaacttcttgtaagagaatgaattctcttatggaaagttgtctaactttgggaaacttgacttttcctttttctaattgataatttcggttttgcttttattagaacaaatcaaataaactttatttggcaggtttgaagtccaaattcgtgatcttggttcaatttggaaagtttcctttttggttttgatctgctgctgcaaaatccgattctgatgctgcaaatcaagaattttcttaagaaagttttgtactgctgggaaatcatttttgtggatgtctctagggttgctctgttctataaataggacctagagagcagccaaacgaatttatctcttctagtctc

SEQ ID NO: 288146 - DNA, 574 bp, Cannabis indica
tgtctctgctggaattctgctgtatcacacttcagctgttctttgatggctaccagctttttccaataccagctggcatggatagaggctgtgtagttccaccaatcttgatccttaaggtatacactatgtatccatctttgccagaggctgtcccgcttgttagatatggcccagatgtacttacaaatagctgctttattccactcttctatctttatgattcccaaacctcctgctttttttggttgacatatgttttcccaagctacagccccaggaccattaaacattgcttggcccttccacaaaaaagccctacacacagtttctattgcccttacaactttttttggcaacaccatcatctgactccaatatgcctgaattgctattaatactgagttaattagagtaatccgacctgcaaatgagagatttcttgaactccaactcttaattctagccgtcattttttcaaccaacagttcacattccttacctgaaatcttcccagaacaaataggtatccccagataagtaaatgccagagcttgtctagagaaccccgatg

SEQ ID NO: 288147 - DNA, 485 bp, Cannabis indica
aaacaaaacgattggaatgctcccaatcctcataggatttcttatccttttcagtggcatcatcagcaggttttggaggtgcatccattctcaaagccaaatctactctcataagagtcaaattcaacatgagagattctacccactgtttgtggttggttccattcagcgtcaacatggcagagtttcttgaaacgcttaaagctgaatgagaaacaagagcaataaccattaaatgcatgttatagcaaaatcatgtcatttgtgctctttctctcataaataaatgatcgcaaaacaacaaatgatcatcatgtatactagagttcttagacaaaattaatgaagtagaactcatacacaggtaagaacaatctattaaatattataatcaaatacattaatttactatcgaaaggatagataaattgtgattcataatatttaataaattttcttcaccatattaagcatccttagtaagc

SEQ ID NO: 288148 - DNA, 642 bp, Cannabis indica
tctaataaaccgtcccaaactactaacatactaagttgtgattttacttagccaaacaccgagttccatgttaccgggcaccggaaaggcaaaattatgaaatctactgaatgacataaaaatgcatctctgaattcaataataacagtataaataattatttaaatagctataaataatttcataattaatcatgattaactgctaatttccaaattaaactaagcggtctttacatccgggacacaatcattgagctgtgtgtgtatttcaaacaattatgctcaagaacacttaatgtttcggatttagaaaaaatgcaaacaaatattctaactattttgtgcaagttagaaacaatttttccaccggctttctttgacataatggttcacgtagttatgcatctccctaaagaagccatactaggtggatcagtgcaatacaggtggatgtatcccattgagcggtcaatgtctgtgtacaagcaatatgtcaggaatcgtgcccgtccggaaggctctataactgaatcttttgtggttaatgaggcattaaccttttgctcaatttacttttgagaagtggaaactcgattcaactgtcctgaccggaacaatgacattgtccaaaacatgccaa

SEQ ID NO: 288149 - DNA, 992 bp, Cannabis indica
gtttggaataataattgggaaacttacaaaaatactggaatttgggttaatttttacaaaaatactgtcacacggaaatcttttcaaaaatactgtatttttataaaataccagtaaaacacaaagcagaacaactcaaaacaccagtagaacactagtaaaacacgagtagaacaccagtgtaaacttaatacagtatactgcagtatgaaacttataaaaaaacacagtaaaaaagtaaaaattccgcctcacagtatttttgtaaaaaaataacaaatgttagtattctatgtaaatttccctaataattgatggtaaggaagtgaatgagttgtgcttggaccattgcctctcttttgcaaaaataccaactattgagttgggtttccaagctccaaatataccaatattttactaactcaaatctgaaaaataacacaaaattaaaataaattaaatattttcaactaaaataaatttaccattgataatatgaaatatttaatttatattaatttaatatgcataaataaagatttaaaatgtacaaatttgagccttaatcacaacccctaactagtttattgctagtctctagcaattcaagcgaaaataacaatgtcaacataatattttctaggttaaaattttttaaaaatggcacaatattcagaaaaatatagtacaagccaatagaactatacagattaccttgaataaatctagagttgtgagtgtgtttaagacaaacatttgaataaacattgaaacaaagataggttatgaattatttagacaaaccaccatcagagtaccacaaaccagctttttgggattttttgaacgaaaaaagacaatctctatttattctaggagccataacaaatgaaaaattaaatgcaaacttttttcttctttcttttcttttctttctttctttctatttttttttttttttattgtttgaacaagagacaacatatagatat

SEQ ID NO: 288150 - DNA, 556 bp, Cannabis indica
gtttaattttgtaagaaaacattttatgacacaaataagagaaagaaataaataaaaaaagaaattaagaaaatgcattgtttttatttaaagaaatacaaattaattagatcttaaatgaatattttcatttaaattattgtgatatattttgtgttgaaaatattttatttggatttaattttatttgtgtttgattaagaaaatgacatttgtgaaaagaaaggaaaagaaaaagaaaaatagtaaaaatgtgatccaaagcaatgaaaaatggcatttttgaagagccaaaacagtccaagaaacaaggcccaatcggcccaaatccctctctcccagcagacaaggcagccacgtggcctcctcccattcgcccgcagctgccaccgccagcaccagcagcccctctgctcacacgcgcgcgtgacgcgcacggcttctccttggtcgtgcgtgcgcgccaccttccaggcgcgcgagtgggcctcgtcccaccttggtcaccaagcttcaaaaaggaagctttctcctcttttctgcatgcgccaagtgt

SEQ ID NO: 288151 - DNA, 553 bp, Cannabis indica
aattagattgattagaaacataacccagactagcatgattagtttggccagatttttgaattttctcaaaaatggtggaacctggatttagcatttgaacattctttttaatgttttcaagttccttggttaaagaaataattttagactcttttaaagacagttcagattcacaacatttaagtttatcttccaactcattaatgttgttacacaagactttattatctttaaccagggagcgattttcagcacatgtttccaaccacttaccaaacattaccttgtaagattcagccatagaattctcatcaatttctgactcatctgattcggatctagattcttccttgttgtcatcgatcaggatattattcatgcaaatggtcttttctttttcctgcaaaaattcttgacaaaacacttgttagagcaaccttttcgttttcatcctcactactctcagaatcatcactccaagtaacatttgacacctttttatttttctttaaggtattggtacattcggattgagtgtgaccaaaaaccttca

SEQ ID NO: 288152 - DNA, 601 bp, Cannabis indica
aagatttcagaggcacgcctccgtactctcgaccaggacggatacctgggcgagctggactgctacattcccacccacgacaatcgtgtcacaaaccctgataaggggatgtgcgcctggtcaggggctcacgtccgagatgtggcggacttcttcagcctctgcccgacccaaattactccaaagggcattaagtatttgtctgctctcttcgtcctctacgcttccaagggatggaatgctccttctccccacgaggtcgctcttcgacctgaagtctaccccctagcacggcaggttggagtatttttacttctctcaaacacgcttcatgtggtttagtgggacggatgacaaggccatcagcaaaatagggcgttttgttgatgagtacttcattgtgaaggatccgagcatcacccaaactcggtttcagtagatcccgacataccactgtcctcccctcactcttgctcttcgggatagagcccaaaaacttgcccggttgccggaggaagacaggaatatcatccatttaacctccaatgagaatctggtgcagtacggtctttacccagaggacttttctcctaagtctgtg

SEQ ID NO: 288153 - DNA, 719 bp, Cannabis indica
agtaacaaaaagttttctattacaaggacaagaagagaaatttcgataataagtctattcaatgaacttaataaaacttcccaattctagtatcataggtttgagattatctaaacatgtggcttatggtatacctaatacttactctggtgcaagcaacttactttagtaagatgctggagcatttttttaatggatatctaaaggaagtcatttgactcctagatgtagattttatttatctaaggaacagtttcaaatattccaaaaaagataaaagtcattaaaggaattccttaaaggtcaatagtaagaggtctcggtaaatttgtccttattcgatgtagatcatctatagaggatctttaactattaggattgtaacaatggataatcataacgtatctatatcttggtacatatagagcgttctatataattgagagtgaaattttgaatctatagtggctcaagaatgaattaataagtttggaaatttacttggtaaattctagatctacttattggaagctcggttatataggcccatggtcccttcactagttgagataatactgcttgtagattctgttaattggttttaattaatcaattataattttaaaattagagtatgtcttatttgtgaattttcactaagcaatggcttaagtgtgaagaaaagagatttttgggtttgttaattaagagacattgtt

SEQ ID NO: 288154 - DNA, 587 bp, Cannabis indica
aatcacgtaatacgcctatgttagttagggtgttacaatgctcaggagcccttgaatcctaaagatgaggctgaggaagagcaggtgactccactgaagaggaagaagaaacccccggccctgcccaggcctgtttagcatgcaattcgcataagggagcccatctcacctgttcagccatcccctcccatgttcggaaaagggaaagctgttatgtctgaaataagatcgatgtcaggtgataatggacttctgagtcttgttttggtagtcaccttgcatattactttttcttgtttttgagcttcttgattttcatgccttatgtttctgatgtctgttttctaaccatgttgttttcgttctatatatagacatgtctcggcagatgcttgacgctctgaggaagagaataggtggaagctctagcgcctctcctccgaacaagaagtctaagggtggtgaggggtcctcttctaacaaaaagaggcctactagggaggtcattgatctttccgaggagctaactgctacaaacccctctacccccaagctgctaagtccaaggagtctggaccatcgaaggt

SEQ ID NO: 288155 - DNA, 621 bp, Cannabis indica
accgtaatcctcatcatacagggtagacccaactcgcatatgtcagaacatgtgcgagtgcctccctctatacctccgcggcaagtatagaggccaatgccctatgatgcagttttggtcccaatgacccaatagccctaacggaccaatgtaagttcgcatgtccagatgctaccaacttcagcatgcgacgtctgtaacgagcgatcacctaaggacgcagacgttccaaacgtacgtgcgaccctacgaactcaacagacggaacacgaacggtcaactcgcagatgcgaaggacgcatacgttgatgagttcagtaactgtcatatatttattaatgttaacgttgtctgagtttaatcatgacaatttaatgtgtaaataatggattaacaataaatgtgatcctcatgtaaccgattgggcacctgctttgtatataaaggggtgatccaccgtgaaaatgcacctacgaatcccttgctacagtggactaagcagaacaaaatctgactgaaccactatatttcattgtcttctgtattttttccagctttgttgtttgttctcgcattcctatttgagtactcgccgttttaggttgaatactcgcatttatc

SEQ ID NO: 288156 - DNA, 503 bp, Cannabis indica
caatcgatccaaagaaaatttgcctaaatcattttccaaacaaaaatcaacaagaatttcgcttcaagagagtatgtcaaacaaattctattccatgtcaagccaaatcattccacaatccaaatagaacacaagtgatatgcgtcaaaaataaatgttttacatctaaatgaacaaccttctaatacacatccaatttaattcaaagagttatgactcaagcacacggttaagatttcaatccattacacaagtgaataacagtaagtcaatcaatattccagctcagttatcaacacatgacactaacaaaaacaaaaactaaactaaaaaaacgaaaacataaactgaaaaactgaaaaaaaaaaaaaataaaataattaaatctctccccccaaactaaagatgcacattgtccccaatgtgttaaaataaaattgtggttgagagagacttacctgagcgccacatcaataagcggttgacgcccgtaataagcgtca

SEQ ID NO: 288157 - DNA, 1334 bp, Cannabis indica
tgtattaagtgtgcttgcataagcgttaggttatttttgtatatgtagattaacatatgtaagacctactggtatgtatattatattattatgaaatctgcttgcactttccataatttctaattagtagcttttcttgctgagtcattgtgactcacgagtgcttcatggtgcaggtaaggagattaggtgctgcgtttggccatgagtcagaggtctcccagtaatgtacatatcagccgtggtgtcttggcttccgggaagcaggatcgacttcttttctttgtgtttggaaatgtaactttattttggtaataatggctttgaaatttgttctaaggaaattttataaacaagggatccccatactttagtagtatttttaaagaaaaaaaaattatatgtatattttaaattatcaaactttatttaaaccacacttttcctaagctagtaggttattgataataagattgtaaaagcacacacgtggcgttcctgagagtcagggcgttacaacatggtatcagagcgaccaaggtttaaagatcctgaagactggtttgatatgtacattggctgcgaagactcgttcgactcatggtctagtaagtgctaattgttagttgattagtggtttatttactaattattcgaattgtcttcatatttgatatgtgtaaagttattagagaagcgtcataagtttttgatataaagttgctaattatgtctatgcacgtgtggtaatgcttattagcattaattctagttagaaagattttaactatgagaaaggaatgatcacgaatgtactaggaggtgtacctggggtgatctagtaagtaaaattgagagcctgttaggctcgggataggtggtgtgggtattaatcttccactaccacagggctgagagcaaatgaatgctatgaggcaagagattacctgagtggccaggtagtagaatttacatagttggtctcgggcagcgcggtgatggaaactgacactaagctggaccgattggcaaagttttgttttgatggagtagttgctaaggctgctagaagggttaaatctaattgaaggtggaaagagtatatcgttcagaatgtagatataatggctaagcaactaaaagttgtctggttttatgctcagatggttgagctaacccttactgctgggggtgcaagaactagatcacgaaagacataatatgaaaggagattcatgaaagtaaatgtctagtgttggaacgggtaaaaggtgttaaccctaatgatcttaaaaaaaaggttaagttaccaacccaccagttatgggtcctag

SEQ ID NO: 288158 - DNA, 831 bp, Cannabis indica
ctattataaataaattataacttttaaattatactttattatactattttctaagttctgtattacaaaatatacctctatataaaataaatataatcttaagaaaaagatacatatataattaataaatttatttaagtagaactaataattttattctaaattgtaatacatgtataaatattacatttatttaaaaataattttattatgatatagtatttattattgaaaaatattatttcacatggatcaaatgcaaaaatattgagctatatataagagtatgggctactctactcatcaccaattagttttaccaattgattatgagatagaaccctatgattaaagattgtttattgttattattataacatttgatacatttttgtgtttaaatttttttagtatatttatatttagttataatctcttaattagaatataatttaattgatttctatgtatcacaattatatataagaatgaatttttgtttttttttttaaaagtaaaaattagaatgcaatattttggtatgtactataaattttgtttaatgtagtttggttaaggtatctactctctaatctcggtttgatatatattttaactttcaaccgttagatcatgtagttattgatattattattaataataatataataataataataataataataataataataataataataataatatacccatataacaatatccagacatatgtatctattaggcattatgcacatgccaataaaatcaaatattatatcatcataaaaaaaatctcatacatatttaaatccataaatatgt

SEQ ID NO: 288159 - DNA, 605 bp, Cannabis indica
aacaggaatgggaaattttctggcacggttgcccgatttaaaactcgataattaacacaaaattgccaactgccatccttcttttttcaccaataaaattgggttagagaacgcactagtgctaggctaagcaatgccaatatggagcatctctcaaaccatcttatcaatctcacccttttgaatctgagcgtatcggtaagaacgcatcgatatgagccctatgtctggcttcaaggtgatggtatggtcccgatggcattgtggaggtagcctcggtggtagctcaaaaacatctccgtattgctcgagaagctggctaataggagcacggattggtgagtagtgttgatcctcagccacggacaacgccctgacatggataatatatgccttagcccccttttctactgtgaacatcatagctttcaaagagatgggtgacttacataagctcgggtccccttgcaatgttacccacgttcccaccatttcaaatttcatcaccattgttttccaattaacttacatatttcccagtgtttccaactatttaattcccaagataacatttgcgcccccaactccaatggaaggaaatctgt

SEQ ID NO: 288160 - DNA, 621 bp, Cannabis indica
ttttatttttgtcggttcggttcagggatctcaaatcccggtgatttcggccctgtcagttaaggaattattgtgtgatggatgcctaggtttcctggccgtggtgttagacacgactcggccagactctgttcggccagaagatatcaaggtggttcgggaatttctagatgtttttcccaaagaactttcgggtttaccacctcagcgggaaattgattttataatagatttagcacctggagtagaaccccaaggctccttatagaatggctccagctgagctcaaagaattgaaaattcagctccaagggttacttgacataggatttatccggcctagtgtgtcaccctggggagctctagtattattcgtcaagaagaaggatgggtctatgtgaatgtgcatcgactatcgagagttaaataagctaatagttaagaataaatatccattacctaggattgacgatcttttcgatcaactccaggggaagacggtcttctccaagattgatctctgatcgggctatcatcagttgagaatccgagaggaggacattccgaagacagctttccgtactaggtatggacattttgaatttctagttatgttgtttg

SEQ ID NO: 288161 - DNA, 546 bp, Cannabis indica
gtaagaaagctttaacaggctagctcagagatagcttggtattaactcatggaatgttatgtcataaaattcaagtgtatatcaagtagtgttaagctcagaaatgatactctaatgaaagtttgcaccactccttagttgttatactttggtactattaagatatgctaagacttgaaaattctacttatggtgtaaaatgcaaaaagatgaggtggacaaggtattcatatttatagtttgtagtgaattaggtttaatcatcagaaactggtaaggttactatgatcagttatatttctcgtataagatgagatgaagttgctaggaatcttgtagctgaattacctagaaccttgagtatgtttgatttggtatggtactacttgggtacaagagctagtatgaaaaattataaaggggatagtatgtttttttttttttttgcgactctaaagtccattatttcggataggaaactgaaattcttctttaggttttaacgaagtctacagaagattggtattgtgtagttaaagtttagga

SEQ ID NO: 288162 - DNA, 620 bp, Cannabis indica
aatgatcttaatttattatctctttatatttgtatcttgaactcttggaaaaattggttgttgatgaaagtgatagtgaagttgtgtttatatataactatgtctagtagagttagtaacaaaactaactaaccttttgctgagctgtctgagaggggactaaagtgactctcaaggggtgaaagtaacaacaatctcttatttacgaggccatctaccaaaataaggagaatagtgcaataccaataaatctccaaatctctcgaaggatcatatagtatagtagcttttttttattattattttttttgagtaatttgtagcataaatacttaagtttaatgtttgacggtaataatacataagttatatttttagaacttccataggtacttggccattaagtgtaaagtcaatgaccacatgccaatctttaattgttcaaagtcattaaatttaattgattgtaaattataatgttttactaattcttttccttttaaagaagatattaatcgtaggaaaaatagaatttccacaacgactgcaaatctctataatatcatttgagaaaaaaaattattgtacgtaaaaagttagattttgatctgaattattag

SEQ ID NO: 288163 - DNA, 763 bp, Cannabis indica
caagctagctgtatctcctcctccacggtcgccattggcggcggcggaatcagctgtgggtttggaattgtaaaaaactgttcctttaatgatgatactattgatgaaattatcgaaaccagaagagaaaggagaagcttaccttggatttgagattgagagtaataatgggaattgggaagcgacgacggcgacggagacggcgaagggtttagggtgagacaatggtgaagcatctgcttcgtagtcagttttactgttgtttttgttttgtctcagtatcgaatcattagatactaaagacaagacagagagagacagagagacaagtttgtttgactttgacttgaaaaaagtacacaccctatttgaatgcccatttaggcctcacattactattcgtaaggccaattaactggcccaaagataacattatgggtgattttacactgcatttagcggtgttcataaaatagtcgatccaatctaatctgtacgatctaattggatgttgattgacatgtaaaagtaatcgatccaatacaatccacacatatttataacaaaattaaaaaattatatatacaaataacattttaatgtaaagaaaatagtaatttaaaagtctaatacatataatacaattatattgcaaaacttaatagataatgtatattctattcttatatatttttttttcgacattcaatttaaaataaaattaaatatctttttatatatacaatttttttttccttttgaa

SEQ ID NO: 288164 - DNA, 584 bp, Cannabis indica
acaaaatccttgatattgcgaaattcctctctatatgtctactcctctagggatagtgaattctttactttttggcaactactttttgtgttagtcaggaagtaacactagtagttaattaattattggtacaatgccaaaattgtatagaactttccatagactgaataattatctttcctgcaactttaacattcagtctcactgttagagttagagactctggatcggtttttacacttctccaaaatcacaactccacccccagagtaatcaccatcttatcagtagactttctagcactaaggcaagtctagaaacttgatttggtgtagtctaagagtattaaaaaaaaacacccttatcaactaacatatagttcctcttcttgatcttaagcttacttgattatcttccaatgttcatttcctagattaatctgataccaactcattactcccaccaacagcaagtgtctggtctaatgcatagcaaagcatatttgatatctttcactgttgatcctaagattctttctttggcttttatcttttctgaaatagttgacacttttccttagataa

SEQ ID NO: 288165 - DNA, 497 bp, Cannabis indica
ggaaaaacggactgccgttttctcagcacagtgggccaaaaagggtcctaactcgggttttaaaaatccgtttgatctcaaatcttttctaatagctcaaatatgataaaataaaaatgctcaaacaagaaaaactaaaaaatgatgaaaaatgacgatttacggtaagcttttcgaaaattgccaagaaaactagaaccttaccgaaaatgagttttacgcaacgaaattgaaaaattctttttccagcagtttgataaagtaaaatgtgaggtgtacaaacttacggaatcgaaaaatgttgaaaaatgagaaagtttggcgaaaaacactcttttaggcctaaaaatctataaattcaacaagtgaggtgccaaaaatttgtttcatgcaaatttcagtcaagacaaacctataggcacactaaatacattcaatttcacatattcaagcatatagacacataagaaaatcaaatatgcaaaaattcacatgtt

SEQ ID NO: 288166 - DNA, 747 bp, Cannabis indica
atatattaatgcaaataaagtaaagtgggaaaacaactatattatttgataagctcaagttggaaaacctaggttttagttctcattcctcgacggcttccaaatgtaaatcaacaatacaatagtgatttttcaacccctctacttttagttgtgcctaatctacaatataattgaccaccggtcgtctggttggcgtaattctcaatgataattaaactgagtctctctaattatagcttctattatatattccacactattctttcacccaagtacgtctaattaattacttgtgaaaaatagccaccttatttttcttgcctcatctaattaatggatgattttttattgtatatattatagtccgttatcagtctctgcttcaagttcaccaaatgaatagcataattgatttggttaaaagcacctggaccaacaatatcacaccaactaatatagttgattattagcaaatatctctcaattattaacaataataatgtggtaatatatgtgttgaaatatggaaaaataaacagaaaagaccatattttacctacacaagttatgctactaaatcaagattactatacatgaattttcgttgtttagcttagaatctgaaacacatacaaatttataactccggtggcgctatagtaataatccatcaaaattgtcaaaatttctaacaactcactaattaaaaaattctatcttgattcttgtaccatggtccataat

SEQ ID NO: 288167 - DNA, 591 bp, Cannabis indica
tcgaaccaagggtgttgcagagacagctggaggatccagatcaggttgtgctgaactggtaacaggatcaaaggctgaaggctccccctgcatatgtgcattacttccagacgtgtctgatgatgcaccaaacgaatcacgatgaaactcaggcagagagatgtcaggcagagaatccccaggaaaatggtgcaaaagagtggacttgatagagcgaaccatttgatacatggaggcctcaaaggcaagctgacgcttttgatccttcttatagcgtttggcaaaagattgaaactcagaaaacatttgtacctgccacctggaatccgaaagccctttgaacataggagacttgcctttactcactttggttctagagggagtggttgaagaaggcttcctattgaccatcgagagaaagctcttactcagaacctgattctgaacttgataatcatgtgttgtgagaggagggtgagcatccataagaactcgttgaactaaacttggaaatggtagcttgttacgagtgccagtagtttctgaggcttcaagtacccgttcaaaaatgagcgagggcagatcaatgga

SEQ ID NO: 288168 - DNA, 674 bp, Cannabis indica
agtagaataggcgcatgtttttaatttctaaattaaacgacattagtaagctctctttgatcgtgacctgatgtgccaactcttggtttcgcgggcggttcagactagatggacgccaggcggaacaccaggagtcagggcaacccagtagggtcaaatcagggtcagggagctcagtttctcccgcatgctaggggccgtggtagaggtcccaggggcagagctcgtggttggggtgatgataacccgccacaggctgcccaagccgatcaggaagcccagaattgggagactaggtttgctgaaatgcaagccaggatagaggagcaagatcaggagattcagagattgagacagcaggaggctcctacagtgcgtgtgccagaaattcctgtggcacccgcccctgctgctaaagccgagatagtggtagcggcaaacagaatggaacccttgtatgaaaggttccggaagcaagcacctccggtttttctgggaggcccagatgtcatgaaagccgaacagtggctaacagtgatcaccaggatactgaactttatgggtgtcaccggaaatgacagagtggtgtgtgccaccttccagttccaagaagacgctctagtctggtgggacatggtgtctaagattcatgatgtcaccaccatgacctggga

SEQ ID NO: 288169 - DNA, 589 bp, Cannabis indica
attgtttgggtagtggggaagttggcggatgttccagtggaaggagcctttgacttgcctagcttttgctcacctttcgctcattgaatagcttcttcgagcatgatgaagccttgggctcggtcaaggaaatcactcattgagtctaccatcctgttcttccttatatctttccagagttcaccgaggacttcgatgcccccaagtattgcggataactttccatcctcaattacccgtgaaactttggtcgcctccgtcatgaatctgtgtatgtatgatgttgcttaacttcgaccaagtttcccaaatgcaatgggagttggcgcgaggaggagaactgcgcatggagttctgaagagaaagttttccatgaactaaactttccaggagccaacttgaaataccatcgttgagcggcttctgacagagtggcagggaagattctgtagcatacttctcctcgtaccccttggaaatccatttgcatttcgaagtacttgagatgggaaaggggatcttctctcccggtgtacatcttccacgtcggcattttgaacttatggggcagtggcaagagattgatctc

SEQ ID NO: 288170 - DNA, 641 bp, Cannabis indica
ttctggatgcacaaccggaattccggttcctcgcagactaaactcaaaaattcatactttgctcaaatcaattccaaaccacaccaaaacttccagacctgttctaaataccctaaagaacaagtctaaagcaacaaaaccatccagaaacctcagataccaaaaatgccatgtgagctccaagctttgagttcaaaactcaaacttggctaaagctcacctacaagcatttaaacttgatttaaactacataaacatgcatttagaaactgcagaaaacatacacaaactcatgcaacaatcacaacaactaatttctcaacttttcataaaagtataatttttgaactaaaaagatccaaacttggttaaacaatctagcatgcttcaaacctactcaaatccatttaattcaagcattataatccaagaaacaacaacaacaattaacagcagcaacaacatcaaaaaccatacatgcattactcatttttcatcattttcaacaaacttaaagagagagaaattaggagctaacctagcttgattagaacaccaaaaggagatgaattcacagaaaaattcaaagatccttgctgctcaaggaggccgaaaatagagagagagagagttgagagaaa

SEQ ID NO: 288171 - DNA, 830 bp, Cannabis indica
ggggccatcccgattgttgcctgataactgttgttgtacgagaactcgatcatgggaaggtactttacccatgatccttcaaattcaagcctacatgcccgtagcatgtcttctaagatttgaatagtcctctcagattgtccatccgtctgaggatggaatgatgtgctaaactttaactgagtacccatagctcgatgtagactctcccagagtgttgatgtaaattttggatccctatctgaaacaattgactttggcacaccatgaagatgaacaatttctctaacatataactcaacatactaatcaatggagaagttcattcgaacaggtaagaagtgcgctaactttgtaaacctgtccactatgacccacacaaagtcgctctgtctcgtggttctagacaatcctaccacgaagtccatagcaatatcttcccatttccactttggaatgttcaatggctgcagcaaccctgcaggcctctgatgttcatccttcacttgctgacaggtaagacacctagcaacatactcagcaatgtcattcttcatgcctggccacgagaacatggccttgaggtcttgatacatctttgttgaccctggattaactgagtaaggagtcgtatgaggctcattcacacactctcttttgataccgtcatccataggcacacaaacatgattcataaatcgtaatattcctgtttcatccactgaatcctatctcgggatttcactaaactctggatcttgcatctgtgcttctctaagtcgctctaaaaagagtagattgcagggtaaatattagccaattgccctaca

SEQ ID NO: 288172 - DNA, 649 bp, Cannabis indica
tatagatgatttacaccgagtagaaataaaatcaccgtttcactcctcaatgtattttatccttaaaacacttagcttcctgtaaatgatatttcagtgaatatgatcactgaaataagagctcttccatttacatctattaagccaagctcgaaggaaatcatcgtttcacttctaagtacctatagaagctatagattccatatctatgtttagcgctcccactcaatcatactaccatgttcccaaaatgtacgtatcaccctgaccagaaagtaggtttaactaacaaatcaaagaacatgaataacactcctgagattgaacctaagcatatcaggattaagatcttttgatctaagatcaactagtgatattgactcagaaagatacaacagtaaaattataatatcttaacaaagatcaatatcggtccagtccaatgtatactccatacattcaaaactagtatactttgccaatgttctggaaagaacataacacttatggaaagtgtaagtacacttcatcgctgattatcacatcaatgtaaatctaaagcactgatgaacagggacttgttttctaaagcatataatcacaatcacattccactcgtgttgtacatcactgtaattataaatagact

SEQ ID NO: 288173 - DNA, 479 bp, Cannabis indica
gtaaaggaaaggtgcgctctctaggtaggacgaggacgcaaggaggcaagtcgcacaaatttaatctcgtaaaggtggtgagatcagatttggtgactcgcaaaaccaagtcctcgcatgagaagggctcatccaattgagtattatccactgaatcggtcccacttccctcagcgtcctcttcctcatctgactcgcagtctggagccatccagtcttcatccatctcctcgacttcgacaccaggagcgtgcctggagtgaataaggtgttcacgagctgacacagtagactcgctgtctcgaatctcgatagttcctggttcagcgagctcctacaccatcctctcgatgtctgcagaggatagtgagcccaacttcgtgtctccggtagtagggatctcctcttctgagatagaagttgaaatgaagctatcctcctgatggtcctggtcgccgttgttggatatattttaccag

SEQ ID NO: 288174 - DNA, 781 bp, Cannabis indica
tggttcgaagccaacatacataactaatgtaatctaacaggttatactaatcttacctggattccgaattcaggtgtgccggtcaacctgactggaacttagctgagcggcggattacaggctcctaaaactaggaactaaaagtttccctatcgataaaaggcatggcaataccccttaaaacattaaatcaaggaaatctagggtttcagaattttccccaaccggtagactggttgcccaaccggaattccggtttgtggaaatattcagaaccccatccggaattccggatgcacaaccggaattccggttcctcgcaggcagcaaacataaaaatccatatcttgctcaaatcaactccaaatcaaatgaaaccttccagacctgttctatatatcccctagaacatttctaaagcttcaaaaccacccagattgcacagaaatgaaaaacaccattaaagctcaagctttgagttctaaactcaaacttgagcaaacctagctaacatgcaatcaaaccagcttgaatctacttaaacatgcttaaaatagcttctgaaaacaataacaaacatcaacaacatcacagcaacagattcaaatcatttctctttgaaaaccatatttttgagctaaaaattccaaacttgagcaaagcaattaacattcattactaacaacctaaataacttcaaattaacatgcttaaatctcagaaacaacaacaagatcacagcagcaacaatatcaaaaattcatgcatgcatcaactattt

SEQ ID NO: 288175 - DNA, 616 bp, Cannabis indica
agcaggatacctcactggcatgctcagagaaagatattcagcaatccgcgcagagcgaccaacacttagcaaattcagctttcgcatcgtgagtcaacaacacaatacctataactcagggatcaatttacgtggatatggcatacacacgatcccgctatcagtgtattcagcctcaatcccacgatccatgcattcagcattgatctcacgatctttctatttatacgcattgtaacaagaggggaaactcttcctccccaagcctcctagccctataaatagtgatgtatgttcactgggcggtcgaaacgcagttgagctaagactataccttaaatatattatctaagaattatatattcagagatactgctgtaagatatataagaaaaggaatctttctccttgatcttagtcaatacaaataacaatgattagactattaccgaactgcttggggctgaacctctataaaattcctgtgtctttttatttctttatcgtatatttgttattataaatcatttatctcttggaaaaacagactcattgtcgttggctaaaagcaaagtcaacatttttgtgtattatatttagaatttttcattctaaa

SEQ ID NO: 288176 - DNA, 500 bp, Cannabis indica
ataaaatattcatttatcagaatcaataatattattttatttccttaattagaaatattctaatatggtttcttaaatattatattctcaaccaaagaaaagtaaacaatatatggtgccaatcctcctaaaatattaacggttttaactaacttctcaactaaaatcagaaagttagtaagaattggtacacaagctatatctataaatagctcaagtcaaaacaaagatccagatcgagatctttctttggagcgttgttcttgtaaggactttcgtatactcttgcttaggggtgttcattggatcacatccaatggatttggacccatccaatccaatccaattatttattggatattggatttttccatccgatccaatccaattgaattgagtcatccgatccgatccgatccaatggatgtattggattagatcggttccatcaattggatgctttaattggtttttttattagattggattggatccatcca

SEQ ID NO: 288177 - DNA, 660 bp, Cannabis indica
tttaggttctactagttttgttattctttttggaagttttcagggctgtaggtttagatgaggtttaggtatgttatcttagttgaattaggtctgttggtgtatgtttaaattgaattcatggctgttggaattggtttgtgagtgaggaagctaaaagaatttagttttcttcacttgagtgtatgattttaagctagagattgaactactgtgttttgcagcttgggttatgccatatttatgttattatactgttctggaaagtttggttaggtttggaggagttttggttcgaatttggtgaagaggaacttttgttcctggtctgccagaaccggtcgaccggattggttctggtgtaccagaaccggtcgaccggttgcttgcaggggaaatttttcgggtttgctttatgttcagttttgacccggggagttgtgtactatctgttttaaattaaatatgggatgcttgacctaatttggggttgttgggagttaggttatgtttgatttctaaactagggttttaatccggaattttgagttaaggtatttattgtgtttcaattgtcgtgacataggaccgggattgcctagcttgttcttccactcaggtcggccatactcttgacttctgaattaaggtaagaaaagt

SEQ ID NO: 288178 - DNA, 573 bp, Cannabis indica
taatttaataatttttatataaaaaaaattaaccacacaaattaattggggcattattggatatgattaatatagcaatagtaattttaagtgcggcatattactattcatgcaaattaattattacttgtgtgtcaaataatacaatgcatgcagcatgcttgaaattgaaatagtaatttaagtactattcaagaaacaaattctttatatcaatacaaaaaaggagagttaataatttcatatgagtaatacgttaaaaatgtgtaattatctatatcgatgattataacttatttgttccaaaaaataaaaatctatcatattacacatttcatatatagacaacgtataatattgtggcaatcatcatcttcaattattacctctatataggtggtgcgttggtcatgactcattaatatatatttgtaatctacctatgacgcactcacagtagatattaattaatatcaacaccaagaaagttaattaaattgaaaatttatttatataaacaattaaatataacaattttgtgtggattgatcatatataactttataaattggg

SEQ ID NO: 288179 - DNA, 541 bp, Cannabis indica
agtttcatggatgccttctctggttataaccaaatcttaatgcatcccaatgatcaagaaaaaacatcattcataactgagcgagggactttttgctacaaagtcatgccgttcggactaaagaatgcaggggccacgtaccaaaggctggtcaatcgaatgtttgccgacatgcttggaaagacgatggaagtttacattgacgacatgcttgtcaaatctttagcagcagagaatcacctcgatcacctcaagcaagcattccaggtattagaaaaatacaatatgaaacttaatcctactaaatgctcttttggtgtctcttcaggaaaattcttaggttacctcgtcacaaaaagagggatcgaagcaaatccagaccagataagatcaatccaaaatatacaatctccaaagtcaatcaaagatattcaacgtctcaacggaaggatagcagcgctcagccgtttcatttcaaagtcatccgaccgctgccacttattcttttcaactcttagaaagaccaaagactttgtgtgga

SEQ ID NO: 288180 - DNA, 883 bp, Cannabis indica
cccaatagaccttggccttaaggaatacaaccagcttttggctttatccttgagtgagaaaggaaagaacttcaatctcaccaagttaatgatgtcagcttggttgttgaatgtggccaccacctcttcgaaggcctgaatatgcacatatggactctcattttccataccatgaaaggttggtaaaagttgaatcatgccaggtttgaaatcgaagttgggcatattcatgggatacattatgcatgaaggtgtggccgtacgcgtaggatgtagataatcctgtagcgttcttggttggatttcctgttgttgagccatcattggaagtgcaggaagtatgggtgatggtggtgaatgagaacgagtggaagaagacgatttaggagagttttctaaaatttcaatttgttgttttacaaatctccctaatttgtctctatttcgtgacattcactttttttttttgtgtattttcacttgttaaataatgtaaattacaactatgtaataatgcaagggtattcacacaagatattcccaggccgattgggaaggttgccaaggtaccgcttcgtcccacacttttactagaactccccggggttgctagaaagtattgagggtactctaccacaaacctttaaagccaatctttcttagacagaataatctcagtttgtaccacttttaccattacacaatttttctcaacactaaaaaaaattatttttttaagttaaaggactaatattaatttaaaaaaataaaaataataaagagaaaaaaaaaagtctaatcctaaatctgaaagtgttcgaaaaaaaaataaagtgtaaaacaaaaactaaaaaaaataatatatatgatatataaaaaaaaa

SEQ ID NO: 288181 - DNA, 523 bp, Cannabis indica
ttctaaaacgataaataaacacacataaagttaagaaaaccttacattggttgcagcagaataatgtctccttccactcagatctctaacccttgtatcctttctgtcgcagagtattatcaagatctgagcccgaatgtccttctctttgtgtgtgatccttcacagtcttccaatctatgattgaggtaccacttgctgtgtgtgggcactactctatcactagagggttcgaaattgtgaagaggaaaagagagagaggtagggtcggctatagagagagaaagtggaaggctcagtttttctgaaaaggcaatctttgattttctaacaaaaagcttgaaaaagttgttattttgactgagccacactttctatttataggcaactactaggtttaggttagtaattatttggcattaaaataattaaaatattaattggaaaaactcatccaagtagccggccataggtgttaatgggcctcccttggattttgcagttttcacaatttttatttcta

SEQ ID NO: 288182 - DNA, 611 bp, Cannabis indica
gattgttggatttaatgttgactttttttctaattttagtaaaaaagtttaacatggatgaaagttcagaggatataatttagtacatgtcaaagttcgagagacatgatttggtagatatcaaagtttgagagcatgatttagtacataaacaatctttgaaatagtaaaattgaataaaatttgacaaaaattcttaaatccaacaatttcaatagttcagggagtatttttaacgacctaaaaagtcagggacatgatttaatacatgtcaaagtttaggggcaaagttcctataatatatatataaatatataattcttctaatgtggggaatttaaaagagactctatttataaggcatttaatatggatagaacctacatgattgagtgggtagtaatatgagggtgcacatttagttttgtgggtttggttatagagattagtataattcacacttcttagacagtgtatttttaaacccacttctttttatgcttggaacccacatggagttcttgatcaaagaggtaagttctgaatcctttgaattgaggtggatttggtttggaggaatgaaaatataagaataggaatgagaatgggaa

SEQ ID NO: 288183 - DNA, 381 bp, Cannabis indica
ggcccaaagctgtaatccaattgagtctgaagatgatgcagtctccacctcatcagaagcagacagcacaggtcgtcaacatacttatgaagaaatgtttgcacaatgggagtacatgactaaacagatcagtgccctaaagaactctctagagcaagtggagactgaaaaaggaaagttagaagacactgtcaaaaatctcaaccgacttcttgatgaaaaggagaatgagatctataaactcacagatgatctaattcgaaccaagcaagctttacagttcattcccccaggcactgctgctatcaatcaaaccctacagcttcagaagccctatggtgatcgaacttcattaggatataagatgctatataaacaagg

SEQ ID NO: 288184 - DNA, 904 bp, Cannabis indica
ataattatttatactgttattatagaattctaaaatgcaatttatgttatttagtagttttcataattttgcattttcggtgcccggtaacatggaactcggtgtttggctcagtaaaatcacaacttagtatgttagtagtgtgggacgatttattagacattgggaatgtcgggaatggccgggaatttagaaattctcaaaatacccctttagtgcgctttatgttattttagtgtggaggggcaaaatggtctttttgccccaatgatattttgtcctttagtggactttatttggttaaattaaatgttatttaatgtgttttattatgttttgttggctgaaataaagagtattatttttgtatgttttctattttcattcaaagtttcaaaattagaaaaaattggaaaaaactctctctcttttcggccctctttgagcagcaagaaaccagccaattccttggtgattcaagctctccttagcaagatttagtgttcataagttgttggtatgttttctacatctttcctttatgttttcttgaatttttgaagagaaatggtaggttgcatgcttagttttgagttgttcttgctgctggatttttgatgttatttctgaagttaaagcatgataaattgaggttaattaagttgcttgtgatgcttgatagttaggttgtttagagctgtggagattttagctcaaaagtttagttttcaaagagaatttttgaaattggtggctgtagttaatgcatgagtttgagtttgttttctgcagtgttattatgcatgattatgtagttttaatctagttttgaggcttgtaagtgagctttagccaagtttgagtttgaactcaaagcttggagctcacatggtgattttttaat

SEQ ID NO: 288185 - DNA, 791 bp, Cannabis indica
aattacaaaattttcaaggaaaagctctctctcttttcctctctctattcggcccctttgagcagcaagaaaaaggggattttctcttgtgattctagtgattttcagcaagtctagtgtgatccttgaagaggtatttcttgtctagtttttcttcctttgttttcttgaaaaatgatgaaaaagatgagtaatgcatgtttaattttgatgatgttgttgctgcagtagttctaggttggtttctatgtttaaaatgttgaattaaatatgtttagttaggttgaaatgcatgctagttgttcttgctttagttggataattttcttgttaaaaagctatggtttttcaaagtgaaattgagattttggtggctgtgattattgcatgagtttgttttggttttctgcagctttagtatgcatgtttaggtgtttgaatcatggtttgaatcttgttggtgagctttagccaagtttgagtttgaaactcaaagcttggagctcacatggcactttttgtttctgtgcattctgggtagttttattgctttagaaatgttctataggatgtttagaataggtctggaaggtttgagtttaattggatttgatttggtgaagttatgaatttttgaattctgcctgcgaggaaccggaattccggttgtgcatccggaattctggatgggttttgaaaattcccagaaccggaattccggttggacaaccggtctgccgattgggtgattttcagaaaccctagttttctcgtttttatgttatttgggg

SEQ ID NO: 288186 - DNA, 816 bp, Cannabis indica
attaagcatgttagtcatcaactatttgactttggtattagtttttaactttattctttaatttttattatttcagaagaatccactcgaacggcgctagagctactaccagtaacacatgtgcaggtctactttccacatacatatgtacacccttcattcactgtatattttgcaataagattgatcacaagaagtttcttactgtgatctatactagctatattatatatatttatatatggttgtccctgtcaatttcactttgttactaaaaataatgtggaagtaacctttgttattattgaacaaatattttatttcttcttcataaagtataatttttaaaattaaacattatatttttatgtttctagcatttagattttaagttttactttattatgtttgattaatgtatgagatatatgatatatatttggcatattcttagcatattttcgtatattatttttttttttatttgtatgatatataaaaagtaataagtatttctgatacttttcataaaaactactatatatggggtttaaggcccagcccatttacatattggacttatagaataaggcaaattttatattaacaaattacaaatttaatggtttttatacaatttgtgccaaagtattttttttttcaaaaaagctattttataggaaaaatttaagaaaaaatttaaaaatttaggaaaactagataagaataaccaagtatctttgggtaattaaccagagtggtaaccagttaccctaaaaggtaaccagataccttaaaaggaggaaattacactct

SEQ ID NO: 288187 - DNA, 585 bp, Cannabis indica
cctaattagcctttttattattattttttcagtaagaattgttcttacttctactcatagtaatgtatacttattgatcgatttgatgattttttttaaataagatagttcaatgttttaatcacttatgcatataattaaatatgtgaaattggttgttttatgatatctagcaaatttattctctacaaaaaaattatatatttgaacttcatcaatttgaaaatgaagaacactagatatatgtgcatgatatctaaaatgactagagagaaatatttgcattttagtctagtatattattttatgtatttcttttcaagtaagcttagtttttgaagtaagaaattatagtaaaattcgaaaaacaatatggatttgggttcaaatatattattattattattattattattattattatgtatttaattagatacatatatatttctaatatatatttataatatgattaattttttcatcaattacatatataatacaatttaatttgaaatcaatgtaacttgtttttacatatgaaaacgatttgttggataagtaaaaaagaaaaaaaataaagaa

SEQ ID NO: 288188 - DNA, 587 bp, Cannabis indica
atataaatcctcaatcttagaaatctcctacttatatttgcttacttcaggcaacttaaacttagagttagattagtagtggcggtccaagcttgaatagttactcatgtatatttggtataaattttaagtctttgactttaaattttaaatttcaaatagaaatttaaaattttattttcctagaatacattggacaatatagtatgactttcacaagttgcttaatttccatattctgtcaatggattcatactatatgtttatgtatgtaatatgagtttagtattttgtgagcaagatccacttggactattctatgaactctctgttataactaaacctttttcatcaaaagaccataaccacattttagtatctatggcattttcatcttgttcatagtagttttgacaaggtcatttttagcaaagagtaaatatgcctatatccacttgaaagtaagttcatgtatattcgaatatggatgtacattcaggggtggatatgagttatcgtaatattcttaatacgattactctagattttacgttatacaaaaaaaatttgaaatgtttaagaaattt

SEQ ID NO: 288189 - DNA, 553 bp, Cannabis indica
tattattattattatattctcttattattatctttctatatattagctattataataatattattttagtaatattgggaagccataaaatatggtaatatgtattaaattatatattcataattatctatatatgttatgattgttattttaattttttttttggtaacggtgttaaacactacaataataatatatatattttttgaatagaccacaataatattattattaattaattagaagttaaaatattagttttatatatataaaataaactaataaataattaaaatataaatatctcaattattattattattattatgaagaccgcgcaacatgcagttatatttactaatatattataaatgttaaaatataaaaacttgaggagaatagaatttcttctaagtatgatatgggtttgcgagtgtttatgcgctttattcttattaataatgaataaaatatattttaaatattttgaataaaaaattaaatattatatgaatacttaaaaaaataaaatatattaatataattatttttt

SEQ ID NO: 288190 - DNA, 544 bp, Cannabis indica
ccatttcttgccaactttgctcaagtttcctaaagagaaaaaatcctctgaccaagagaataccttcgaacactctgcaaatttcccagtccaccttcgttcactactgtcaatccctcttatctttgtttgatctacagcagaacccccagtctcaacacttcactgtaagtttcttgcaccccttgctttactgttaatgtacatggcatgctttacttatctgttcgttttttctgggtttggtatttgaagtttctgggaatgcactcttttagatttttcacgtaacaggtctagattcaccatttctggtgttaggactactcttgtcacgtatttgttattattttttgcaaaggaccatacgttcttcgtatactggtcgtctagggcatagaggagactgctttttctcgattttctgccctttctttttcttttatgcgcaatgtcgtcttctgtgaatttattgcacccgacttttgtccaggaaatccttctagggttttctgtttgacagatgtccggagggggcctcttt

SEQ ID NO: 288191 - DNA, 1082 bp, Cannabis indica
tcatttcggttacttcccatttcttgccaactttgctcgaatttcctagagagaaaattctcagacctagaacgaagccttcaaacactttgcgattttcccagttcttctttgctcgttgctatcagtccctctcgtcttcactcgacttgtatcaggacccccagtttaactttcatcgtaagttttttgcatcctttgctctgttattgaatggcatattattacttgttctgtttgttcttttctgggtttgcattcgagatttctgggcatgcaagtgtttaagttcttcatgtagtctgtttgaatttactgctctagtggtaggattgccattgtcatgcctctgttgttgttgtgtattttctttgtagaaggccatacgttcttcgtttaatggttgcttagggcatagaacagaatcttttctttctgttttctttatcgcgtaaagccgtcttctgtgaatttactgcacccgacacttgtccagggaatccttctagggtttcctgtgtgacacgtgtccggagggggcctctttccagcggttaggggacccccattccctttttcttgatttagggtttggtacggggcctaactgctggaattttacccttttttacagaatagaaaaatgtctgcttccggctcaaagtcctcaaagaaaagtggtaagcgcatggctaccctcgaagaggtctccctgggacccgttgcccaggaggggtataagtcccgggcgaccggatgggaagcggctgagcttcattcgaccttgacctgtccccaccaactggagaacattgtggaggttgctggaatcaagccttccacttcaggaacctaccaccggccacctcgcgacgcggagacgcccaaccacaactacggcggcttcggagcctggagccaaacgcacctgatggccggtgccatgctccctcttcaggattactttgttaattttctagtttttgtcggccttgcgccataccaactcattccccaagcttaccgcctgctttcaggcttatttattttttatgccgcccgaggatggggatctccccgcc

SEQ ID NO: 288192 - DNA, 559 bp, Cannabis indica
aaaaaggaagagagactaataaagtagttcaatgatcaaggaaaacgttagagaagggataaaataaggagtcatttataattactattatcatatataaaaaacaaatcatctctacttttatttgagtaggtacgtatataagcatcaattatagttgtaacctgaatttattcgacactttagttactttttaatacaaatatgctattttttttcctccaaatattatgattttttaaaatatttttatggaatgattgcctaaattgttgtaaagaaataaattataattttcaaaaacacaatattttgcttttttaataaaacccccatttaaaattttgccatagcctaaagctatagagagcaaaaaaatttcttcctataatttttgaaaattttagatagaaatataaaaaagggaaggttggtatttaatttcgttatatttataggagctagagtgacaataataattaatgactactttttattaattaatttttgtgtggatttactattttttatttttatttttatttaaaatttaaataaa

SEQ ID NO: 288193 - DNA, 750 bp, Cannabis indica
cttttatggttcatattctggattaggttcatctcttagttaatatttagttaataaatgataaaatgaaatttagatgcttatgggcgatatctaatgaaactgtcgctggaattgagatctcattcaaagagaaggataccaaatatctggagtttctttttgtattatatggatgatctgatccgcgaggaccatgattgggaattgcttgatcgtctttcttcgaggaagagacaaaacataatcaacttgaattcggcacagctatttgaaatcttagtgaaagactgaatttgttatctcatgtttgcctagaagataaaagttagtgtggaaaactagataatctcataatcaagtcaacttggttgaaaggagtaatggaggaccaagcaccataggagagattagcgaagaaaatacaatagagtgatacaagaaagtgactacaaaagaaaccaacagcagttacctaggaaaatgggaaggcgtgacaagtgcaatgaatacatggataaaggatatcaagaagtgaatgttagacaaaaaagtggtcgaaatggatcattaaaatatttatatatagaagacttttttaagagcttacatgtttatttccaagtgtcatggaacaagtgtctatcgatgagtgagtaacatctatgaaattgaaagaatgacactgtagccttacagtagaaaatcaagtagagaagtaagatttttatacgtaataacatttaacta

SEQ ID NO: 288194 - DNA, 792 bp, Cannabis indica
aatagactttcatattgggctttgattgagtaattatcctaaatcgtaaaaataccataattttaccttgacacttactataatttcaacaatgtttagaaatctgtcaatactattctaagcaattatctctattcactattagtaaaaataaataaaatacttgttctcacacaaattgtatgacaaataaaatttaaaatatatgtatattttaccgggtattacaactatactcaaatgcttatctatggaaaagaatgttaataactctttggcaatacacaaattgtttactttgctgtgttttttcaaatgtgcaatagaattggttagaccattttggtacaataagaagactaagacaaagaagaataaagtattttatttgaatgataaaatcgatgacgatttagttcatcatatgatcattgaagttctttatttcgaggtgagctttcatagaatccaagaaaaatagaagaaaaaaaaaggtgttttaaaatatgaatgatttgatggtacagatgataaaaagctcataaaaatattagactattttcaaatataatatatattggttagttttgtaaatattattactcaaatttcaaattattttatgaatttcttagcttgatcatcgtttcttgtaatgtttgtaatcatgaaattgtgtcattaattatttactaggttacaactatagtctaatgcttaaatgtggatgagatttgtaagaattcttcggtaatatacggttttgatacaataagaagaataagaagaaaa

SEQ ID NO: 288195 - DNA, 702 bp, Cannabis indica
atttatcgcttattaaaagactcattgtcgttggctaaaagcgaagtcaacattttggtgctttcattgagagaagaatcacagatcgctctttcaacacgatggtgcaaactcgcagaggcctgtcagacccagcaaactcacagacgctggatccgatgttgcaggacccagggagttcgacggttccacccgctgtcaatcctggacagacgggaagcgtggtgaatgatggaacaactcctgttactgaaactgcgcctggtgtgcaagagaccggaaataacggttccgcacacagccaggatgttcataacatgactgttccaccaggcatcagcgcccagacaaccatcggagatgcaaccgaattgcaaaatctccgtgctgcgcttggactcatgcagggccacaacaataccctgcatcacgatcaggaggagttacgtgccgcagtaaacctcgcgtttgacgaacagaggcgtatgttcgccgagtggagagataaagagatggaggcattaagggctcaccatgcagaaatcgaagatcgtagtcggcaagctactgtgctgatacggagagcctatcagactgtaggccagcaggcgccgagcgtcattccccttggagaagccgaggatgacccaacggtgaatgcttcccagacaaacaacggtcagccgtccaatccccggtcac

SEQ ID NO: 288196 - DNA, 499 bp, Cannabis indica
aaccttcgttttgttgaactggtcagaagtcgggatcgatattaagaacatgtgaaatgatagaaggatcaattctaaccatatcctcatgtgaccaggaaaaaacgtctacgtttgctcttagaaattttatcaattctgattttacttcgagcaacaaaccttttccgatctttagctttctggtcgggatatctcgatcgatctcaatctcttctaattcttcgataggtccaaaattgctgcttgggtccccaagttgaggatccagatctttaatccccggcttgggaagttccctacttgggaatttttttcccttgtctgtgctctggctggaggatacttccttcttagccttggccactacaaggttgtaacattctcgtgcagactgctggtttcctcttagacaccctaccccattctttgttgggaacttcaggcacaagtgaaatattgatgtgacagcctttaagtcatacaaggccggccggcc

SEQ ID NO: 288197 - DNA, 618 bp, Cannabis indica
aggagtgaaggaatactcctcgaagtctagtacaaccaatggggccagtgcattggggacactgcaaatgaactggttagccagattggcttgtatgcaagacgaaatcttccactggcatacaatgattggagaaaagttccaatagaatttaaaaatctattatgggagtacatcaaggtaatgctaatagctaagattaatttgcatatgtagttgaatatttaatgtcattctaactattattgctaattcttgcagtcaatgctcaagttaggcccaaaagctaagcattctaccttaaaaactgctggacgaagatggaaagactggaaagcattcctaacaagaaacctaattttcaaatacaaagataaagttccagcaatgcttgatcgtccttcagatgcttatgcttcatgttacaagcccgaaggctggaaagaatttgttgccaaaagatgtagtcctgaatgggaaaaaaagagaaagaaaatgcaagatatcaggagtcaaaatacatacaatcaccatgcgggccgaggtgatgttaagaaagttgaagaaaagttggagaagagttgggccaccagctgactatatatgacagggcagact

SEQ ID NO: 288198 - DNA, 828 bp, Cannabis indica
gtattgggtttgtctaaacttttggtgatttcaatttgggttgtcgttgatcataatttgccaagggggagattgtaagtgtcgtgtttctgtgtggcaaattagatattactgttgtttggtaattctgaaattgcatttgcttttctaacatcttatctgtagttagttgcatctgtcttcactaaattcattttagtgccatgtcagctttctgcaaggttgttagtttgtgccagctgtacattgctggttgtttagttagttaggtttattatcttcagcatataaatactgtgagatctgtcatactaactaactctcttctgttagaatcttctattggattcttgctctgctagggcttctttttctgtgtttgtttcttgaatgtgcagattaatatttcgaagatcttcttgtggtcgaagatggagattgaatctgcctgatctgaagagagttcagatcaatcagctgaatgagattcagctgtctgaatattcagagttcgtgtttacagagatcttttggtgattagatcttgatacttgagtgtgttcaagtattaggtaacattgtataaaagtcaatttagattacattgtttgatttgaagaatcagaactggtatttgtaattgaattgattttatagtggatgttactttacccggttcaagggaacccaagcactactcggttggaatgcgtttccaatgcggaggaagcttgtaaattctgtgttctttgatttactcttcgtttaattcacagatataatcaatttaggtaatttgtacttaatcaatagtaattaggactttca

SEQ ID NO: 288199 - DNA, 712 bp, Cannabis indica
gaaggagaattgaaaataaaaatcaaccacatctgatacagattatgaaaacaacaaggaacagattcacacatcatacacaaaacaactagacaaattcagaatcaccaaaccagagagagagagagagagaattacctctggcaacgctaccaccaatcaagaaacccagcacttgcagatcgaagaagacagtcctcacaacaatggcagcagattaatcttcactttggctaggggttaggggtttgttggggcttgggccatggctgggagtagaagagagataatttgttgatatgccaaagtagtggaatggaattataattccaccaaatgaaaaatggaaagcaattccattagttttggagaatagcattactatggaaatcttttccaaaagtgttattttccaaccaaacaaaagaattaggcccattagtattccattccattcttttctggcccattaccatcaaccaaacgggccctaagtttcttctccaaattgctcttcttcttcctcttgattttttgccaatctcaaaattaaaaatgctaaattaaaaccctaaaataaaaccctctttcttctttttcttctttttctttttcttctttttcttcatttctcttcttttcttcactgtcagccgccctcttttttccttaattctttcacgcctcatcttctctcatcatatatgcatat

SEQ ID NO: 288200 - DNA, 511 bp, Cannabis indica
tgagaatgcaaaaatctacaaggggaacaaagaagtggcatgaccaaggcttagtaaggaaggagtttcaacctgggcagcaagtgttattatttaattcaaggttgaagttgtttcccggaaagttgaagtcaaggtggtcaggaccatttaccgtggtcaaggtatttccctatggagctgtggagttaaaaggtgaaggtcgagcaactaatggacagcgtttaaagctctacttgggaggtcaatttgaccaagccaagtccgccattattctggcgcctctctagacacagctcagtgtccgactatataacgataaagacagcgctcttgggaggcaacccaagtattttctttaatttttcaaactttttgattatgtttttagtttatgctttattatttttagtattttcaatttttagctaagtaccagacattattttttccagttgaatcgtgaaaaacgtgaaaaaaaaaatatattttcgggactgggaacccagtg

SEQ ID NO: 288201 - DNA, 554 bp, Cannabis indica
gtcaaaaatcatgcggcgtcacaaccatcaactgggtggttacgttggttgattgaggatgtttgaaagctgtccgaaccgacttcactgtcggagtgatgtattgctgacactcatttgaaatcatccggtgtcaccaccctccgatgggatttcggcgggcgttcacgttgggtgattgaggatgtttgaaagccatcttgaccgacttcattgtcagaaggatgggggacactcgtctaaaatcatgcggcgtcacaaccatcaactgggtggttacgttggtttattgaggatgtttgaagctgtccgaaccgacttcactgtcggagtgatgtattgctgacactcatttgaaatcttctagtgtcatcaccctcagatgggatttcggcgtgcactcacgtttggtgattgaggatgtttgaaagacatcttgaccgacttcattgtcagaagaatgggggacactctttaaaaatcatgcggcgtcacaaccatcaattgggtggttacgttggttgattaaatatttttgaaagctgtccgaaccg

SEQ ID NO: 288202 - DNA, 590 bp, Cannabis indica
gaagtacaatgttgatgaaaaaagccaagctgtcattcttctcagatcattgccaactgcataccaggaattgaaggctgagaccaaatatggaagagatactctcacccttgatgatgttcttggagccttgaaatccaaagaacaagaaatggccaaagaaaaagacaatgtcaaggatgaagcttacctggccagaggaagagacaataacaggggtagagatcactacaagaagaatcatttcaaaggccaacacagatctcagtcaagatcaaagtccagggcaaaatatcacaaggacagaaaatgttatttctgtgggaaagtaggccacattaagaggttctgcattaagtttaagaataaactcaaagaagatagaaaaaagaagcgtgtttctgcttcaaatgtagaagactcagatcattgctcctctgatggtgacttgtacatggtttcagatcaaagaatcacaaatgaatggattcttaattctggatgcacataccatatgtgtcctactcttgaaaattttactgattataggaaagtgaatgctggtaggtactaatggggaatgacaattc

SEQ ID NO: 288203 - DNA, 482 bp, Cannabis indica
gaaaacactgttcaggtggaacagggagaagacactgttcaggtggaacagggagaaaacactgttcaggtggaacagggagagaacactgttcaggtggaacagggagagaatactgttcaagtggaacagggagaaatcattgttcagttagaacaaggaaacctaagggaaagtcaagcagaggagttggaagactaccagttgactagagacaaagttaaaagagcacctagacagaatcctaagtatagcttcaacatttggaatgaagacattgcctatgcactgttaagtgctttgcaaggacagaagaataaaccagaaagttgtggagaagctatgaagagcaaaaatgctaagaagtggaactgtactatggatgaagagacagactctttgagtaaagagaagacttgggtttgtgttccaaaacccaagggaaggagtgttgtgaaacatatgtggccttttagacataa

SEQ ID NO: 288204 - DNA, 596 bp, Cannabis indica
ctatggaaatcatgccggcgagaaaagtctttctaagaaaattctaaggcaaggttatttctggcctatgatgattgaagattcaaaggactatgttaagaaatgtgacaaatgccagagattttcaaagatacctcgagctccacctaatgagttaactcagatgtagagtctgtggccttttgccatttgggaaattgacctaatcagacaattacccaagggcaaaggaggagtgcagtatgcagtggtagcggttgattacttcactaagtggacagaagccgaaccactcacaaccattacatcaaagaaagttcaagacttcattgtgaagaacataatctgccggttcggattgccgtacaaaatagtttcaaataatggcaagcaattcgacagccaaaccttcactgacttttgtgcaaaccacggtatcatcaaaagtttctccgcagtggcacatcctcaagcaaatggtcaagttgaagcagtcaacaagaccatgaaggatacactgaagaaaaaattcaaagatgccaaggaaattggccagagaactcctgaagttctatggtcatatcggacaactgaga

SEQ ID NO: 288205 - DNA, 612 bp, Cannabis indica
caaagcttgagctttaatggtgatttttgtagttgtgctttctgggtggttttgaagctttagaaatgtcttgggggttatatagaacaggtctggaagttttggtatgatttggggtttatttgagcaagttatgaaattttgagtttgctgcctgcgaggaactggaattccggttgtgcatccggaattctggatggggttctgaattttcccagaaccagaatttcggttgggcaaccgatctaccggttgggaaaaattcaggaaccctagttttcctcgattttgtgtttttaggggtattgccatgctttttatcgatagggaaacttttagttcctagtttaagtccccgggaagtgatttagcgtgtcacttatagtgttgtgatttttatggtttaggagcctgtaatccgccgcgcagttaagttccagtcaggttgaccggcacacctgaattcggaatccaggtaagattagtataacagtatgcatatgtagattacgtgtttagcgtgcatgtaggaagcctgttagattacattagttatgaatgttggcttcgaaccatccaatcctgtcacatcggtacaggctggagtatgac

SEQ ID NO: 288206 - DNA, 508 bp, Cannabis indica
gtttgggtttgagttcgggtcggagttcgagtactggtatgagtttgggttcgggtccggatttctgtctaggtccagatcaggcttcggttgggggttcgcctcctaggaggtcttggtcttggttcggtccgagtcccaagttccaataccgatttgagtttggattcaattcttggtctaagtccttggttctgatcctggtctgggttcgagttttggtccgggtccgggtctagctttgggtctgattctaggtgtgggtttgagttcaggtcggagtctgcgtctgggtttgtgtgttggtgtggaccccgatctcggtctaggttcgggttcaggtccaagttcaggtcccgagtgcgggtccaagttttggtgagggtcaggatctcggcccagatctaggtcgagcatttcgatcccagcctgggtaattgtccgtgtccaggttcgtatctaggtccagcattcttgttcaggttctaattttgggtcccaggtctag

SEQ ID NO: 288207 - DNA, 513 bp, Cannabis indica
aatcacacacataaatattttcaatactcatcacactaaacactataaaacttgttctaaaattacattttaagtttttctttctttcttttgttttcatgtagtttttgatgagaaaagacagacctatacacatggaaacaacaccaaaacgacagtccttccctcggcgcttcatctcattaagcaaagttgcaacgcagcgggcacctgtagcgcctaaaggatggccaaaggcaatggcgcctccattgacattcactttctcgggatcaagctcgagtttcttaatgcagtatacatattgagatgcaaatgcctgaaaaaggagcaaatgagattttctagctataaagtagtgctaattaagatatagttattttgtccaaaaacaaaaacaaagaagaagaagaaatcccttgcctcattaatttcgaataaatcgatgttatcgagttcaagaccagcagacttcactgcagctgggattgcaactgatggaccaatgcccat

SEQ ID NO: 288208 - DNA, 774 bp, Cannabis indica
atgtcatatagtgaatttcataatttttcatttccggtgcctagtaacatagaactcggtgttcggctcagtaagatcacaacttagtatgttagtattgtgggacagttatttagacattgggaatgtcgggattggccgggaatttagaatttcccaaaataccctttagtgccctttatgttatttttgggtggaggggcaaaatggtcattttaccccaatgttagtttgtcctttagtggacttagtgttgtgaaaatatttgatttattattgttatattggctgaagtgagtaattaaaactctttattttcattttacaaaattggaaaagttagaaaaaattgtgaaaagctctctctctttctctctctattcggccctccttgagcagcaaggaagtggattttttcttggtgattcaagctctttttagcaagatttagtgttcacaagttgttggtatggtttcttcatctttcctttatgttttcttgaatttttgaagagaaacggtaggttgcatgcttagttttgagttgcttgttgctgctgtgtttatatgttgtattcagaggtttaaagcatgcttaatttagtggaatgaaactgttttgatgcatgttgagttggttttaacaatatatggaattttagttcaaaagctatggttttcaaagtaaaaatgtgaaatttgttgctgtgtttgttgcatgagtttgagaatcatttctgcagttttattatgcatgattatgtagtttaaatc

SEQ ID NO: 288209 - DNA, 761 bp, Cannabis indica
aattagatttttacttgaaaattcagattctacacaaaattctacccaaaattagcttttgtttcaatgaaaaacgatttttgaatcaaaagatatgaagaaaataagtttgcacgcgcggaagcatggatttggccgagacagaggctacaagcagtctcatttgaccaagggaaacgggctggacaagagcaattttgtctctgagcgagcctgttgtctgaagcgactttgttcgagcgagcctcactagtcaccatgcgcgcgcgtgtgacactcaaaacctgatattttcgttcaacttcaaaaaatcataactaattcataaaaatccaaattaggttctgtaaaagcctaaatttattaatttttcgtctacttttcagaaaaaataattccagatcgaaatcaaaaatatttcagtaacatacattacgatttctaaactatcatcacataagcacataaaccacatgaaaaccatcaaaatcaatacaagtcatcgttttaattcatatttcacgaaagtaaatcattaccttggctttgacgccaattgttggaataagttttactaggatctagatttactaacaagtatgtttcattaacatcctagtatgaatttttagaagaatgaaattagatacatataaagtttaggaaaccttacattgggtgcagcggaataatatgtctccttccactcagatctctaacccttgtatcctgtctgtcgtagggtatcaccaagatttgag

SEQ ID NO: 288210 - DNA, 631 bp, Cannabis indica
agtttgtgttcccattaatgaggatgtacgacggaacaagcgatccaaacgatcatatagccagttataaacaaaggatgttcactgccgccatccctcgcgagttgcgcgaggcatgcatgtgtaaggggtttgggtctagcttggctggcccagccctccaatggtacacgaatttacccaataattcgatctcttcttttgctcagttaacggatgtttttgtagaacaatttgcgagcagcaggaaattggagaaactctcagatgacctataccgcatcaaacaaaggagaggcgaatccttacgagactatgtggcaagattcaatgctgaaaaagtttccatcacagcatgcaacgtggacacagccattaccgccttccgtaaaggcctgcaggtagaatctgacctttacaaagaactcacaaaatatccatgcaggacaatggaggacgtgcttgccaaagcttgggcgcagatcaagtgggaggaagacgaatccaatagacaatcgacaacatcctactcttactctcgcgacagtagagtaccgaagagggtagagcgacgacagtcctaccattattcagaaccttatccaacaaacagatcacggtcatacagaga

SEQ ID NO: 288211 - DNA, 605 bp, Cannabis indica
acctctgaaaacaatccataaacacagcagcaacaataaaccaaaactaagcatgcaacctaaccattttcttcaaaatctcaagaaaataacaagacaagttcaaggatcttaccaacaacttgaactacaattaagttgattgaaaattagcttgaattcccaagaaaatggccagcttcttgctgctcaaagagggccgaaagagagagagagagagctagagagtaaaatggatttgtttttcttttctaattttccaatttgaaaataagggataaaaagtatatttccaactctttattcagccaaaaaatatcaattaaaatcatgtattttcaccacataaagtccactaaaggacaaaatatcattggggcaaaatgaccattttgtccctccactctaaaatagcataaagggcactaaagggtattttgggaaattctaaattcccgaccactcccgacattcccaatgtctaaataaccgtcccataatactaacatactaagttgtgatttttactgagccaaacaccgagttcgatgttaccgggcaccggaaatgcaaaattatgaaattcactatatgacataaaatgc

SEQ ID NO: 288212 - DNA, 619 bp, Cannabis indica
ctatagatttggaattccactctcaattatatagagcgctctatatgttttacgatatagatacgctatgaattatctattgttatattcctaataatcaatgatcctcaatagatgatctacatagagtagggacaaattactgttacacccttcaatgtattttatccttaaaacacttagttacctataaataatatttcagtgaactaatataataactaaaataagtactcaaccatttatctctattaagccaagctcgaagaaaattatcgtttcacttttatgtccagattgaagctatagattttgtatctatgattagcgctgccacccaattgaactatcgtctccttaatctatatgtcacaagaagatccattggtcgactttaacgaacaaattgaagaacataaataattaaactgaactagaacctaaccatctcaagattaagatcacttgatctaagatcaactaggtgatattgaattatatagatattatggtaagtttattatatctgatccaagttcaatatcggtcccttccgatgaatactccatacatcgaacccaagcttactttaaccaatgccctggaaaggacatatata

SEQ ID NO: 288213 - DNA, 539 bp, Cannabis indica
gaaaataacaaaatccttcacctctttaaatgtgaaaatgacgccgaatatccatgtggattagattaaaaagaagaagcagcaaaattattttttgaattaaagggaaaccttttttatttttctaaatggcatatagaacaagaagaaagtatagtagagtctttaaaatgtaacattttatttataaaacttgtagtatacattgaatgatgactaagtctagcatgccatgaatgagcactattacaagaactattacaaataattttattgtgaacaacaaaagtggaattggaatcgtacagcaggaataaagatgagcaatacgtttagcaatcctaatcctcttgttctgtgaaccctgaataatgtagcagaattgtaaaaaaaaatgttgtttgttaatgtttggaggaaagtgagaatattgaacaaattgaattggaaattaagaacataaagaatattgtataggtttaactaattggagaatttaatatgttaaagccctaaataattaggcacactacccaaaa

SEQ ID NO: 288214 - DNA, 644 bp, Cannabis indica
aagccctggtgtcccgagggttgtacgctccaggcctaatcgccctgacatgtacaatcttcacctgctcgctctcacggttcctcagctttaaccttgcccttacctacacataacaatagcactgtgagtcgacagactcagtaagaaaagcataacataataaacatactaatatcccgggttataatcaggcgcccatacacctaaccataaccctaactgaattaggatcgatcttgaccaagtatgactaatcgcgaatccagcctatactcagtactctaatcgcactgatgtggtagcagttaatccatactatctgataccctaacatatatcggatggcatctcggtgcaactctatgtacacctcagtttgccctgatatgctaatctgatggctatagatttgcctaacatatatctgatatgttattctgacgacaactaacatgtacgctaaacatgtataaacatatgcatgacattatactaatctcacattgattctgaattcaggggtgccggtcaacctgagtggaacaaatgctcggagaattacaggctcctaaatcacatcaatcataacataggtgagtgacacgctaaataaatttccagggtcttaaacttgaaactaa

SEQ ID NO: 288215 - DNA, 560 bp, Cannabis indica
agctggttctggaccttggaaagtaatggtcggttctcctgtaaatcagcctatcgtgctctggccgaggagagagtgaatccaattgaggtggccccctccatgtggaataaactatggaattgcaaaatacctgagaggctcaaggtcctttggtggtgtattctttctaaagcccttccgatccgctcggctataagtaggagatttcctattgaagatgagaggtgccccctgtgtggaacggaagtagaaactatggagcaccttttcctatcttgtaacttcgcctttcacctttggcggtcctctccttggggtatttatcccatttgtgacactggcattcgggtgtgggattgggttaaattcttatgggatctaaacaaaaaaggcttgaatgtccaagaggttttcctttatgcctcgctgatagttgacacaatatggcggactcggaatgataaggtacataataattgtcctgcagatattgttaaatgtattgactatgttcagttttcttttgcagatcatcatgctctcctgctcccttgccc

SEQ ID NO: 288216 - DNA, 650 bp, Cannabis indica
ttcaaaaaagtcatgtctacaagcataaaggacagataagtaaaaaatcacaatcctacccgtcagtttatagcaaaaagacgagttacctgaaatttgccgaggagtttgcttagaaagacgtttgtctatccgctcttgctgcttctcagatggttctttatatactggctcccgttgaagactcgcgttctcggggatcagctggtgttctcgcaacttcgcagttgtgcacagtaatcgccagtcgcgatcttgtaccggaagactcccgagaatttcagctgtctccttcctagtcgcgtcaagagttggtcgagctggtctatctgcgatgacaacaaaaagcgagttagcaaaagatctcagaaaacaaagtaaaaattatatctaagtcaacaaatacgcgacatactgggtctgcgattaaagtcagtcctaatcccaggaaccttaaaaacgtaaaaccacttcgacttccagtcacccatgttcgataccatcccctcgacaccgtttatttcagaagtcgcccatttactaaagcaatagaagccgttatgaagacccacgctctttatgtcatagaagtaactaaactcctctactgacggagccctatgggcatactccatgtacatcgcatagaa

SEQ ID NO: 288217 - DNA, 560 bp, Cannabis indica
gatattactggccaacgatcaataaggacacacacgagtttgtcaagaaaggtgataaggtttttcacatatacctcacgtaatgccaacagaacttagaatgatgacctcgccttacccatttgttatatgggggattgacctaattggggcattacccactggacgaggaggagctaagtatgcggtagtagcagtcgacttcttcactaaatggacggaggccgagcccctcgtttccatgacctgcaagaaagtccttgactttgtcgtcaagaatataatctgtaggtttggaattcccatgaagatagtatccgataaggaacccaatttgatggcgacttgttcactgaattctgccagagaaataaaattatcaaaagcttctcgtcagtatccaggcctcaggcaaatggacaagtggaagctgtttataaaaccttaaaggatactatcaagaagaagttagatactgccaaaggcagacgggttgacgagctacctcaggtactctgggcccacaaaactaccgagaagacagctacgagacacactcc

SEQ ID NO: 288218 - DNA, 533 bp, Cannabis indica
aatatcacattttatttttttaagtcacagttttaaacttttttataattatattttttaatcaattttttttaattatattgcattaataaaaattaatttttttagtttttcagtacaaatttttgatgagtcgcaacatacaataattagaaaaacaaatttttaatcgtcttaaaacatcccactaaataaatatattgatcattattattaaatattaatagttttgttttatttttaaaatattagattatttatttttaacatttggcttagtagacaaattcatcaaagagaattaattagtagtatgacttttgtttggtcatattatctgtttgagtaggtatattataggatttttcacaaaaatactagaatctgggcaaaaatttagaatttactgtcacacggaatttttttacaaaaatgctgtctttttataaaacacaaaactgaacaattaaataacaatggaacactaaaaacaacataaaacaacattaaaaacttaacacggtacacagtat

SEQ ID NO: 288219 - DNA, 1074 bp, Cannabis indica
ggtctttaaatatcattactcattctttagcaaaatgagagcatattttaggtgggtctcgtgcacaggcggacttacatagagcccagggagggcttaagcccaccctcaaattttagaacagattatataaaattagagataaaaataatacataattattagacaacataatttgtataggtgtttattcgttactcggaaaatgtggttttgaatctgattccccttaactctatctcctatttttatttataaatataaatctaccattttgaaagaaaaaaaaactacaaaatattaacatagaatattcaaactacaaataacttttctgttagaaaaaacttgttatattaataaattatgttcaattatatttaatttataattaacataagttcccacataaaaaaaaactaaaacaagaattttaaaatctcatattattatttagatgttaaaatttgttccaatctatataataactttatctgaaatttaaataaaaattgtaatatgtttttttttaaaaaaattaattattattttaaatttagttacaaattttagttagcccaccctaaaacttatatcctcggtccgccactagtctcgtgtttagtggtcggtagtactctttatagatttaattgtttgattttggattttgtagtttttttttttgtttttattttttttttttgtactttgtaaccttttaggttttgtgctttttatatatatactagtcggaggcacacgtgctccgcacgtgtattcaacacgattttttattttgaggggactcatttattataaaaatatgaaaaattttatttgcatcccacaaattaactacaagaaatgtcatttttgtcaggacatttttgtgttggcaaaagtttagtattacgctggtaaaataaaatttactcagatgcattggcaaaagagattggcaaatcaacgttggtattagaatttttaccagcacaaaatgaaaagcgctggcaaaaataacttttcccagtgcgtaaatacactgaaaaagttagattttagtcactacaa

SEQ ID NO: 288220 - DNA, 534 bp, Cannabis indica
tctcaccaagtgggtattgtagaagagcaccttagagaggacaattgccaaattggaaccggtagatttaaagagcaccttgcaaggattcaccacccaaaatttaagctaaaatggatgagaatccaccacttgatcttcaatgcataatggcaaaccactttctctctctagatttctttctcttctttccctctctttttctttctttttcttttggctgcttgctgctcacgaagcttacaacccttttaatttttttttttattttttttttattttttgttgattgatttaaacataatgggccttaagcccttaaatggtccaagcccactaacgaggggcggacccaacaaatctccccctctgcctcagttggtgggctctactaagcccgctcttcgcctacaagctttaagcttctctttaggcaaagtctttgtcaacataatgcaccttttcttagtgcaattctttcatctcaagtacatcccggatccaatgatatctaacatcaatatgcttggatct

SEQ ID NO: 288221 - DNA, 791 bp, Cannabis indica
tgttaaaaaaatatggtatttttcaaaatcagtaaaaaaatgtataattttaaaagaggaaaaaaaattttttgggcccctgggctgggtgggccctaggcacaggcctagcccgcctatgcccagggccgggcctgatcggcgaggccttcatttgggtttgggccttgtgaacccagttgtaaaccgaactactctatggataccacctcctactaaatcctttgctctagcggatgcttcggtaattttggggaggggctttgttggattggggggagttatacgagatgcaaagggtgtggtttggttggtgtggttatcatgtgtgttaggtgatttctctgctaatgtggcagagctgcttgtcattcgtttggacttgactcttgcacatcaatttggtttcaatatcactattattaatagtgattctatcgtgacaattggttggattaataagctttttattaattttagttttctgtctattttattaaatatatattctttattagttgatgttggtggtagttcttgtagtgccatttcacgatcaaagaatggtgttatccatacactgataagctctgttacttgtttaggagattgtgtttggacaaattcttatcctcaattttttgagttcttctgtaacagcaaaattttttctcaatgaattttgatttttttttcaaaataaatcactccaataagaatattatatgaatcaaaacaaattataaaagaaaagaggaaaaagagatatttaattcagaaaaaccaaagtc

SEQ ID NO: 288222 - DNA, 510 bp, Cannabis indica
tgagtgggagcgctgaacataaataaggaatctatagcttctatctagtaaaaagaaagtgaaatgatgatttccttcgagcttggctaaacagagataaatggttgactactcatttcacttcgctgaaatatcatttatacggagctaagtgttttaaggataaaatacattgaaaggtgcaacggtaatttaatccctatacaatgtagataatctatatagtaggatcattgtatcaaattaggattataacaacggataattaatagtgtatctatatggtggaacatataaagcgttctatataactgagagtgcaattctgagttctatgcgtggatgcaacaaggaattaataagtcagtgaatttacttggtaagttcttggtctgcttatttgaagttcggatatataggcccatggtccccacactagttgagacaatacttcttgtaagactcacttaattgatttgattaatcaattgcaattctaaaattagacta

SEQ ID NO: 288223 - DNA, 530 bp, Cannabis indica
ttgacaggattggaggcttggccatgtgttctttcaactttttgaatgcttcctcgcactcatccgaccattcaaacttttggcacttcttcaataggttgaagaaggggatgcacttatctgtagatcgggaggtaaaacgactcagggcagcaacctttccggttaggctctgcacgtctttatgcttcttgggggatggcatgctcaggagagcttgaattttttctgggtttgcctcaatccccctctagatgacgatgacgcccaggaactttcctgatttgatcccaaaggtgcatttcttcgggttgagcttcattttgtatctccggactacctcaaaacactcttctaagtcatctgcatggctactgcatgctttagacttgacgagcacatcgtccacgtacacctccatgtttttccccaagaggcctttgaacatccgattgaccattctttggtaggtcgcaccagcgttcttcagtccgaaaggcatgaccaggtcctgaagctagtgcactctt

SEQ ID NO: 288224 - DNA, 511 bp, Cannabis indica
ccctctcgttacaatgcgtataaacagagagatcatgggaacaatgcgtaatgcaaggattgtggtattaaggttgaatacactgatagtgggatcgtgtgtatgccatatccacgtaatttgatcccctgagttatagggattgtgctgatgactcacgatgtgaaagctgagttagctaagtgttggtcactttgcgcggattgttgaatactttgctctgggcatgccatcgaggcatcctgctcggactatgctttccgagcagatgttccaagtggactccacgtgtcaccattcatgtgatgccacgtcaaagtgcaaaaattgggataacatttgcccccaggtatgtacgggacttcccaagttgcgtgtagactttatccgagttgcttctgcctttggatggggacactattgggttttgtgccctaaataaaacccatttcaatataatcagatttacttattaacaaagatcaaaaataacattttatgttgcatggtt

SEQ ID NO: 288225 - DNA, 587 bp, Cannabis indica
tgttaatcaacatacttgtgaggagatctaagatcctggtaaaataatttccaacattaagataggtttattttagttgattttgtgctgagatagctagttgtgctacagattactcaaacttgaagttagagagcttaagttggctctctaatggtgttgttaatgtctgagctatttgatgtgttatgttgcttgaaatggatttagtatagtatatgcaggtgttctagagagtatgtcagtatggtagagtttgggctcgatttgagttgtgggagacatttttggggttccctgcactgaaccggtcgaccggttcagggaagcctgtaacaaccggtcgaccggttggtccctaggaaccggtcttccggttgggcctttttcagaaccctagtttttctcatttttgtgttgtttggaacattaccatcttatttattgatatagttattcctagttttgattttaggtccccaataagtgtttagcgtgtctctcattaaattttgaatattatggttagggccctgtaaagcgttgagctgcaattccactcaagctgaccagcaaacttgagcacg

SEQ ID NO: 288226 - DNA, 739 bp, Cannabis indica
tatatacgctcaattataacagaaatttaaaatattatttacgtttctcaggtttattatttgcagcttaattgataattactatacatactgtgtaaggattctgtattgatatatatatatatatatatatatatatatgtgcgcatacatgcataaatcatatatttacaaggatgatattcttcaacgtatcgatatcccatcccaaattttatattcctcttggtcatctaagttcgatctagatctaatgtgtcaatggcaataattacggagccacagtttgccacctcaattaaaattctacatctacacctatatatatctttctcaaaattaactccgttttttatttaatattattttctaatttgaaaaaaaaatatatgttttttttcttctagcatcttgtaaaatatatcatgactctgtctctctcatgatctctggttcttctctaatggattattgaggatcagaagtgccactgtcatttcttctagcatcttgtaaattaaatatatatatatatatatatatatatatatattaataaatagtgcacatttccacgcttgtttaattaaaatgatttggactatgaggtgaggttataaataatttataaagtctaataaaccaacaagagaaaaagtcaaatggaaagaaaaccaacacatgtctagagaaaatctaactttttctacagaacttgagtacaaacataagtgactaa

SEQ ID NO: 288227 - DNA, 517 bp, Cannabis indica
caatttcgaaaattattttaattatgcaatatttttgaatttatcttgaaaaatagattgagttgtaaattaattatatattttaattaattcttggggcaacttaaatgtggcggacttcttcggcctctgtcccgcccagttcactcctaagggcattaagtatctgtctgccctctacgtcctttatgccttccagaagtgggatatgccttctacccacgaggttagctggttctttgatttgaagtccacccccaagcaaggcaggtcggggtacttctatttctctcaaccagacttcaagtggttgacgggcaccgatgattcggccatcagcaaaattgggcattttgttgatgagtacttcttggtggatggcgcaggcatcacccgtactcggttccagcagattccaacatattaccatcctcccctcactcttgcacttagggatagagctcaaaagcttgctcgactaccgggggaagaccggaatatcatccatttgacctcc

SEQ ID NO: 288228 - DNA, 582 bp, Cannabis indica
atggaaaatgtaaaagataattgttgcatgttgatttgttgtgatgcttgctgctgtgatttgttgtggttttctaaggattaatcttgttattcttagtagattagagctagtttaatgcatgatttttgctttgattcaagcttggaagtttttagctcaaaactatagttttcaaagagaaatggttaaaatctgttgttgtggttttgttgatgtttgtagtagttttcagagattatattatgcatgattaagtggatttgagctgaattgaatgcatgttagtagggtttgatcaagtttgagtttagaactcaaagctttatgctttaatggtggttttagtttggttgcatgaagcttgatttttatgctttagaattgttccatagggtctaaatagcaggtctggaagttttggtattgtttggtttggatttgagctatgtgtgaatttttgaaaatttcctgtgaggaaccagaattccggttgtgcatccggaattccggatgggttttaaaaatttccagaaccggaattccagttggacaaccggtctgccggttgggtgattttca

SEQ ID NO: 288229 - DNA, 513 bp, Cannabis indica
aaacccaatgtcaagcatcccctgaagttgcaacttaagctccttgagttctgctggagccattttatatggagctttagaaaaaggttcgactccatgtgctaaatcaattacaaaatcaatttctcgttgcggtggaaatcccagcaactcctcaggaaacacatcgagaaagtctcttaccaccctgactgcctcaggccccaatgtttcgggtcttctggagtcaatcaccactgctagaaatcctacacagtcactgtatagtaaatctcaagccctcaatacagaaataactgcgatccgagacccctgaactaatccaacataaacaaatggatcttcaccttctggctgaaaagtcaccattttccgcttacaatctatactggctgaatacttagatagaaaatccatccccagtataatgtcaaactcagttaattccagttctataaggtcagcgctcaactccctatcctcgatcctaatcggcatagacctaatgcgcct

SEQ ID NO: 288230 - DNA, 549 bp, Cannabis indica
gactgggcgtcccttcagtttttggctaataaatgctctgacacttaatatttcgaaatccaattttctctctccacggctgacgactgcacttgattatttttgatttcccatattcgcttttaaggagggaaactgaggcgtctgaggttcctttgagacgattacctctcttcgtgacttgcctataaataccaaacaacattggcacataaactcattttcatcacctttctttgctaagtaagcttcagagcgaaaagagagattcttgacttcaaagttgtcgaagcgccttcatacaaactgcttgttggattgacgttgctcgcacccagacatctgaccctcgagtaagtctctggtttcctttatccttatctttgcatgtttatatgtcaaatgcatcctctaatttggtgtagaaaaatgtttaggaaaccctaggccccgaaacctctgcggtttttctttatcatgtattcgtgtgattttatagtcataacacttgtttcttaacaacgtaacgtctatctttcatcttgctta

SEQ ID NO: 288231 - DNA, 573 bp, Cannabis indica
agagcataaaggcccttcacataagtcaccattttaaaatccctatcatccccagctgattgagaacctgaggacataagctccattggagtgctccccacatcaccagacccgaaatcaacaaaaggagatttcaaggccgaagcacgcttcctcttatccaacagaggtgtatcagagacagtgtcctcagtttcttcatcagtatgaagggcatctaccaataacatctggattgggtgcgggaacctaaaaaagaaagaacgcattaaaacagttgcaaaacatactagaaactaatgagcaaccaaaaagaaacctaatttttttgaaaacaattaaaataaacttacatggattttagcaacagcctccaagccagccaacacaacttgatcatcatctatttcaagctggctcaacccatcaaagaaatcgtcccccttcaatcgagactcatcgcccttcggcttctcaacatccttaacatttttatcactccctccaacatcctcagatggattcacatcagcagaaggaacagcagtaacagccttgtcagcatcatcagca

SEQ ID NO: 288232 - DNA, 676 bp, Cannabis indica
ctcttccaatataataatctttgtatcattagaaaggtcttccaattatataaaaactttgtgaacaataatctttctaattaagacgttttatgagttaaattgggattaaagtttctgtatagtaaggataacaaacatactaagcttattattggtctaagtgttaagaggtctattatagactaagaattactaaaatattatgctataactatttaaatattttattttattaaattaggttattactttactttattatctttatctaaaggaaatttttttatttattttctcttgaaagagtaggtatcattagtctaattacctctttaattttataaaaataattttattttatttgtaaaatttatcatttattgtaattttatttaccaacctaattacttttttactggaattattatcttataatatcactaacaattaattataatattttttataacaaatatataagtatattattttattgaaattaagttattctattttttttttttttttttttttagtctatagagtgaaaaattacattaatttgttttaaatttacaattttattaaagtttttttaattttgtatagaaataagttatgggacagtgaaatctatattcaaataaattatttatttattttacattgtcca

SEQ ID NO: 288233 - DNA, 621 bp, Cannabis indica
tctggaggtttttcagtggatggacaagctctcttggtactactcccaattcttcatagtactttctgtttaatggcccataggagtcaagccatttaacatatcccattgcttctttttcctctagctccatcaaattgtcttcaattaaactcagttctaaagggtcatctatcaacttcttctcactcacaattgtatcaatcaaatcaacaaagtaacagttatcacttgccttcgggtaagtcatcgcctttaacacattaaaaaccacttctgctccttggactcttagctttaattcacccttctgaacatcgatcaaagcttggccagttgccaagaatggtctcccaagtatgattgggacattactatctccctccatatccaaaacaataaagtcagctggaaagatgaacttgtcaactttgactaacacatcctcaatgactcctctaggatgagctagtgatcgatccgccaattgtagagttaccatggttggctttgcttctcccaactgccatcttctaaaaacagacagaggcatcaaattaatgctggctcccaagtcacaaagtgcatttattccttcaattctcccaatggtacaaggaa

SEQ ID NO: 288234 - DNA, 604 bp, Cannabis indica
cctagctttagaaataccctagttttaagtctagggcattttagtcttttggttaaggttagtgtggtggctgcccatatagttgacacctagcatctaatttggaagagttaagtaattaactcatttttcatttggaaaataaggaaaaaatcaaagaaaatcaagagaagctctctcttctctctttctctcttcgaaggcagcaaggggcaaggaattttgggagcttaagttgtgttttcagctaaggattcaagaggaatcaaagcaaggtaaaccctagaatcattgtgtatgtgaattttcaagtttatgatagtttgaattaatgaatttgtgatatggtggctgttaggtttaggtaagtttaaggttcgaattttagggtttagatgagttgattctaagtcctagctactggttttaatggctgtagatagtttttatgcaaattaggtttaaagttcaagctttgttcattaatggcaacttgggttgtgatggtttgttctgtgaattactgcctggaaatcattgtgtatgcattgtataggtatactggagagtttggtaaagattgggcttgatttgaatcaagggg

SEQ ID NO: 288235 - DNA, 868 bp, Cannabis indica
ggtggcagaatatgtggaaaggtccaaaattattccaccatccccacccaaggaaacagcagacgcctccacatctgccactgtgcccccaacccctgccactgtgcccccaagctctgctccacccaatgactccgactacctcttgttggctaagagattggagaaggtagaagcgcaacaacttgcgattctcactgcccagactgagatgaaggctgacttcaagagaagtcagaaagagatgaagaatcttatcatggatcaaattgcgaccgtgataagtttgttacagaagcagccttcggagccgacacaaccatcagggccggcacagcaatcagaccccacacatccatccgacacggcagagccattacagacggtacatccatcaccgccgacatatgatgatgatgatgatgtctacccagaagattggcaacctgacgtatgtgacgttccttctactcctgcaaacgccattgtcatttcgctgggtgatacagaatctcaggatgtggaagagttgcaggggccaccagatggggtggagttctgtaggcttaggcgaaagcggaagccggttttcttgaatgactacacagctgggaagaagaaacaacgacatgggcccgtggtagtagacacactgaaaccggcggacccccggctgttaaaatttttccagaagtggatcacttatgctagggacaatggccgtcctagggatgttcacactggcgaagccactagatcctggttcgtgaagttgatggtgctgaacgaatggctcgacgatgatgtaagttatttcttaacagaattaatttattgtgtttttcattgtttgtgcgacttacatgcg

SEQ ID NO: 288236 - DNA, 650 bp, Cannabis indica
ccaaacctgaggaagccctcgctaagttccgggagaagaagaggaggcttgatgctttgctcgaagaacgtcggggccctcgtcttcctcctcgtattgaataggccgagcagtccaaccaatttcaccattacaactattttttcttcttttacatttacagtctcttttctttccttccagacaatttaaattattatcttctaaggggagacagttattatggcccgtccccaggcccataatattttttttaggacctactttcgggtcaagacatctaaaatatatattttgcttaattttgtttttacttttagcctgttttacatttgtccgtgtggtatgccttagtgccttagtacccccctaagtggcatggaaacattgtttttaaggcaccaaactttattcaaaatttagaggttgcaaatactttatagtacaaattctcttaacaaagcctaagtttacatttttggactattggtaatattttcggagatgatcggcgttccaggcccttggcacaatggttccgtccaatctttttagcttataggtttcggagccgatctcatcctcaatttcatatggcccttctcaatttggcccaagtacccccactccgggttcttgagtggctggga

SEQ ID NO: 288237 - DNA, 524 bp, Cannabis indica
gttctggtcctagtctgagtcccagacctagacaccgactactggactattccaagccccattacccgaatctcgagtcaagatatggatcactgtcacgggtttcggtctggttcttgttcaggtcccaagtcccatttctgagtttgggttcgggatcgagactggggtacgattctaagtcccgaccatggttctatgtccctagtctggttccatgtttgggtctgagttcatgttcgggtttgggtctgagttcatgttcgggtttgggtcccgagttcaggtttgggttgggattcggttctggctcccaattcgggtataggtcagatttggagttcgggtccctatccagttacagatctaaatctatgtcaaatttcagttatgattcaaagtccaagtcctagttccagtccgggtcaacattcgatttaggttctaatttggggtcacagggtacaggttcgggtccacttttgattttgggactaggttcaggtccgagtgtgggttctggt

SEQ ID NO: 288238 - DNA, 561 bp, Cannabis indica
cgcatattttatatgaaaatgactcttgatgacaatctacacctggctgtagcataggacctctttgtatattaaaaaatctttcaccatgcactacactaaatcaccatatttgatattaatttactagaaaattatttatataggggttccaaaatttaatttcgtcaactctcctggcgttgggttgctcatgaaaggacactctttataatcgatcataagggttgttgtaacttgtaactgtgtaaatatgattgcttcaagaaccatgaagataattttgctaatatatttttgttaggtgaaaacaaaagcttttttttttttaatttcaaagtttattttgcaaaagcttcaccaccatgtggattttattttatttactgaatcatgaaatggtttttcagcttattgatgatatcttgtctcgtaactgcttgccagtcatagttgggggtacacattactacatacaggtataaatctactttattcttcagtttacatcagggaaggccagaaattttctgttgcaaaaacagttatgatgcacctata

SEQ ID NO: 288239 - DNA, 639 bp, Cannabis indica
ctaacttgaaggccaaatgagcacaacatgtagtcgtgctaacaacgttataacaaagtaaacttacaggagttttctttacttttttttttcttttattttgtattgattttatttgattgagccttcagaacaatttctatattaagtgtgggggggagattaactatcgtgtctatccagttttttttaatcattttttttcaatttatattagtttttcttactttaattttagtgagtgtggtttgaatgaaattctgttgacaataattgctcgtgtttgatatgtatttttactttgatatcttatgcatggtcttgtggaaaataattttgttaatgatgaaattcttgattgtgtgataattattattctaggaaaatgatagattctcatgatttgtgtgcttagctcataattaattactgctcaaacttgaatttttttttttttaaaaaactgacttttgttcatcagttgaattatcatatttgctaatatttggaaagataaatgcatgcttgactggttatttaatgtctcaaccactctagaaattgtttgataatcatttgaggcaaaatcgattaattacacataattttgagatgtgatataagtcaattttttttttt

SEQ ID NO: 288240 - DNA, 881 bp, Cannabis indica
gttaggcatctccgcatctcggggcggccggtggtacgtctcggacatcgcgggcttaattccagccacctccacaatgttctccaactggtgagggcaagtcagagtggagtgaagctcggccgcttcccatcccgtagcacgcggtttgtacccctcctgggcaacgggacccagcatgacatcttccagggtggccagacgcttaccccccttcttggaagattttgaaccggatgcagacatttttgattctgaaaaagagttaaaattccagcaattaggccccataccaaaccctaaatcaaaaaagggaatgggggtcccctaaccgctggaaagaggccccctccggacgactgtcaacaagaaagccttagaaggatttcctggacagaagtcaggtgcaaagatctcacagatggtgacattgcgcgtaaaagaaaaagaaagaggaagggcagaaaatcgagagagacaaagtcttctctatgcccttgaaggccatcacacgaagagtgtatggtcctttacaaaatataacaacagtgcgtaacaagagtaaccctaacaccagagaagggaaatctagacctattacttgaaaactcaagggaatacattcccagaaacttcaaacactaacccaaaaaacaagtaacagtaaagcatgccacaaacacaaacaataaagtaagggtgcgagaaacttacatgaagtgttggaactgggggtctgctgttgatcaaacaagaaatgtagactgacagtgatgagcaaaggttagcaaggaaatctgtaaagtgttgaaggttttctggtttgaggtgtttcttctctctagaaaactcgagaaagttggcgaaaaaaggaatgtaac

SEQ ID NO: 288241 - DNA, 1038 bp, Cannabis indica
gttttgcttagaaagacgcttgtctattcgctcttgctgcttctcagatggttctttgtatactggctcccgttgaagactcgcgttctcgggaatcagctgatgttctcgcaacttcgcagttgtgcacaataatcgccagtcgcgatcttgtaccggaaggctcccgagaatttcagctgtctccttgctagtcgcgtcaagagttggtcgagctggtctatctgcgatgacaacaaaaagcgagttagcaaaagatttcagaaagcaaagtaaaaaatatctaagtcaacaaatacgcgacatactgggtctgcgattaaagtcagtcctaatcccaggaaccttaaagacgtaaaaccacttcgacttccagtcacccatgttcgataccatcccctcaacaccgtttatttcagaagtcgcccatttgctaaagcagtagaagccgttatggaggcccacgctctttatatcgtagaagtaactaaactcttctactgacggagccctatgggcatactccatgtacatcgcatagaaagccaatacagtgcgataactgttgggtgtcagctgaaagggcgatacgtcatatcgcctaagaatggctgcgacgaagggatgaaaggggaccgatacaccacatcgaaggatgggtattgagattaccacatcctctgtagggatgatcgcagggttggtgaatggaaggtgcgctctctgagatggtttaggacgttgaaacgcgagtcgcaacaaattcaacctcacaaaggtggtgaagtcagatttggcaaccctcgagactaaatcctcgcacgcgaagggctcgttcaattgggagtcgtcgaccgaatctgtcccactcccttccgcttcctcctcttccccacctgactcgcggactggagtcgtccattcctcctccacctcctcgacctcgatgtcgggagcatgcctcgtatgtatgaggtagtcgcgtgctgacactgtggactcgctgtcccggatatcgattgtcccaggttcagcgag

SEQ ID NO: 288242 - DNA, 513 bp, Cannabis indica
atattttaatagttgccgaaaacctcggtcaacagtagtaaatctagatcctggtaaaatatttccaacactttctaacatgtttgaggtgactacatttcataatgtacatacatgttcccttgatctttgagaaaaagataaccgtctagcatcacctttgatagttgcccatctaattaaggataagtttgcaactgacggctcaaatcatttggcctctgatataaggaaagatatgcacaaggattatgggatccaaatgagttatgaaaaggcttggaggtgcagagagaaggcactacacctagctcgaggtacacctgaagattcatactcgaaattacctagttacttgcacatgctaaagttgagaaatccaggtaccatcacggattttgtggtagaagatggtcgcttcaagtattgtttcttctctctggatccttgtattcgggggtttaggttttgtcgacctgttgtatgcgttgatgggtctttcttgaagactag

SEQ ID NO: 288243 - DNA, 806 bp, Cannabis indica
ttacacattttctaatttttgtataatatgtataaaaatatcattatttattttttatttttaaaagaatatggaaatagttaagggtaatttgttaacctaagtaactaattaacttatattgttttttctaatatattttcaatttattttaaaacaatttcccattatttcaatattttttttttgaaaaaaaaagccacattattataaacttgtatcttgcaaaccataaaaatgtttcacgtcaaagaaaaaccataaaaatatttaaattaattattatattttatgtacaacaaatttagaaaaatataaattttttgtattggaattgataggaccaacacaacttaaagcactcaactttgtttgttaaataaatatatttaaatggtgaattaagatttttacttttcaattttgatataatatatcatgctctcaattttttcatctaactttattcaattctactaatggtaacgtagaaatttttcatatactaaattgtgtccttctaaactttaagatatatcaaatcgtacatctttcaaactttcatccatattagatactcgttagtaaaattaagtgaaaggccttgaatctaattttgagaagaatatttaacgatcataaaagttcaagatatacatcatagacaaatatcctaattagcttatttaaaatctagaaccatccatatttcttttcattttactttttgggcaaaataatgaattatataaataaatatctatatactatacctgatgaccaaagcaaaataccaagaactttac

SEQ ID NO: 288244 - DNA, 262 bp, Cannabis indica
taaattgacatgtggcaatctctaattggtccaagtcatgaatatttatttgatatttataccgcaaactacttaattaaaaatataaatgctggcaagtaagagtaggttgtgtaggccattttacactaaacaaagttaatttcaagctcagactcagaccccattgctgagatggagactttcccactcacaacaaaagctccctttccttcatcaataaacaaaaactccctttccttcatcaataaacaaaaactcc

SEQ ID NO: 288245 - DNA, 543 bp, Cannabis indica
aatattacgaatgatgctacaaatgagattttagtttttattttcaaatcaaaaaacatgccaaaatgatatatctcaagaattaacatgttcaacttgtaaagaggaaacacaatgagtggcctaatcaattaacaagtgagcaatgatcatttgagcaaagaacaaattcattcaacttcacaatgagccatacttaataaaaagatgagacaacttctaccaatccacatattcacacacacttgagaaagacaataaacaaggaattttttacaggattttgaaccaagatttttcttcagtgtgtgcaagtgacctcatgtgagaacattggctcactctctcaaaatttttattaagctgcccattttttttttttttatctttagacactccggctctttcttttgcaaccagctacggctttcactctccctcagagatgtagccgtcctcttttaatcagaaatactaatatagaaggagcatactacttattagtaaatggactaaagaaagctcttcccattgcatctaaaa

SEQ ID NO: 288246 - DNA, 507 bp, Cannabis indica
tttacaatatttcaatcgtattaaactacttgtcgcttatataaattagactcactgttgttggctaaaagtgaggtcaacactatgcaatcccacaccgcctagggatggtcaagtatgatgcttttgagactgtgtaggtatgggactatacaattaaagagggcttaaattgattgattggtactacctatatcaataaggtacattttgttttttctgtagcccatcacgaaagtactccacggttaagcgcgcttgacctggggtaattttaagatgggtgacatcttgggatgttttcctaggaagtgtgcgagtgaggacaaatcacgctgtaaacactcgtgtaggtttgtagggttagttgtcattttaggaagtagccagagtaacgtacccgtgtataagagacatcatttcgtgggtgtaaaggtccaatggaggcttaaagcggggatgttacatggtgtttctcccccatgcttatgtaaaaactgcgtcttt

SEQ ID NO: 288247 - DNA, 669 bp, Cannabis indica
tgagcttgcaaaccatatgttccttgccaggctcctcaaaaccaacaggctgagtcatgtaaacatcttcatacagatctccatttagaaagacagttttcacatccatttgttcaagttccaaatcaaaatgagcaaccatagccatgatgattcgcaaagaatctttggtagagacaggtgagaatgtttctttgaaatcaataccttctctctggctataccctttagcaacaagtctagccttataccttactatttgcccacttgagatcatgtttgatcttgtaaacccatttgcacctaatgggtctgcaacctttcggtaggacaactaaattccatactttgtttcgcgacatggaacttgactcatctgtcattgcattcaaccataacttagattgaggactcctcatggcttcttgataagtaactggttcagaagcatctcccacatcataatcatgttcttgcaaatagacaaggtagtcatcatgaatagcaggtttgcgagctctctctgatcttctcaacacaacttcaccaccctcaatattaggattttcatcttgcatatgattctgaggttcatcatgagcttctgttggaattgttcaatcacaggatcattagtaggagcggaagcggaagcggaagcggaagcaa

SEQ ID NO: 288248 - DNA, 822 bp, Cannabis indica
gctttcggggtgcgacttttgggcggtccgagagagtggggctgggtcggggtgttggtgcgggtggtcggaggtggcggtgagggttggaggtcggagaatggaagtcggaggtggtggtgagagtggcggctgggatgtgagatagagagagagagagagatgatgcagagagagaattgtgagggggtatttttggggttttgaaaaaaaaaagtatagttttttagggtttaagttttaggtttaataataaaatttttattttttaaaagttagagggtaaagaaaaaaaaatttttaagtatataaaattttaaatattcaaataagctagaaatttttgtagaaatctaaaaaaatacttaatttgagatattttgacatataatttagaaaaattattcttaaaataataattgtctaaccatatctattttaaaatttgtttattttgttattttaattttattcaattattaaattagaaaatgatattgaaaatatctaattggttattttcaaattatttattttattagatatttaatttaatttgataaaataattcaaataaacctagatattttaaaattagtttcaattttgaatttttaaaaaagatatttaaggttgtttaaacaattctaaatttttaaatttagttggttagttaaatgataatttaattatataagtaataaatatcttatttcacatattgttacatgatattgtttgtttgatttaaattgtttattcaaaaactttttttttaacaaacttattatttatttgatctaaattgttatgattaacttg

SEQ ID NO: 288249 - DNA, 534 bp, Cannabis indica
aaaggttaattaattcttttatgtattattttattgtattataaattcttttagtggatgcttaatcaacaattaattttaaatatttgtagggtttaattgaggttgtgacaaacatcccgggtgctgggcatcgtttttgttgttttcatttagaaaataacatggtaaaaaagtttggcacatcacaccttcaaggtctcttttgggcagcagctgagacagccaattttgagaattttaagataataatagagcgaattaaagaattcaaccaagaggcacatgactggctaagcaatattgacttcaagcattggacaatgagcaagtttgatccaaatgtgaaggtagaacatctcacaaataattttgttgagtcattcaacgattggatagaagatcatcgatacaaggccccaattgagttgttggaaggtataagaatgcaacagacagccatgatgtatgcaagaaagtaacagctgacagatgggagcataagctcactccaaaagtccatcttaaggttca

SEQ ID NO: 288250 - DNA, 820 bp, Cannabis indica
tgaaataattaaatcaaaaattataagtatatttcgagcttcatcttcacttggacaatctccacccttctgtccaaccatctgacttaactcgctaggatagcaatccaagtttaactagctggagctgaaataagaagaaaataaacttggttattagatccagaattaataacccaaggggataataattctctaaaacacatgagtttatagcataaatagaaataccttatttctttgccaaaaacttaggacactggggtttccagtggccctttttgttgcaatagaagtactttcctttttgctttgcattttgattagcagcctttttcttattagccattttaacaactttaagaggcttcttgctattcttccaattcttctttttgctgggttccgaagcagaggcaatgtttgcctcagccttggccgtaccattagcagtgcaagaactaggagctttagttcctcctttttgtggtcctctaatcaaattttcaaatgtctgaaggttgttgatcaactcgtggaaggaaaactccaacttgttcatgacataatttgatgtaaaaggcagaaaagctggagtcaaactattcaaaatcaaactcacttgagttgtctgatctataatagctccatgattctcatcctcttggaagtaactagtcatttggagcaggtgatcacgcacattctgatgaggtttcatctgtgcattgataaaattcatggttgcctcaaagcgagcttgaattgacgccatcccaaacagttcagtcaactgtttcatgatatctgcagtcgtgag

SEQ ID NO: 288251 - DNA, 561 bp, Cannabis indica
tacaaaccaaacaagtaacagataactggaaagtaggctaagatatctctattttaaaatttaaatttaaaattttaaatatatcttaatgagaatttaaaatttaggttgttagagattatttgaacaaattcaaaaaaacctaacatatctcgtaaatatcctaaattctaacttaaattcaaatatctcacccatttttcaaatttcaagtttattcaaaatttaaattaattaaatttctaataagataatataatataatatcttgaattttaaaatttagatatttctaatattacattcttaatcttataatttaataaattaaatattacaaaataaacaatttgaaaaataagatatttcatggttagaatattaccttttttattaaaaaaataaattaaaataagtttgaaaaattttacggttagaaaccctaaaatttctattcaaacctaaactaataaatttttcaaatttttatgttatttttgccaaaattaatttttgattaaaaaatatctaataagataaaatgttaaaactaacatttat

SEQ ID NO: 288252 - DNA, 583 bp, Cannabis indica
tttttgtttacgtcgagtctaggtcaagggtcgaattcgggttcaggtcagaagttgggttcagcgacagggctgtgggaggatttgggtctgagtctgattgaagtcctaaatgttgattaagaaaaaaaaaactgcttaaaaaaatattgaaagtgatttttttttttgtttttaaaattttgattctcaattaaaaaattaaaaagtaaaaatagttttatagaacatggtttttgaaaaatattttattttttcaattttaaaaacagaaaattgattaaaaaagtattaccaaacgccaccttaattattagatagagattttgcatctttggccctttaaaaaaaccgaagaaagaatcaattatgtgaaagatgtggccaactaattttcccaccacccattcaatcacgtctctcactctcaattattcttcctttcaaacccttatgtaaattgtcaatataattaataattaaataaaaaaagcagaatctatcttacctaaagcatgtgatcagtgattacactgttaagttcaaatatgtaactgaagactattctaactgttaagcaaca

SEQ ID NO: 288253 - DNA, 622 bp, Cannabis indica
tattgatcgttggccagtaatatccttgtctaatgatctttttagacagactttgccagcccgcatgatccccacagaagccttcatgaatttctctgatgatttcatttgcttctgcggggagaacacactaaagtaggggcattgaatacccttttctatatagtttgcctttgatcattgtgtagcaaggcactgaatacaatagttttcacacctcgtttttgtcatttggaagttgtctgtcgagtaaataattgataataggcgtcatccaagttggagagctatctatcatctcgacgccttcagtttcacatatacttggttcgctcagcatctctaccgaaactaagttcaattcatccaagtccttttgcaaggccaatttcgctaaggcatcagtgttggagttttgttctctcggaattttttcgattttaaagtaatcgaatctttccaagttcttccgaactttctttaaatactatgccatttttaaacctttagcctggtattccctgaggacttggttcacgatcagcggcaaatcactatgacaaatgagattattgactttcaatgcctatgctatctttaactcggcgatcaaggcttcata

SEQ ID NO: 288254 - DNA, 1187 bp, Cannabis indica
catatatccaactgtattcctccacagccttccttatcgaatttacaacagcttctttatgctccctacctttcttctttgtcttagataaggtaactgcaatgtacaccagaaaaatcattcaaaagcacatttcaatgagtcaaaaaatttcatatgcaaaggttctcattacaaaaccatatatcccagaaaaaaaaatgaatttatttccatgaaaaataataaatggagcctcagaatcccattccaaattcaagtaactaaatttagtagtgtgactttgtttatacagaaatcgcattctgggcacctaatatatagtcataattaaaactccaaaacccaaaataaaagaaaagagaaattacgagctaatttgaaaattaccgagctgaaattcatacatgaacagcaacaagaaaacagtatgttaataaaaataaagctttttaatcacccaaaaaaatgaaaaatattctacaagctgatttcgagttcaattagtttttcaacttttcaaaaacagaaacagattaagcacaaaaagagtaagtgaagtcgcgtagaaagagaaagaaagacgaaaccaggtctatcacgcttagacttgggcatggtgagagttgagagtttgagaaggtgaagtgcggctccaacagtggtgcaaagtctaaaaccctaatatgaatatggaaccctctcttcttctaaaagggttttcttcaacggaacataccaatatttgtaccctcttgcctctttttctttttattcttatttttttttattgtattttatttttgaaaggaagagaaagtttctctcaataatgatagtgttgtaaattcgtgtgtgttgtgctaactcggtttataatatactgtactttttaaaatatgagttattgtcggtgttataaaagaaaatataaatatgtcgtgttgtgctattaaaaaaaatatgagtcgtgtcgtgtcgtgtcaatgtagactcatatttttattgttgtattcggattttgtgtcgtatttttacttttgtttggcccattttttctctctttttttgtattcaggtttcgaattcgtactttaatttttcacattctatttttataattaatgaaccaattattaaaagagaaattgctaaaaaagtattattaaatgtctcaactttttttg

SEQ ID NO: 288255 - DNA, 306 bp, Cannabis indica
aatcatagtgtgtaagactgtaggagattgcaaacaacaagaaggagaatcaacatcaaaggaaggagaggaagagatctaggttcagatctttgtgatgctctgctacagaaaggaatcaagggctagagatcagaacggaaggagtcattatattccactgcacccaatgtaagatttactaaactttatatgtgtttatttcattgttttagaattcatattaggatgttaatcaaacagacatggtagtaaatctagaacctggtaaaatatttccaacagttctgtgcgaggagtccagtc

SEQ ID NO: 288256 - DNA, 572 bp, Cannabis indica
ataaaatcaaaacataagggggtttggccgcaaatttctctaaaaattaacatatgctagagacaacatcacaaagtaacccgatatatttttaataccactaccattacacatgtagtctattggcaatatcaaaaagtaacataatatttttttaactccactaccattacacatgcaacttattggcaacatcaaaaagtaactcgatgattctaaagtaacctggtacctagaatattgaatttagttgtgtgctacattttgactgattttaatgcaaacataacatttttttcctttttgtcttttattatatttttgaaagtaactcggtacttgaaatattaaattttcttgttattctatattttttttacacatgtaacctattaataacatcaaaaagtaacctgatattttctaaagtaacttggtacctggaatattgaattttgttagtaacataatttttcatcttttgtcttttattttgctttctagagtaatttgatacctaaaatatgaaattttgttgatgtgctacattttttacacatatgtaacctatt

SEQ ID NO: 288257 - DNA, 256 bp, Cannabis indica
aaaaaaaaattgattatctattatattttacaatatatactaattttttaatattatttatttaaattaaagattacaaattttttaaaataaaaaaaaaattttgattacctattatattttataatatatattaatttaaattaaagattactaaaacaaatattttgattacctattatattttttaatatatactaatttatatttttctattttatttatttaaattgaatattataaagtttaaaaattt

SEQ ID NO: 288258 - DNA, 509 bp, Cannabis indica
gatgagaatggagtaaaggtagacactactccttatcgtagtatgattggaagtctattgtatttaactgctagtcgtccagatatttgttacagtgggggtgtttttgctagatatcaaagtaatcctatggaatctcatgtatctactataaaaaggattattcgatatgttaatagtactattgattatggaatttggtattctaaagatactaattctaacctagcctattttagtgatgcagattgggtagacaatgctgatgatcgaaagagtacaagtgaaggttgtttctttcttggaaatgatttagtatcttggcacagtaagaaacaaaattctatttccttgtccacaatttaagctgagtacattgctgctggtagctgttgtactcaattgttatggttaaaacaaatgttgattgattatagatttgaattgggtgctttaactatcttttgtgataacactagtgccataaatatttccaaaaatcctgttca

SEQ ID NO: 288259 - DNA, 769 bp, Cannabis indica
aactataaaattataaaaaatttaaaataaaaaatcttataaataccgaaataattaaaattacaacaatatacttattttagtggccttatattgtaaacgttagcaccctataatattatatataacttttaaagttaccctaaaaaaattaataatcatgtatttttgaattgatctaatttttttttaagagacttggctgtattagtataatgtatatatattctctcctctaattattaaagcaaaacttgtggactgaattgccgaaaacctaaaatcattaacttcaactaaatataaataggagaaaatatatatataatatatatatatatatatttatagtttcttaagagaataaaaaaagggggagggacacatataatatatagtcccacaaactaaatctcatcttcttataaataatattttaaaattatcaataacgctatatatatatttacactatatatcagttgatccacaacttaagtaccaataacaaataaaaaagtaatatatatataaataaataatcttttttttattttatttgtaacatctatttatatataaatgttatagtatgaatttggtatttttttaattctaaaattaataatattaatgtatatatagtaatatctatgatgattatttgtgtatataaccacacgtaggtactaggattttttcacgagtacaaataaaagtatagttcactataatatatagtaatatataatttagttcaatctaatta

SEQ ID NO: 288260 - DNA, 569 bp, Cannabis indica
gatggcatctcggtgcaactctatgtatacctcactgttgccctgatatgctaatctgatggctatagatttgcctaacatatatctgatatgttattctgacggcaactaacatgtacgctaaacatgtataaacatatgcatgacattatactaatcttatcttgatttcgaattcaggtgtgccggccaacctgagtagaacaactgctcgacgaattacaggttcctaaatcacttcaatcacagcactgttaagtgacacgctaaatcactctccagggacttaaacttgaaactaaaagtttccctatcgataaataacatggcaataccctaaacaactcaaaaatgggaaaaactagggttcccaaaactgccccaaccagaattccgattttgtggggtttcttgaggaccaaccggaattccggttactacaggcccctctgaactagaattccgattcagtggaggaatgaccgaaaattccacaactcaaccaaatcaaccccaattcgaaccaaactttccagacctgttttgtgcaacctagagaacatatccaa

SEQ ID NO: 288261 - DNA, 502 bp, Cannabis indica
taattataaatttattgtgacttagtaaattttttgtagtggtcccgctagttctcaaaggaaatataatgtatagtataatcatttaacttgcgtatattggcaggctacctctaggtttaattaaagagattttttaaatctcattatatagtatctcaaataaattatagtaaagttactatatatgtatacttttattaaaatatatataaaacacagaaaaatgcatacattcactacaacactaattaggacaagtattttcagggattataaatataaatgtagataaagaattccccatagcttttaaaccttgctgatgatatatatttatatatatatatatttatttatttatatatctgtagctagctatttgttcctagtcaatagtacacacaaaggaaagtgatttattgggcatagaatagaagaaacaagaaatatattaattatataaaaaataaataaacaataatttaaaacgaaagcagta

SEQ ID NO: 288262 - DNA, 547 bp, Cannabis indica
ttaatatcaagtatttttgatagttagaaattatttatgcttggttccatattttattaaaaataatattctttgattttttgtatttacattaaattgtttcacatttaatgcttagaagttataattttaaagcgaaggaaaatctattttttttattagaaaataattggtttgattactgattaaattatgagaatcaatataaacataaatatttttatatacattaagtggattctgaacccttgataatatcctaaaatatttctgaaaatatctgttactgtcatttttatcatttaaacactttattttattttgttaccaaaaacctcaccattttcggaactaggttagagttttattagcttagattaaataagtattttcttcgatttcacgcaattcccatgggttcgacctcgttcttcacaatctccatactacaataaagattcgtgcgcttgcgagttgataaatgtaaaacgtaccattttggtatacaacaatgaaccaaaaagaaagagggaaaaacgtagataaa

SEQ ID NO: 288263 - DNA, 590 bp, Cannabis indica
aaaaaaaataaaaaaaataaaaatattagcaaatgccccttaaataattaaatatttaagagtcaaataatagtattaattactcattattataatatttaattaattagtatttttatttgataaacaaaaattaaatattattcttattaattaataatatgtttatattaaatttaaattattgttgcatacatatataaaagtgatataatataaaagtgtaaattattgtacaaattaatatatttaacagtgcctatacataaatcgatctattgtgtataatatttgttactttactttcttattataaccttatatttaagattttcgaagaaggtagggaattttgcaaataataataattattataatcaaataattaaaatatagaatggccagtatgcatatatatttttatttttatatatatatgtacgcatatatataagaattaaattgagagagtaattaattaaaataataatatatagtgtggtctatgggcagatcatatatgtctaatggtggtattccactggccttacaccttaaaaaaatatattaaaaagtaaaaatcttttttt

SEQ ID NO: 288264 - DNA, 530 bp, Cannabis indica
acatatctctctaacaatttcaaaaaataaactcaataattttgataagttgattttcaaatttttttacactgcttcattcaaatttcaaaaaataaactcaataattaaacccaaaaaattaaacaatctttacgattaacccattcatcacccatacaggcaaacacaacaaaagcctctctctctcaatttcacctactgaaacagaatgcaatcatcagttgttaattctcattgcttttggtaaaatttacacctttaatacttctttgttacttttgttgtgctattttgagtgaaggtggctttataatgagcagatgaaattttaatacttctttgttactttataatcgagactttgagaattgagggttccttctttgtctaatttacacacgctttgcttattcttaattttgtaatatttgtttttccaggtcaaagatgttcttgctgctattattttaagaactggaacaaatgcaacatatattataaccttattattattgtttccaatatgt

SEQ ID NO: 288265 - DNA, 681 bp, Cannabis indica
atggaatttcacaattttgcatgttttatgctcaataacattggaacgcggtgtttggctattagaatcacatcttagtattttagtatagcgggacaatatagttggccattggaaatgtcaggattagttgagatcttagaattgacaaaaatacccctaagtgattttatgaccttttagttatgggaagggcgaaatggtcaatttgcttaaatgactttttgtcatttagtagtttgtaattatgtttaatattatgaatttattttacattaggttgatattttttaataaaacctttttattttacaaaaaaaaaataagaaaactcataaaaaagaagaactctctctctctctctctctctctcaaaatacctaggcagctagggtttggatgttttctttccatcaattcaagtatttcacagcaaggattaagtgatctcacgctctaggtaagttcttggcttcagcctcttttgtttcttaaactataagtaagagttcgtttgtcatgatttgtgttttgtagttctgtagctgcttctgttagttagttttgttttctgtagtttgaattatgtttagatatgttgtatttgtgcgggttttagtggtcgtgttgttaggtatgaacaagtcttgtagtttagtaactcaagcttggctcttcaat

SEQ ID NO: 288266 - DNA, 1031 bp, Cannabis indica
tgctacttttcaaaggtgtatgatggctatcttttcagacttgattgaatcttgtattgaaatctttatggatgatttctcggtttttggttcctccttcgatcattgtttggaaaatttggaaaaagtgctaactaggtgcgagaagtctaacttggtgctaaactgggagaagtgccactttatggtaacagaaggaattgttcttgggcacaaaatttcaaaggcaggaattgaggtggataaggctaaagtttcaacaatagagaatttgccacctccagtttctgtaaaaggagtgaggagtttcctaggacatgctggcttctaccgcagatttatcaaggacttctccaagatctcaaaacctttgtccagcttacttgtcaatggtgttccatttgagtttggagaagattgtttaaaagctttcaaggttctaaaggagagattgatttcagcaccgatagtaacttcaccaaattgggagttgccgtttgagttgatgtgcgacgcaagtgactatgccattggagcggtcttgggtcaaagagttgacagagtattccacacaatctactatgctagtagaactctgaatgatgctcaattaaattacgccactacagagaaagaaatgctggcaatagtgtttgcttgtgacaaattccgaccctacctgattggaaataaggtaattgtctacacagatcattcagcgatcaagtaccttatgaccaagaaggatgcaaaaccgagactgattcggtgggtacttctacttcaagagtttgacttagagataaaagataagaagggcaccgaaaacctggtagcagaccacttgtcaagattagagctggaagagagtcagaatacaaaggaggtacaaataaatgagcaatttcctgatgaacaactctttagtgtgagggaaaacctgatggtaccatggtacgctgactatgttaatttcttggctgcaaaaataacccctcccgagctttcgcgtcaacaattgaagaagttct

SEQ ID NO: 288267 - DNA, 587 bp, Cannabis indica
aaaaacaccaagcatgcaaaatttcttcttcttaaaactcaagaaactaaaagaggaggttgctataaatcataccttggcttggattatacaataagctgctggaaacaaggaattgaggaagcaaacacaagaaccctagctggttctaggatggccgaaagagagaaagagagagtttgagagtgaaaatgagatttttcttccttttccaatttttttgaataaaatgataaaatgacttgatttaccaacataattcagccaatattctaaaaacattcagcttaacatattccacaaaagacaaaacacaaatgggaaaaatgaccattttgccctcacacactaaaatggcaaaaaaaggggtacaaagggtattttgggaaattctaaattcccgaccactcccgacatttccaatgtctaataaactgccccgctatactaaaatactaaattgtgattctactaagccatacaccgcgttccatgttgccgggcactggaaatgcaaaattatgagatttcactatatgacataaaaatgcattctaaattcaaataaatcaacataaataattatt

SEQ ID NO: 288268 - DNA, 478 bp, Cannabis indica
aaaaggaatttaatatctgaccttggatttaaaaataagataaaataatcaaaattttaaaaaataagaaaagaagtaagaaatttttttttttaccatttttcaaattcaaattacactaatatctaaaattaaatttaaaaaatcaaattaatttatttctgataattagatttgaaatatgaaaagtaaaaatcaaaatacaaaattacacaaaaaatcggcagttaattccatgaaaaatcacaccatccaggtgcacattcttgggcgcaaggggctgcttgggcgcacaaagggtgctgccagcagccagccgcgcgcacaagtgtgtgtcaccaccccggtttttttcaaatctttaaaaaatcataactaattcaaataaaatcgaaattgagttctgtaaaaaaggaaattgcttaattttttccaaactatccaataaaaataattccagaaacaaaaattcaataat

SEQ ID NO: 288269 - DNA, 620 bp, Cannabis indica
ttttcccgtttttgcgtaatttacggtattagcatcctatttatcgataggattatccttggtttttattttaaatccccgataagagttttagtgtgtctctcattgaattttgaacgttatggtttagggccctgtaaagcgtcaagctgcgtttccactcaggctgactggtacacttgagcacggaacgaggtaagatagcataataacgtatatatgaatatatgcttgttttaactacttacactactaacactaattgtttatgtgattttaagagtgttagtatagtatgggatatcggtgtgttacggtgttaccaacacaagtatcagggggtacatcgtgcatgtggtacaacacttagtaattcctgagagtacattaatggctctaccaacacgagtacagggttggtactttagtgcatttggtacaggggtcgtacttcccttaagaacgttcttatccatttggtgagctcaattattgagctcagggtggcttaaacataaagccgaaatcacattgcttatatatatgtcttgcttatcttattgagtccgttgactcatcagtttgccaccttgtggaggtaaaggaaaagctaagctaga

SEQ ID NO: 288270 - DNA, 511 bp, Cannabis indica
agtagcacaatgaaaacactcacccaattactattcaaccaaaattacactcctcacatccccttcatgatacaacaaacaaatatcttagaataataagatgctcatagggtatatggaggaaagatttgtatttggctaggcttacatgtggtaaaaaaataaaaggatcaattatgctcaaaaagggtgattagggataaaataatatcatgattggctcaaaaggctcaaacggtccaaaaataggctaactcatgtctttggttaagcgttgtctaggattttgcctcaagagagaatcaaacaaattttaaaacttgtgagatcacaaaattatatatttgcacaaactttcaccaaatcactcacaattaaataatcaaggcatttgtgctcaaaattggacatatctcaatcaaaatgaaactaacacaagaattaatcacaagctcaaacaatatttatatttttttcaacaagctatgcacaatatcaattaggtattaga

SEQ ID NO: 288271 - DNA, 572 bp, Cannabis indica
aaattttactgaaggaatgagttgcatcatctttttcctttgaagccatcactacctatttataggaaacaacttagggataggttagatttatttgacaataaaataataataaaaataaagtggcaaattgcttcccaagtggccggccatggatagtgggctccactttgcaattttgctatttttctaatttttcattttattttctcaaaaatgtcatttttccaatttaatcacttaaatgccaaatctaattatttaataattaaaattaattattaaataatattaacagttaatatattcattatttagacttaacaaagtctcttaattaacaaataaaccctaaaatctcttttcttcataattaaaccctagcttagggaaaattcataaactagacatagtctaattttagaattataattgattaattaaaataacttaactgagtcttacaattagtattgtctcaactagtatggggaccatgggcctatatatccgagcttccaataaccagatctagaatttacctagtaagttcactaacttattaattcctc

SEQ ID NO: 288272 - DNA, 546 bp, Cannabis indica
gatgttttagtcttaaaagaaacttacagtttcagactaatacaataagtcacaaccagatatccctccaagcaatgaaaggttaaaggtattatttaactagacatctactattgagtgggagctatttgagatgtaatcaaataaggaacgttaggagatactcaagaaagatttatgaaagtgatctatatgttagatattaaggaactatatattagctatccttgtatctaccccaactcattcaagattttgagatggtggttactctggggtgtggaggagttattctataataattcaagctctaccagagaagatttataactttgtaaattcgaaattaccagaaagttattttactgaagaaaattctacactgtattatctcagttccaaattttaaaatatgagagatatgtcttctgtttattcagatgtacttaataagcagtaaggatttcagtatcccttgatgagtaaagcatatagtaaaggatgtttcataatatttttatgaacttgtttccagaagtttgggtg

SEQ ID NO: 288273 - DNA, 767 bp, Cannabis indica
aagttaacatagtattatataaaaatatgatatataattcaattcaatataatataatacaatacgacctaatacgacgttccaaacgagctcttaagtttattaaaataaaaatttgctatcttcttaatataatcctataaaaaatttaaatttaaaaataactaaaatatcttttaattgattaaaagataaaaatttatttattaattaaaaagataaaataatatatgaaaaaaactattttagttaaaaaaaaaaagtaccgacaaatgaatgcaaggccaaacttgagattcgatggaccttaggaaaaaaaatcttattgttaccttataaaaatgtgttattttcaaaattactacaaaaatgtgtagttttaaaaatgaaaaaagtttgtaaggcccctggttgggtgagacctagcgcattcttaggccacctagacccagggtcggccctaaagagatgtgggtggaagaataagagaggagaacaatgaagagaaaataattaattctaggattaattcttttaagggataattacataaaatatcaatttttgaaaaaaaaaaattatatatttttacaatattcaaagtttttttttccacatttttacgatattctataaaaatacaagaaaacaaaaaaaaaaaaaaaaaaataacaacaaaacaacattaaaacaacataaaaaaaaataataatatgcaaataacaaaaaatcaacaataaaattataagagtacaacataaaaataa

SEQ ID NO: 288274 - DNA, 205 bp, Cannabis indica
gaaacccgttttacacatacttagatcctgtttattgtgccgtcaactacattggaagtaaacatcacttatgtgtaataaagtttcctagatttatacagacacagggttttactgattaatgtgatcaatgatcctctatatgaatgatctacactgtaaagggattaaattaccgttacaccctacaatgtatttattcctt

SEQ ID NO: 288275 - DNA, 891 bp, Cannabis indica
cttggaactcctcctgcagcgtgtcccatgcttcttttgccgttgctgcgctcataattcgtggaaaaagattgtccgccatagcttgttgcaagcagtataatgcatgagaatccttttgttgattatcctcgagtgccttcttttgatcttccgaaagagatgtaatatcttccggaatagtgattccttcttcaacaattttccatagattttgtgatcgaaaataggtcctcattttgatggaccaaaaatcatagttttctccatggaaaattggaagaggtagtgaagagcgattgtactccgaactcatgttgatgagtgaaaaagattacgcccagtgatatatgatcgaacggggctctgataccactgatggtttgagaataaatttgtattggttttgtttagaataggtggatatgtagttaatagtttgatgatgttgataagttggatgattggtgggataaggaagagttatgtagtgttttaatttttatgtgtgtagtaagagaggagacaaggtagtaggctagtagtaaaagacttgctttggctactcaagcttggttacaatttggaagtttgatggggtatttatagttgctcaccccttacactttatggctagaattatttcttctagatctttctagttcaaggattttatccatacatttctacatatttcttaagcatgcataactagaaacttctagactaaagttttctagaaatgcctatgttctattggatttctacatgtctagaaaattctaaattattctacaattatctaaaagtttagagtatgatttttctacaaatgtgtagaaaattctagacttaatttagtattgtagaaatgtgtatcaatttctaata

SEQ ID NO: 288276 - DNA, 622 bp, Cannabis indica
aattttgtttagatttaataaaatatttacatagaaattaaatagattaagtatattactatataattaccaatgtcttctttagaagatatgtatgggtctaagtcattaaagttgactattttgtactctggttgttggtttttgtcttcattttttgtcgattcttctatttttgttgtacaggtgattatccattggtatggataatctttgtatttaaaatggtcatgtgctttagtaacacgtgcattactgatgtaataccattgatacatatttaatgtatctttccaagtgtcaatatcatatcatattcaaaaattgtagcttctactttatttccctgtgttaaagtaagtatacaatttcaattaaatttatgaaattttaaaaataatatttaacattcaattgagtattaaataaattaatttacctttgtatcaataagagttaacttttgatattttttatgcttgtatggacttgtttgcaccaatgacttataaccaacgatcatctttgctttccagttacttgttgttggattgatattgttgattgtagtctccatattggttaattctgtcatttttaatatttattaactatagtgtta

SEQ ID NO: 288277 - DNA, 504 bp, Cannabis indica
gtgagacaatagtttcaaattatgaataaaagaaggagatgagttgtgagaatgttagtttggaaattattaaaaataaatatatcgtgtaataaagaagttcaaggcaataaaaaaaaaaaaaaaaaaaaaaaaaaaaaaaaagaaaatttgtgttgatgtatttcgtaaaattaaaaaggaagtattgtaatgctaatataaccacctcaaaattactgtctctttctatagatttaagaatgagtaccgttgacgctaaaaagtaggtcaacacttactcgctatattggcgagatgaataatgagtttaagtaaaacatttggagagatacaaacaatttatagtagtttatttctcatgtcgcgacagtaatggagctacgtcaacttcgaatttttatttctcaggagatgctaactacaaaaaaggttaaagtgtttaagctcttgcttctagagaaagaaactagagacagatgctttgaccatgtgggtagtttt

SEQ ID NO: 288278 - DNA, 525 bp, Cannabis indica
aaaaaaattataatcgattttattaagtattgtgtgttatgaagtattttattataaaactagttttgtctttaatttatatttcattgttttaggaactgatttcttctttgtttttaattgtaatcggtttgagttattgcgcattacttgtttgtattcattatgttatataaccggttctattttagttataacaagtttgagttctttcgtgttatttgtttttattcattataacactgttatagaaccggttttattttaattataacttgtttgagttattttatgttatttatatgtatttattatgttacagaatcagttatatttcaattatatccggtttgagttattagtttttattcatataaccagttatatttttagttattatgtgttattatttgtgttatttattttgttatggcgttagttcttttcatatttatgcctcagtattttttcaaattgatcctcacctttcaaaaaacattataatcgattttatgaggtattatg

SEQ ID NO: 288279 - DNA, 653 bp, Cannabis indica
accctctctctctcttcttccttcatatttcgaaaccccttagtgattagagtagtgcccacacacagcaagcaatacctcaatcatagtgaggaagatcgtgaagaaagatcatcagcaaaggagtttcagcatcaaagattcagagaaagagatccaggttcagatcttgataatactctgctacagaaaggatacaagggttagagatctgaacggaaggagtcatttaattccgctgcacccaatgtaaggtttcttaaactttatatgtgtttatttcatcgttttagaaagttcatatttagggtgttaatcaacatacttgtgagtagatctaagatcctggtaaaataatttccaacaactggcctcagagccatggtaattgatttgcttgcaagaaatttggactttaaaacgattgtttgatgtttttggatggtatcatgttgtattgagtgttatttgatgattgattgatgtttgtgaattttcgtgaaaaataattgaatatctgtttctggaattatttttattggatagtatggaaaaaattaagcaagttacttttttacagaactcaatttcgatttaatttgaaaaaatcggggttgagctgaaaccctcgtgcgcgcgcggaaatcatgcaa

SEQ ID NO: 288280 - DNA, 620 bp, Cannabis indica
aaaacaaactctaactcatgcaataactacagccaccaatttcaaaaattctctttgaaaactaaacttttgagctaaaatctccacaactctaaacaacctaactatcatgcatcacaagcaacttaattaacctcaatttatcatgctttaacttcagaaacaacatcaaaaatccagcagcaagaacaacctaaactaagcatgcattacaccatttttcatcaaaaattcaagaaaacaaagaagacaagagtaagaacaatacctaaagcttgagttgcacacaaaattagcttgaaaaaccaaagaaaatcccaagttcttgcttcttcaaagggccgaacaagagagaagaaaagacagagctttttgagaaatttctatttttttctaagtttgaaaagaaaatgaaattaaatgccacttaacccattttacttcagccaaaataataatcaaataacatattaaattcatttactaagtccactaaaggacaaaatatcaatggggcaaaatgaccattttgccccttcacactaatatagcataaaaagcactaaaggggtattttgggaatttctaaattcccggccaatcccgacattcccaatgtc

SEQ ID NO: 288281 - DNA, 764 bp, Cannabis indica
tatcatcactaaagataatatttttttgtagtgctcgtttcacgctaattggggcattgggcaaaaaaatataattggacaatttttagtcatcgaagagtactttccaacattcactctcgagcggggagcgagttcaagaccaagcaaaccttatctgtccacataaacgtcgatgcagtcgagaagagatttgaatttcaccctttcccccacaactcatctctctgccttttttgtatgtatagtagtaataaaatttaatcataacatatagtattttaaaaatataattaggttttttttttaacaaaatatcaaatggagtatcttacaaaataaattagggattttttttaagaaaatagttatagttttttcaataaataatagtaaaaatataaaatataatatttttaaaaactaaatttggaacctttttttttaaaacaacatgaaacaacataaaaaataaccttaggtatttttgtaaaaaagaaaaaaattaaattggtcaaaaatttcaaaagaaaaaaagtgtagatccatatttttgtaatgttaattagatttttgatcataaaaatatatagataaaattctagtaaaaataggctaattgcagatgaggttatagtggacttaaaaagcccacaataagaccgttagatgaggcctttaaaagtcattttagggattatttcacaaaaacataaaaacaacaacaacaaaaaaaattataaaaatacagttttacggaattt

SEQ ID NO: 288282 - DNA, 531 bp, Cannabis indica
cttatgatatctttagccaaaattgtttttcattttccaaatatctaagccatactttataaacctcaaaaagccctattgattctgaaaggatgttgtcaacattagtggagagaggtaagcatgcaagcatatgagttattgggtagtggaatggttggaaagagtaaaaccattataacattgtttcgagcgtcaagtcatcttgtgtttgtgcagtatgtgacaaactgagcatctaaattaattgttagagttggtggaattgaaattctagtttgagcgatagaagagaacaacacatgaggcagtagtattgtgattatctcatagtgtagttagtagtatttatcttactccagagcgagtaagaattcgctgcttaaccccgtcacgacgggggctcaaaaacttgttgctataatttataaacactacgcaagtatacgcaatcaagtagtaaactcacacaggtgaggtcgaaccacagggaattggattaatcactactaaactatacttataattcta

SEQ ID NO: 288283 - DNA, 607 bp, Cannabis indica
tgtagtcatgatgaaattataccataactgattggtgatcagacgatccgcccaatcttttcaaacttgctcagtattactgtcccagcattgttcaccagatgatccactatacaatattaatttcataacacattaaaattcaaacaaattttgagatgatatatatatatatatatttatatatatatatatatcttgcccccccaaaaataaaattgaacactaataattaattacattggccaaaatgttgaactgtttcatctatgaacctcttacaatcttccaccttggtaacatcagcaacaatagatataacatctggagatcctaatttatgagcttttcttttgacttcttcaagattgtctttaatgtcaactaaggtcaaacaagctcctcttctaccatactcataagcaatttgcttcacaaaattcataaatcaaaataagttgtaataattaaaacaaaaatgaaaaattatccattatacttattttttttttaacttgtcttccatgggttctcaagtagtttttgctatacggagtttggttgtgatttaagttgcaatagggatttctgtgtagaattccgtaaa

SEQ ID NO: 288284 - DNA, 792 bp, Cannabis indica
tcctttgaaaaggcgcaagaagctccgtcagactacaatggaggatggtttctgggccgaattcaaaaatgaatacatccctacgtttcgctttattagggcactctgagaagttttgttctaagctttttgatataccagccgagatgatcataaagccttatggtgcttggatgagggctcaaccatgacgacgaaacaacctggtgggctctcagtgattgcgtgatgggaatgagatagatgagatgtttgctggccgatttaatggtgctgcggcgactgcttcgagaatgctacatcagcaggctagaagggaggaggttgttggaggattctgtggcaattcgggtgggaaatatcttcaatttaattctccgaatgttgtgaaggaaaatatggaatatcatgttggtgttgaccatagtgggaatgggataaacgctaatgacactgatattgatgatccgaatgatgatgtcatgttgttggattctaaaaaaaggcgcacaagggatagagtgcaatcaggcaaacgggtggtgggccaacattctattggaccgtgttatgatccagttgagaaggataatagtagtatggaggttcaggtggctgaagttaatcatgatttgggctcaaaaaatgagcctttggtgggtgctgggatccaggcccactattcattatgagcatcattaggtggaattaccatgggcttgggaacccacgggtttatcaattccttgtggatcttattatctaaaagaaacccaaattttttgttttgtg

SEQ ID NO: 288285 - DNA, 633 bp, Cannabis indica
tttagatgtttttcctgaagaacttccgggtttaccaccatagcgggaaattgattttgttattgatttcgcacttggagtggaaccagtttctaaggctccatatagaatcgctccagctgagcttaaggaatttaaaattcaactccaggggttacttgatatagggtttattcggcctaatgtgtcaccctggggagctccggttttgtttgacaagaagaaagacgggtctcttaggatgtgcatcgactatcgagagttgaataagttaagggtcaagaataaatatcctttacctgggatcgatgatctttttgatcaactttaggggaagacggtcttttcgaagattgatctgtgatcgggctatcatcagctgagaatttgagaggacattccaaagacgactttccgtactaggtatggacattatgaatttttggttatgtcgtttggactaaccaatgctcctgcgtcattcatggacttgatgaatagggaattcaaggatttcctcaatatctatgtgattgtgtttaacgatgacatccttgtctactctcaatctgaagaggagcatgagctacatctccaaatggttctgcaacggcttcgagaacacaagcttta

SEQ ID NO: 288286 - DNA, 595 bp, Cannabis indica
tattatttaaaaaaaaaagctatatattatatttattaactatcctttcgaagatagaaaagaaaaaggactgtatatgaatatactgcatagtaaaacacattaagctaattaaacgtattctttataagatcaaatttttaacataatccaaatatagaatataacaacatgttttttgatgtgaaggttaaacataacaaatggcatagtttagtctccgtataacacaacaacgatgtgagctcattaattttgatagaaacaatgcagatttgaaaagattcaataaggagacaaaaatcccaaaatgttagaaaatgaaaaattaatcttaaaaattgggggatgatttacgaataaaaagaagacccaattggatcagaacctgaaattgggggacgatttggtaaaaaaaaaatccatttataattcgttcttttcctgatctctctcaacaaactaattgtatatgcggtttaaggttcaatttattttatatatatatttttaatttctagagttatagttgtgattatatatagagttgaaatatgctaaatatcagttcaaatattaatatgatttgttttat

SEQ ID NO: 288287 - DNA, 623 bp, Cannabis indica
gctattcttccacttcttcttattgttgggtttggaagcaaaggcaatgtttgcctcagccttagccgccccattagcattcccagaattaggagctttagatcctcctttctgtggtcctccaatcaaattttcaaatgtctgaaggttgttgaccaactcgtgaaagtcaagttccaacttgttcatgacataatttgaagtaaagggtagaaaggctggagtcaaactattcaagatcagactcacttgagttgtctgatccataacagctccatgattctcagcttcttggaagtaactcatcatctggagaaggtgatcacgcacgctctgatgaggtctcatccgtgcattgatgaaattctttgtcgcctcaaagcgagcttgaattgatgccatcccgaatagctcagttaactggttcatgatttctgcagccgtgagagtgttagcaaaccttgttttcaaggtgtcaaccatgctagacagcataaagtatcgagctttgtgttggcattctgccaacgctcgaactttcctttactgccttggttgcattctcacccggctgctcaggagccgcttcagttaacacaaacagggcattttcaccaatgaga

SEQ ID NO: 288288 - DNA, 474 bp, Cannabis indica
ttcgcattgaaaagttcttggaacttttcccaggtcatcgtggtgacatcgtgtatcatggacaccatgtcccaccataccaatgcgtcctcttgaaactaaaaagtggcacacaccactctgtcattcctggtgacgcccatgaaattcaatattttagtgataacagttagccgcttccggaacctttcatacagatgttccattctatttaccgctaacactggttcgacctggacaacaggggcaggtgccactggaacttttggtactggcactgtaggagcaccctgctgtctcaatcgctggatttcattatcttgttcctcaattctggcttacatttctgcaaacctgttttcccaattctgggcttcctgagtggcttgggcagcctgtggcgggttagcatcaccccgaccacgagccctgcccctggcacctctgcctcggcccctagcatttgggggaaac

SEQ ID NO: 288289 - DNA, 225 bp, Cannabis indica
tgtagatcatctatagaggatcattgattattatgattataacaaatggataatttatagcgtatttatatcgtggaacatatagagccctctatataattgagagattatgtcttatttataaattttcactaagatatggcttgattgtgaagaaataggattttagagtttatttgttaattaagagactttgtggagtctaattaataaataatataaatg

SEQ ID NO: 288290 - DNA, 1042 bp, Cannabis indica
aacttaaattaacaaacattcaaaacactaaaatgttggaagacaaagactttgaataattcatgcaattgtctaacatttcagtgattcatgacatcccgacacttaatttcctatatgtgtacaataacaggtaagcatctcttcctatataacataatttcattatatgtattatatggaaactgttaagtacaatgtaccaatatgcctaaataatggattctgtaaattgttagttttgttataattataatttcccaaaaggaaaattgaaataagattaaatgcaattaaaagcaatgtcaatttcccaaaatcgagtgggctataccaaaccaagaactccagttactgattggaacaaaaaaaccgccaagtacagcagttcacaaacaattaataaaataaacaagtaataataacaataaaaatcactcatcttgttgcaaaatagtctccctttgcttccaagataatttactattacaataccatcacagcaaagtcagttatacagtattcacttttaacatacaatgatgccaacatatgtaatataaaatatagaaaaaattatattaagattttattgtagtataaaggttcaagggtaaataggcatctcagtgtagatgcagaaggaacatgaaaatatacactgagaagaataaataataaggatctaccacaattttttaaacttattttctatcccttccacattttttccctatacctaacatagtcaaaaactccataattcttcaaaggagaatgcaactaatgttttacttgctaactagagtacttactaatgtcttattacacttcctcaagtatgaacattaagctttgatggggttgcaaaatgggacttctaaaccttgtccacttctatattactttacaaaatagctttcttttgatactattttataagatgaattctatctgcatgagtgaaaaaatttcgaaagggttttaatttcataaggtctcaaaaatgtacgaaaattttattttctgtagtacaaatatc

SEQ ID NO: 288291 - DNA, 613 bp, Cannabis indica
ttgcgagtagttcctccgatatggggacctccggagatcatggctaccctcccattaggcctgggcggcagaccggggatgtgctgggcgtcgcccgtgggagcagctggagctaatgcccctgctgtaccccccggtgttccctgaggcatacccacagtcgcctggcccggattaaggtggggcaacctatttttgatccactcgtagaggtggcctaaccggattagattttcaatctcgtccttgagattcttgcattcattggtgctatgaccgatgtcgttgtggtactcgcatcttttgctcggatctctccgggagctatccttgtacaacggttgtggcctccggtagtgtgtattttgcctagtagcaaagtacacacgctcttgggagtccgacagctccgtgtattgagtgtactggggggtgtacccccttttctggcgcttctcccccgtccgggtgctacccttggaggaccttttactcctcgagccctgggaagggcctgccaggctagcagccggagcagagtgcgaaggagtttgtccattcattccggacgggttgccgaaatgggatgatgctggtgccaaggcctggccct

SEQ ID NO: 288292 - DNA, 613 bp, Cannabis indica
tatgaattgcttacttctgaattatgcatccaagttagttcgtagagttattgagttgaaattctggttattgatttgcttgaagttgtgcaggtggtagtgggagttcaatcaattgaaggtttagttatcgattgcattgtttaatttcagtttgagttttagatttactcgagggcgagtaaagattcagtttgggggaatttgttaggctatttttagcctaagttttgggtcacattttatagttatttttcttctttattattgtttttggaatagaattacgcttgttttctttgatttcaggtttcaacacttggaatgtataaattggacaaatttcggaaaacagtgatctataaaatagagaaaattttaaaagagaataaagctgaaacttcaagcctaaattcgactatgttctgatcatattttggaaaaagtcaaaacataaaagttttagatctctttcttatctttccaacgcatcttgaatcagcccatttggagttcgtatgagaaagttatgcccattttactaaaagatgtcgaagctgaaaattccatctcgccgcggcgagatttccatggccgcggctagaaagtctgg

SEQ ID NO: 288293 - DNA, 456 bp, Cannabis indica
ttcctccttcgagatattacctgtacgttgacaacaatcacatgccttcacaaagtactagcatccttaaagagtgttggccaaaagaatccactctgcaacaccttagcagcagttctggtcccactgaaatgtcctccacatggtaaagcatgacaatgatttaggatagaatacatctcctcttcaggcacacatcttctaattatctgatcagcgcagtgcttgtagaggattggctcttcccaataataatgtttcacctcagaaaagaacttcttcaattgttgatgtgaaagctcaggaggagttatttttgcagccaaaaagttgacataatcagcataccacggtaccatcagattttccctcacattaaagagtttttcatcaggaaattgctaatttatctgtacctctttcgtattctggctctcttccagctctagtcttgac

SEQ ID NO: 288294 - DNA, 703 bp, Cannabis indica
agatgtatgctgcagaatcttccctaccactctgtcggaagccgctcaataatggtatttcaagttggctcctggaaagtttagttcatggaaaaccttctcttctgaattccatgcgcaattctcctcctcgcgccaactcccattgcatttgggagacttggtcgaagttaagcaacgaccaggcgagccactccgagcatacataagtagattcaagacggaggcaaccaaattttcacgggtaactgaggatggaaagttctccgcaatactggggggcatcgagccgaaggcttcatcaatctcgaagaagccattcaacgagcggaatgtgagcaaaagcctggcaagtaaaaggctccttccactggaacatctgcccaagttccccactgcccaaacaattcaagttcaagtggtaagcgttccagcaacaaccacaagcaagggaatgggaagaaaggaaagtttactggccaatccgaacaagctcccttgaagaatcatgccaaatacactgcattcactattctaactgaagatatagaaagtgtatatatggcaactcagtcgctggccccgtataagaagcccgcgcccatgaagaaagattccaacaaaagggacatgacaaagttttgtcggttccacggagactacgaccacgacactaatgaatgctacaacttgaagcgggaaa

SEQ ID NO: 288295 - DNA, 516 bp, Cannabis indica
agaacggccaactacgagagaagctgagttcggatgtcagcacgagtcgacaaactacacagcaagtatggcttcgcacctgcagtacaatattgggcgtacgaggcctagttttggaggtaggcaagatgtatggcacgaatcacgggattccggttcccaagatgcttagctggacgagcaagggcgatattgggaagaaagacgtcagcgcattattttctagacgggtatgaatttcacttatgttcagaataattatttaacataaatggttgtaataaatgctaaatggttctattttaatattttttggactataaacagaatcttgaagtggtgaaggggctacttccacggacagaggaggaggcatttgtgaggaccatatcttacgatggtgtggagaacctggttgatgatggtgtggatgacacagaggctgaggcaggtagtcaggtaccagacactcaggaaacagacactcaggtaccaatttttggaacttttttttta

SEQ ID NO: 288296 - DNA, 106 bp, Cannabis indica
atgctctatatgttccaccatatagatgcatcattagttatccattgttataatgaaattgacgtactaccaccactttatgttcgtttggtcaagtctcgaagga

SEQ ID NO: 288297 - DNA, 711 bp, Cannabis indica
ctttatatgtgacataattttcacatgaagagacacattgagaaactacaatcaattactaaacctaaactctaatattagttaaaatcataacttacaacattaaatattttggaaagaaaaattaaaaaataaaaagacattatatatattgattgattgatatattaatattgatgatttgatcatattttttttatttataggtagttatttaggatgtgagttatcaaaaataaaaagacattatattaatatcctgttaatgaataatttgataattcatttaaataaattaataaataagaaaatagaaaaaaataaaaaataagaaaaatagctcttatatatgccacatatcctccttcaaaaccatcttatatatattgattgatattgtttatattattctcaaaaaaaaaataatatatatatataatataattttatatagtctattaatacataatcaaaaatagtaaaaagccaaatatttctctaacaactcttctcccggaacatgagaagaaccaatcataagagtaaaccacctccattgccaccgttcatcagataagccaccgccaatgccttcagctccgtcccatgctagactcgatggcgttaacgaactccatcacccatatgctagaaactcaaaagttattccaaaaatttaaaaactggacgtagataatcggttgtttcttc

SEQ ID NO: 288298 - DNA, 835 bp, Cannabis indica
ctcatttctcgccagtgatcgctgctagctcaagcaaagctattattgccatttacagatgacccagaacccagcccatgctcagtccatctccaatactgccaatgttgtcactggtgtacgaaacttccctcgttatagtggaacgatagtttgtatcattaaggtactagtaacttgagtattttatttctttggctctgtctgtatttgtttctttagaagatttttgttttttttttttgttgggagaaccagttaagtgaatttattgtattatatttttactccaattttctattggaataaaaaaggtcttcatttgctttgatttctcttttttcaaatcatatatttattgaccctacccaactcataatgattttaactgttttttgtcagataaagcttataatccatattaagattggactccatgttataaagaaaaaaataaaaaataaagaagaaagatggagtgatgaagagcatttacaaataattaataatgagcaaaaaaaatatatttatatatataaagtaaaattctagatggttggattaattaatccaaaatacgtatatatatgaaatccaatcaattcaattttgtgctttttttaagcttgtttatttttaacacatcagttatgtataagttgctttatcacattgatttttatgactaacaagttttttttaaaaaaaattacataatcttacatagaaacaagtttttttaataaaactttatatatgttactatgtagaatgcaatttcattgtttatgtaactggtttttatattttattgtgtcatttttatttagttata

SEQ ID NO: 288299 - DNA, 677 bp, Cannabis indica
cccatttgaaaaaatcaaaacttaaaacttctctctctctctgccgaccaccccacgaaatcaccacacccacatcccaccaccacccgaaaccccatcggagcaatccagtccgaccctaacccctccgaccctctcgacccaccgtcatcaacgccgcacagaggagaccgaggaccaccgaggaccacccaccacctccgatgaaggacccagcccccctctctcttcctctctctcaacccgtgagcctcaaccgaaaaccaaaaaaaaaaaaaaccacggtccgatggggggtccgacgggtccgatggggggttccgatgcatgtgcgggttggaaaaaatggggttgagttatgtgggggttattttgggtttttgataaaagtgtcatatatttttagtttgaaatgtatttatttaagaataaaatattagagtttttaaagtatagtttttcaaatttccctagtgatatttatctataatgcacacaacacttaaatggccacaaaaattacacttaagattcacacatgtttttaatatagccggttccatcttaaatagttttcttggttggaattaagaacaattttctttcttttcttttcttttttttttttttttttttagtttttttgttttgtagtattcattgatttatgttacatt

SEQ ID NO: 288300 - DNA, 523 bp, Cannabis indica
ctatgctgtagaaagaatgcttaggaaaccctagggttagaaaacttctgcgattcatcttttccatgtccttacgttggctttcagctgtagagcttattttacaactgcattgcgtctattttccatcttgcttattacaagcttcatgaacttttttgccctaacacaagaaaactttctgacttcttgagttttgactttccttcgaacatgttgttctttaatctgttgagtactcctggttggcatattttcttgtttttcgtttgatactccatccaacactcatcttgtgtgttgtcttttgtagatgaacccaggtgagtcttgggaactcgagcatcaaatcgaccaggatttgcttcaacttctgcacgaagttcaccctcgtcttcgtgctagccctccttctagcgaagaaaattcttctgaacccgtactcagccataggatgatggctcgtacgaagaaaaccacgcgtttggccgacgcttcttaccctcaagtggctcagctcgcc

SEQ ID NO: 288301 - DNA, 687 bp, Cannabis indica
acccttttccttatcaccacacacactctcttcacatactaaacacatattaaccccttttatatccaacacctaaccctaagggctttattaggcttattgggttaatgagtacaattagtggtggactataatttaatgggccaattatagttttagggtgctctcatgtgcgtctaatacatttattaattattaaccatcccattatggttgttgacaattattgggcacatagttaatgattgtgtttatggtattaaacctatgattatattagcccacaatattaattctaataaacttttgtaacctatgttgtctgttgccataccaaagaaggggtgttcccattcttcgccagttactatgttaaacgatcggggtatcccgtatcctatttttcgaccttaactaaatgtctcactactacaaaagtcagaattcgcgacggtttgaaaaagggaccgtcactaaaaaaattaagtaactgtttaaaactatcgagaaaaatcagtattcccgacggtttataacagtaattacaggaataggtgacgattttaattgaattcgtaaaatttattgagcccttataggtgacggttttaattattgattatagtatttattataataacaaataataatatatataaactaatctaaatttttactttttttttt

SEQ ID NO: 288302 - DNA, 503 bp, Cannabis indica
gcagcatcatctccgagatagctgtccgaaggccggaaccagctggatgtaatgtaagctgaaggacctaagggaacgggctccggaggaccagaacccatccgggaccgacctaggaaatctcctaagtttgaaaaataaaattccttcaaatgatctccccaccgggtcgagggcatcctaaacctataaagacgctcgtcgaaccctacgggcctaagactggcatactcgccaacagaaggaacataatgaactaccaaaggagacttaccgccggcgccggaagtgctggcaccaggagccccagtgttcggctcttgaaccgaaggctgtggcctgggagcccttctctccgttgaatccccaatgtgaaggggcttcccggcaatcgcctgactccttctctccaccgggctccccacgcgaagtgtcttcccggaagccgcctgggccttagagtacgccttctcctgggccttcggtagagatactcctggtac

SEQ ID NO: 288303 - DNA, 551 bp, Cannabis indica
tgtttgttcttggttttttttttatattattttttatcatcttgtttaatgtagttttctgtgttggatgtgttatgtcatgatttttgacttttagtgaaaacaggtttctgtaggaaccggtttatggtctttgtttctatccatgtttctgtgttattttctgtaggaaaccagtttctatatttatgttaaaatcttgtttcaattaatttatggttcaggcatactatcaggatataacggatgatggtggtgcgttacagttgtccgttcattctgttcaagctgaggtacaagctttttcacattatgttttgcattgtttggatgttaatgttcgttctaaatattttttattcaattttgtaggaggaaaaggagactttgaattttgaaaatatgtttatcgatcctgattttcttaagggtgtggttgatagcactgttaagagtgctttgaagacagatgatgtttcgtttcatgatgatagtgataagttgagtttggttttgtacgatgaatcgtatttgtctccggaggttcaaaa

SEQ ID NO: 288304 - DNA, 619 bp, Cannabis indica
ggccaaaataaagcatacacctcgaacttggacaatttagtcattccatgcacatttcaaccccaattaaatttaagatttcacattactaaataaaatgccaataattttgttcaaattgcatttcggccgaaccccgttcggcccaaaatacccagttgtgactatactacgcccacctgtcagaacacacgtaaaaagacaacataggcatactatataataatatagttccattaagcacgtaattaaattaatttcatcaatttacccttctgaggtcataattactaaaatgcccctggctcactaacgggttcttaacatgacataaatcatataaattcacatatattgaactatataataatatagttcctcaattattcataattatctaattagggttttgctaatccactttctaattctaaggtatcacaattaccccctcatgaaatttcgtcccgaaatttacctgaacaactccagatatttctgctgcatatccgtctcgagttcccaggttgcgtcttccactttactgtttctccacagtacttttaccagtgccactgtcttgcttctcaagactttctctcttctatcgagtatctac

SEQ ID NO: 288305 - DNA, 696 bp, Cannabis indica
tgtaattgtgaatgactatatgttctggacttaccagattttgtatatattaaaccataaacatgaaaactacatgtaaacataaatgacttctaatctttcattgataacaaatcagattagattgaaatgggttttatttagggcataaaatcccaacaaactcccacttgcactaacataaaacaagtagtgcatttcaatcaatctattgtcttgatcttcagatcaagtgtagtatatttgactcaacccaaatttctggaactgtaagtctgtggtaagctactgctttctccaccattacttcctttgtgttcataaaacattatgcaacattatttgctatatgcattactcatttagggatactgaattctttactgcttataaagtgcatctgaataaacagaagacgtatctctaattctatccaaaaattggaatagagataacacagtgtagaattttcttcagttgaataactttccagtaatttcgaaattacaaagttatgtatcttcactgatggagcttaaattattatagatgggtttttacactcttctagaataactcatccacccccaaagtaaccaccatctcggatcctttatgagttggtgtagatataaggacttctaatatatacatccctatcatctaacatataggtcactttcagaaatctttctt

SEQ ID NO: 288306 - DNA, 553 bp, Cannabis indica
cccacctactttttttctatttcccacatgcccacctatatcttctcacctatttcttctccatttcccacaccctataacgaaaatcttaactctccaaaaccccacccacgcctccgcaccatcgccctcctctctcgccgtcttcctccctctctcgatctccatttcttcttgtctctctcgtccatcgatctccacccacccctcctcccgtcggtctccctctactcttcgtcgcatacgtcggaccaccaccacctcccgtcggtgtccctctcatcttcgtctcatacgtcggaccaccaccacctcccgtccgtctccctctctctctttctctctctccaagctcggtataaatacatttatttatttatatacttttttatttattatatatttattttgttattgtataaatttaatgtgttttaaagttagttgttattgtaacaaaattaattagttgttttattttaatttaggtaaaattataaagctaatggagaaaaaaaatgggggaaaatttaatagcagaaaaatctgtatt

SEQ ID NO: 288307 - DNA, 880 bp, Cannabis indica
gtatttgtgaggcttccctacgattttccaataggtccaacgattcattcatcatctggtgattactgacttggttgtatgtcactcgtcggtgggagggtgggtctagctcgaccggtatcatcgcatcatacccataagcaagggcaaagggggtatcaccagtagctgttctttctgttgtcctatatgaccacaaaacttcgggtaattgctctggccagcttcctttcgcttcttcgagtcttttttaaggtgtcttttaaggtcttattcaccgcctctacctgcccgtttgactgggggtgcgagaccgccgagaagctctttactatgccatgcttaatgcagaaatttgtgaacaggacactgtcaaactgggtaccgttgtcagataccaatttatggggtaatccaaacctacatataatgttcttgaccacaaagtcaagcaccttcttggatgttatagttgctaggggttcggcttctgtccactttgtgaagtaatcgactgctactaccgcatattgcactcctcctttgcccttaggcaactgaccgatcaagtctataccccaaatagcgaagggccatggactctgcatttgcgttagctcgttgggtggagcccttggtatttttgcaaacttttgacatttttcacaccttcgaacatactccatggagtcttctatcatggttggccagaagaatccttgcctcagtaccttcttggataagctttgccccccagcgtgattaccgcaaaaaccttcatggacttcttccattagtcgttgggcttggtcttgatgtacacatcgtagtaggggcatcgagtaccctcgccgatacatgacaccatcaatgattaggt

SEQ ID NO: 288308 - DNA, 635 bp, Cannabis indica
atgttgttcattttatcaaagttgaaaagaaaaaaggaaatttttcaaaaaaccaccattttctctcaaactctctccctctttcggcctctctttgagcagcaaggaggtggtgttctccttggaatttcaagctggttttaacaagatttttgtgttctcaagtgcttggtaagatccttgtagcttcattttagttttcttggtttttaagaaaagttgagtattgcatgcttgagaatttgtggctgtagttattgctaggttttaattttattttctgtagcttaattaggtttcaatatgtggattcaagcaagtttttgttggtgtttagttgattttaaacaagtatgaagttttgagctaaatcttgattttaatggtggattgttcaattagcttgttgtacatgtgggatttgtttagtgttgttttctgctgttattatatgcatattggagtagttttaatcaggttttaatcaggtttagttgatttgtaggtgagctttagccaagtttgagttttgaactcaaagcttggagctcacatggcatttttcatatctgtgatttctgggttgttatgatgctttggaaatgtttatgggggtatgtagagcaggtctggaa

SEQ ID NO: 288309 - DNA, 923 bp, Cannabis indica
gtaattgctctaagttcaaacataagaactcagagttgagaaagagagaggagagtgaaaatcagagagatacaaagagtgttcttgagagaaaagtagtagaatctaggagataaacaaaagcaagtaaagagaatcgagacttaattactagttgatctgtagctggaagctccatcaatcgtgtattggatcttgattttgtatagtgcaagactctgatcattttttgaggggagctcaagaggacttaccttatcaactcagggggaacctctataaactgctgtgtttgcttttcttctcccttaatctcctctgaataatcaaacccattcatatttttgaacattgcatgcatatcaattgaaactaaccctagaaactaagctaagaaaacttgatcaattttcttggtatctgtttttggtaaagttaaatgttttacttaatgtaattgtattgatattgtttgggatacgtggacagctatgtgtccacttgctgagattggtaaaggtcaagattgaccttctgtttgtgtgttagtgttgactttgtgtaggaatatatcagtcaattcccaacagtggtatcagagcaaggtttattgctaaagaaagtcaacacaagaagatcaagaaagctattcaaagctggaagaacttgatccacagcaagaagattatgcacttaaggattttgtggatattcctttgaatgatccaattgaaaactctctaactcaacactttgttaattcagatttcattaaaatgagtaatattatttactagatttgatggttctggtgattacaggatatggaggagaaaaatcagatcacttttggtacaacagaaattgctaagagtacttgaagaaccaatcgaatggccagaaggcatatcagaatccagcaa

SEQ ID NO: 288310 - DNA, 666 bp, Cannabis indica
aaaattaggtttcaactaacctaagaatctttttcaaaaaaaatgctaacaactttttaaatttcatgttattttaaaaaattaaatattcaataaaataaaatgataatttaatatcatttttctgattttataatttaatttaaataaaaaaataataaaatttaaaagttagcataatatcctatttctattgaaaatatctgaccttaaatttaaaaataagataaaataatcaaattttaaaaataagataattaattaagcaaaaaagatagatttatacctattttcaaattcaaatttcactaatatcttaaattaattttttaaaaaaaattattaatttaattctgataattagatttatatttgaaaagtaaaattaaaatacaaaactacacaaaaatccgaaatgaattccatgaaaaaaagaaaaaattggaaaaaaattgcatttggtacggatggtattcagtgcataccatccacgcgcgcgtttaggtgtcctgggcgtggattgacgcacaagcatgttgcgatgtagcatttccatgcgcgtagaaggggcgttttagacagcctgggcgagaatcctcggacacgccttgtttgaaccacgggtgtcacccgtgtgcacgtgcatccgcgcgcgcatatgggtga

SEQ ID NO: 288311 - DNA, 527 bp, Cannabis indica
tatttctacttattacaccaagctgtaattaaagtcgcagatatatatattaaaaaacgcgagtacccgtgtactgcgaaaatgttaaaggataattatccccgcgaggatataaatttgtccaaagtaaaaagcaaatttgtctaagtacaaagcgcgagtacccctgtaccgcataaaaaactaaacaagtaaaattaaaaagcataacagttttaacatagaaaagtcaagcatctggagcaacaggagcagtctcatccgcgactttgctgacggcctcgttctcggcttcctcagcatccgcaccctcgacctcttcaggaaggttccctccaccaccttgagtttgagtgggcgacatagcgcgaaaagcctcggccatctcagcggcttctgctccgaggatcgagaagtcgaagtctgggactttggaaagagtggtgtaaatataatcagaaactgcctgatcatattgtttcttcccattctctttctcgacctccaagtcgcgagtcatctcctcg

SEQ ID NO: 288312 - DNA, 549 bp, Cannabis indica
agttgtaaaaggcaccgtctgggtgagtgcagaggtcagggatgctttcagtgtggcatgcctggacattacaagagggattgtccccagctcagatcagaggcaccaagggctccggcgagacccactccagctagggtgttcgcaattactcaggctgatgcagaatgccagcccttcaatcgtaacaggtcagctctcagttaacaactcttattactcagttttgtttgattctggggctacacattcttatgtggcagccagaatctttagtaaattggatagaccgtgtgatagttatgaatcagggtttggaaccctattacctggcggagagttagttatctccaaaaggtggattaggtctatgccgatcagaatagatggtagagagttaagtgctgacttgatagagatgagcctagtagattttgatattattttaggaatggatttcctatctaaatactcagccagtattgattgcaagaggaagatggtgatcttccaaccggaaagtgaagaaccatttgtgtttgttggttc

SEQ ID NO: 288313 - DNA, 628 bp, Cannabis indica
atgaagtgaaatttatgatttagaaggacatgaagaagtgtggatcgaagatgactctcctgttctctcaggctctagaccagtcctcactagacagcctcaagtgtaccctaacactcctacagagttctaaatgcagcatcaggcatatcaggtgacaatcaagccagtgccagtggtctaggaagaggaaatgaagttgatagtgccatgaccaaaagtgttcgagatgcgttgttagatgagttctggttggctgccatgcaggatgaaatgggaaatttcaagagactgggtgtctggataatggtccctcgaccagatggtgcaaatgttatagggacaaaatggttgtttaaaaacaagtctgatgaatttgggacagtgactcgaaataaagcacgacttgtggctcaaggatatagtcaggtcgaaggcatcgactttgatgaaacatttgcacccgtggctcgattagaatccattcggctacttcttatcattgcatgctttttgaaaatcaaactctttcaaatggacgttaagagtgcatttctcaatggggtaattcaagaggaagtctatgtcaaacaaccacaggggtttgaagatccacatcatccacacc

SEQ ID NO: 288314 - DNA, 617 bp, Cannabis indica
tgattcatgaataacaattataaatgaccaataagtaattacaaggataaaatagattgtaaggaattgaataaaagatgaagaaaaaataactactgcattaatccatgaaagaagtttaagagaatcacataacaaccctaaaagagatttagccaataacaatcatcttaaacatccaaagattaaattaaaaacataaaagatgaagaaaatgagaaagaacactaactgaagtcctttaatggtgtttcctatgcttctagtcatgctcgatcccctacccccaatgtccagaaaattcgaataaatcatgaaaacttagcctccactcatttttagatcgaatcaatagagttaccaaaaatagccaagagttgcgacctttgatagagagtcgcaactcttggattttttatagagatgagatttttcaatttctccaaaggttgtgacttccaagggaaggtcgtagctcttgctcaaattttttttttttttaaaaaaactttgttagcaattctaaaattctgctacgatgactaatggtgtttcgatatagctcaaaatttgacgattcaagatgttttgaaaaagctaaaagagagatctagaac

SEQ ID NO: 288315 - DNA, 625 bp, Cannabis indica
aaatccaatttcaacgccataaaaccatccttgcccacctgcttccgcttaagataatgtagaatttcaaacgacaccattatattatctgtaattaacctgcgaggaataagggcactttgatgtttggagataacctcagacaataatcccttcattctgttagcaagaaccttagtaataactttggtaatgacattgcagagagaaatggggcgcaactcactcatttgctctagggtttttttttttttttttttggtaaataagtaacttttatcaaaaacaacagaaaactaacacaaagtagtagccaaaaaaggggctacatcccttaggcgacccttaatgcaggcgttggcacatctcgcccaacccttaatcctgtctatgtctttgtaagtgttttgatcttgtaatcttctctcattttcctcggtctgaaaatagaaaaatatgtgaaaatcaagtaaaaggaactaggtatccttatggtaaccaattaccataagggagttatgctgttttttttccccatattttttaacttttgtttttctttttctaaaatttcccataaataatttttttagtaaaaaaaaaatcatattttacaaacttatac

SEQ ID NO: 288316 - DNA, 582 bp, Cannabis indica
tatgcagtctttgctacagtgcactgcatatatgcagtagcagtgtagcaactgcatctttttttattattattaatatttaatagctaagttttgtttatatatattgtttaatattaaaatatcttatattttgttaatataataataaaatgtattttttggtgtaaattttagtattgtagttggagtggaaatatttttttgataccaaatttagtgatagtataataccaaatttaatgtctcttttaagtctctattattcaacactaaataatagtctgacatgcatctttcaaaaaaaaaaaatagtccacattatatacgataatgacttcacatcccatactaaatgatatatatgcaacttatcaaatctaacttttccattttggaatgctataagacaccaataagattatatgcaatcatagtaaaattttgtattatatttgaaacaaaataattttgtgatttattcacattaaattttaatattatatctaatgcacaagggataattgcggcaaaagtccccaaaaacttgaggttgatgccgattagtcctcaacctcaaaa

SEQ ID NO: 288317 - DNA, 1064 bp, Cannabis indica
actactgttacttccataaattctgaggcgacaagtgtttcatcgacatccaaaaaagtaagtgtatatatacatcatttaatttttttcaaaaatgtaagtgtataaacataaatatatatttatatggatgcatttttaatgagtattacttatgaatggataatattaagaaaatttgagcattttatgattaattttctatctaactagaaaaaattatcatttttacattatatgagttgaagttattctattggctaaaaaaaattaagaaaaaaagtcttccagcaaaacaaatataaaaaaatgaatatggacatatttttaatatatataatgtaaaaaaatatattttttgatgtgactcttttaattaagtagtaaaacaagatgtaataatttaatatttttaaaattaatatttagagaaaattgacaaaataagtctctaaaaaactgataaattctaaatctcgaaaattgacaataatagttcccaatgtcattatttatgtatgtccattggtacccaatttaacaaatctgtcaagtgctgacaataatgccacgtgttgaaaatttattaatcaaaatcataatttcaattaaaaaaaataatttaaataataaaacttattaaaaataaataataaaactttaatatattccttttatttttatttttgttttttgtttttattgtttttctttccattcttcttcttcttcatggaacatcttatccgatctgctcaaccaccttttttttcgcaagctttttgttccttctccgccttccaccaccacccttttgtttcttcattgtggagcacagatccatcttcttcgttgagcacagaccacacttgcataaaaaaaactacccataccacgctttgatcttgggacctcaccatcatccccgagcccatttcaagtgagccaatcggtccccaacggtgcgcatcagtccctgaaggtgagtagatcgacatgttagacatttatatatataaactgaaatatagtgtttatgtataaaatggggaattaaatcaaac

SEQ ID NO: 288318 - DNA, 544 bp, Cannabis indica
ttatcaaacttaccatgtgcagattaaggttgtaaaacttagaaagccggtggcaagtgagaccttggaggcttgtgtgtgtactcgctgaggaccatataactgaggatggtctagggcacgctccatttattttattaagtgttattaaattaatgtcgcagttatttttatttattaattattatgtcttttaagtccaaactgagctcaaatatgaaatattttatgtttataagtaaaagcgacattacagtttttccgcattttaacgcttgtaactaaattagtaatttatgaaaaagtacgggcgttacagtttggtatcagagccacagttatattggtcccgaacgttctcacgagttacacatatcggctaaaaaggttccactggctaccaagtaagtatcatttttgcatgattgtattttatgtgcatttttttttagagaagtattttatgtgcattttagtaatttcagaagttctttttattttcagaaccctagaaccaactaagcaccaacatcatgagaccaga

SEQ ID NO: 288319 - DNA, 629 bp, Cannabis indica
ttatgaattggactctctattttgttagtgagaacatttaataaaaatttatattttagttataagtaattttttgttgtgattaaaagttatgattagtcaaaaaatttatattgtgactaaattaaatagttatttttttatagtattttatttttcaattttgtttaaaaaaaatgaaactttgtttcgtcgaaaattgtacacatgatataataaatgaaatatattgtagctaattataactaatggctatgactatatgaaaaatgttatatatcatgaaaatgtatcataaaaacctattataaatgatatggtatgttataattttttactttattaatttatattttacttttttgtattatttttttaataatatattctcacatcatttaaaatgataattcatgacaatttttcaagtcatgaagcattgctcttactatatatattagggatattggcggttaaattatttgaaatttttaatttttttaactacttgattttttgtgtggttaaaatacctaaactcccattttgttttgtctctatacccttccgtctaaaaaatcacaattaagtactacagtggactgtccacgtgtacacacttatacacg

SEQ ID NO: 288320 - DNA, 724 bp, Cannabis indica
gtgtacatatatatatgtagaaagtaatgtagtgtaaccattatttggcttaattatttccaaaacagttttgagaatcaagtaaaagcagtagcagaacctggtagccttcgattgagaacgagcaaagtaattttctgcccctttttttgatttgttttcaagagtttcaactctgttagtgtcagtgttagtttaattttcttcagaaaccagtttctctagtttaatttgtgttatttgtgcgttctgtgattttaaaaattgtcatttgtaaacctgtttctatatgaagatcacagtttctatatcaggtgttttttgggcttatcctatacctaatttgaaatcagttaaaaaccagtttctgagattgcattttctatattacttagaattgatgcaggtgttgtttgggatcctcagatttttggtttgtgaggtgttttaatgttcaggttaagcacgtgagattcaggttaatgtccttcttgcctgttgtttgttcttagtacataacctcttcaggggaatataagacaattctaggtagacaattgtgttttagaggttctagattgaaataaactagtgtaatcactagtatcctactgaatgatataaaaggagaaactggtttcaaacatcaatgtaatgcacatatttgatcatacctattttggaaacatgtcaaaaaccagtttttacagattgatttgtgtta

SEQ ID NO: 288321 - DNA, 506 bp, Cannabis indica
aagaggacacctaaacctaatcctaagtacagtttcaatatctggaatgaagacatagcctatgccttcatgactgctatgaaatctctaagtacagaacctcaaacctatgaagaagctatgacaggacctaatgctaagaaatggtttaaagctatggattcagaaatggtttctctgaagaaaaacaagacctggataatggttctaaggcctaaagggaaaagaataatagcctgcaaatgggtttacaagcataaagaagggatacttgaaggtgaacctataagatttaaggctaggttagtagccaaaggttttacacagaaagaaggagttgactacaatgagatattctcaccagtagccaagtacaagaccataaggataatgctatctatagctaatcagtttgacatggaaattgatcaaatggatgtcactacagcttttctacatggagacctagaagaagagatctatatggaacagcctaaaggttttga

SEQ ID NO: 288322 - DNA, 726 bp, Cannabis indica
tgtccgaaggccggaaccagctggatgtaatataagctgaagggcctaagggaacgggctccggaggaccggaacccatccgggaccgacctaggaaatctcctaagttggaaaaataaaactccttcaaatggtctccccaccgggtcgagggcatcctaaacctataaagacgctcgtcgaaccctacgggtctaagactggcgtactcgccaacagaagggacataatgaactgctaaaggagacttaccaccggagccggaagtgctggcaccaggagccccagtgttcggctcctgagccgaaggctgtggcctgggagcccttctctccgctgagtccccaatgtgaagggacttcccggcgatcgcctggctccttctctcaaccgggctccccacgcgaagtgacctcccggaagccgcctgggccttagagtatgccttctcctgagccttccggtagagatactcctggtacttcttctctgcagtggcgatgatctcatcccggaaggtcttctccgcgaccggcgccctcacgttgggacagataacccgggaaaggttagagtcctccacagattggtgcggaaggatgagttttgccttcctgcagttctccgtagtgaccaggcccccgacgtcaagatcagcccggtcataagaggcaaaggcctgggctctccgaagaaagacctgagtaggtgcagtccgttcgtaag

SEQ ID NO: 288323 - DNA, 506 bp, Cannabis indica
attgatttaaatttagagttatgatatataaaaatatattttagattaattaatatttataaaagttaataaaaaattaaaaactagagagaattaaggagagaagatatagtgctatttgaagtgattttggaccgtcatgtcaccgcctcatacttcttctttatatatatattgattattatattattttttttaaaaaaaaccgaaacgttaaggtatatatgtttattgatattttatgtatataaacaaaatttacgattcattatatttgatattttaatattttttttttagaatttattttttattttctaattttttaaaatattttgtatttttatagaaaaatattttaaaataatagtaaaaattaatttgtagatttatgattttttttatagaaaaattattaaaataataataaatatcaatttataaatttattcgtttaataaaatattaaaattgagagaattcaggagagagagaaaaataattta

SEQ ID NO: 288324 - DNA, 753 bp, Cannabis indica
agtaatcccgattaggggattagggtttcataagcataattggtagcgtgcctaattatttagggcgttacacaagcagtgaaatgcggtcattaaatttaaaatactaaatatttctcttgaattataaaacttgtaaaatcacattctattaactttttttgtacgaaaaaattcccttgaacattgttattttgtacggtgatattattatgttagtttattatgcaagattttattttttggagttggcaaaaatttaactagtttgaacaaggtctctcttcaagtattcgagttggagataagtttctatctttttattttatctattacattattattattattattattattttcattggtataatatgttctaattattatttatttttctttggttttgtagctttagtggttgcactggattggtctcttgcattgggctacttaataaatcttttgagtctagttgattattttcaattactgtatattctaggagatcctttttctttgttttaaagtaggatctttcctagatttttttgctagtttgctatccagttttcctgaggcaactctgattcatgtttattgtacacatgaattagcagttcgtgcactcagggtggatgataaactagtttggatagatgatttttcatcttttctctatgtataaacttttgagtattttcaatgaaagttcattgtcaaaaaaaaaaaaaaaagcttcaaggggtcaat

SEQ ID NO: 288325 - DNA, 856 bp, Cannabis indica
gcggttatttttcaagatttgagtatttaattactagcaaaaaagagtatgtattgggaaattccataaaaataataattggatcaattaggttattagattagacatttttcaactcatatagtgtaataaattggttttgggagaaaaagagactcttattaggaaaaaaatactaaagatgacatattattattggtgtatttaaatattgtatctcatatattttaatttaaatataattagtacaggaaatcatgactaacaataaagtatatcgagtgagtatagttaatttgtcaaataataatactttattagaaatgacttattatcaaattttcaagttaaaaatggttgagaccctataatatatatagggaaatataaatttatatccatcttttatatttaaattaattttttaaactaatacttataactattgaaaaaatatgatcacttttctctaaaccctaaaatacccatctcattattctcaaccatctctctcttcctcctttctctctcaaagcaaacccaaaaacaaactaagaaagcaccacccaaatccaacataaccaccggcgttccacccaaaacgccgatcgagcaccacccacagttaaccaccgcacccacactccgcacccacggtactttttcattttttcatggtatttttcatttttttaattgttgatttagggtgaaaatgctttttctttgatagatttagattctgtgatttttagggttgtgatttagtgtattttcattcaaagaagatgaaggcccgatggggcctgatggggcccgatagttggggccgatggtagtggacgatgtgccaaaa

SEQ ID NO: 288326 - DNA, 501 bp, Cannabis indica
gaaagatggcaaacttgaaaagcaaactgaagtttgcatgtttgtcggaaattctaaagagactaggggtggactattttatagtcgcaaggatgataaagtgtttgtttccacaaacgccactttccttgaagatgactatattaagaatttcaaaccacaaagtaaagtagtattgaaggaaatactttcagatacaactccttctaatgttctatcctcttctactcaagtagaggataatcccacttcctcggttgaacctttgcaagttgatacaacagaaaaatctaccactgatgttcctgttcagaagatcaccactcctcgttgtagtgggagggtttctactaaaccatctcattattgcttggatggtgaaatcaatatggtcgtttgtgacggtattgatgacgacccattaacctatcaacaggcaatggcaagtccaaaacagaaacaatggtaagccgacatggattcagaaatggattccatgaa

SEQ ID NO: 288327 - DNA, 838 bp, Cannabis indica
atggcaataccctaaatatctcaaaattgggaaaaactagggtcccaaaaattcccccaaccggcagaccggtcccaaccagaagtccaaaactgggacaccaaccggtcgaccggttggtacaggtcccccagaaccggtcgaccggttctgtgctgggaacccaaaaaccaacccccttaactcaaaattccaccaaacttcaccaaactctccagaacatctgcacaatgcatttacaacgttttccaaccaacaaatcccaaaaataaccactaagtcaaaatatgccattaaagacctaagttaaggtttttatgctcaaattaacacaaaacctaaatcaaccaaccaaaccagctgctataacccttaattaacccaaactaagcctagaatttgatccctaagcatttcaaaccaaaacagccactattactcaaaaacacaagctcaaactaagaagaaaactttaaaaacatgctctagggttctagggttttaccttagcttcaagagtgcttgattccctagttgattgcagcaaaacaatgaagaagatttggatttccttctggtctaggctggccgaacaaagaaagagaggaaatagagtgaatttcctcaattttggatttttctctaacttccttaattttctcaaatgaaaaggatttatctaatcctttgttgaattttaattaaacttaagtattttccaagactaggggtaaaatggtcaaactccatatccccgctcaaccccgatattttattttctctaaaatattttccactaagaaataaggttctaaacttacccatgtgatcaaactag

SEQ ID NO: 288328 - DNA, 824 bp, Cannabis indica
gaaccggaggtagcagaggtcatggaagtccgggaagcactttcttggatcaaagatcatcaatggtagtcgactttctcttgaaactgattgtcttttagttttgcaagctctgcgaggcacttttttcattgatttccttattttgacatgtaattgatgattgaaagcgtttgctttctttattgaaaaatatttatgtggtttttgtaaaacgatcagctaatatggtagctcataactttgctagagctgctatattataccccaattatcgtttagtttagagtctgttctaactgatttgctaccttgcttggtagctgaagttaatggttaataaagatgatttttcattaaaaaaaaatgtataatttattcttatatgcaaggagaatataattcacactataacaatatcaataattaattatacataagaaaagaaaaaagaagtaaaaagtttctcatttctctactttctccttccatggcgaggaagaaaaaagtgggacggaagccagtcactcgaattccaataaaagatgcgtttgtaggaatcacaagggagacgaaagatgtcgatgattctcattcgattgagggattgaatttgatcgcagagatggtcaaagctcaggatctaatcgatacagaggaataagatcgatctgtcaaaagacgtactcagagctaggctgaggaggttgaagatgagcaaatgatgaagtaggatgttcaataatctctgaagtcagcaaggagaatctgggagacatttacaaaggaaaagctatgaatcgtgatcgacgacttcttttcac

SEQ ID NO: 288329 - DNA, 596 bp, Cannabis indica
ttctcccccgtccgggtgctacccttggaggaccttttactcctcgagccctgggaagggccagccaggctagcagccggagcagagtgcgaaggagtttgtccattcactccggacgggttgccgaaatgggatgatgctggtgccaaggcctggccctggctatatccgggggtagcagagaattgtatgccacttgtttgtggagttgcggtcggggtagtacccgagggcgatactccgggcatgtaccctgctatcccggtgggatagtatcctccgtaagccacgatttgggcttcttcgaggttgatatatttttggactctcttctggaagtcctgaaggctagcagctccttcttgctgcagttcattccagaaaggagtcccagtgcggatgcctgcttggagaagtgcaagctattgtccgtcgtcaactttcttgattttcgaggcttcctctcggaacctctttatataattcttcaaggtctcgggggcagttgcttgatattagtcaaggcactgacctccagattgacctttcttgcggcgaaaaactgtctccggaagttggtctgtagcttgttccaa

SEQ ID NO: 288330 - DNA, 689 bp, Cannabis indica
acacatagaattataaatgatactttttttagagtgtgtttgaagcttatgtgaaattttttggatctcttcactactattttttatctctattttttttttgtataaatatatatgtatatagaaaatttatattaaaaaaatgaaaaatatacgtacatatattttattgttgttaattaaattcaaaatagtatagtaatagagaaaatttagaaattagatttttattatgaatttttatttatttaaaataattaactttaataaaaaaaaattagaaaaaatgagaacgtacaagattaggtatatatattttattggttttaattaaattcaaaataggatagtaaatttatggtttaaataatatcacatgagaacaatatataatattgtatatatataaataatatcagttcaaatatcaaatatcagtttaaatttttattttattattttattatatataaataaaaagtcacacccataaatttctcataaaccaagaatttagttatataggcacactttatatagaatagatacataaaacttactatttttttttaaaaaaaatatacattatattttagaaaattatgaaattaaatttaataaaataattaataatagtatagtggcaaaaataaaaggaaattttcaaaaatactttttttcttatattt

SEQ ID NO: 288331 - DNA, 698 bp, Cannabis indica
ggggggaatagttgtaaagaccgcttagtttaatttggaaattagcagttaatcatgtttaattatgaaaattatttatagctatttaaataattatttatactgttattattgaattctgagatgcattttatgtcatttagtagttttcataattttgcatttccggtgcccggtaacatggaactcggtgtttggctcagtaaaatcacaacttagtatgttagtagtttgggacggtttattagacattgggaatgtcgggaatggccgggaatttagaatttcccaaaaatacccctttagtgttatttatgtgattttagtgtgaaggggcaaaatggtcattttgccccattgttagtttgtcctttagtggacttaataattgagaaatatgtggtttattaagttttgttggctgaaataaaacaaaagggttatgtgcttttattttatttttcaaagttagaaaagttagaaagttagaaaaattcaaaggctctttcttcttctccctatttcggttttgagcagcagggtttggattctcttggatttcaagctggttttagcatagattttgacctcaagttgttggtaagatccttgtagctctcccttttagtttcttgaagaattttgatgaaatgatgatgtttgcatgcatagtttaagttgttattgttgctgtgatt

SEQ ID NO: 288332 - DNA, 930 bp, Cannabis indica
aaaacaagatgcaccttgttgatataggtagtaccaatcaatccatttaagctctattcaactgtgtagtcccatacctagacagtcttagaatcatcccacatgaccttccccaggcggtgtgagattgtacagcttacccggtgtttccccttacggatcccgggactactgactgtcacatagatggacacttggaagtcatcattggaggcccgcacatcgctggagacacgggcaaagctcgagaacgatatgcctgcacagctcaatacgagcaagaagaagtcatcctggccgtggaagaaaggaagcccaaagttccacgagcaggagagccaaccataacattcaacgacgaagatgctgtccagataagatttccgcacaacgacccgctagtcgtggaagtccagatagcaaacaaaatggtgtccagaaccatgatcgataatggggcttcttcaaatattttgtttaaaactgcttacgagaagatggggctccagctcaaggatttaactccatgccttcagcccgtctatggtttctccggccaaggagttgcgcctctgggacaaatccggctacccctcacagttggacaagctccaacgagcataactatcatggcacaattcctgatattggatgttccttcagcctttaacgtaatgctaggccgaccagccttgtatgacttaaaagctgtcacatcaatattccactcgtgcctgaagtttccaaccaaaaacggggtagggtgtcttagagggaaccagcaatctgctcgggaatgttacaaccttgcagtggccaaggctaagaaggaagtatcctccagccagagcccggacaagggaataaatattcccaagtaggaaacttcccaaggcgaggatgaagatgtggatcctcgacttggggacc

SEQ ID NO: 288333 - DNA, 557 bp, Cannabis indica
aaactggaaagtggcacagaccaccctgtcatttccggtgacgcccataaagtttaggattctagtaatcactgatagccattgcttggctttcatgacatcaggacctcccaaaaaaactggaggtgcttgcttgcggaacctttcatgcaggggttccatccgatttactgccaccactggttcggcctggacagcaggggcaagtgccactggaatttctggagcaggcattgcaggatcaccctgctgacgtaaccgttgaatctctttatcctgttcctcaattcgggcttgcattgctgcaaacctattttcccaattttgggcatcctaagcatcttgggcagcttgggcaacctgtggcgggttaacatcaccccgaccatgtgccctgcccctaagacctctacctcggccacggacatttgggggattctgggctccctgaccagcattagatccaaccgaatcgccctaggtcctggtatttcgcctggcgtccatactaatttgaacagcctgcgtaaccagagctagtctggtcagattgtgat

SEQ ID NO: 288334 - DNA, 558 bp, Cannabis indica
tatagttattaaatagttagaaactgcatttatatggttgaatttgaaaattggcgttttttgagaaaatgagatgcagaaatgataaaacagcaaaattacaaaaagtgaggcccaaattaacatttcctaggctggccacttttatagggtttatcatctgatattttcattattttaatgctaaataattcaaatctacccctagtggaatgctataaatagatagtgaaggcttcaggaaaattacacttttcacaaacacttttccttcagagaaaaacctgagccttctcttctaaaccctggccgccacctatactctcttcttctctcttgaatttcgaacctcttagtgatagagtagtgccgacacacagcaagtgatacctcaatcatagtgagaaagatcgtgaagaaagacattcaacaagaaggaatttcagcattgaagaaggagagaaagagatccaggttcagatcttgataatattctgcgacagaaaggatataagggttagagatctgaagggaaagagacataatattccgctgcac

SEQ ID NO: 288335 - DNA, 494 bp, Cannabis indica
tgagtgttatacggtaggaagtgtaggtctcccatccactgggatgagacaggggagagaaaatacctaggtccagagtcagtgcagcggaccaatgaggcaattcagaaaattaaagctagaatgcttgcctctcagagtagagagaaaagttatgcggattcgaaacgcagggatgttgagttccaagtaggggaccatgtgtttttactagtatctccaatgaaggggatcaaaagtttcgggaaaagaggcaagttatcccctaggtttacaggacctttcgacattctcgagatggttggtcaagtggcatatcggttagcgttgcctccagctctttcagcggttcacaacgtattccatgtctctatgctgaggaaatacgtttgagatcctactcacatacttagttatgagagtcttaagctgcaaccaaacatgacatatgaagaacacccagtgcagatcctggatagaaaggataaagtcct

SEQ ID NO: 288336 - DNA, 596 bp, Cannabis indica
ggtcccgcagcagtgcgatcatagtgctggtagtgggtgatatcatggtcaatagcaccaaccattaagaacgttcttaatcagttgataagccttgtaaataggtgtatgggcgcctagttacaagtcgaaagttgtatgatatgttatatgcttttcttactgagtctgttgactcacagttctactttcatgtgtaggtaaaggaaaggcgataactgaactggagtgaacctgagctcggatgggattgtacatgtcaaagcagcgcgacctggagtgttcggtctcgggacatctgggaattgtattttgatagtcgctgtgcgacctgaaaaatgtgtattttgaaatattacttctaaaaagtttgaaaacgggatcccggcacttgtaaatattttaatatattataaagtttattaattaatataaaagttttaatttgacacgtttttcaagaaaactcttcgattagcgaagattgcactgtaattgaaaaagcactgtagcgtgccttagcattagggcgttacaattttggtatcaaagccgccaggtttgtctaccaaagcttgctaagacatgtacaatct

SEQ ID NO: 288337 - DNA, 688 bp, Cannabis indica
ttcactatctgttacaaaatctgttgaagatgaaggtgctgcacataagaccttcgacgatgaggactttgatatactcgaagtggcatctttctggaataaaggcaaagccctcgtcaaatcaaagaagacacagtcggagaatgtgcctttaattgaggatgacttcaacgataaggcgtacgagcaattcattgagtcgggcagaactgttgtcgggcctttcaagacgaaggaagcgatcccccgtaaccaatatgggttttacaagtttatttttagcaacacgttagatccggggtaagtaaatgttattttcgtatttctcattatgatatacttgtagaaatttttaataacagttacattgattacaattgaatcagatatgtgcttgcgaaatttcgaaagtttgaagtggataggaggtgcatggcatcgttgcgaccgttgcgagaagttgagggatccgtaagtgtcaaagtattaactaaatatgtatcatttattgtacatgtgtaaatcatatttcattttgttgcagatcattgactgtttttctatactaatgaacaagtacgaacgtgatagtcgattacctgaccaacctcgtgtttggtacatgcccactcgcatctcggtaattgctttgctgtacagcttattttaaattttgtaattcagtttg

SEQ ID NO: 288338 - DNA, 756 bp, Cannabis indica
atagattatcttgaaaaaattcaatactataatggaagtggattaggtaccacagcttgcaaaatgccgcattcttgcggcaacactcgaggagaacgcccacgattggtttacccaattgcctgaagcgtcgatatcgacatgggaaaccttcatcgacttatttcttacacatttccaggccacaatgacctataggccaccttatacgactttggccaacatcaaacaagagcctggtgagtctttacaaaactattttaaacggtttaatgcagaagtaacaaaagtcgagaaggctcccgagtcttcgcttgtttgcatgctgataacaggtatcttgccgaggaccgacttttggaaggagttacaagctcgaaggcccgagtccttagtctaattctttgccatggccaaaccctacaagagaatcgagaattctctggcaaagttagagaagggcaatcaccaatactgcgttcacgatctcgcagtccccgagggaagaactccaggggccaaagcccaacgagacgtagcccgcggagacagcgaagtccaaagttggccaagtctcctccaaagaaggaatcctctccgaaaaggaaaggtggacctcgtttcgtcaactatactgaactcgcagtcccccgagaccatatctacgcaatcgaagaaagaaacggagtcttcaagtagccgccccccatcaagggaaatcgcgacagaagataccccaaaaaattatgtaagtac

SEQ ID NO: 288339 - DNA, 63 bp, Cannabis indica
aaatcaattaaccgagtcttataagcagtatggtctcaactagtatgggaaccatgggcctat

SEQ ID NO: 288340 - DNA, 544 bp, Cannabis indica
gtggtgtaaataatccaaaaaaaaaacacaagaagaggaaaaatgagtgacatctttcaattaaaaagaaaagaaaatatgggctttccattcaccttgatatgtttaagctggcccattgggccttttcaggtcaggatatgccacttttattcttcaattaatgattataccactttttgtttagtgatttaccaaaatatacaagatcaggatgattttgatttactttaatatgtttggttaatggaattgaatggaatctatttatattctattttatttagtaaaaattattggaatcacattttggtggattggaaaagaatgtattttccttattttagtggagactattcttttaaaagagaaaaaaaaaactatgggaaacttacaaaaatactgtaatttggagtaacttttacaaaaaatattgtcacacggaaaagtttacaaaaatactgtgtttttataaaacaccagtagaacacaaaacagaacaactcaaaacactagtagaacaactaaaaaacaccagtagaac

SEQ ID NO: 288341 - DNA, 481 bp, Cannabis indica
tcagatctctaacccttgtttcctttctgtagcagagtatcaccaagatctgagcccgaaactccttccttgtgtttggattcttcacattcttacacactatgattgaggaccaacttgttatgtgtgggcatgtactcaatcactaatggctgaatttttgtttgtgaagaagaggctatggtgtttcgaattgaagaagaagaagaaaaaggaagaggtctcatcaacccagagagaaaactaagtttttagctttggaggcattagttggataatgagaccatagccttcattttatactatttttcaatagagttatggttgaattattaggaataaaaaattgataaaaatagagtgaaaaagccacctaatggccgaccatatgatgggccctacattagtttgggctttgtcatttttctcaactattttatctatttttcacgaatactattttttgcactttcaaccctat

SEQ ID NO: 288342 - DNA, 447 bp, Cannabis indica
tttttttataaaaaaaaattaacaaaatgtcaatttagttaaaattttgatgatgaaattacaattataatcttgaataattgaccctagctatttgctttcctttttctctctcgacactatatatcatgaaggaaaggaaaaaataaagtgcattagtttagtttttttcgtatatttatatttttctaaggtatattatttttatgtgatatggaatacttgaatgaaagaaagaacataaaaactacgaatggaatatcactttaagtttctggtatagttgattttgcattgtggtatatctttattatgtgctacgatatatagaaataaaaaacttttaagagttgtatagtatttttaatttgtggtataatgttttaaagtgtttggtatagttattttgcacaatagtatttcgtttttatgtgcaatagtatatta

SEQ ID NO: 288343 - DNA, 340 bp, Cannabis indica
ggcgaggtgccatgcagcttatatataggcttacgttgctgctcgagcattttcaaagcctgcaggagcatgctttggtcaattcctcctgtcgcaggagctggattcgctgcagctgcagggctcgcaactactgcggcaaggtttgctgggacattaatcccagtggtcgcgatcggcgcgataggcgggttattatcagcattgacaccctgatcgcccgcatggggatcacggagtgtctcggtattatgtgggccgcgagagcgtgccctgaaaactgcgttgcgatgatcacgtagatcacctcggtgtacctgataacgtcctccctgttgtg

SEQ ID NO: 288344 - DNA, 617 bp, Cannabis indica
gctgtgttgtttgtagttgcttgttgttgttttcagatacttagttatgctcatttaactagatttgagcaggttgtgatgcatgttaagtagatttaaccaagcttgagttttgaactcaaagcttggagctcacatggtgatttttatatctgtactttctgggttgttttgatgctttgggatgttctttggggtattcagagcaggtctggaaggttgcatgaggtttgggtttgatttgagtgagaaatgaatttttgaaaatttcctgcactgaaccggaattctggttcagggaagccatcagcaactggtcgacccgttggggcttccaggaattttccagaactggaattccggttgtagaaccgatctaccggttgggacaattttgggaaccctagttcttcccatttttgtgttttttagggtattgccatgctttttatcgatagggaaacttttagttttagtttaagtccccgggaaatgatttagcgtgtcacttatcagtgttgtgattgttatggtttaggagcttgtaaatcgccaagcagttcgttccactcaggttgaccggcacacatgaattcggaattgaggtaagattagta

SEQ ID NO: 288345 - DNA, 454 bp, Cannabis indica
ggtgacatttggttgggaggaatgaaaatataagaatatgaatgggaatgagacttggaataggaatggaatagagtaaaatttaaaatgcataaagaaactgataaaaaaaaaattactgaattttttcaaatcttgcattggaatggtctttcctttcattttaaaatagaatagtcattctaccaaaatgatggaaaggccattccattggaatgttattccaatatttttaaatgcaaccaaacaaagcaatggaacggaaattatttcctttccatttcattccatttaattacctctaaccaaacgccacctaagtacacaacaattccatcattctgaaattttcctttcactagggtatttccttagaaggacttaggaaacgactagtaactaatcatagaccttatactatcatcaaaatgcaaatcgaatttctggggaggta

SEQ ID NO: 288346 - DNA, 552 bp, Cannabis indica
atgagttaatttttttgctagaattattttgttgatttaaattgtgatttggtattttgttgctatgtttagtgaattggttttgttcattcaagagtgtttattgtgcaattgcttacttttgcttgatcaccattagtaagtagtagctaatcttgattttggaaaaaatagggttagtggaattgcttgaatgatgcatgaatatcactttgaaaaaatgtggattgtaaatggcataggaatatgttatttaccttgtatgacttgaaggaattatgcttaaattggtattcttaaaattaattgggcataggaatatgttaattaattagagaatcaaatcataaatactttggaaaaaggattatgagattttaaattcctagttgacatcatcaatttacaacaatactcattagcaccattatatcaactttgcatttttaggccaatttaataattctagcttgtttttttttcatagtttgtgtttgttaattttttacatattctcatcactttatgttatttttgttgaaaccaatttgt

SEQ ID NO: 288347 - DNA, 500 bp, Cannabis indica
  modified_base (495)..(495): a, c, t, g, unknown or other
aaaaatgagatttttttttttttgtgtgtgccaagtgttattaacgtggcattatatttcaaagaaaaaaaattgtgactgtatcttagggtaaaagtacttcagcttttttttttttttttattaaggaaaaagtcatttttaattaatagtctctttccagcactaataccaaaaaggaaaaattaaagtctaaccggttacacagcgggtaaacattaataatgccctctaaataaattcataaaaagtaaaatatatttattatttaatgactaattaggatttttgccccctgaattttgacatgtgccaaatcatgccccctgaacttttaaggtagttaaaatagtcccccctgaacctattgagattgtttgatttattggacttttttttctaattttagttaaaaaagtctaacatttgatgaaaagttcaggggtccgatattttagtactatatcaaaagttcaaggagcatgattggtaagntaatc

SEQ ID NO: 288348 - DNA, 590 bp, Cannabis indica
agggacccttggcttcctcactgcacaatagttttgtctcttcaactcatcctgctcttcaaaactgtatgcttgcagtatttgcaatattagagatctctttaacgttgaagatcaggagcttctatctattcaactaagtgcatctgctacaaatgactgctggagttggaaatatgaaagcctcggacagtactcggtcaagagtgcttataaatatttacaagaaatgaaaggggcctggcctaatgatggtggttcgaatttttggaaggagctgtggaatctgaaggttccaccaaaagtcagtaattttttgtggagggcagctttgggttcgcttcctacttgttttcagctgaagaacaggcatgttcctgttaattctatatgtcctttgtgtaacgcttcaaatgaaacgatctaccatgctttggtggggtgtgattttgctcgtgcgtgctggcatagaactatggtggacgtgggtagcactttgaatgtcactttctgcaatatgctgctggttttgttcagtcgtggtaggcaggaagagatggaggaagccgcggttgttagctggtcaattt

SEQ ID NO: 288349 - DNA, 1241 bp, Cannabis indica
  modified_base (27)..(27): a, c, t, g, unknown or other
gcaacagtaagcagacgtgctctccangcagaagaagaagcacaaagcagacgcccggcgtttccatgctgcacagcagaacagaacagacagagaatctgctccagaacaaagccaccgttggaaaaccctcaaaacggtgagtgcttgacaagaagatgtggaagagccccaagtgcaggatatcaatgttgaagcaactaatggaagttaccatcaaataagaagagaaaatactaataaaaactgatgatgataaatttgaagaaaaaaaccaaggacgatgtggttgctctaggcaatggagaagtgattcaatgtggaaatacagaagcagggaaaacagggagtgatgttaagcaaaaatcttccctgctagtgaagaaaccttgaacaagatcaagtggaagaaaataatatcatcagctttaaaatctgtatgtactctaattcctgcatctcttctctgtttcactttatttttatttggagtatgatctttcttccaatgcatatatttgaaaacaatgacaaataactatgaaagaaaaatgaaaggggaataaaagaagaaaggaaaagaagcgcaaattcacacataattatataatataaatatatcaaggcttatgaagaagactttcactttgcatactagtcttagactgagtcactgagcaaagtataatttttcatattttgtgtgatatttacttcttttagttacattattcatgcactttctctatgatatattaattgtatattggtgggtgctagagtcctgacggggttataaaaatgaagaaattgagaaaaacagttctcaaggctcttcaagaatctggcataacagtagatgaagatcaattcaaaaatacgattgagcacaaggtttgcccatttctttctgcgatgcttgtattttctctggcatccttatgaactttgttaattatcttgttgcttgttccagatcaattcgagctcaagatttactgttgaaaacaagcatgtccggctggtagcaaaagattaaaagtacagtctcattgaaatagaaggaatccatccctaatattctttcttcagtaccattccatttgccttctccaatgggttatttgtaacttagttttaccatccacagaggttgaatttcaggtcctgggtagaatttatgtcaattgtctctcccatggaagaaaattttgatttttcctttccgagaaagtaactgt

SEQ ID NO: 288350 - DNA, 647 bp, Cannabis indica
tatgttacgggtttaataagtaagcattttcttggttattggtgtcttttggagaagttttacgcttgattttccttgtttcaggttcccggggtatcaaagttcaaattcagtcaattgatgaaaagacgggacaaattggtgaaaaatcagaaaaatttgctcattgggtgtcagtagtcgcgactaaccagaagctaggttgcgacccttttctttggtcgcgaccatggtcgcgacttggaagatttggcagaacctcggtatttcgagatttgcttgtagtcgcgaccaacctataagttggtcgtgaccaggcatggaaaaacgcagttttgacctaattcagattttttcccaattggaggcacacctttcattcctatataaggaatacgactcagaaggtcagagtaagcaagaacagacctgaaaagtggatgaaagaggagaggaagcaatcttgaaaacccggagcgatatcaccttctagtttctttcttttacccttattctttcttttatgtctagtgttgtttcagaattaatcatggatgtttttattattgttatgaactaaatttcccatttagggaggatgatgaatgttgttaaagtttttgcctagttaataaataattgtcatt

SEQ ID NO: 288351 - DNA, 421 bp, Cannabis indica
gatattttcaaaaagttcaaatcccgtgtcgaaagacaaagcggtcactacatcaagacaattagaagtgatagaggcaaagaatacacttctaatgaattcaacaagttctgtgaagatgaagggatggagcaccaactcactgttggatacgcaccagaacagaatggtgtatctgaaaggaaaaacaggactgttatggaggcagcaagagccatgctgctagagaaaggtctcccaaaacgattttgggcagaggcagtaagcactgcagtctacttgctcaaccgatgtccaaccaaagccgtgcagaataagacgccgatcgaagcttggagcggacgtaagccatcagcaaagcatctcaaagtcttcggctgcatatgctacagtcacattccaaaagagaaaagaagcaagc

SEQ ID NO: 288352 - DNA, 605 bp, Cannabis indica
aaaataaataataaacattttatttttaatgaaaaaaaattaacttgtttattttgagttttaataaacattgtttattatttaatgattaatatgtatggtttgatgtaataatttttcaaaatatataagttttttaaaaataatttttttttttgctacattttttggaattatattgtttttgttgtacatttatgaaaaaagcccaattacgaattcaatcatcaaaatttgttataaccaatcaagaaagttgggtaaaaacttagatctgaaattgcacaataaaatttaaatagctcatccaaggtcaaaaaccatagctcaaaccactagaacgaaactaaatttgtaccaattttttcaggaaaaaaacaattctcaaatctggtaaagggacataccatcgaattcaaaaacccaaatctattctttggggttctgcaacttatatacaaaaagatctaataattttttcaaaacaaaacccagaaaaaaaaaaaactggcattaaaagatttggtacccactacccagcctcaatttcttcatccatcttcttgcagtggacgtcgatgatggtgttggagtgggattcaaag

SEQ ID NO: 288353 - DNA, 721 bp, Cannabis indica
attcacttgtgtttatcttgctcatatacaatcttcttaaatctattgacgaaaaatcgcatcaacaaccttattctgtttttcctgtatttattaactttttttttaaaaaaatttctcataaaataactatttttagttaaaaaaaaaaaaaactatatttttgtacaaattgaataaagacacgtaaaatttgtaatttatttagttttttttttttttgttaaaattatcaacatcattcaaaagtcccaatagcaaggacaatgtaagagtagagatataatccctactaataatacaatcatctataaaataagggtcccgtgcaagataaagtgttatttgttttaatagaatctgtgtgcaatatagtttttttcttcgcaaaatttaatttatgcgaaattaaacttcaaaaaaataaaagaaaaagttagaaatatatggagaatacagttaaaagtaacaggtaaccaattgtgttatacttattttttttttcttaaagcaaataaatcataacacttctataaatattttaatttgaaaaatgccacatttttgcaaaactttccttaaaaaaccataaaaataaaaatctccaaatattagatgaaatgaaaagggtggtccatttatatacctgtggccaaatatagctagcagccataacactcacgtaattcagaagcatgagtccatgacaaatatatgctat

SEQ ID NO: 288354 - DNA, 518 bp, Cannabis indica
gaaggcctccttgaagagtaggttcacggaacttccgttatcaattaagactctggccaccactttattggcgatgggggtctctatgactaacgggtcatgatgagggaagcgcaccgtcttggcgtcttcttccgtgaatgtgatgggttgatccatcagccggggcctttgagctgggagttgagtgacctcccaaacctcattgtgtttcacggcccccgcgtaccgttttagctccttgcgagtagttcctccgatatggggacctctggagatcatggataccctcccgttaggtctgggcggcagactggggatgtgctgggcatcgcccgcgggagcagctggagccaacgctcctgttgtaccccccggtgttccctggggcacaccccctgtcgcctggcccggattgaggtgaggcagcctattcttgatccactcatagaggtggcccaatcggatcaggttttcaatctcgtccttgagattcttgcattcattggtgctatgac

SEQ ID NO: 288355 - DNA, 627 bp, Cannabis indica
atttttattgtaaccatcatggttacatttttcttttacctataatagcaggttaccaataggtaaaattctttttttttttagaatcaattaattatatgtctctctcttctttctcaacgtaatctattttatttttcactttttaatatttaaataaaaaaattaaataatcaagtgtaatacctttaaattaaaattataagtataataaaattttaattatgaaattatatgtgttaacacagattttcgttaaccaaatttgagcctcacggtaataatttcacatagaaaaaataaaagctatagaaaaataatatatgaacacagggttttttatgtggttttgcagttaaaattctgcatagtccacgagtcaatcttattcaaatttttgagcatttttcagggcctctttcatatgagtttttttgtcccctttcttgatcttgtctgccactatttgtaattacatagtgggcagtaatcactattacaaaaagtataattcacgtcagttataagtgtgatttaaagaatttacgtcggttaaaaaaactaacgtatatatcataatcgcaaatagtcttttattaatgtcttttttgaaatgacgcaaaaaat

SEQ ID NO: 288356 - DNA, 423 bp, Cannabis indica
agccaatgactccgactacctcttgttggctaagagattggagaaggtagaagcgcaacaacttgcgattctcactgcccagactgagatgaaggctgacttcaagagaagtcagaaagagatgaagaatcttatcatggatcaaattgcgaccgtgataagtttgttacagaagcagccttcggagccgacacaaccatcagggccggcacatcaatcagaccccacacatccatcagacacggcagagccattacagacggtacatccatcaccgccgacatatgatgatgatgatgatgatgtctacccagaagattggcaacctgacatatgtgacgttccttctactcctgcaaacgccattgtcatttcgctgggtgatacagaatctcaggatgtggaagagttgcaggggccacc

SEQ ID NO: 288357 - DNA, 531 bp, Cannabis indica
gtgactataccgcgccaacctgtcagaacacacctgaaaagacaacacaggcatactatataataatatagttctattaagcacgtaattaaattaatctcaacaatttacccttctcgggtcataattaccaaaatgcccctggctcaccaacggggtcttaacatgttaaattcatataatttcacatatgttgaactatataataatataattcctcaattaactcataattatctagttagggttttgctaatccttttcttaatcccgggtattacaattagagtttaattaaccttcttgtaatgcttgattgttagttaattaaagttatgatttttagctcaaaaatatggttttcaaagggaaatgtcttgaatctgttgctgtgatattgttgatgtttttaattgtttccagaggcttagttatgcttgtttaagaggatttgagtgggtttgattgcatgttagctaggtttgctcaagtttgagtttagaactcaaagcttgagctttaatggtgatt

SEQ ID NO: 288358 - DNA, 574 bp, Cannabis indica
atggctagattgatcacatgggtaagtttagaaccttatttcatagtgggaaatattttagagaaaataaattatcggatttaagcggggttatggaatttgaccattttacccctaacttttgaattaccctagttttaagtctaaagggcaatttagtcatttggtttatttgaggataggtggctgccttaagaaagtgacacctagcattttatttcagcaaagaatcaactttgttactcatttatctcatttttggaaaattaaaagaaaatatcaaaaattgaagaactctcttttccttccctctctctcttcgaaaccagctgaggcaaagggattttggagctgaaattctgtgttttcagcaagggattcaagaggaatcaagacaaggtaaccctagtttcttttccccttaagtttttgaagttgtagtttagtttcattatgaaatttctaggtttagtggctgttaggttttaaaatgcttagggttcaatttctagggttagtttgagttaatctaagtccctagcagctggttttgatgcttgatgttagttctaag

SEQ ID NO: 288359 - DNA, 495 bp, Cannabis indica
  modified_base (436)..(436): a, c, t, g, unknown or other
gtggaaaatggagaagaaataggtgagaaaaaagaggtaggtatgtgggaaatagaaaagaagtaggtgggtacgtgagaaatgtggcgagaagtaagcaacaagtgtgatgcatgaaatgtgtatgcaagtggtataagtgtaattaaataaacttgaagagtaaaagagtaacaataagcgtgtgggggtattttagtaacaaagaatgcattttgtatttttgatgtaaaaatttctattttaaattttaattattttttaattccatatttttttgcattatttatttatgccataaaataataaactctactacattttcttatatttatatatatatatatatatatatactagttgggagttacgtgccgagccacgtaaatgttagttttatttaagggttggtttttattttggttttttttttttntttttttattttgtttatgtaactaaggaatgattatatgaacgtacttagtttttaat

SEQ ID NO: 288360 - DNA, 903 bp, Cannabis indica
aaactcaaattttaatggtaaaactttctaaattattgagctgttaataaatttaaggtgtcagctagctaactgtcaccatagactctttatgtgtacattcttatacacatgacaagtttatattcatatacttaatattattatttcaaattttattttaaaattaaaattaaataaaattataaaaataaaaataaaatatttcaaaaataaaaaataattataaattttgaaataatttttaaataataattttagctgcattaatgtaaacatgtcacgtgtataagagtgtacacataagtaatttattttggcagttaactgtaaaaaatagatgacagcttaaatttgttaataattcagtaatttaaagaattttactattaaaatttgagtttagagaatctatatatataaataaaggaaagcataagaggattgatgtggcatcttttccttccatttctctattttttctattttgttatgttttctaattttttctattgaataataagaaaaaaataatgtaacctccccattcttaattttttataaataatctattagtattcttttaaactattagtattctcatctatatatatatagatagatattttattacaccaaaaaaatatgatatatgtatagtaattttgtaaatatatatttatatatataaaggaagattttagggaatttatgtggcatgtctaagattgttattatcttcaatacttatttttccctttttctaatattttaataattttgtatttttctatatgtagataaaaagtcatatgtatcataccaacacaatatattcattaatcaatatcaatatatatatatatatattaatcaatttatatacatatgtcaacttaacaa

SEQ ID NO: 288361 - DNA, 581 bp, Cannabis indica
cttaattttaaaataatttattcattttataaaaaaattatttaaattaaattatgatttggacaaataatttgtcaacacgtgatatttttttaaatgaacaaatacatcatttaattacagactaacagattaatggaaatagtgaccttaaggattattactgttaatttttgaaattagaaaattaatctgcatgagtttttggagattggaattttcccttattctatttataaactagggaactaagccgcgcttcgcgcgctgttgtctaatttttggaatctttatatatatgtattgtaattatattgagtgatataatctaaaatataatattttaatttgtgttattataaacaaagtaatattattaaaattataaaaataatttactatttttaaaatatatagaaagatagtgattttatgagatacattaaagattgtaaaattaacaaagaaattacatgtacatttataataaaataaatgaaaaagttaactatttctaaatttaataaactgaccttgtatctgatgatgtagttatttttaaaagactatctagacttttt

SEQ ID NO: 288362 - DNA, 568 bp, Cannabis indica
aatcaaacaaactaataagattactaataccaatcattatgtaatagagtaaggtatggataaaacttttttcacaacaacaacaatgtagtaataacaatgtaccaggggcaaacaacttgcttattttaaattatcttcctaaatctcattatctcactctatagtccatagtccatatccaaacataacttttctccttctcattatttgtgaaagcaatattaaaagaaaaactcaaaaatatgcaaagtctcatggaccaacttaagccatagtaagtacttactcatggtaccaagggcaaacaaggaatcgatctggttgtatgttgctcaatcgctgaaaaagcaaagctacacgctcgttgtaccctaagccatcagtagatgccacagatgcaggattcataaatgcatatacaccgttcaactcatttttgtttagttcacgctgcattatactggtaaacaataaaaaattaataacaaaaactgcaaaatatatattaagttaattatcaactttcatacctgcaccacacagacattggaacagatccgatcca

SEQ ID NO: 288363 - DNA, 494 bp, Cannabis indica
caatcttattcagatttctgacaatgatttttcagggcctctcgcataagagtttttttcgtccccttattgagattatttgccactatttataattgcatagtggtagttaattacaaagctgaccaaaatgtaatttacagtcattatcccttaaatcgtgggatctgattacatattatgaaatgtaaatgcggtgtatgattttgaaaatcatttagctgtaattttcctgcttttactgggtcagaaatatcgtgttttaaacacatcattaatagttgaatttggagatgtctcgacagaaactagactgaagtgattccaatggcaagctggaaccatccttatttttaaggtccacttgatatgttttacgttgattgcaggtatatggaaatattctgacttgccagggttatgagcctcgcttctattagttggatggactataggaagcttcctcgtagtgagatggccatctcgcattcttg

SEQ ID NO: 288364 - DNA, 654 bp, Cannabis indica
ttcttcccttagccaacccttcattaggtcaattctggtcctttctttgctcacaatgagcatgtcatctacatacagaagtaagtagatgacttcatcaattttagtgcctttgtagtatagacaggtatcatagtagcttctagtgaaccctttcttgatcataaactcatcaaaccttttgttccattgccttggtgactgtttaagtccatacagggacttaatcagtttgcaaaccaagtcttccttgcctttttcctcatatcccttaggttgttgcatgtagatctcttcctcaagttccccatgtagaaatgcagtagttacatccatttgatcaacttctaggtcaaattgagtagctatggtaagtataattctgatggttttatacttagccacaggtgagaatatctcattaaaatcaatcccctctttctgtgtaaaccctttagccactagtcttgccttaaacttcttaggatctgcctcagtaagtccttccttgtgtttgaaaagccacttgcatgaaactatgctctttcccttaggtttcttcactagtatccaggttctgttctttctcagagattccatctctgtatccattgccttggaccatttcttggcatctttatcagtcatagcttc

SEQ ID NO: 288365 - DNA, 761 bp, Cannabis indica
attccaatgaaacaaaaaagaatagtagaaaaaaaaagaaaaacttacaaaaaatactggaatttaagttaatttttacaaaaatactgttacacggaaatattttcaaaaatactgtgtttttgtaaaacaccagtaaacacaaagcacgacaactcaaaacaacagtagaacaacctagtaaacaccagtagagcaccagtgaaaacttaacacagtatacttgcagtatgaaacttataaaaaatacagtaaaggtaaaaataccttctgacagtatttttgtaaaaaaatagcaaaagttagtaatatcatgtaaattttccaaaaaaattaagaaatgttttaaaaataataaataacaataattaatttttgttttaaaaaataataatagaattgaaaataggttttggggaattagaatagaatggtcaatcatgacaagttgttaaccctttgaaaagtttaatttattaaaaacaaacccgtaaaaagacattaaaaaaaacgaataattatataaacacaattcttgtaaaaaaattaacattttacgtttaatttttttcttttacaattttataatttactataaaacaacactaaataacaagaaaattagataaagtaacaggaaataatatccaaaaacatgaaacaacaacaaaaataacatacaataacaaaaatacaacaacaaattaataaagtacaacataaaagactatattttctgtaaataaatcaaaaaatcgtaa

SEQ ID NO: 288366 - DNA, 703 bp, Cannabis indica
tttatttttttttttaaaaaaaatgagtactattttactaactttttaattacatgttttaaatttcaatttcaattttatttcatttaaacattcaattaattttacattttctctactaaaatttcggcagcataacggcttaaaaagtgtaaacccaaaatttttaatacctaaaaataacacaaacaaatatttccagacaatatataaacaaaaaaataattcacccatccaacagcagtcaattttatcacagaacctacttctctaacatgcatagacatattaactagtaacaaaccctactatgtactaagcgaaagcaaaacaacatacctgaatcgagtgtaaaaatgacaactgcttgcagctagcggtaatccggagcggtcgaacacgaacctaattccataaaaaagtaaaaccaaacattcaattaatacctataaaaatttcaaaatttaatcacatatccattaccctacactaacttacacatatacacacacatacacatacactcacacacactcacatacacttatacacacacatacacacacatatacatatatatttacatacatatatacatatatacatacatacacacatatatgcctacaaacatacatacatatatatatatacatacaccaatatacacatacaaatacatgcatacatatatatacacacc

SEQ ID NO: 288367 - DNA, 399 bp, Cannabis indica
ggccttttactcctcgagccctgggaaggaccagctaggctggctgtcggagcggagtgcgatggggcttgtccatttatccatgagggatttccaaaatgggacgatgcaggggccatggcctggccatggctatattcgggagtggcagagaactgtatgccgctcatcggtgcagctgctgctggcacagtgcccgagggctggactccgagcacatatcccgctatttcggtgggataatatcctcaataggccactatttgggcctcttcaaggttaatgtatttttggactctcttctggaagtcctgaaggtttgcagctccttcttgttgtagttcgttccagaatggagtccctgtacggatgcctgcttggaggagggcaagttgttgt

SEQ ID NO: 288368 - DNA, 172 bp, Cannabis indica
cattttatgttgtatggttcacatgatttatttcatgattattgtttaatgtataaattctattaagtccagaacatatgtatttgtacatgattatagtgttgtcagcacaatagaataaaatcatatttatatgttcgaaagttttaattccctgatttgtcagttcact

SEQ ID NO: 288369 - DNA, 543 bp, Cannabis indica
cagattttctaggcaatgatcgaatgaagatccaaaaactgaaaaatcatccataaaaatctcaatgcaagattcaattaagtccgaaaagatagccatcatacacctttgaaatgtagcaggagcgttgaataacccgaatggcattcttctaaaagcaaaggtaccataaggacatgtaaaagtagtgttttcctgatcctccggtgctatggctatttggtggtatcgagagtagccatcaagaaaatagtaatactcttgccctgctaatctgtctagcatctcatcaatgaatggcaagggaaagtgatctttgcgggttgctttgtttagttttctatagtcaatacaaatcctccaaccagtgactgttcttgtgggaatcaactcattcttctcattcttgattaccgtcatcccacctttctttggaactacctgtaccggactaacccatttactatctgagattgggtaagccactccagcatctaaccacttgaccacttcttttctgacaacttccttcatgggtggatt

SEQ ID NO: 288370 - DNA, 896 bp, Cannabis indica
gaaaattttctataattataattaatccgtgaaaatcaagaaattcaatctaatattaagtaaaacgcgcagcatttaatgataatgcgtagatagctaatgctatattcacatagcatggtagttatatgtaataaagtttttttttaaaaaaaaaactaaacttaaaacaaaaaacaactcgtaaatgtcattaattaaataggtagttagttgctcattataataataaggctcttctttcttcaggttgatcaattacgataagaaaaatttaatgtattgtacagttaatttcaatgtgactttataaaacagattttataaatgattaaattcaaatttggttcaaatgatattttttttggaactgatcatatagattgagttaacacatcagatgataaaattactcgatatttatataatgtctgcaaaattaatataaatatctaatttttcaaaactgaaaatttttttttcagaaaaaagagtaaataactaaaaatggttaatctataggtatatagtcattagtttgcttttgtggcaaatgatttgtataaatccatatttttagtgggataattaagtgtcaaaattcactgatgatatgaatatcatcctgtcattttacgtatataattggcaaaaattaactatatatatttcatcattatctaaacttcttcataattaggctgcctaattaagttgtatatttacatctcaaaaaaaaaaaaaaactaaagttagtatatatatataaatgaatcatgtagatatatatatatatataattgtatttgtttatgttatattttttttaaaaaaaaccttaaactttagtaattgtatagtattactaaaggttaatatacatatatatatacata

SEQ ID NO: 288371 - DNA, 578 bp, Cannabis indica
tttgaaaagttcacttattttcgaaaaatccgtgtgcttggtgatattacgttcttgactaatttcaattttgagcatggaatcatattaggtaatttgctagtaattgaattgttttatgtatgttgattgtggaatgtggaaagttgtttggaaaattctagaacttgcttgcttgctatttgaggcgaaataataaattatgcatgactaggaaagtgatttaggcaattgtttggatcgattgtgcctttcaagccatccttgtaattttcatcctagttacccttttgagccttaacctattctttatttctacacatattgagcctaagaaaaaagataaacccatgaatatcctaagatttaatcctaattataccataagtagatctttagtttgggggaatttggatgggaagtttgttgtatgtgtgtggaaaaagtgtgaaaattgagagaatataaaaaaaattgattggcaacaacttgaaaaaaaaaaaacagaacagaaagaaaaatctgacaaccaatgtcaaataaaaaaaaaaaaataaataaataataaagttgttgca

SEQ ID NO: 288372 - DNA, 744 bp, Cannabis indica
tccagttttggaactagaattggtcagttatataataatatatgtaggtatatattgacaaatgtgggttgtgatgttggagtatagtaactcaaaaaacagagcgaaataattatgagagtactattgaattgctgcaataattaacgtaatggtgtattgaatgtggtttctttattgtggggaagcagttaggtggagagttatatattaaagtgtccactaatgaagcatgagagctctttcagcctttgagggcctaattccacattaaaatctcaattcataatgcataaacagatattaatatttctaactttatgtgtgcacgtacaatttactgttcttaattcctgttctggcaacaatttattattggtttagtgtctaaatgtgctttgtataagctttttttcaattattattctttttaagaaaacaacttatattggtgtaatgcctttaaactcaggctgtaggaaatttagctccgatatatagaaattaacttcgataattctagctttaagatcacacttaaacaacaaaagttaaatcaaaacaaacaaatcaaaaataaaaaaccagcaacacattaaaccaaaaaaatgttgatcgttttgtgccttcaataaaactcatttcaatataatcagatttactaattaatataagatcagatatcgcttttatattgcatggttcacatgacttatttcatgattatatttaatgtataaattc

SEQ ID NO: 288373 - DNA, 788 bp, Cannabis indica
aaatactctcataaataacatagactcgtgcactaaggctcattaatgcccccaaccacgtaaaaatcttgcgcattaacttattatagctttcttatatattattattatattagttgccgaaaacctcggtcaacattttggtgctttcattaagagctgaaggaagcgtctgcaagtaaacagtaatattacaaaacaacaatggtggagactcgcaacacacgtcaaccccgtcctcctcaagacgctcaagatcctgacgatgaggatgtggcctcaagagtgaacatgggctctaaggaaggagaaggaacccacgacgacaaatatgaaggaaacttcgatgagtacgacgcctatgacgagggtagctacacagaactactacttttgagacaaaaggctgctgatcacgaagctgaaatcacggcccaaaaagatgcaagaggtgatgcttgccatgcaaaaagccatggaggcagcaggaatccacgtgcatcataaagccatccctgttggacttggggaaaacaccagaggaatcctcgccaagtgcccagaagaagaagtctagggaacctagccctataaggtatacctctgaagggaaccaacagaaaaaaccctacttccactcccgggaaaaacgaaaaaggcacaggatccgcaaaaggtccgctcagatttcccaaaagggaaaggtccgcagagggaaaacgtccaaagagggagtctggccctcaggatcgagaggaccgaaagagcgtttctgtgcaccaggaacc

SEQ ID NO: 288374 - DNA, 669 bp, Cannabis indica
atttgttagttaaacctactttgtggtctgggtgatacgtacattttgggaacatggtagtatgattgagtgggagcgctaaacatagatatggaatctatagcttctataggtacttagaagtgaaacgatgatttcctttgagcttggcttaatagatgtaaatagaagagctcttacttcagtgattatatttcattgaaatatcatttacaggaagttaaatgttttaaggataatatacattgaggagtgaagcgataaatttatttctactcggtgtaaatcatctatagaggatctttgattattgagattagaacgatggttaaatgtgatagcatatctatatggtggaacatatagagcgttctatatgactcagagtgcaattcatagttctatgagtggatgcaacaaggaattaataagtaagggaatttacatggtaaattctagttcagcttattgaaagttcagttatataggcccatggtccccattctagttgagaccatactgcttgtaagactcaaataattgattttaattaatcaattacagttctaaaaattagactatgtctagtttattaattttcactaagcaagggctaaattttgaagaaaagagattctaggttttatttattaattggaagaatttatt

SEQ ID NO: 288375 - DNA, 572 bp, Cannabis indica
tcagctgagaggagtaaaccatcgtccttgtgtaacttataggcatctttcactttatacacaccagaaggattaagagaccaataccagaaatcagaaggagccgaagaaataggggtcttacatatcaaatcccgatcacggttattaaacaaatcattcagcacttccaagtcccagcttctatcatgattatccattaggctagccacttgacagtcatctaaccccaccagttgggttgttacaaagggattggatgcgtcagggagccagggatcccgttgaatattaatggaagttccaggcccaatattacaacgcacccccgataagacaagcttctgggtatcaaagatgctcttccaaatgaaacttggattgtgaccaagttcagcagtaaagaaagagcctcggggaaagtacctagccttgtataaacgactgacaagagaagactcattaacaatcaatcgccaagcttgcttacccagcatggagagattaaaatctcttaagtctctaaaacccagaccaccaaaatgcttatgctttgtcagatgttgccaact

SEQ ID NO: 288376 - DNA, 771 bp, Cannabis indica
ctgatgtgccaactcttggtttcgcaggctgttcagactagacgaacgccaggcggaacaccaggagtcagggcaactcggtagggtcaaatcagggtcacggagctcaatttcccccgcgtgctaggggtcgtggtaaagatcccaggggcagggcccgtggtcggggtgttgataacccgccacaggctgcccaagccgatcaggaagcccagaattgggagactaggtttgctgacatgcaagccagaatagaggagcaagattaggaaattcagagattgaggcagtagggtgctcctgtagtgccggtgctagaagttcctgtggcacccgcccctgttgctcaggccgagatagtggtagcggccaacagaatggaacacttgtatgaaaggttccggatgtcatgaaagccaagcagtggctaacggtgatcacaagaatattgaactttatgggtgtcaccgggaatgacagggtggtgtgtgccaccttccagttccaagaagacgctctagtctggtgggacatggtgtctcagattcatgatgtcaccactatgacctgggaaaggttccaggaactcttcaacacgaagtattataatgaggccgttagaagtgccaagaggaaagagttcacccacctgacccagaaggaaaacatgagcgtgactgagtataccacctagtttgatcggttggcaaggttggcttcgggaattgtgccaaccaattttagtaagaagaaaaagtatctggacggatt

SEQ ID NO: 288377 - DNA, 1047 bp, Cannabis indica
gagagagagagagagagaaatagcgaaggagaagaggaagattggctcaccacatgaggaggagaggagcgtcggaagcaaagagaaaccctataccctcgttcgtattgcgtggagaagaaaacgaatttgatcttgacttttttaacaagtaatttgaggcaaaacaattcagttttcacttcctattacactttttaacgctaataaataccttaagtgacacacctagctgctggaactgtcctaaatgcatctagttgtaatatgagataattatataaggtaatatttgttttttaaaataattatatttgtatgtttattttttttttttttataagttttttaaaaataatataaaaacaacgtaaaaataatataaaaataacataaaaataacaacaaaaaataatatacagatttcaaaaaattaaccataaattaacaagagtacaatatataaaaaccgtattttctgtaaataaattaaaaaaattataaaaatacttaaaattctatgaaattgtatttttgtaattttttttattatttttgtatatttgtgaaataattcctgtaataaggtatgatatggctagatataatggggtttttttaatagatttttggggtttttacaaaaatattaaattttaggtaaaactttgtaattttattgccacagaccgtagaaattacatttatactgtcctcctctctctttattttttttcttttatattgtaaacacaaaaagaaatatgaggcctccaccttctacacttatggacagaaccactacagcaataccaggacagccagaaaataactattaattccgacgagattgaacaaaaacagtaaatcgacgtcaaataaataattatgacaaaacaagtgtaaaacaacactaaaataaatcaaaaaaataaaaggaaaaaaggattaaaaaaactaacaatcttctacacagcctcaacaacagatgcaatagcggctatatttgcaagcccaatccttaaaaatcataataaaagaaaaact

SEQ ID NO: 288378 - DNA, 1364 bp, Cannabis indica
ttagataattcagtaagataaaaacttctcttttattcacccaaaaaatttcatccccttatagtatattttctcaaatcagatttattttgcgattttttagcaacaaaaattgacacagtaaaaatacccaatacatctaaaaggtcatatttctaaataatcagagcaaaacactaatttcccaaaaaaaaatcaatacatgttataatttagttagatttcaatttcaaactctgttctttcctaaattttctcaccaaccaaacagaggcggcaaaagcaagatctcatataatacataaacacatacataaatttctaaatatgtacctgtaatgctgagaacaatgatgcctgcgatgaatagcaaaacatgtagccttctattctggaaatccatgaataaaaaattcaatcactctgagaagagaaggagaaaaatcccaaatccaaaattgaaaggttagttatagttaactgatattagggcaaccttagagaaaaattaaaggtaacttagggtgaaaagggaagaatcttgaaggccataaattctcgctaagatctctctgactcgaagtcttcgttcgttcgaggaaaaccagtcaagattcaactgtactcgctcacgcacaaaacgcaccgtttcgtccatcttcgcttctttctagttgaccaactgtttcctgtcgtttaatgtaaaaaacgacatgtagttggagatgggaagcttaaccataactttgcttttttatttagaaaattgcttaaataattttaaaataattaatatttttgtcctctaaattttttaggctaccaagttgtgcccttatataataattagtcatttcatcatattttatttaattttataaaacagtaaataataattgataaataaattcaaatcaaatacctatcacaatttttacttaatgattaaaaaataaaaatataaatataaattattattattcaattttgtgaaaaatgtcttattaaatattttaattaaaaaaataatttattttaattatataattaattataattattttaagtttaaaaaataaatttttacttattattagtaacttgctataataagtcatataataatataatcatcataattataattatatttttaatgtaaccatttaaatagttatatttactaacttaacatatatgatagattaatatatttactaatttcttgttaacatatttaaaaaaattacttattaatatacatttaattatgttaattttaaatttagttggttttttttttttttgaaacaaagattgcaactttattaatgcaaatcagctaataaaatagcttccaaacc

SEQ ID NO: 288379 - DNA, 298 bp, Cannabis indica
  modified_base (200)..(201): a, c, t, g, unknown or other
tattaaaatttatagccttaaataatttacagaagagcattgatttattaatttcagaaaaagaactgtttcaaaaacaatagttttctgctaccacagaatgttttttctgatctttctggtaatcttcataggatatagcattgctcaaaaacagacagcttactctgaaattaatttactaatattaggaccttggnngacatataatagttccgaatagaatctctttagaaagaaaatcttttgtctcatggtagcctgctccggttcccttacgaaactttcgttattgggt

SEQ ID NO: 288380 - DNA, 641 bp, Cannabis indica
gtggtattaggtattactggtgccaagtagcaatgctcttaatttaattattatataatatttttaaccatttagaaagtgttaggtaccaatggtccctaatatgaatgttcatgtaaaaattacgagaattgctaaaacacgttagtagtgtctagtaggccggaacataaaaaccgctaaaccgtgggaaccgcctaacccattagaatccgcccgcatggaaaccgcccattaaaaaaccgcaaaaattgggttgggttgagttttaacccgttgattggcgggcgggtacgggttagcctaaaaggagcgggtccaacccgtacccgttatttattattatatatatatattttaaaaaatttattcctaaggctgcctaaaacaaaaaaaaaaaaaaaaaaaaaaaaaaaaaacctaaaactaaattgtcgcactatgtgtgaaaataaataattgccttatagttatttagatggtggctttaacttgtgatagtaaaccaaaccaaagcttcaattttggtgataatatagtataccacaggttgtatttgtagtgggggaagggagggagatatttttttgctgagtaaaatttacatatgttgtttaagcaaaaagtggagtctatacttg

SEQ ID NO: 288381 - DNA, 581 bp, Cannabis indica
cccttgttgtttgtctctctaccaaaaagttgatcgctgacatttgttatttgtactctaaatagttatgttttagcacatcaactgagaattatatgttcactctattaactgtaattgtcatgcattattatagctttatggattaaatcactatgttctcactgttagaacataaacgtagaacaattcaaacataatcaactcaaattaaaaccaataacattgaatttaaaaaaataaccaaaaaacttagcttgaacaatagtggagaaaaatgaaactttattaattgattcggcacattacaacaagagttttatacctcaattactcttatcaataatgttcaacaccagttacaaaatgcctcacattggaaaaccttaaacacacacaaggaatccttatacaacccttcttcactcaataattttgaaaaaccgtatttttgcaaatgtcagttatataagaaaatataaaaactggaagcgtttgtagaagcagaaagtaattctgctacagtaaaacggaacaggcagaatataaaatattagcagaaaaataaataacttgacaca

SEQ ID NO: 288382 - DNA, 661 bp, Cannabis indica
cacccttaaaacaagttgttacagcagtaataatgtccaaaaaaaaaaaataattcaaaactaaaacttgaacttaattgaaaataagaccaaaaaaaacttaactcaataatgaatgaattgtggatctttattgaataggaatagccagtagtacacaatagaatgagtccaagattacaactcaacacagtaagtaattacaaagaaatacctcacattgaggaaaatcacttcaagagtgatactcccttttacatccctccacacacactcattatgatcttggactctctctctctaaactgaatctaaagtatgagctttggagattagagatcagaactctcaactcagacctgtctttgagaatagaggaatccctatatatagttgctagtgggtccactttaagttagtattaaagccaattgttataactgttagaattattataatggactaatacaatcataggtttaattccataatacacaatcattaattatgtgcctaatgttactcataaccataatgggatggttagcaacttaattatatgttagaggcacatgagagcacccttaatactatagttggcccattaaattatagtataccgtaaaagacctcaaaagccctattagttaataacccctta

SEQ ID NO: 288383 - DNA, 441 bp, Cannabis indica
aagtatttcgagatgcagatggatttacaaggagtgcgaggagacgtatgttgcagaatcttccccgcaactctgtcggaggccgcacagcaatggtatttcaagttggctccaggaaagtttagttcatggaaaactttctcttcggaattccatgcacaattctcttcctcacgccaactcccattgcatctgggagatttggtcgaagtaaaacagcgaccaggcgagccactccgggcatacatcagcagattcatgacggaagcgaccaaggtgtcacgggtaaccgaggatggaaagttatccgcgatactggggggcattgaagtccttggcgaactatggaaggacataaggaagaacggaccggtcgactcaatgagtgatttcctcgaccgggccgaaggtttcatcaagctcgaagaagccattcagcga

SEQ ID NO: 288384 - DNA, 389 bp, Cannabis indica
atgttagctaggtttaaccaagtttgagtttggaactcaaagcttgagctttaatggtgatttttgtttatgtgcgttctgggtggatttgatgctttagaaatgttctaggggatgtttagaacaggtctggaacttttggtatggtttagtgttgatttgagcaaagtgtgaaattttgaattgctgcctgcgaggaaccagaattctggttgtacatccggaattctggatggggttctgaaatttcccagaaccggaattccggttgggcaaccggtctaccggttggggaaaattcaggaaccctagctttcctcgattttatgtttttggggtattgccatgctttttatcgatagggaaacttttaattcctagtttaagtc

SEQ ID NO: 288385 - DNA, 583 bp, Cannabis indica
agttcatctttccagctgatttcatcgtcttggatatggaagaagatagcaatgtcccaattattcttgggagaccattcttggcaactggccaagccttaatcgatgttcagaaaggtgaattaaagctgagagtccaaggagaagaagtggtctttaatgtgctaaaggctatgacgtacccaaaggcaagtgataactgcttctttattgatttgattgatgaaatggtgagtgagaaaaagctgctagatgatcctcttgaactaagtctaactgaagatgaattgacggagcaagaaggacaagaggtcatggggtatgtgaagtggctcgactcctatgggcctttgaacagaagatactttgaggaattgggagcagttccaaaagagctgaagccatctactgaaaagcccccagaacttgaattgaaggtgcttcctagtcacttgaggtatgagtttttgggtcaagataaaaagctgccagttattgtttcagcttctctctctgatgtggaaactgatagacttttgagggtacttcgggctcacaacaaggcaatcgcttggacactagg

SEQ ID NO: 288386 - DNA, 504 bp, Cannabis indica
attaataatatttaattttaatagataattattaattttgatattttgaggtttaaatttaaaaatttattattttatttttaaattatggccagattttaaaaatttgttaatttctttaatatttatatattatttaactataaggttagatattttaatattgagtatattttaaattaaagatagcattatcttttttaatttgaaatattatattaaaattaccgtatatgataaattaaataattaataaattttgaaatgaacctagataatttttatagatattctaaccataaaattttcaaattcaaaattggttattttgttaaatatttaattttttataaattataagttagaaaaatgatatttatgctattttatatcattttacttattagaaatttataaattgtattttaaatatttgaataacctagatatttttgtagaaattaaataatgcttaatttgagatattttgacatataattagga

SEQ ID NO: 288387 - DNA, 702 bp, Cannabis indica
gagatgggtccatcacccgcattctgatgcactggtgatagtcgccaatattggtggggacaatgtccatcgcatactggttgacaatgggagttcagtgaatctgctgaatttccaagccttcaaacaaatggggttgcaggagaaggatttgcgacctatgacatcgagcatttatggtttttcgggagatgtcatagcaattaaaggaatgatcaaactcccaatcactttgggaactgccccagtgacagccaagtcaatggcagatttcgcagtaatcgaccagtactcagcgtataacgccgtaattggtcgaccaatcctgaaggagatgaagatcataacctcgatctatcatctgacaatgaagttccctactcccgctggagtaggttcggtgcggggagtccaatccgaatcacgagaatgttataacgcagccgttaaactcgcagaaaaaaggacggtaaatgttatctaccttttggaggcaccacctcctcgccaggagatcctcagaatcgaggaggtgccgcacatagacgaaccagacttggatccaagaatcctcgatcacaccgccgcagcccaagccgcggaagacacaatcgaggtacctatagatcctgtagataataacaaggttttaaaaattggttctaaattaaatttacagctgcgagaacaattaacgacctt

SEQ ID NO: 288388 - DNA, 723 bp, Cannabis indica
atgtgactctcttatgtcagagtattttggatataatacatataaaaagaagtattttcaattaaatataaaattagagataaatttgattaattgattaataaaagtgatagtattacaccacttgcatgaatgaggattacaattatcaatacattacaaaaagacttttctaccattttctctcttacctctttatcaaatatagttgacattaaataaaatgaagacattttagttaatatattaattattcaattttatttttatactgaaccaaaataaaaaaaaaaaattgattataatattcattacaaaataaactaaatatggtaatagtaatctcattactattagggggggtttggaatgggttaatgctaacaagggaaatggtaatgtaaaatattaccttgtttgttttgtagtctttagtccttagtaatgttattcccttacgtattataattacccttgtaggaggataatgttgatacttttaaaaaaaggtatgattgaatcattaccttctattatattaatttgtaatagaatttttgtaattaataaataaatttaaataccaataatattatcatttattattataaataaaataattacggtatatatttagtttgttgatatcggtttttttttaacttgtagttatttttattattattagtcaataatatatgtatattcattatacataaattt

SEQ ID NO: 288389 - DNA, 317 bp, Cannabis indica
tgttgtgtttacctctgttttttgggggacaatcttctgtaattcttgttcttcgattatgcttccatttaccaaaaactcttcgccggatttaatggttttttcttggttatctccgactccggcgactccacaaacacgaagcagcccgtttttccgtgttttctactgttcacagtataaatattaagttgttgggcttgggcagtataaaagtaaagaaaacgggcttgggcagtaaaaaagttgtttttgccgtgtcccaatatttttgtaaaattttagtcaaaaaacagtatatatgtaaatttccctat

SEQ ID NO: 288390 - DNA, 653 bp, Cannabis indica
aacttcaggggatgcttgatattgggtttacccgacccagtgtatcgccttggggagctccggttctgtttgtgaaaaagaaagatggttccgtcagaatgtgtattgattatcaggaactaaacaagttgacaattaagaacaagtacccattacccagaatcgttgatttgttcgatcagctttagggaaagacagtgttttcgaagattgacctacgatccggttatcatcaactcagaattcgggaagaggacataccaaagactgcattccgaaccagatatgggtaccatgagtttctgaaaatgtcattcggattgactaatgctcctgcggcctttatggatctcatgaatagggtattcaaggatttcctccataactgcgtcatagtgtttatcgatgacattcttgtatactctcagtcggaagaggagcacgagcatcatcttcgaatggtattgcagcgacttagggatcacatgttgtatgcaaagttcaaaaagtgtgaattctggttgtctgaggtatcttttctgggacatattgtggggaagaatgggattatggttgatccaagtaagattgagttagtgaagattggccgaggccaaaattgtgatggaggttcgaagttttctcagtttagc

SEQ ID NO: 288391 - DNA, 572 bp, Cannabis indica
attctaagggaataataatttttattttttttcatcatcacatatacataaccatgaatattttctcatcaacaaaactctcacacctttacataaaacatcaatatactctagtgtgaaaaaggatgaataaggattttctttaggcttaaaggttattgtatagggttaaaaagaaaaaacaaagatgtcaacatttaggctcaaattgggtaaaactagggatttaacaaatagggtaggcttgaaaagctcaatcgatccaaaaaaaaaattgcctatatcatatcttaaaatcatgcacaatttattaatttcgcctcaaatgattatcaaacaagttctagagtggttgagactttaaaagaaaagtcaaacatgcattcatctttccaaacattagcaaatatgataattcaattgatgtgcaaaagttttaaaaaaaaaatcaagtttgagcagtaattaatcatgagttaagcacacaaatcatgagaatctatcattttcctagaattataactagaatttcatcatcaacaaaattattttccctaagaccatgcataaga

SEQ ID NO: 288392 - DNA, 950 bp, Cannabis indica
ataaaatagattacattgaaatggagttttatttagggcataaaacgtaacagttatgttttatgttatgcttttcttactgagtctgtcgactcacagtgctatttccatgtgtaggtaagggcaaggctaaagctgaggagccgtgagagcaagcagatcaagattgtacatgtcggggcggttaggcctggagcgtgcgatctttgggacatcaaggctttttgatgtatagtcggtaggcgacaaaacttttgtatatgaatagcaaacttttgtaaatgtattttgtaacgggatcctgggattttataaatgtattactttatatttctaattaaataagaaaattttaattaatcacgttttttgttaatctcgttgattagcaacgagctgcataatacattaaaaatcacgctaacacgcctaaattagttagggtgttacaatttggtatcagagccgccaggttgtttttcgaagatcgtcacgacatgtacaatcatcatcagcagtcagctcatttcacgattcagtaagcttttattgctttagtagtttattttaatagtatgatttaagaaaagcctgttaggaagcattttagtagcctgatagtagagtaggcgcatgtttttaatttccaaataagcagcaagagtaagtttttctttgatcgcgatctgaccagactagctcttgattacgcaggctgttttaattagtatggatgctaggcgaaacactaggagccagggaaattcggttggatccagtggtggtcagggagctcagattccccttaatattcgtggtcgaggtagaggtcctagaggcagggcacgtgggcgaggttagggctgcacatgggctgagttggctgggttggagatgttttaatgggccaacccaataactgcagtttggaaaaactatgaaccattcac

SEQ ID NO: 288393 - DNA, 595 bp, Cannabis indica
taattgtgaataaacatatgatctggatttaactgattccgtgtgtaatagtaataaacatatttaaaccattagcatgtagaattcatgcaaacatcaatcacttcaaatttcttatattgatatctaatcagactataaagagttttatttagggcatagaacccaacagacaacgtaccgtgactttctgtctgagaacactaaatggtattgacttcattagttgtatcaagataacagaggtagtgggaccaccttatatcgaataagatgatagaacacttttggaatcaagaaaaaatatctcctctactttgctagtttatttttcagatttagtcacattcttagaaaagtagtatttattgaaacaaacactgtcttatcttaatgaccataggatggtccacccctaatcacttagaatagctatcaaacatgcaaaccttagttaacagttctatcttttcttaagttcacgatcaagacaaccttgaatctagtaatggtttacactaagtacacaaccattccatcattatgaaatttcctatcactagggtattttcctagaaggacttaggcaactact

SEQ ID NO: 288394 - DNA, 487 bp, Cannabis indica
caattcaatttatgccattaaagctcaaagcttgagtttccaaaactcaagcttgcttagaaccattatcaagcatcaaaaccagcaattagggacttaaatcaactcaaaataactctagaattcgaaccctaaacattttaaaacctaacagccccagaaattcaatttcacaccttcaacctaagcttaaaacttgaaaactaaagaagagttccattgaagcttaccttaggttgttccccttgaatctatggctgaaaacacagaaaaatcccagccccttcccccttgattcttgctgccttcgaagagagagagagaagaaagaacttctcaccaattttccaattttccaatttcttttctttcttctttttaattaagttaagcaacatattaaacttatcttggctgagaaaatggggtgctaggtgtcatcaaaataaccagccacctagcctcaaataaatcaaatgactaaatt

SEQ ID NO: 288395 - DNA, 646 bp, Cannabis indica
attcaatgctcaatcttccaccaaaatgcaaatgaaaaccttccagagtacctaattagggcataaacaataatttccagccagtatttcacagaacaaaccattataattcaagttgccattaaagctcaaagcttgagtttcaaaactcaagcttgcttagaactaacaccaagattcaaaatcaacaaccagaacctttaatcaatcaatattgagcataaaaactgaaccctaaccaattctaaacttaacagcccctaaaacccaatttcacacattcaacctaaactttaaattcaagaactaggctaggagttgctagagcttaccttgggtttaatttctagttgaattccttgctgaaacaaaaaaattcagcagcaaatctcccttgcttgcttcagccgaaagaggaaaagagaggaaggtttatgtttattttctattttttcctattttctctaaatgaaataagcttaaggaaaatccattttcccttcctgaaatttactaggctaggtgtcaactaaccaagaagccacctatccatgacttaaataaaaagtccaaattgccctttgactcaaacttagggtattaaccaaaactaggggtaaaatggtcaaattccataaccccgctc

SEQ ID NO: 288396 - DNA, 504 bp, Cannabis indica
attaaaagttttatttttacaattttttttttaaaaaattatagagctatatttatttaaaaaaaaaaattgtaagaaaataaatgtgtgcttaattactaatatatataattaaaagattaattaggatttttgcctcttaaactttgacatataccaaattatgatccctgaattttttagtcgttaaaattttttctgaactattgagattgtatgatttaaggacttttatctaatttcatttaattttactaattcggtgattgtccatgtactaaatcatgctcgcatggactttgatgtctaccaaatcatgttcctcgaactttgacatatgccaaatcatacttcctgaactttcatctatgttagacttttcttactaaaattagacaaaagtccttaaatccaacaatgtcaatagttcagggagaatttttaacggtcttaaaagttcagggggcatgatttggtacatgtcaaagtttagagggtaaaaat

SEQ ID NO: 288397 - DNA, 635 bp, Cannabis indica
tttaaaaaaccaacactaagaatagcatcagccaaatgacccttttctttaattttcaacccagtaagaatagcatcagcccaataagttaaactctaaactaaacctagtatataaaggaaagaaacctacggcagccactattgtcaaaagaatattcaaattctttcaaaatccttttctctcttcaacataaaaaagcagtaaaaataaattctaggggttaaagtttttctttctctacttcttcttttcactcttatggcagaactatattgttgtaatgggttcttatactatgttttctcttataaatttcttctaaaaacagtaaggaaatattagggttttctaagtttttttcttatttctcttttgtacacacctatgggttagggttcttaatttttctcttctcacttctacccgaaaacaataacccagaaaactttcacaaacttcggcctaatctccacacaccaaatccgaaaatcaccaacaacaccaaacacaaacaaatacaaatataaaccatatagggattaggatgagaaatacaaataggtaaagatggagacacacatatataaaatgaaatttatgtcaatctctttctttcaataatacctgtacag

SEQ ID NO: 288398 - DNA, 712 bp, Cannabis indica
tggactacaaaaacaaaaaagtataaaactattttaaaaaagtataagtaataaaaaacaaaaaatttatataacttaccataaattaataataatactactacataatagaatagactaataaaaataaaaaactaattagtaataaaatactactaatgaaaccctcaaaataaacaataaaatataggaaaaaacattaataaaagttaaaataatataacaactcatgactaaaaaaccttaataaagaatcttgagaatgattaatatacaaaatataaataacaaaagtttagaaaacaaataataaaaccatattaataaatgctaaataaatataagaagggaaattcaaagtaatcaatataataaattattaatactaaaaatcttacatttatactcaaaaatttaaaggtaaataatcatcatagtcataaaactaattaataaatttagtacaccaaaataaattaaaagaccagaaaaactttctataataatctacaatacttttaaaaaattaattattaaataattaatactgagaattaaaataaatcaatttgattactgaaaaaagctaaacacaaaccagagatacaaacattaaaacaggaaaagatcttctaaaggtagaatgctgaaaagtaaaattataaaaaataaatctaatttgttgataaacctagtaacatgatagggccca

SEQ ID NO: 288399 - DNA, 625 bp, Cannabis indica
agagagccgtgagagaagatgacggcgagaccttgcgactgaagttctaggtctgtgtgttcgacggtaggggttctaggtcggggttaacgccggagaaagagagagagacatggatgtttgatttttatttgtttaagggtaaaattggatagaaaaatagtgtgagtatattttgcatgatgtaaaatatgctagcatatttttagtggataaattaattttaagcatataatatcaaatttccctttggaaaataacgttcttgttatgaaatattattgggaaatttgttaaaatacacttaaaaatctagactattcttttaatataccacctttaaataaatactctaaatattctccaaacaccttaaaaccctaaaattacccttacaattcaaaagctctcttctcccactctctctgtctaacttccccccctctcactctctgttattcccatccagccccaaacctttcaagccctgactgttcacgagctccgaccgaccaagacgacccacaaccgagaagacccatgacgactcacgacgacccacgagaagcacccaagacaacccacgaccaccacatttttttttctggtttctgacccatctagc

SEQ ID NO: 288400 - DNA, 650 bp, Cannabis indica
ccattctctgaaaaaatggcagcatcaacattaatcttcaaggtattaacagcagtgggaatcatagttgtatcttgagcccgagtccaatctgtgaggagggctttagctaaatgaacaacgctctcaaccgtgggaattttctcagaccaaagtaattcattacgatgcctccatatcgcccaacacgtcattacatcttgccttcgtttttcctcatctaacctgctgtaaaatatttgttttagtagtgtgtcaaagttaaaggttgatctaaattccaatcacaatataagatgatgatgtaaaatttatatggcaataaataaatttcttttttatttacttattatttttaatattttattattaaatttaattattatatattagagcactcctaataattcttttaaaataaaaattcttaattttttttaaaaacaatagagcaaaaaagcattccaacaaatgaactcctctattttaaagtattgttgtttttataaaaactaggcaatgataccacttagaaacatttttttatgttgtaaaaaataaaatttacagttaatatattataaaagaaaaaatattagttaattaatatagtataatctataaatttttttttataattttaatgtatt

SEQ ID NO: 288401 - DNA, 667 bp, Cannabis indica
ggattgggggtccgtttttatgtactttggcttgttggggttctttggtcagggcactatcaacttcatttcctcttcctggatcactggcacttgcttgattgtcacctgatacgcctggtgctgtatttagagactctgtaggtgtgtcagggtacacttgaggctgtctagtgaggactggtctagagcctgagagaacaggagaatcatcttcgatccacacttcttcatgtccttctaaatcatcaaatttcacattcattgattcgactacagagagagtccttttgttgaatactctgtaagcccgactgttggtggagtaccccagaaatgttccttcatcactcctgggatcaaacttggccaagtgatcccgatcgttcagaacataacacgtacatccgaaaatgtgcatgtggctcacgttaggaggtcttcctttccatagctcataggcagtttgagaggtaccagtgcgaagatgaactctattgcacacgtagcaggcagtattgacagcttcagcccaaaatcgttttgaaatatctttggcctgcatcatgacccgagccatttcttgtagagttctgttttttcgctcaacaactccattctgctgaggagtttttggggctgaaaactcatgatgaatcccatgcca

SEQ ID NO: 288402 - DNA, 725 bp, Cannabis indica
gatcccaagcgacgggatgttattttccaacctggtgatcatgtttttctgtgagtatccccaatgaaaggtatcagacgctttggaaagaaaggcaagttgagtcctaggtttattggaccttttgaaattctggaaaaggttgggcaagttgcttatcggttagccttacctccatcattatcagcagtgcataatgtatttcatgtttccatgctgaggaagtacgtgtctgatccaatgcacgttctgagttatgaaatgttagagttgcaacctgatctatcttatgacgaacaaccagtgcaaattctggataggaaggaaaaggtccttcgaactaaaaccatatctttggttaaagtactctggaggaatagtaaagtggaagaagccacttgggaattggaatctgatatgcgggctcagtatcctgagttgttcaggtagatttcggggacgaaatctttttaacggggggataattgtaaagaccgcttatggttaatggttaatatcttgaattatttaaggtttatgtatgagattagttaataattatgaaatgtaaattttgggaatatatttaatatcatttatgttattatgctattttatgttatttatctaatttctgtgtggtgttcggaagctgtggaacgcggcgttggggcctttagagagtcatatgttatattttgttgtatgttatttgctcggggtat

SEQ ID NO: 288403 - DNA, 536 bp, Cannabis indica
ccttagtgattagatcgaaagaattgaaaatagaggttaactattgtaccaatgataacattgttagccagtgaggagaaaatgtgattcaaggtgatacttctaaacaaggaatagattgtattttgacacagtttaggagagttattgcctaactatcgaggctactgaaggaatatgagaagtggtatttaagccatgatattggattggcagtaatcgttttacattgaaagttgggcaccatttttctatgtggattttctatatggtgaaaatgtgaagtctatacggatcacaaaagtatcaaatacttttcttttgaaagaatttagatgggaggcagtggtgacggttaaagttgattgaaaattttgaactgtgtgatttattaccacttggggaagtaaattagtagtaaataccttaaactgaggaggtttaggacaagtttgtaaagcgaaaagatcttactatcggttgttgggaatgtaaccagaatagggattgagttcatgattggagaacttgttaat

SEQ ID NO: 288404 - DNA, 655 bp, Cannabis indica
tctaaaatttaaagtcaaagacttaaatttataccaaatatacatgagtaattattctagcttggacaaccactactaatttaactctaagtttaagttgcctaaagtaagcatatacaagtaggagattctattagatcgaggatttatatcatttcggggaatgtcaggaatatagtcatctgcgccattcaatttcataagagaaattagagtgacatcataagcgaatgatttataaactattcatccaatgatatattattaagcaaattcgaaataaaaaggctaagaggaaacattaaaggataattccaattaaaataagaatccaacgaagtctagcatctcgaggttaaaatgaaaagatttaaccatgtaggaccaacaatggagattgaatatccttataactaaaaactcattattttaaagagttgtattttcttttgatacttattttaacatatatttatttaaataaaattactgttgcccctgattttgtcctaaaatacgtggaccaaccggactgtgacacgtggattgaagaagcaggactttgagataaatcgactaacgtctcctttaatcaagaggatcggcatttaacatgcctcccggagaaggcatgaaagttccatatactcccgga

SEQ ID NO: 288405 - DNA, 743 bp, Cannabis indica
ctgattctagtaacaagaaagctaaggccctacttttaagctcatcctgttcgggtatacactgactaaccgttacgctaaatattggaaaaatcggatgcctctaaatggttactcaaatggggtagtggagttgggccaatatgagattatcttccaacaccaaacagcaattaagggccaagccttagcaaactttgtagtagagtgcgcgggcaaggaagaaagcgtatcagaaagcaaccctgagccagaacaaatacctcagccaagtaagaatgaagacaagccgacttggaaactacatgtagacgggtcagctacaaatcagctatcttgtgaaagaatcgcccttgtcacacctggggagcaaaacttgcatgctgcagtcaattttggatttaaggcatccaataatgaggccgaatatgaagttttgatcgctggtctaaaactagctcggtaaatgaaggccaaacatattgagatctgtagtgattcacagctggtggtaaatcgtgtatctggagaatacgaggatcgggaagaaaagatgatagcatatctgagcaaaatacacgatcttcttgcacagttcaaaagctatgcactcagaaaaattcaaaagagaagaaaacacgactactaaagcattagctccgcttacgagtagtaatgtaagtgatagagcaaatctagttcctattgaatttctcgaagaacctagcatcattggcacggaa

SEQ ID NO: 288406 - DNA, 1044 bp, Cannabis indica
ctgcgcggcggtttacaggctcctaaaccataacaatcacaacactaataagtgatacgctaaatcacttcttggggacttaaactagaaactaaaagtttccatatcgttaaaaagcatggcaataccccaaataacataaaaacgagaaaatctagggttcctgaaaatacccaaccggaagaccggttgaccaaccggaatttcggttctgggaattttcagaaccccatccggaattccggatgcacaaccgtaattctggttactcgcaggaaactttaaaaaaatcacacattgctcaaatcaaatccaatttaccccaaaccttccagacctgttctaaataccctagagaacaaacccaaagcactaaaacaacccagactgcacagatactaaaaatgccatgtgagcgccaagctttgagtttcaaactcaaacttggctaaagctcacctacaagcatcaaaccttgattaaaactacataaacatgcatttagaaactggagaaaacatacacaaactcatgcaacaatcacagcaaccaatttcaaaatttctctttgaaaacttaagcttttaaatagaaaatccataactttaaacaataccactaatcatgcattactagcagctcaattcaacataaataatcatgcttaaacctctgcaaacaacaacaaaatcacagcaacaacaacaacctaaactaagcatgcaaacatcatcttttcatcaaaattaaagaaactaaaagaagagaagctagataaggattacctttactagaatgactatgaacttgagaaaaacacttgaatttagcaaggaatcacagccctagtagccccccaagcttggccgaaaagagagagagaaagagctttgagaattttctaattttttctaagtttggaaaatgaaaatagatgcaacataaaccttttattcagccaacataacaatcaactaacatttaaatttccaaattctaagtccactaaaggacaaaacataaatggggcaaaatgacaatttt

SEQ ID NO: 288407 - DNA, 520 bp, Cannabis indica
tattgcatttcgaaaaattaaagtattcaaggactattattcgaaagggtgcttgtaagcgtgtggctgatggtcaggagacgaacatctggtctgacccttggattgcacatctaaaaggatttactcccacgccgattgggcgggcaatgaatagggagtcaaaggttgctgagttatttcagactaatggcggatggagcatccaaaaacttaatagttattttgatcgtgatactgtctctgctatcctcaaaggaggtagtcctaccggctctggcaaagacagctggttctggactttggaaaataatggtcgtttctcctgcaaatcagtctatagagccctggctgaggatagagtgagtccaggcgaggtggccccctccatgtggaataagctgtggaatagtaaaatccttgagagactcaaggttctttggtggtgtattctatccaaagctcttctgattccctcgataataggtaggagatttcctattgaggatgagagctgtcc

SEQ ID NO: 288408 - DNA, 687 bp, Cannabis indica
ttcaacccaatcacattcctcatgtgaatatttgtgattttacatccttaagagctcactcgtaagaattcaatacaaaaatgtttattttcttttcttgattagtttttctttaattttactactcacataatgtttatcttatcaataattttacagatctatacccgtcgatgactgaaaatgagtggtatttatattataaaaaagattctttttccacaacgaagaataataagagattgaatcgaaaaataaaaaaatggaacttggcatggtaatgcaacaaagaagtcaatcttgaatcaacaaaagattgagataggttttaaaaagactatagattttatggagccagataaaaaactaactctatggaagatgaccgagtatcatttgcttgaatccaatgatacacaggtactaccaaatattctaatgatcatcattagtattcacttttgatatataatgcatgcatatgtacgtaacaataaagtctaacttaattttaagggataattacatgagacactattttttgtacaaacaaattatatttttaagtttactgagtttttattttttttttttttactatttttatggttttctatacaaacaacatgtaaacaacaagaaaactaccaacaacaaaaataacatgcagataacaaaaattaacaa

SEQ ID NO: 288409 - DNA, 636 bp, Cannabis indica
aaacacaaaattatgaaattcaacaaaaaactgaaattctaaaccatttgtctccaatttacacaacataataatgaacaaagtagagcaattagatattatatgttctcaatagttaaacttaatgtgtcctaaatccttcaatgttcgtccaaattgggtaaaagagggtatacggcttggcacagtcctacaacgctttccacttgaactttcaccttcaatcacattaccactccttttcaaatcagagacaaacttcacctcactctcactactatttactggtttaccatctacacattcaattgaagtcattacattagttttcacttcaccaacattagattgcttcatctgaaattgtttagcatctttttccatgttactctccgccaaaccggtttgcacatgcccctttgaacattgaccttcaaaactatttattttatcaattgctgttgctaaactagacaaaatttgattcgttgaattttttctaccctcctctgccctcaaaattacttccagcaatctatcaacctcgtgattctttgaatgaatacactcttccatctgctgggtcacactttgtaaacgcctcaattcttcatccaagtgttgtattagatattt

SEQ ID NO: 288410 - DNA, 700 bp, Cannabis indica
aaggatttcgaaattgaagaagaaaagaagagagaaggtggcggctagaagattttctctgaaggaatgagatgcatcatcttttcctgaagccatcactatctatttataggtaaccacctaggtttaagttagaattatttggcattaaaataatagaaaaataaatggtaaatgcttagtgtggccggccataggatgttggattgggcctcactttgcaattttgccattttgtcatttttccatctcattttctcaaaaacgccaattttccaatttaaccatttaaatgccaattctaattatttaataactaaaaattaattattaaataatattgtcatttaatatatttattaattagacatataaagtctcttaattaataaataaacctagaatctcttttctttacaatttcgcccttgcttagtgaaaattcataaagtagacatagtctaactttagaattataattgattaattaaaatcaattaactgagtcttacaagcagtatggtctcaactagtatggggaccatgggcctatatttccgagcttccaataagtcgaaccgaatttaccaagtaaattccctaacttattaattccttattgaatccacacttagaacttggaattgcactctcagtcatatagaacgctctatatgttccacgatatagatacgtcatt

SEQ ID NO: 288411 - DNA, 584 bp, Cannabis indica
tggttgcttagggcacaggacagacttttttctttctgttttctaccttttctttttctttagcgtgtaaggccgtcttctgtgaatttattgcacccgactcttgtccagggaatcctcctagggtttcctgtatgacaggtgtccggagggggcctctttccagcggttaggggacccccattccctttttcttgatttggggtttggtatggggcctaactgctggaatcttactctttttacagaatcgaaaaatgtctgcttctggctcaaaatcatcgaagaagagcggcaagcgcctggctaccgtcgaggaggtctccctgggtcccgttgcccaggaggggtacaagtctcgggcgaccggatgggaggcggccgagcttcactccactctgacctgtccccatcagttggagaacatcgtggaggtagctggaatcaagccttccacatcagggacctaccatcggccacctcgcgacgcggagacgcccaatcacaattacggcggcttcggggcctggagccagacgcatctgatggctggggccatgcttcctcttcaagattattttgtt

SEQ ID NO: 288412 - DNA, 570 bp, Cannabis indica
atatacaaagcaggtgtccgatcagttatacaaggattacattcattgttaatccgttattacacattgaattacaataattaaactaagcaacgtcaacattaataaatgaatgacaattactaagttcatcaacgtacgcgtcttctgaatctgcgagttgactgttcatattcctatgttaaactcgcagggttatcattatgtttaggatgtctgcgtccttaggtagtcgcttattgtagacatcatatgtcgagctgatagaacctagacatgcgagtctatattgcattataaaggctacagggttcttaagaccaactcgtatttacagagaatcgttctcctggtttatacaaggacaaaggggaggatgctcgcatatattcgatatatgcgatctactctcttatttcggatacgattagacttcgatcatgctcgccacctctcgctggttatatcttaagcgaggtttaaaacttcaaggagtcccttagggacatctcaactttctgtggaaaatctgagtgtacgtgtcctttaagtaggggtctggtctcgagt

SEQ ID NO: 288413 - DNA, 465 bp, Cannabis indica
gggcaagctttgtttagatcagggaagtctatacaaactcgccagctcccattaggcttcggcaccaggaccggattggctagccaatccgggtagtagacatctcgaatcataccactcgttaataatttgtccacctctttctctaaggcttcggccttcactgagtcgaggggacgtcgtttctgctggaccgacggcatgtccaggttgacattgaggacatgagtgatgacgtggggacttatgccaatcatgtcttcttggcaccatgcgaaaacgtcaatggcacccctcaatgtctttattattttttctttttcctccagttctaggctctttcctagccggagtactttggtggagtcgaggtcgcacaccgacacttcctcgacgtcctccattggttctacaattttttcaaatcccacacggggatccaactcatcttcttcagccatttct

SEQ ID NO: 288414 - DNA, 640 bp, Cannabis indica
ctggaactatctgcgcggcggattacaggctcctaaaccataaaaatcacaacaatataagtgatacgctaaatcacttcccggggacttaaactaggaactaaaagttaccctatcgataaaaagcatggcaataccccaaataacataaaaacgaggaaaactagggtttctgaaaattccccaaccggtagaccggttctgcaaccggaattccggttctgagaattcctggaccctcatccggaattccggttcctcgcaggaatttttcaaaaattcaccactcaatcaaatccaacccaaatcacctcaaaccttccagacctgttctatataacccaaataacatttctaaagcattaaaatcacccagaatgcacagaattgaaaaacaccatgtgagctccaagctttgagttcaaactcaaacttggctaaagctcactaacaggcctcaaaactagcttagaacttcataaacaagcataataacactgcagaaaactaaccctaattcatgcaacaactacagcaacaattcacacaatttctctttgaaaactcaagctttttaacaagaaatctatccaactagagcaagaataactagcatgcaattcaacctaattaaacatac

SEQ ID NO: 288415 - DNA, 703 bp, Cannabis indica
aagagccccttgctcttcttcaccttctttagcttcctcaagaagtacctcctcctcatccactaagtcaatagtgtttggaggggcgctggaagaagctttcctggggatgaccatctgggaagaagtagggggagggtaaacgtcaggactgtgggctccggcaagggtagccaagatcgcctccatgggatcagctgctgcaacaagagaaaagagtcaagtgttagaatatctatgaaaacagtgaacacttaaaaagcaatcaagctagtcctaccctgactctctaattcggccctagaaaagtcccgaatcttaacactggctgcatcatccccgagatagctgtccgagggacggaaccagctagaagacagataggctgaaggatccaagggaacgggcaccggaggtccagaacccatccgggaccggcctaaataatcacctaagttggagaagtaatactcctttgcatgatccccccaccgagtagagggcatcctaaacctaaggagacgttcatcgaaccctataggcctaaggctagcgtattcacgaacaggagggacgtaatgtatcgttaaaggggacttaccagaaccggaagtgctggcatcgggagccccagtattcggcacctggaccgtaggccttggtctgggggccctcctctccaccgggctcccaatacgaaggg

SEQ ID NO: 288416 - DNA, 814 bp, Cannabis indica
atttttatgttaattcgcacacttttcagagcactcccaataatttttttgctctatcttttaaaataattatacaaattttattttatttttctattttatttcaaacttttacattatatcatacatcattaaatattatttttttaaaaaaaaatcaatatattttatttatttcaaacatataatataaatatatatacacatatctatataaaataaaatattaaaatctaaaatatatagtgtgtttttaatttaaggattattacataaaatattattttttgtaaaaaattatatgtttatgtttaattttttttttttttacactttcaatgttttctataaaaacataagaaaactacataaaagtaataaaaaaataatattcaaacaacatcaaaataacatacagataacaagaaatcaacaataaattaataagagtacaacataaaaagactatattttctgtaaataaaatcataaaaatatttaaaattccgcacaacagtatttttgaaattttttgttatttttgtgcatttgtgaaataatcccttaatttattctttaaatatttaaaaaaatatatatttattttaaaatatctattgtgactggtgttgtaaattcgtgtgttttcgtgcggatccgacccatatttattctatgttttttcaaaaaaatgggtcattctgtgccacagaaaaatatgagtcatgctatatcgtgccaatatttttaaagggtaggtcagcatggcccgtaggctcgatattttcatgtcgtgttttgctcgtgccaaccc

SEQ ID NO: 288417 - DNA, 338 bp, Cannabis indica
acatatataacatttcaggatcccgtttacaaaatactttacaaaagtttgctatacatataatcaaaagtttttcgccaagcgactatacaacaaaagtctcgatgtcccaaagatcgtacgctccaggcctaagcgccccgacatgtacaaccttcatctgcttgtcctcacgattcctcaactttagcctttcccttacctacacatggaaatagcactgtgagtcgacagacttagtaagaaaagcataacataaaatatacaaataacccgagttattgttggaatttattttactaggatcttagatctactcgcaagtatgtttattaaca

SEQ ID NO: 288418 - DNA, 664 bp, Cannabis indica
aaatatatgtgaaatgtaaaaagatggtaactttacatgattcaaagttcaaacattacctccttctattctatgcatattttttcttcattttccctttgtagatactattctaaaaaaagattacaaatatgttgtggtacacgtgcttttttcgattgttagtgggataagttacatttataaaaaaacacattaattttcttaacttacacactttttttttcttctaaaaagtatactttaaattcataatttaaatatttttcaacaaaaaaaagagaagcaatattcacaattaggtcccgtcttgagtaagtgaattaagcccgtgtctaaggttcatttaatcaaggggcaaaaaaaatttcctttttaaagttatatattttttttactaatttttaaaattattatattttttaaataaaaattaaaagatatttttcatggtcaactatattttagaatcggatgttcgcaatagatcaaatgacctaaataattacagttttcattaaatttctatttttttatgaatgaaattcacaaaaatgctattgagatacatatgcacttatcaaatgatgtattataaaagagattatttcacaaatacacaaaaacaatataaaaattataaaatacagttttacaaaatttt

SEQ ID NO: 288419 - DNA, 535 bp, Cannabis indica
aagccaacaagaagctctttaccccccagaagaagatagttgagctgactaaggatctcgaggtttttgatcgttttgaagagaccatcgagaccttatttactgaagttaaccaggatgagaggacttctctttgagaggttcctcgtcgggtggagggggagaagaagtctaaggaggaggagcattcggccgaggtgacgaagctgaaagagaaagttcatgccttggagacagccggccttgagcttttctatgacttctagcgggccaatcctcaggcaaacttcgactacttgagggaagctaaggacatgtaccttgagttctgcgcttcccaagtagcttatggtgaaaccgaggcggctgcttctacctccggctagaatgctgatgtacctcccgttcgaacaacagatccttcagctcctgccggcccagaagacccgaaccgatagcctgggactccagctttttaaacatttctccttttatcttttatttttatatatcttattcggccacaaggcctttt

SEQ ID NO: 288420 - DNA, 996 bp, Cannabis indica
agtcgactgcctcctagcctgcggctttatacgggagtcgttctaccccagctggttagcgaatcccgtactcatgcccaagcctaacggctcatggcgcacatgcgttgactttacagatttaaataaagcctgtcctaaagacagtttcccacttcctagcattgaccaacttgttgatgccactgcaggtcatgaacttcttagctttatggacgcatactcgggatataatcaaatcccgatgtatgaacccgaccaggagcatacctcgttcattactgatcgaggcctatactgttataaagtaatgccttttggtttgataaacgcaggtgcgacttatcaaagacttgtaaatatgatgttcgcagatcttattgggaacaccatggaagtatatgttgacgatatgctcgtaaaatctcaacatgcgaaggatcatatcgcccatttacaggcaatgtttgatatattgcgtcgatataaaatgcgactaaaccctctaaagtgcgtctttggagttggctccgggaaattccttggattcatggttaatcaacgaggaatagaagcaaaccccgcgaagatcagggcgttggtggagatgccatcaccaactaagccaaaagaagtccaaagcctcacaggtaaagtcgccgctctaaatcgctttatatcgcgatcttctgataagtgcaaagagttttttcagattttaaaaggcaataagaagttccaatggaccgaaaaatgcgaggcttttcaagccttaaagacacatttggggcaacccccaatcctatcaaaacccatgaccggcgaagtcttatccatttacttagcagtatcagaatatgcgattagttcggtactaatacgcgaggatcaaggacgacaatacccagtgtactatgtcagtaaacgattactggatgctgagacgcgctatcctcaaatggaaaaatttggcgttcgccctggtaatatcgtcga

SEQ ID NO: 288421 - DNA, 740 bp, Cannabis indica
gatgaatttataaatcaaatagacaaacaattgataaggtgaaccaaaacatacacaaatgaatgaaaaatacttctgttactttattgatattgaataatctggattacattgaaatagagttttatttagggcataaaacccaacaactagatacctgcctgggacccttcttgctcaaggcatcgaccactacattggctttcccaggatggtaaaagatctcacagtcgtaatccttaaccaactttaaccaatgcttttgtctcatatttaaatccttctgagtaaaaaaataatttgatgctcttatggtcagtataaatttcacatctctctccatagagataatgccgccaaatctttaaagtaaacactactgtggcaagttctaggtcatgagtcgggtaccactgttcataatcttttaactaacgggaggcattagcaataactcgatcgacctgcatcaacacatatcccagaccttgtctgaatgcatcacataaaccacgaacttctctttatcatatggtagggctaacactggagcagtgattaacctctatttcagctcctgaaagcttgcttcacacttatccgtccacataaaacactgattctttttagtgagctcggtaaagggtgttgaaatattagagaacccttctacaaactgacgatataaccagccagcccaagagcttctaactgtgtcactgttttcggtctcgggcaat

SEQ ID NO: 288422 - DNA, 516 bp, Cannabis indica
catccagttaccatccgtctatatgttgcaccagcatttttagtttgaaaggcaggaccaggtagcagtatacccccttatcggtcctgaagctagtgcattcttgatccgcaatgtgcatcttgatctggttgtagccggcataggcgtccatgaaggacaatggcttgaatccggaggtggcatccaccatttgatcgatccgcgatagggggaagcagtcttttgggcaggccttgtttagatcggtaaaatctatacatactcgcatgtgccatttggtttaggcaccagcaccggattggccaaccattctagataatacacatcccggatcatgccactagctagtagtttgtccacctctttctccaaggcctctgccttcactagggtcgaggggacaccgcttcggctgaactggtggcatatccgggtaaacgttgaggacatgggttatgacatggggacttatgctggtcatgtctccttggcaccacgcaaaaacatccgtgg

SEQ ID NO: 288423 - DNA, 640 bp, Cannabis indica
cacacaagggatgctaagagaaaagcagcagctgctaaaaaggccaactttgaaataggtgatggaaagagaacaatgtcatgaaaatggatgtgttagatcagcaaaaatgctttggttctgatgctagggaagctatcactatgcttacaaaaaataaagaccaatacaatgagtaactcctctgatttggatgatgatattgttagaagtgatgatgatgatgatggtgagagttaaaatggaaattagtttttttcccctaattcttcacctgattagaatgtattaaatcatcttgtataaaagcgaatttcttaagtagttttgtaactttctaatgtctgagaaatcataggcttagttgctttagtttgtgaacataaagagttgtcttgtatagttgtattgcatttaattggtgatgtaacttttgctataaaaacctgaaattcagggaatataggaacttgaatttgagaaaaaaaatgtcttaggtttgaacatgcttgaagtaacatactaaaaaaatgagccccatagtgctattattaaaatatattgactaattgtcaaagggctatcccccatttctggcagtgaaactaataagaacttatcattgggttgtgttattgac

SEQ ID NO: 288424 - DNA, 632 bp, Cannabis indica
actcttatgtgtttatttcattgttttagaattcatattaggatattaatgaaacatacttgttagtaaatctagatcctggtaaaatatatccaacagttacaacatatatttgtattaaaagatgatatatatatatacataatagtaagcttggtttaatggttaagttagatgataagtatgttagagggtaaaggttcaaatcctactaattacactttattttgttctttttaaattttatttttgtcctccctgcttttaaaccaaaaaaaaaaaattaaccgccccctcactttaaattctgggtccgccacaaaatctatggatggttaagttaaacttagttatattatttatgttcttcaagttgttcgtggatgctaactaatagttttggcagatatttacatattgggcacatgttagttcaattgagtatgagcgcttatcatagatttggaatctacaaatttcataatatttagaagtgaagcaatgatttccttcgagcttggttgaatagagttaaatgattgaggcatcatttcagtaattatattagtttactgaaataccaatttataggtagtctgtagtgttttttagggattaaaaatactaagttg

SEQ ID NO: 288425 - DNA, 512 bp, Cannabis indica
ttttctcgattttttcagaaccaacatgtctgcttcttcatccggttctaaatcttccaagaaaggagaggttcaactggccaccctggaggaggtcatgcaggaccccgtggcccaggagaactataagtcccttgccagcagatgggaggcggctgagctccactccacactgacctgtgctcaccagcttgaaaagattgtggtggtggcaggcttcaaaccttcggcctccgggacctaccgcaggctgcctcgggacgaggagagacccaaccacaattatgggggcttcggagcttggagccagacccaaccacaggctccctcttcaggactactttgtaaactttcttatttttgttggcctcgcgccatatcaactaatccctcaagcttaccgcctgctttgaggcttgtttattttgtatgccgcccggagctggggttcaccgagttcggctgaaattttgtatttttacgaacttgtttctatccccaagaaggaagat

SEQ ID NO: 288426 - DNA, 702 bp, Cannabis indica
gttttacatagttattgttttagttagtaatcctccctaatggaggaacgttcattagcaatttaacgtcgtagaatctcgaaagataagtactagttgtaagtgtttattttagtatggatcaccctaatggtggtgacatttaataaggcttacaaaagtatgaaacaatggtggaagctcataagatagaatagccttgactctcacctaaacgggacaacgctggattctcatcttgatcgaataaaaggttgctagaatgtttatcattttagatgagctgacaacttgaccatttgcttggggatgcgccactgcggagaaactttttatgatcccatggttcgcacagaaatcagtgaaggattgactgtcaaattgtttgccattgtctgagactatcttgtatggtaatccgaacagacaaattatgtttttcacaatgaaatcttgcactttttaagacgtaatggttgccaatggctcagcctctatccacttggtaaagtaatcaactgcaaccactgcgtactatactccgcctttgcctttgggtaactgtccaatcaagtcaattccccaaatggcgaaaggccagggactttgcctctaagttagttcgttgggcggtgctcgaggtatctttgaaaatctctagcatttatcacattttttaacgtaggccttggaatcttcaat

SEQ ID NO: 288427 - DNA, 613 bp, Cannabis indica
gggcctatataacctagcttccaataagcagatttagaatttaccaagtaaattcccatacttattaattcctccttgcaccactatagatttggaattgcactctgaattatatagaacgctctatatgttccacgatatagatacactaagaaaatttaaccatcgctctaatcccaataatcacaggtcctctatagatgatttacactaagtaggaacaaatttaccgttttaccgctcaatgtattttatccttaaaacacttagcttcctataaacgatatttcagtaaactaatataaacactgaaataagagctcttccatttatctctattaagccaagctcgaaggaaatcgtcattgcacttctatgtccaaatagaagctatagattccatatctatgtttattgctcccactcaattgcactatgatgtttccaagctgtatgtttgacccgaatcaaatggtaggctttaactaacaactcaaagaacacaaataacactctttagatcgaacctaaccatgtaaggattatgatcttttgatctaagatcaaccaatgatattgacttagaaagatacaacggtaagattataatatc

SEQ ID NO: 288428 - DNA, 550 bp, Cannabis indica
ataaatgttaattctgccgtgtggcagtaaattgaatattaccccaaatacagtattttgtaaaatgccctatagtaatggtagtattactctccctatgtgtctaagatttaataaagtaatattaatgttcatttccttcactatcacctccatctccatctctatctctttgtcattatttttactaaaaatatataggattagtcatgctctttctatgtgttactatttagtaaaaataatattgatgtttagttttatatttaatcttttattgcattattgcttgatgtataatgtcatttctaggttctacataagattaaattatttcttttatttttaagaacttgtatactcaaaatataatgaactttaatattatattaattgtgttaactttgtgaatcaaaggtacaaaatagctaaataagcatatggataattcttgaagcctttctctctttgactattgattacacttttatttgatttcttttaatatttattaccaaaacaaaaatcttcaaactcttttggttactta

SEQ ID NO: 288429 - DNA, 529 bp, Cannabis indica
acatttttttgagagctaaaaattccaaactttgaacaacacaactagcatgcatcataaccagctctattctactcaattaaacaagattaaacctctgaaaatatatcacaaacacagcagcaacaacacttcaagtaagcatgcaattcactcatattttcaccatttttttcaagaaaataaagaaagaaaattaggaaatacataccacaatcaagagttcacaaatttatgttgaatctagcttgaaaattgatgaaaatcccagcccttgaatcccatgcaaccagccgaaaagagagagggaaaagagagagttttttctattttctaactttgtgattttttgtaaaatgaaaaaatgaataaaagacacctagcatataaccatttcagccaaataaacaataaaataaacatttattttcaattactaaaatcactaaagacaaaataccattggggcaaaaagaccaatttgcccctccacactaaaaccacataataatcactaaaggggtatttt

SEQ ID NO: 288430 - DNA, 832 bp, Cannabis indica
aatgtaatttataaaatttaataaacatgcaactaaaataattccaattcaaattcaaatacaattgataaatgtaagacgtagcctaatgatctagttttttttaaaaaaaacttaagaaccttagaataagaatcgtataataactaaattaaaactaaaaaataactaattagaaacagaaaaaaaaatgagagacataaaccatttaaggttgaacaattcttctaactaaatacatcagaaaaaaaaaatataaacataacaaaacaagtctttgaaactagataaagacaacaaaaactaatacattaatctttaaagttgcaacctcatcatcattacctcacatttttccctgaaaagcctcttcaatggatgacttggtgaaacagcaacaataaaaaaattaaaagatgaaacaactataaaacaacttataaacaacgttaaatcaacgtaaccattaaaatatttagataaaatttttgattcataaaaaagataaaatatagatcaacaaaagtaatatctaaacaataccacgaaaatgctaacttaaagttgaaataaaattacatttgaatgtgccttattcctttaagctagtaaagaattctcttgggcatttcatcaaacacctagcaagtgtacttttatatgtatatatataagaactcaactaacagaataagaacaaaattcctaaaatctgtaagaaaaatagaaaaatcaataataaataagcaaataaacaacaaactcttataaaaactatcaaatccaaacttttatttttgtaattttagcaaaatgagaagaagaagaagaa

SEQ ID NO: 288431 - DNA, 501 bp, Cannabis indica
tattaataagtaaatcttattatattgaaatggattttattttgggcacaaaacccaacattggaaaggacacaacacttatcaaaggtgtaagaatacctatcgctgattatcatgccagtctaaatccagtgaagtgaaaaatcagggaattaaactttcaaacatataatcaagattatattccactgtactataacgtcccgatttcccgagacgtcacacttactagtccgtttaaaaccatttataataaaacaataaactaatttattgaaaataacaaaagcatgagatctcattattttaaaacaaaaacacttgattcatttataaatttttaaacattaacttttacaaaagtaatcaagccataatctttaaagaaatattctcaaaccaaaatatcgtgacaatccactaacatgtaatcaatgcctcgagctcgccaccctcactgtatagttttgcccttacctgcacacagagtacccgtgagct

SEQ ID NO: 288432 - DNA, 945 bp, Cannabis indica
aatgcatcattcatacacgaaatcaagagagaaaaagagagagaatttcgaaatccctttgtgagagagaagtgcccacacacagcaaacagtacctcaatcatagattggaagactgtgaaggatcacatccatctgaaggacattcgggctcagatcttgattatactctgcgacagacaggaatcaagggttagagatctgagtggaaggagacacattattccgctgccatcactgtaaggtttcttaactttttatgtgttttatttatcgttttagaagttcatatttaggttgttaaatcaacatacttgtgagtagatctaagatcctggtaaaattaattccaacaattatatatatatgacaatatatattataattatagcatccatcttcttacttattagttaaaaaaattatgaataatttataaaaagacttatttgtagcgcaggtccttaaattatataaagtttggtaagttggtgcccaaacttactttttatcaaaatttgtttcccaaactatatagtatatacgttttggcaagtttatcctcaaactgtatttttttagtaaatttagtcccccctaaaccttttattttattagcaacatcaagtgcccactcttagatattgatattcttataatttttttttttatgtatttttacttattattattttttttttgtgtaaaatttaaataattttgtttttttaaaatagtttgataaaataattatattaatatattttatttatttatttttacttttctagtattcatataatatttaatttttaccaaaatatttaaaatatgttttatttatatattatttaaattttgcatcaatgataaaatttcatgagttcatcattgagtacaagtcaaaaataaattttataatataatttacttcataatttataa

SEQ ID NO: 288433 - DNA, 272 bp, Cannabis indica
attccagattcagatcattccgccattgatgatcactctcaagctccaagatctaacctgtaatcacaacaacaagaaacaagatacgactatctctctcaaaacaaccgaaataactgtctgaacgatttaatggataaccgctttactaacagaaactgactatatatatatccacaaaataagtccagctggcactaactaacacttaaaagagactctcgtaaacaaacattagtgcagatataacagactaacaatccagatacgac

SEQ ID NO: 288434 - DNA, 632 bp, Cannabis indica
ttttacaatagattacatttccgaacatagaaaggatcaatcctgcttcccagaagccaagaccccacggctgatatgtacattgctgggagacctctgactcatggccgaacacagcttctaacttccttacctgcaccacgaagcacccgtgagtcacaatgactcagcaagaaaagctactatataaaatcatagaaagtgccagtaaatttcattacaatgtaatatatataccaataggtcatacatactcaaggtgcataaataacttaatgtctatgagagcacacttattacgtaatcaagtatattcatagttatttataatcaacaatctctgtgtttcatacaacctcctaaacatttatcattataaatactcaccttcagtgcttcataaaacactctaattcacacattaccataactccataatctcagtgcttcataaagcactctaattcacgcattaccataattccataatctcagtgcttcataaacactctaattcacgcattaccataattccataatctcagtgcttcataaagcactctaatcttacatctctataagcacgaattcttacatttcgtgagtcactaagattctgcaagaaaagaaac

SEQ ID NO: 288435 - DNA, 571 bp, Cannabis indica
aaagcactttgctagaaaatcctaaaagacttgataatttccaaagctatttccatgagagttccctgtggcgtttggttggaaggaatgaaaatataggaatgagaatatgaatggaatggaataaaatttaaaccatgcattggaatggtctttccttccatttcaaaatgaaattgtcattccaccaaaatggtggaaaggctattccattggaatgacattctaacactttaatatgtaaccaaacaaaagaatggaatggagattgtttcctttccattccatttcattacctccaactaaacgccacctagagacaggagaaaataagcttttagacaaggtgtaataccttgatcaagttatgataatccccactattctacacgtaaggttgtgagtgagtgtatacatatatttatatatgtatatcttcttctacctttcttatatataacatatagtatatatatgtatatattgtatatattgtgttgtaatatttatttaatctctttgttagtccttgtattatattgcaatagagttgtaatatcttaattttctt

SEQ ID NO: 288436 - DNA, 578 bp, Cannabis indica
attcattctaacaaaggaataataattttctgttctctcattttgttttttttctttaatttttttttttcagttgtagccattaatatttttcttctctcaatctcttattgcaataactaatcattcagaattataatggaatcaacaagtgatgcatcaaccacaatacccacacaacccaatgaacatgaacaactaacatatatattttattagagtcttttgggctataattttgatttttgtaatttatggataaaagaccttgaatttgctctgaataaccataaacattaaacaaccttaaatttacactatgcgaccatcatggtcttttatgttctttaactaactttaaagaacttgaattttctctgaacgaccataaacaaccttaaatttacattatgcgaccatcatggtcttttatgtttttcaaccatttaaagaacttgaatttgcatagaacgaccataaacgaccttgaacttacattatgcgaccatcatggtcttttatggtcttcaaccaattttaaagaacttaaatttaatctgaacgaccataaacgacct

SEQ ID NO: 288437 - DNA, 362 bp, Cannabis indica
gagatctcatttcagtaattatattagtttaataaaatatcatttgtaggtagctaagcattttaaggataaaatatattgaagggtagaacggtaaattatccttattcaatgtaaattatctacataggatctttgactagtaggattgtaacaatggataatcttaacgtatctataccttggtacatatagagcgttctatataattgagagtgcaattctgaatatatagtggcgcacggaggaattaataagttaggaaatttactttgtaaattctagatctacttattggaagctcggttatataggccctgttgggaatattttacgagtatatagatttactaacaagtatg

SEQ ID NO: 288438 - DNA, 598 bp, Cannabis indica
atattaattttaaaaatatcaaaccatcgaattttgatctaataacgaataacaaaatcacaaattttaatttctatgcttaatttaactacttaattaaaaaaatatcaaaaaatatctcttttttacactatgtcaaaaatatgttcatacaaaaatatttaactcaaactttaatttttttcttttcttatttttcttgctaaatttattttttttttttaattatttttttttttttttgccgataaaacaatctcagcccatatgatataaaaatgagatatttttttaattagatagaaaaatcaagcataaaaactcaaaattttctacttttacctatttataggtaatactcattaagagtacacctatatatatttaccattttaattaatcttattctcttataacaaaaatagaaaaagtcagagcaaatttagttattgttaatatatatagggagagaaatatatacaaaagaaaagtggttccccaccacaaaaattaaatctatgttagttagtgtgtaacacaaaacactacacatgcatcttcttaatgattagtacttatctaaatggctattggtaat

SEQ ID NO: 288439 - DNA, 767 bp, Cannabis indica
aaaaacatatacatgtgaaaattcatcaaaaagctcaaatgtgatgatgatgttgattccataacttataattacaaccaatctcaccaaccatatatcacattacatatccaaaccaatttcacaacttgcttgcttcttttccttttttttttcttcttaataataatttaattagaaggggtttagaataacaagtcataatcttgtattacatataatataagaggagtattgtaatcattcatagttattgggtttttaaaatttcattacatcttaattttattttagtgattcttaattgtatttataacttttcaacgcgacacaacttatcagaaatttataaaaaaaaaaagtgttaaatctttctatattaaaggaacgaaaatagtaataacaatgttaatgtttacgccgaccaacatcgatcgctacctaagggtgattgtttaggctttgattttcatagtaaaacaatggatatggacattgtagcttatgaagaaagtgatatgccagccaattttgatatgcccttacttttttcaaatgaaaaattggcatttaagccaaccttcaaatttcaatttttttttctttctttctttaattatatatgttggatttacatatttgccctgggctgtgtttgtttgagtagtcaccaagtttttttttttctttttcaattagcttggataagaagaaatacattttattatttcataaatatatatgatttaaagtagtttttttttttt

SEQ ID NO: 288440 - DNA, 462 bp, Cannabis indica
tctaggattctaagtgtttgtgacaaattacaatttttatttgtgatgaagaatagaacctaggttaaatgaattatatgcttcattgatttgttgcctagattagtctatctccataaatctcaatgctttatctaagttaaataaattgcatgcttcatggatttactgctttaggtaaaagagttaattattgagcgcttcgccttgattacatacaatagggagattgggataattgactgcttcagcgttatctgcgggattaatagtttgattggaaactgaaaattacattctttaataggaattaggaatgattgttgagggtggcgaataacctttaactagtttctcatatcgtattctttactttaaatttgttcttttctttaatttttattctaatcttcaaaacctcttttttttctaattcttattactaaatttgtgaataattta

SEQ ID NO: 288441 - DNA, 558 bp, Cannabis indica
caaggtttttagatcctgaagactggcttgacatgtacattggctgcaaggacttgattgactcatggttcagtaagcgtttagttaaaagatagtttgttaattttctgattgcctgattatctgaattgtgttgatatcggaatggtgtgggcaagactataatatatggaaatacttatcagtattgttattacctggaatgtgaccgcaggtgtatagattatgcacccgaggcgaactagtaagggtacccgcgagctagctgggctcggggctcctggtgagggcgagaaccctccaccaccaccaaactgggaagagttatatgctgcaatgcaagagactattcggcagcagggtgagcaaatcagagaactgagagagcagcgagctcagcctactctaaaccctaatcctgatcctccggcacctctggtagtgccaccggatgtagggaaccgtttggaaccgttgtatgagcagttcaggaagcagaacccgccagtgtttgagggtggtgctgatccactcaaggcggagcaatggatgagtatg

SEQ ID NO: 288442 - DNA, 605 bp, Cannabis indica
atgattttcttttaaaattattaacttatattcagcattaataaaacccaaataagacaaaagaagcctttgccaaaagaccttcttgcccctccatctatttaaattaactacaacctcccaagggtaaattggtcaattaccaaaccccaaaaattctaacgcctctaatatttaacaatgataccccgataatattctaaacatataaaatgtgactctctaaaggcccaacgtcgttttccacagcttccgaacataattattctgatagtttccaatggcgtgggcttgctccattggcaaactgtcgacatctatagggcatgtgttagtggcatgaatgttgagttttgtgccctaaataaaacccattacaatctaatctgattagttatcaatttaagagattcgaagtgatttatgttagcatgtatttttcatgcttatggtttaatatatatatgcacaaaatcagttaagtccagaacatatatttattcacaattacaatattgtcaacacagtggaatgtgattgtgattatatgattcaaaagactaagtccctgtttcatcagtattttggatttatactgatgtgat

SEQ ID NO: 288443 - DNA, 859 bp, Cannabis indica
agctgcacagtacgtttaaaaatcacgtaatatgcctaaaatagttagggtgttacacatttatttttagccatttgatcattaatgaatggttctgattaattgacaaattaaataaaaaataacttgtaacctgataataacttaatactttatttccttataaaactttaattaagattaattttattttaaaattaaattaattgtaatttattttttttttaatttgttactaaacaaggttcttttagcaattaattttcttgcacttaaattattttaatatttatagcaaaattagttatattttctgtatctattcatgttaaaaattatcttaaaattagctatattaaaaaataaaattcttgaaaattgagcttagggtcctatttttacaattttggaaaatatagggtctattttgtcatttaacaaaatagatggtccaattagtaacttttgcaaaacacaaggtccaaaatagtatttacccatagttatttaccgcttaaccaatttattttaaaaggggttagaagtctattttttgtaaaaaaaaaatgaggttttattgtaaatattattatcaaatagtttgaatattaaaaaattacaatagggatttaaatgtaaaaataaaattatttataaatattaattactaaaaaaagtttattaaatatattaattaattattatttttttaagtatataattaatcacaattaatttaattttataaaagtaatgtttaccagtgtacttttacaaggtattatccttgaatgggtagtgttaaaaatttttaaatttttatgtttaatgtttctatctaattaaaatatatatatat

SEQ ID NO: 288444 - DNA, 471 bp, Cannabis indica
caacactttcttatcttaatgactatagaatggtccacccctaatcacttagaatagctaacaaacatgcaaaccttggttaatagttctagattttcttaagatcacgattaggtcatccatgaatctagtaatggtttatactaagtacacaaccattccatcattctgaaattttcctatcactagggtatatccctagaaggacttaggcaacgactagtaactaatcattaaaccttatactatcatcaacatgcaaatcgaatttctagagaggtaagtttgtaatacaattcaaaaatacaacttaatgatcttttgaactgcatatccaccaaatattttctcctacccctatcagttcgcaacatctttaaccacttaccttaatggttttcaccattgctagaaattcatgaaaatttcccaacatttcaaatttctttgcataaggtaaaatctagagtg

SEQ ID NO: 288445 - DNA, 591 bp, Cannabis indica
tagccaagtttgtttgggcgatttctaataaaaaagacttgttatgggttaaatggattaacaccatatacctgaagcaagattcctactggttgtatgagctcaaacccgacacaagttggtattggcgtaagctatgccacttgaggaagagattcacagaaggagacataaaggctgctgtgagaacaggtaaacttagaactaatctgttgtataacagcttgcttgatcaaaatcactttcaatgccataaaactatttggagttctcttaacttaccaaagcatagatttattctttggcaagtggttaactcccatttacttacaaaagataatatggcaagatttcatattcctgttgagtcgaataagtgcccggtttgtgaggattactttgaaactcatgaacacttgttcttctcttgctgcttgtcccgaaagtgattgagttggtgtttgattggcttggtgctcgcatgtggcctttagattttcaaagttggataggttggtgtctttgaacatggacaattgggtgagaaaaatcagcatagcagctgctgccgcaacctgctactacctttgg

SEQ ID NO: 288446 - DNA, 530 bp, Cannabis indica
gaataacataaaataataaaacataaaaaatatatgtaatacataaacttattttattatatataatatgatacacatatttaaatacaaaatctaatatatatatataatataccgcaagattcacaagaattacaactttacatgtagatataaacataaataacatatgtaagacacacaaatataaacatgcaaaagtcgatacaagaaaacagttacaacatatacttatatacattccatacatcttattaagaataaaatacaaaataatattttgttctactattataatctatctttatattcatgtgaatcgtgtatgtagatataaatttatgtacattcatcaattatgcagaattatacatatatcacatatcaatttacatacaaggtaaaaatttcaaatcttaataaatatatatatatacaatataaaatttacctcaaattttaatatataaaatttacctcaaattttaataaatatatatatagtatacatacaagacaaaaaaaattgc

SEQ ID NO: 288447 - DNA, 545 bp, Cannabis indica
aatgcgacttgattgctcgagagagatctgacacatcccggagaggcttcacgtcatgcgagcttcccggagtaccttgtactctgggtgcctcctccgggacccacgctaactgcgcttccttgtggcgcacaaagacttatcaaatgtttacaggttatctgatccacgtgtcctaattcgactagtccacgtattttgggcgaattcaggggcaacacgcacgattccactatcggtgtatacagcctcaatcccaggatcctagcattcaacaatgatcacatgatctttgtatttatgcgctttgtaacgagagaggaaactcttcctcctcaagtttcctgccctataaatagtgaggaatgttcacttggcaagggacagatcgatcaaaaactgtaaaatagagatcatacgctgaaacgctataagctaaggctatctaagaattatatattcagagatattattgtaagagctataagaaaaggaatatttttccttatacttaagtcaatacaactaacgaggattaggctatt

SEQ ID NO: 288448 - DNA, 540 bp, Cannabis indica
aataaataaaaataattaaaattcattacctttaatggtattccttacaaaattgttggggaagttttctctttcttttctctcttatttaaagttctcccttttctaattttaataatataaagtaaataaatgaaaggtaataattatcttacaattaattcacattatttattaataaacataccattaaatttaggggtgttcataaaataactgatccaatccaatccaattcgcaaagtgcggatatccgcacttgtgcagattggattggaaaattcaaaatccgcacttgtgcagattggatgttgattgacatgtaaaagtaatcgatccaatccaatccacacatatttataacaaaattaaaaaattatttatacaaataatattttaatgtgaaaaaaaatagtaatttaaaagtctaatacatataatacaattatattgcaaaacttaatagataaaatgtatattctattcttatgtatttttttctacatacaatttaaaataaaattaaatatttttttatat

SEQ ID NO: 288449 - DNA, 557 bp, Cannabis indica
acactatatagtagggaaaattataagagttttacgtttttacggcataaataaataaagataagggattatggtatttttttgtttttttttacatttatatgagtttttttttatgccatatttttgtaaaaaaaagatggaaatctcatatttgtaaacaacaataagttttgccataaaagttgctggcaccggaaaagtctctggaaaaaattatcgtcgccgaaaaaatcacagtcgccggaaaagtcactgaaaaagtcaccgtcgtcagaaaagtcatcggaaaagtcaccgtcgccggaaaaagtcaccaaaagtagatgtctcaaatataaacaaaaatagaaccggttataattgaaatataaccgattttgttacacaaattataaaaataaataaaacaaaataactcaaactaattataattaaattagaatcggttctatagcataatgaatgaaaataaattacacaaaataactcaaaccggttataattaaaatataaccggttctgtaacataaagaataaaaaataaaaaaaataaa

SEQ ID NO: 288450 - DNA, 639 bp, Cannabis indica
ttttatctctaagtcaaactcttgaagtagaagtacccaccgaatcagtctcggttttgcatccttcttggtcataaggtatttgattgctgaatgatctgtgtagacaattaccttatttccaatcaggtagggtcggaatttgtcacaagcaaacactattgccagcatttctttctctgtagtggcgtaatttaattgagcatcattcagagttctactagcatagtagattgtgtggaatactctgtcaactctttgacccaagaccgctccaatggcatagtcacttgcgtcgcacatcaactcaaacggcaattcccaatttggtgaagttactatcggtgctgtaatcaatctctcctttagaaccttgaaagcttttaaacaatcttctccaaactcaaatggaacaccattgacaagtaagctagataaaggttttgagatcttggagaagtccttgataaatctgcggtagaagccagcatgtcctaggaaactcctcactccttttacagaaactggaggtggcaaattctctattgttgaaactttagccttatccacctcaattcctgcctttaaaattttttgcccaagaacaattccttctgttaccataaagtggcacttctc

SEQ ID NO: 288451 - DNA, 811 bp, Cannabis indica
gccaatattctcgccgccatggttgtagaaaagtaaaaaaatgggctttctgtagtcccttaccacggccaccaaaagcctcgttgcggtcactggactcgttttttactacttcgacctctctcagtaaaaatatgcataactttaacatacaaactccaaatgagctgattcaagatgaattggaaaagctaaaaaaagagatctaaaaactttttatgtttttgacttttttcaaaatcggatcaaaacatagtcgaattttggtttaaaattttagctttattttcttgtaaaattttctctattttgtagatcatcgttttttgatatttgacaaatttatacatttcaagcgtcgaaacttgaaactaaagaaaataagcgtaattttatttcaaaaataataataaaaaagaaaaacaactataaaaactgatccgaaactttagttaaaaataatttaacacgaactaagcaaataaacttgaatataactacaaatactaaattaggcaaagctctccaaattgtatataaaatttaaaataaatcttcataaaaaatgggcattttacaattttgtatacattattttaattaattacaaaatatttagtaaaaaaaacttattatcattttctcatactatttttatatataattaaaaactttttctaatttcttttataatatatatatatggtaataattattgattattatatatatggtaatattggctatgtttattttatatttacaattataataaaaaacataccaataatataaaacattttatatatgt

SEQ ID NO: 288452 - DNA, 514 bp, Cannabis indica
gattatgctctgctacagaaaggaatcaagggctagagatctgaatggaaggagtcataatattccgctgcacccactgtaaggttttctaaactttatatgtgtttatttcattgttttagaattcatattaggatgttaatcaaacatacttgttagtaaatctagatcctggtaaaataattccaacaactggcaccagagccatggtaatgatttactttcatgaaatatgaattaaaacaatgttttatatgtttttgtgttgatttggatggtttcatgtggtttatgtgttagttgatgaatgtatatgttgtacagtacctttttccatgaaaaatattttttttcattttttgaaaatattttatttggattccttgtgaaaaattaagcaatttttgtttttacggaactcgattccgataaaaattgaaaaagttatgaatttttgaaatttgggagccatggctgtcgagtgggtgcatcgagtgcaccaggcactcggaca

SEQ ID NO: 288453 - DNA, 642 bp, Cannabis indica
ttccaattcacccccctcttggaaacatatcttgggctaacactgacaacactataatcatgaacaaatacatatattcgggacttaaaagaatttatacattaaacaatcatgaaataattcatgtgaaccatgcaacataaaatgatttctgatctttattaatcaataaatctgattatattgaaatgggttttatctagggcacaaaacccaacaatcggttattaggtgttaaccgacgtattgaaataaatccccacatacattgtaaaatcagcattttaacggagaatacaaagcagataaatcctaggtggccttcgacctctatttgtaacactttaactagcataggcgtgtttacgtgattttaaacgtactgtgcagctcgttgctaatcaacgaggtttatgaaaattgtgattaattaaaattttacttatttaattaaatacttatagcatttcatacaaaaaaacttgggatcccatttacaaaatactttacaaaaagtttactgttcactacaaaatatttgtcgcccagcgactaactacagaagccctgatgtctcgaggatcgtacgctccaggcctaaccgccccgacatgttcaatcttcatcggctcgtcctcacga

SEQ ID NO: 288454 - DNA, 490 bp, Cannabis indica
aattacaaagaagcaaaggagggagttgtcacttttggtgatggaaataagggccatattattggaaaaggagacttggtgatgagtagagctgcacctcttactgaagtactgtatgtgaaaggactcaaggcaaatctgataagcatcggtcaactttgtgatgcaaattacactgtaagtttttctaaaactcattgtttagtttcatttgatgggtgctcagtcttaacagggaagagatctagtgatggtagttatttgttggacaatgttgtcctatgtaatagtgcatcattggataaatcagatattggagactttactgctattccaaaagttttaaccaaaagaaataagagtgttaaatcatcacctcgtctttcaagagctcattcactattattagtgctatggtatggtcttctaaaccttatactgttgaatcttgggtttaaacaaagaaatgatgatgtttttgtcctagtgt

SEQ ID NO: 288455 - DNA, 816 bp, Cannabis indica
atgcatgtgtattacatgtgtagcgtgcatgttaggaagcctgttagattacattagatatgtatgttggttgagtaccatccgactgtatcacatcggttaggctagagtatgactagcagttggagtatgaccagtgtaccgagtataggctgatactgtatcaaatcggtaaagctagagtatgactagcagttggagtatgaccagtgtaccgagcataggctgatactagggttggtggtattgtactgtttgactgtatcacatcggtaaggctagagtatgactaacaactagagtatgaccagtgtaccgagtataggctgatactgtaacacatcggtaaggctagagtatgactagcagctggagtatgactagtgtaccgagtataggctattactttgtcaaaagtaccgtcgtacgaaagttcgggactcagtatcgtgtgggacacggcagttagggttgtggtcaggggtatgggcgtctgatcataacccgagatttatttatgattatgattatgcttttcttactgagtccgtcgactcacagtgttatgtttatgtttagttaacggcaaggccaaggctgaggaaccgtgaggaggagccgatgaagattgtacatgtcggggcggttagccctggagcgtacgatcctcaggacaacagtgcttttgtagttagtcgctgggcgacaagtattttgtattagacagtaaacattttgtaaagtattttgtaaatgggatcccaaagtattttgtatgaaatattatataagtttaattagaaagcaaaaatttta

SEQ ID NO: 288456 - DNA, 494 bp, Cannabis indica
attcacagaacaaccaataaatctcaagttgccattaaagctcaaagcttgagtttcaaaactcaagcttgcttagaactaacaccatacaccaaaatcaatattcagaacctttaatcaatcaatattgagcataaaaactgaaccctaaccatttctaaacctaacagcccctaaaacccaatttcacactattcaacctaaacctaaattcaagaactaggctaggagttgctagagcttaccttgagtttaatttctagttgaatcccttgctgaaacaccaaaaaatcagcagcaaatctcccttgcttccttcagccaaaagaggaaaagagaagaaggggttatgttgatttttctacttttttccctatttttctctaaatggaataaatattaaggaaaatccattttcccttgctgaaattagcttggctaggtgtcaactaaccaagaagctgttgggttttatgccctaaataaaacttatt

SEQ ID NO: 288457 - DNA, 532 bp, Cannabis indica
atatatatacataccctacacatacaaatactgcatacttatatatacacacccacacccacatacacatacacatacacataaatacatacacacatacatacatacatacatatacacacatatatatacacacccacatacacaaacacatacacatacatacacatatatatacataatcccacatacacatacatatacatacatacatgtatttatacacatacatacatttatacccacataaatatacatacacatacatacagaaatacatacatatacacatacatatactaatacacacatacatacacaaatctatacatataaacattaaaaaaaattaaaattaaaaaaattaaaaataccttaaataaattggaggaggtggggcttggtggtctgcggtggtggctggcgtagctcggccgccgtcgatggtggtggtggcgacggtggtggtggtgttggtttttttgaagtgaaaaagagagggattgagagggattgagagagggggttagaa

SEQ ID NO: 288458 - DNA, 992 bp, Cannabis indica
cacatgaatatgactttctgcccgaaaccaagagatgattagaaagtaaaagcaccgctagaactttcctttgtttgaagtaataatataataactaatatcttttattacatattaataattaattcaagatgaactttcaaaagtatttttgaaacatcgtgggatatataaatgcaatacttttgtataatagcatgtagcatgttgtcttcattagtatttttcaaattttaatatgaaaattaaaattataaaatatagcttaagaaattataactaaggttataaactggtaaacgttatgttggaggctgggatttttgctctagagagagaaatttgttagattaaattttggtaggattatttatctaaaattaatcaattataattaacgttttctaatcagaatattctgtcaagtattagaatattctgttaatattttgacagaaaaataaataataatattaaaccaagaattctgttacatagccacattttatataaaaaaaaagataatatttttaaaaaaagtcagtcaataatttctcataaaccaagaattcgtttatatagccacattttatatattcagatttagatgtggaggcaaacaattataacctgatcgagccaaaaaaacaaatagaaaaattatttagcaatatatatataatatataaagcaaaaacccaattgtatttttttagatttaatgagatttattttatttatttcattatataaagtaacccatgaatttctcataaactatattatttttattaataaaccattttatttttaatataaataaaaagtcatccatgaatttctcataaaccaagaattctgttatataggcacactttaggtagaaaatagatatatactagatgaaagttacggggcaagccacgtaaatattaattttatttaagtcttagtgattttttttaaaaaaaatcaataactaattgtaaatt

SEQ ID NO: 288459 - DNA, 542 bp, Cannabis indica
tgagcatcgatcagtttggtcggcttttttctctataaaaatgcaaaattcaattttcggtctggatttgtgcaatcaactaaccgaccaatccagaacctatcttaaaaccgaccattttgaacctcgatttggtcggtttaaaccgcccaaaccgaacttttttttaaaaaaaaactgatccaatttattctataaatgcattattctacattttacaactacaaacataaaaattaattgttcaaaaactaattatcttattcttttaattttaatattaataaaaaataatatattatttttatatattattagtaactataatacatgcaaaaaaaaataataacttaatatatatgtatagcggtcggtttcggtttttttggtcggtttattacccaaaaaaaactgaccgttcaatggcggttttaaccgttagcactttttttggtttttggttttgttgatttcggttccaatagtgttcggttggtcggtttaaacggttttttcagctttctggattttatgctcactgc

SEQ ID NO: 288460 - DNA, 470 bp, Cannabis indica
ggtgatcagccgagaaaaactcgacgccaggggtccctgcatgatttccgcgcgcggagataagggattcagacatccctgggcgtgtcactcggacaaaaccttgtcctgacacgctcctgaccgagcgaatgggtgattcgcgcgcgtgggatgagggtgatcaccttatcctttttcaaaacttcaaaaaatcataactaattcaagtaaaattgaaattgagttctgtaaaaaaaaatgaattgcttaattttttccaaactatccaaaaaataataattccagaaacgaaaaattcaattatttttcataaaattttacaaacatcaatcaatcatcaaataacacacaaatcaacatgaaaccatccaaatcacacacaaatcgttttaagtccaaatttcttgaaactaaattagttaccatggctttgaggccagttgttggaatttattttaccaggatct

SEQ ID NO: 288461 - DNA, 853 bp, Cannabis indica
tttgtaactgtaaacttaatttatttggaatggaactatgttgaccgaatatgtgccattgagtttcactatttccaataagttatgaacaacacttgcaatgtcagattttaaaaaataattccataataaaataagtggatgagctagggttttcaaagtagatcgtacaccctactgatgtgaccttatacggattaatggtaaaaaattagtaaaataatgacatataactatcaagtaattagtaataccttcgaaatcattaattattatttttaaatattatttcatttgaaatttgaactcacatcaccatttggttgagttttccaaatgcctttttccaatgcattgacaaagtcatcttcattgataggttgtacagtctagtcaaatcaggttttaaatgaaaatatatttgggacgtatttcaatgtacggcagaagatggatctcccatatctcaataagttcaagtttgaaaataacgtacatcaatatctgtgcacagtacgtcacaccgtaaatacagtatggtgcaattatgtttactcaatatttgaatttaatgagataattagaagttgttgtcaaatgtaaactataatttcgtacatatttattcgtaaaatacttattttaatacagtttcaaccatttcctatttacgagttgtactaaatttggactactacccattcttaatagtccacattcttatattgttgggaattatttcaaaattgtccaaatattgtaatcttcttacccaagtatggactattaatttcctctaattttaatttctgcatactcactaaaaaaaccaattgttgtcttatcaatattt

SEQ ID NO: 288462 - DNA, 518 bp, Cannabis indica
cctcgcaggcagcaacatcaaattttcataactcaaccaattcaaccccaaattgcttcaaactttccagacctgttctataccttccctagaacatatccaaggcatcaaactaacccagaaatcacagatacaaaattcaccattggagctcaagctttgagttctaaactcaaacttgagcaaatctaaacaacatgcataccaagcagcttaattctacttaaacatgcataaataagcctctgcaaacaacagaaaacaaccaccacaaacacagcaaccaatttcttcattttcttcaaaatcacatttttaagcttaaaaattccaaactttgaacaacacaactagcatgcattaaaacctagataatccattcaattaaaacctaatcaagcttctgtaaacaacaattaaacacagcaacaacatactcacaataatcatgcatttactcaattttttcatcaaaaaatctcaagaaaacaaggtagagaattcacataaagaaatac

SEQ ID NO: 288463 - DNA, 1036 bp, Cannabis indica
tgcaggtacaaaagacactaaaatgcaggtaacactgcaaatgaagaacgactattcaggtggaacaaacagtgaacacacctgaacagaaccagggagatcaggttcaggtggaacctgggaaccaggttcaggtggaacctgatgaagacaacactgacattgttgatgaaggcactcaagaagacttgggggattatcaactagtcagggacaggggcagaagggtaccaagacctaatcctaagtatagttttaatatttgggatgaagacattgcatatgcctttatgagtgaattggaaatggccaataatgaacctcaatcatatgaagaggccattaaaggaccaaattccaggaaatggaaaggtgcaatggatgaagagatggaatctcttaagaagaacagaacctggattgtagtgcctaaacctaaagataagagcatagtggactgtaaatggctattcaaggagaaagaaggcagaactaagaatgaacctataagatacaaggccaggttagtggccaaagggtttacacagaaagagggtatagattttaatgaagtatttgcaccagttgcaaaatacaagactataaggataatgctaagtctagctactcaattcaacctagaaattgaccaaatggatgttactactgctttcctacatggtgaactagaagaggagatctacatgagacaacctaaaggatatattgaaaaagggaaggaaaactatgtatgcaagctagttaagtcactgtatgggttaaaacagtctcctaggcaatggaataaaaggtttgatggatttatgctaaaactggggttttctaggagttactatgatcactgtttgtactacaaaggtactgatattaataaagtcatatatctacttctgtatgtagatgatatgcttataatcagtaaagaaagggcaagagtaaacacaatgaagggcctactcaagactgagtttgaaatgaaagacctaggggaagctactaagattttgggaatctc

SEQ ID NO: 288464 - DNA, 135 bp, Cannabis indica
tttgttattttgttaaatatttaaatatttataaattataagtttaaaaatgatattttactattttatatcattttacatattgaagatttttttctttcaaagcattgatcttatttgatatttaatttaatt

SEQ ID NO: 288465 - DNA, 371 bp, Cannabis indica
tttaccaaatgaaaaaacaaagtataagtattctaactaaaaaaaaaggtcgggcctaacccagctcgattatctcgggtcgggcttggcctgctaggccaaaagaaggagtcgggtcgggacgggccgggccaaagtgatgtcgggccgggccaactcaagaaatcaacaaaaagctacaagaaacttaccaagaacttgagatcacaaaatcctaggcttgttcgcagtatgctatgcaaaattggtggcacttgaggaccttctaacaagacgattgggatctaataaatcatggtgactacacaagccttatggcaaggagtgtcgacctgatgaagttggttttggagtttattttaccaggatct

SEQ ID NO: 288466 - DNA, 645 bp, Cannabis indica
tcaaagcaggcagaaaagttatgcagatcccaagcgacgggatgttacattccaacctggtgatcatgtctttctacgagtatccccgatgaagggaatcagacgctttggaaagaaaggtaaattgagccctaggtttattggaccttttgaaattctggagaaggttggacaagttgcttatcggttagccctacctccttccttatcagcagtgcataacgtgtttcatgtttccatgctgaggaagtatgtgtctgatccaatgcatgttctgagttacgaagcattggaattgcaacctgatttatcatatgacgaacaaccagtgcaaattctggataaaaaggaaaaggttctccgaaccaaaaccatatcattggtcaaggtactttggagaaacagtaaagtggaagaagccacttgggaattggaatctgatatgagggcccagtatcctgagttattcaggtagatttcgggggcgaaatccttttaacggggggataattgtaaagaccgcctatgaatagtactttgtattattaattatttaaggtttatgtattaataattatggaatgcatattttagaaatatattttatatatcatatatgtttttatgctattttatatttaatta

SEQ ID NO: 288467 - DNA, 604 bp, Cannabis indica
gcggcattatctctatggggagagatgtgaaatttacactgaccataaaagtctcaaatatttctttactcataaagatttgaatatgagacaaaggcgtttgttggaattggttaaggattatgattgtgagatcctttatcatcctgaaaagctaatgtagtggctgatgccctgagcagggtccttggcaaatagctatcatggttcaaatttcacctcagttagcagaagatatggtcagatcaagcatcgagttttttgtaggtaaacttcataacttgacgctgcaatctggtctgttagaacgtattaaagctactcaattaactgatcccgagttagtaaaagtcagagaagaggtttcggctggtcaagctaaagactttacagtgtcagatagtggaatgttgttgtttaagactagagtctatgttcctaatagtatggaactcagaaatgaaattctcgaagaggcacataccactccatattccttgcatcccggcaccaccaagatgtatcaagatcttaaaccctacttctggtggagcggaatgaagaagaatgtggtggaattcatatcgagatgcctaacttgtca

SEQ ID NO: 288468 - DNA, 832 bp, Cannabis indica
ataataataagcattcctttaaacatcacacattcctggtacttaataaagtaccactttttaccactcgtcacatacgagctgaatatgtcactatcgttgcccgataaagcaaacgataagtaagaaacctaaccgcggtttcaagagtaattactcataacggtaataaccgtttccaaccctaggtcataacctaggcttaataaacttttaatcagcatcatgataataattaaggccacttccattcatccattaatctttaaccacatacggtgcttaccacttttcttaccttaattcagaagtcaaaagtatggccgacctgagtggaagaacaagctaagcaatcccggtcctatgtcacgacaattgaaacacaataaataccttaactcaaagttccggattaaaaccctaatttagaaatcaaacgtaacctaactcccagcaaccccaatttaggtcaagcatcccatatttaatttaaaacagatagtacacaactccccgggtcaaaactgaacataaagcaaacccgaaaaaattctcccctgcaggcaaccggtcgaccggttctgatacaccagaacccatccggtcgaccggttctggcagaccaggaacaaaagttcctcttcaccaaaatcgaaccaaaacccctccaaacctaaccaaactttccagaacagtatattaacataaataatggcataacctaagctggcaaacacagtggttcaatctctagcttaaaatacacacactcaagtgaagaaatcaaattttcttttagcctcctcactcaccaatcaatcccaacagccat

SEQ ID NO: 288469 - DNA, 425 bp, Cannabis indica
acagatgtgaaataagatattaatataattaaattaatattttaaactaaccgactaaattttgaaaatttaggttgttaaaacaacccttaaaaaatctcaaaattcaaaatttaaaattgaaaactaatttgaaatatctaggtttatttgaattatttttatacaattaaattaaatataaaataagataaatgatttgaaaaaatatcttcaatatcatcttctaatctaataatttaataaaattaaaataataaaataaaccaactttaaaatagatgtggttagataattattattttaacaataaaatagtaaataaataataattatcgtaattaagcaatatatgtcaaaatatctcaaattaagcaatattcaaatttctacaaaaatatctaagttatttaaatatttaaaat

SEQ ID NO: 288470 - DNA, 460 bp, Cannabis indica
gggaaaaattgggaaccctagttcttcccatttctgtgttgtttagggtattgccatgctttttatcgatagggaaacttttagtttctagtttaagtccccgggaaatgatttagcgcgtcacttatcagtgttgtgattatattggtttaggagcctgtaaatcgccgagcagttcgttccactcaggttaaccggcacacctgaattcggaattgaggtaagtttagtataatagtatgcatatgtatttacatgtttagcgtgcatgttaggaagcctgttagattacattagatatgtatgttggcttcgtaccatccgacagtatcacatcggtaaggctagagtatgactagcagctcgagtatgaccagtgtaccgagtataggctgatactatggtcgatagtaccgtagtgtttgactgtatcatatcagtaaagctagagtatgactag

SEQ ID NO: 288471 - DNA, 788 bp, Cannabis indica
ctcaaaagcaatatgacaatcatgatcaaaaacaaatgcattatcttttccaagtaaatggcacagaggccgtgaaattttgctaaagtcttttatgaatctccggtagaaaccggcgtgacctaagaatgatctaatttctttcacagttttaggtggtggaagttttgaaataagatcaactttagctttgtcaacttctattccctcagatgaaatcacatgtcctaagacaattccacgttttaccataaaatgacatttttcccaatttagcactaaattcttttctttacaacgaatcaagacaagagacaggtggtgtaaacattcatcaaaagaagatccataaatagaaaaatcatccataaagatttccaaaaaatgttcaaccatatcagaaaaaattgcaatcatacacctttgaaacgtcgcaggtgcattgcataagccaaaagacatgcgtcgataagcaaatgttccataaggacatgtgaaggtggtcttttcttgatcctcgggtgctatcgggatttggttgtatcccgagtaaccatcgagaaaacagtagtactcgtgaccagctaatctttcaagcatttgatcaatgaagggtaatgggaaatggtcttttctggtgaggctattcagttttctgtagtcaatgcacactctccatccagtttggattttagtggggattaattcatcgtttgcattcttgactacagtaattccagacttcttaggaacaacatggatcggactgacccatgaactatcagaaa

SEQ ID NO: 288472 - DNA, 727 bp, Cannabis indica
gagcaagatttgggtccttctggcggcggaggagggaggaaagccggtgaggagagatggctttggggacagtcatggtggcttcttcttcttcttcccgccaaaaccaaaattgtagtttaaatttaaatttatgagtataaataagcaatttaattaaattaagggtttttttatttttacaccttaaaatagtttttttttttgtatttttacgaaatcctacctagaaatcctgcgctgcaacctaaattgcaataaaaaatcgtgcagaaacccctattgcaactagcattgcaactactttagaaactcaaaccgtaaatttcaaaaaaaaaaaagttaaaaaaacagtatatgagataattttccattaaattaagggtaattaaattttagtggatttactaaattatgctcaaattccttctgaattgatgtcctatcaataaatactaaatacttatcaaattttgatagttagaccaagcaaagcaatttgtcgataaatcattaataatgtgtcgataataatcaataattgccaaagttgacaaaaataacgataaaaaagaaactattgagaatctattgataaatatcaacacctatcgataataaatttagctggaaaataccataactaccagcatctctcacacaaatccaaaaaacacggtgtattaggctataaacaatgattaatcaaacttaatccactaaaata

SEQ ID NO: 288473 - DNA, 839 bp, Cannabis indica
ataaataagtaaatatggttttagtacaaaaaaatcattatagcattttaatccaaactgtttttctaaaagttgggttggaacagctttaacttttagatgtagcttctccaaaaattctttaaaaaactatttttttcactacttaccaaacacatttttatcacaacctagggtgggccaacttgtagttttccttaaaagctaaaatcccaaagctagggtgggctaacttttcctaaaagctataaatttcacttaaatttttgaaaaagctgttttttaaattttaccaaacacatattaactcataattttttccaaaagtgattttagctttttaaaaagctccccaaacggggcctaagagcacctcattataatacacatactaaaaaaattgtattaaatttaatataaaatataaaataagctaaattggcactacaatatatatcacatttttttatttattactgtttaaataatttttagtccatcttaatcaatttgtattttttaggaaccctttaccctctatttcattattgatttattcttagtctctcatgccctcatttatccattagcatcccttatatttatccttttctcttattatttagtatcatcctactaaagtcttactttgacattattttttataaggtatctttacatacttttgtacatatgttatttgttctcttaggtgttcatattatatatatctcctattcaaaatgtgtaactttctcgtctgtattttaagtattcgtcttggttatgtttaagtcatccatccgagatgggtaggtcgatcctatccaatatatgtg

SEQ ID NO: 288474 - DNA, 297 bp, Cannabis indica
agtttcaaaaaaatatcgggacgaagcactcacccacgcgcgcggaaccgagtgatcctcggtcaggcgcgtgttcggacaaggttttgtccgagcaacacgcccaggggtgtctgaaacccctcctccgtgcacggacatgctgcaggttccccctgcgccgagttttctcggccgtgcactcccccatgcgcgcgcgggcagtatgcacagcatactgtccgtacagctcgcaattttttcgtttcttcgatttttcatgctatttcacggatttaacttctaattttttgtgta

SEQ ID NO: 288475 - DNA, 534 bp, Cannabis indica
caaaagagctgactaggttttatggttgaaaggtcgcatccctcgaggggtattcacatggctttgtaaacaaaaagtaaagtcacgtgtcactaaatacaaattatgttttggtaaataattacaatttaagctaagctggccattgcattgagcaatatctctatttattatgttaattaattaactatttagtctcaaatttttggagagagaagagagagaagatgattatgtacttgactagaaaataacaattgctaaaactatttgtcctcgaaacacaggttagtagtattcgaccgactgtgccggactatactgatgacacatgacgaagacaaatattttggcgccatttctctcttcttaatttcattattactacctagcacacgcgacacttgaaatgcacgtggaactgagatattcaatgtagtttttctttttcttttttgcaagaggtattaagtactcttattttattttaggctaattagtatttttgcttttaacatttaccaaatcatgttc

SEQ ID NO: 288476 - DNA, 514 bp, Cannabis indica
accgggggtggcaaattctctattgttgacactttagccttgtccacctcaatccctgcttttgaaatcttgtgtcccagaactatcccttctttcaccataaagtgacacttctcccagtttagaaccaagtttgactttttgcatctgattagcaccttctccaaattctctaggcaatgatcggatgaagaaccaaagaccgagaagtcatccataaagatctcaatgcaagattcaattaagtccaaaaagatagccatcatacacctttgaaatgtagcaggagcattgcataaccgaatggcattcttctaaaagcaaaagtaccataaggagatgtgaaagtagtcttttcctgatcctccggtgctatggctatttgatggtatccagagtagccatcaagaaaacagtaatacttttactccgccaatatgtctagcatctgatcaatgaagggcaagggaaagtgatctttctgggttgctttgttgagttttctataatcaat

SEQ ID NO: 288477 - DNA, 949 bp, Cannabis indica
tcatagttaacgcgaggggtattaaagcaaatcctgaaaaaataaaggcattaatagacattgcgtcaccgacaaagccaaaagaagtacaagcattgacaggaagaatggctgcacttaacagattcattttgaaatcaactgataagtgtgtgccgttcttcaacatattacgaggcaaccaaaagtttgagtggacaaaagagtgcgaggaggccttttagaacataaaaaggcatctagcaacgcctctaattttggcaaaactaataactggagagacgttgtttctctatttagccatctcggaagatgcgattagtgcaaccataatgcgagaagagggcaagcaccaacaacctatttactatgtaagtaaaatgttactaggggtagaatccagatatccccctctagaaaaactcgcgttgtgcctagtcctccatgcgtctcgtaaactacgaccatactccaggctcaccccataaaggtgttaaacgatcagcccttgagataagttttatcaaaaccatatgtttctggaagattgataaaatggtcgattgaactggggcagttcgacataacatacaatcctcgaacatccattaagggccaagccttggctgacttcttgatagaaggtataactccagaagaaattccacctgatcagcgagacgcagaaacttggaagttatacgtggatggtgcatccaacgaacagggttcgggtgtaggggtaatattaatattgccagaaggctttaagattcactatgctctgaggttctaatttgacgcatccaataacgaggctgaatatgaaaccttgatcgctgacttaaagatagcagaggcatcgaaagtcaaaaatctcatttgtcatagtgattcgcacctgatcgtgaaccaggtcctcggggaaccaggccaaaggcttaaaaat

SEQ ID NO: 288478 - DNA, 565 bp, Cannabis indica
  modified_base (528)..(528): a, c, t, g, unknown or other
gtgtaattttgaataagctctaatcatgaggttccatacaagagtgggggctaaagaagaagggtaaccatcaaatagtgttctagcaccgttgagatccttcaaagagagataacagttaataagagaggtggttaaagaagaatgagatgaaagtgccacggtgaaaactctgccatggatttgcttaagctgagggagttgaggacgctgctttagtagctgaaaaagggtttgcgggattggatggtcaaaaggaattctgataagacttggtttgggtatggcggacaatgtagttgatgaagacgagaaagggaaggagggaaaatgtttgaatttggatcttgctgtgatcacttttcattttcaaattttgttttttggtcagctcattttcaaccttgtacaatgttcgtgaaacaagaatgacaatgttattaagcttttttttttttaaaaaaaatgtaatgtcgatgaaattcaatcccccttattttgctcattgcatctgttcactaaattttntattttgaatctagttcaatccctaaaagtgtagtct

SEQ ID NO: 288479 - DNA, 882 bp, Cannabis indica
gtgtggttaaatcttatttcataattaaaatgtaatgatcaaaaaagagaaaacatgttttagacttctaaaaattaagtgggggtatcatttttatttttggtatatatagtctcgtcttgtcttgtcttttttttagtgtacggaagttaaagaaagttatagagaaccatcaattaaaataataaaagaaaaaacaagaattaatatagacctataataaacttaaaaataaatggagttggtctaatattactaaattttttattaattagtaacatttagtataaaattaggggttttttcatttttatacttcaaaacagtttaattttttttttacaaaatttttacataaaaacctctattgtaaatactagcggattgtataacaatccacataaatattaccagaaaaattactttagaaacccaaatcgtaaatttaagaaaaagaatattaaaaaaataatatatgggatagttcttttaaaattaatatatattttaatttaaaataaaatatattgcacaataacatatggtgatctattttatacaaattatgctctaaataattattaatgagagaaaaagtatatattattctcatatcattgaggacaggtgtcacaaattgattgatttgcaaagaagacaaagcttgcccatatatatttatagatatagtgatatatatgttttcatatagagtgtttttcccttttggaataaagggtaagggcaataatataaactgacaatcatctcttgatgacattaagcaaaagtgtaattaatttgagactagaccagagtgatcgtaaattaggtggaatatggatatatatggtgtaaatataaccaccccatatgatatat

SEQ ID NO: 288480 - DNA, 721 bp, Cannabis indica
ctcgactaatttatacaaattctactctttcttacccttcacaactatcatcccacatttcgtaatagatccaaccgcaattatccaaagctcccaaagagactaagttcctccttaatagtagaacatatctcacattagttagtgttcttacaacaccatctaacatcttcaccttaatagttcctattctaacaactttagagctagaattattatccatcaaaatagtacagccatcatatgccttataagtatcaaaacactccttatacaggcacatgtggaacgaacaaccagaatacaaaatccaagagtcaaaaaagttttcatcagctatgacagagaggacatcaaagttacctccaaagccttcactagcagcattagtagaatctgacgtgtctttgcattcttgattcttcattgcatgcatcaagatgttttgtcaactcttcacaaaaaaaatacccaagttcttaaaaaaaatcgtctcaaacggacaaccagatcaaaagttaataatgttcaaagtttttaaaaaaattcatgcaaagtttagccctttctctgattttttttttaatttattctggtctttattatttttcattttattagtcttgaaaaattatataaaaataagttatcacattgctaaattagttaagaaatgagaaagttatgccattctaaaagctactaagtgctcttcactcac

SEQ ID NO: 288481 - DNA, 513 bp, Cannabis indica
ctccccgagcctcgtattctcctgatacatgatttactaccagctgtgaatcactacagatttcaatgtgttcagccttcatctcccgggctagttttagtccagcgattagagcttcgtgctcggcttcgttgttagatgccttgaatccgaacttgactgcagcatgcaggtgtttcccccaggcatgacgagggcaatccctacaccagatagttgatctgtagccgacacatccacatgtagtttctaggttagtttgtcttcattgttacttggttgaggtgctggctaggggttgctttcttttttgcctgtgcattctaccacaaagtcagccaaggcttggcctttgattgctgttcggggttggaaggtgatttcgtactaacccaactctaccgcccacttgagtaaccgtccagaagcatctggcttttgtagtatttgtcgtagtggctggtcagtatataaccgaacaggatgagcttggaaataaggcctcaacttcct

SEQ ID NO: 288482 - DNA, 918 bp, Cannabis indica
cttttagtttttttgaacttcaattttttagaaattttgctttttaaaaaatttagtaaacaccttactattaatttttaagttattttttatttttaaaaaaatatttttatttatatttatgtaccccctagcaaacttaaagaaggatttgtaccccacctaaaatttagaaaatgaagtaaaaacaaaaaagttatataatatgttatggggtactaatggtgtctagtaccactagatatattatcctgtgattttacagtgataaatccttaaaaaattattacattaaattatgtggaattttatacttaattaaaatcaataacaatattattagatgatactatgcataactacttttagcctttcaatttgcataatagtgtttagatttataaaatttatgtatagattaaaagttatataaacttttttaaaggcaccctaaaatattgggctttgaaaggcaccctaaaaaattagagaaatgctaaagggcaccactggtatctagcaccctcctacgtgtcaatatcactattggtgcaattaagtatcgggtcccatatagtttaatataataatttttatagagtatcgctagccaattgcaagtcaacacatttagaaagtgctaggcaccactagtgcccaatagcaatgctcaaaaattaagcctaaggcatttcccttttaaaaagagaaaataatatgagtggataattaatgcaagtgtgttgactattttagggaggtgtgtaggggtatggaaaatgaggtgatgagatatgaagtaggatgttgtttataggtaatggttttgattggccttaaatatgcagcatcttcatctactcaactgccaccctcttaaccaataataataataataataataataaataataaaga

SEQ ID NO: 288483 - DNA, 604 bp, Cannabis indica
gtttcccacggatgttctaacacttgctttcttttgttgtagcaggtatctccatggacgccatcttggatcagcttgctggggttcacactcctgaggctcctcctgcctttacttcttccccaatggcccctgctctaaagatttcttccagcgctccccccgacactattgatttagtggatgacgaggaggtgctgccgggagaaggtcaagaaaagcaatggggcttttctgaggaagttaaagaaggtgcaggagggctccgggctcttcctgaggaagttgaagaaggtgaagaagagcaagaaattgctctgattcgcaagcgtaagggcaaaatgattgcccaggaagagcccaagcggcctcggagagctgacactccggcccacggtcttgatggtggggtctctcccatggaagagcatactgcccctcccaacattgtgctgactccggttcctggagacgaggcgaggcaggagctccggatagccaagcataactatgccatggatgaatactcccgggggtttgccgaggtggaagcccttaggagggttctgcgggttgaggtgcaagaaaccatcaacaacccgga

SEQ ID NO: 288484 - DNA, 625 bp, Cannabis indica
gcgacagaaaatggggtacactcgctaatacacccagtacacggagttatcggactcccaagaacgtgtgtactttgctactaggcaaaatacacactaccggagaccacctcctctgtacaaggatagttcccggagggaccccaacaagagatgcgaataccataacgacattgggcacaacaccaatgaatgcaaaaatctcaaagacgagatcgaaaacttaatccgattgggacacctctacgagtggatcaagaatcggttgcctcatctcaacccgggtcaggcggctggagctttgccacagggaacaccagggggtgcgacaggagtattggctccagttgttccccccggagatgcccagcatatccccggtctgccacccagacctaacgggagagtggccatgatctcgggaggaccccatatcggaggaactacccgcaaggaactgaagcggtacgcaggggccatgaaacacaatgaggtttgggaagttactcaactcccagctcaaaggccctgctagtgccggcaggtgttatgggcctcacttggttttgcagtttttcaattttatttcattttctcaaaaacgtccaattttccaattctaatc

SEQ ID NO: 288485 - DNA, 791 bp, Cannabis indica
gagcaacggccagaaacttgaacgtcccccacaccttcgttgttgtcaatccctggctcagcagataatgtctccttcaccttcttccctttccctctaccaccaaccttggagggggaagcctcgacttcgtatgaagcccaattgtcaatctcttcctcgctaagaagcttgaattgctccttaaaactacgaagcacctgcaatattaagactctcgattattaagtaaagtacgctaaataaaagataaaaaataaaagatccataacacagtccaagtcactcacatctgctttagatttttctttgtgtgcatcagcataagcatagaaattggcttggctgcatcaattaaataaaggaatggaattacaaatattattttcaaaaccaaaaaatattaccactaaaataactgccacaaataactcactagtacttcgcccaagcttccttcggatccttcttctttatctctgctgcatcctttttgtctgcagcagcccccctcttccgtttatataccattttataaacctattacacaagacaaaataacttaaattaacaaacattcaaaacactaaaatgttggaagacaaagactttgaataattcattgcaattgtctaacatttcagtgtattcatgacatcccgacacttaatttcctatatgtgtacaataacaggtaagcatctcttcctatataacataatttcattatatgtattatatggaaactgttaagtacaatgtaccaatatgcctaaataatggattctgta

SEQ ID NO: 288486 - DNA, 756 bp, Cannabis indica
ttattatgcctaaaatagagggtggttatttaatttatgctggaattgacacagatttgactattatttataaagaagaaaagaaaatcatgtcgttttttaagtctctaaattttcttaacaactaaattgggaaagtatacatttctgtgagtggattaccaaaaaagaaaatcatatatatagaatagattgttaaaatttattttaagaaatggccggtagcagaatctttccgtattattttgtacacgtgtcaaactataagccgtttatcatccacgattataaaaaaaaatactaaagaagaagataatggctcaaagagtcagtcaccattattccgcgccaagttgccaacccaaacacaccgaactctttttttttttttgtctacaaaaacacaactgcttattcatcctcgccagatattgtcactatcattttatttatttatttattatgattagtttattctaccaataaagttcacttttattatagccaaataataataataataataataataataatacagttttaattttattttttaaaaacaatgaactttccttttttaaaaaaaacaacaaactttaggtttatttatatattagtttattttatttgtgtacgtatgtatagttagaatccttaaaggtagaggagggtcgcttggcctaactaagttcaaatcaattaatcaaaccagaaggacgccaagagagagagagagagagagagagagagaga

SEQ ID NO: 288487 - DNA, 509 bp, Cannabis indica
ggagaagactcatgcgggttcgatgggggtggtccgccttggagaaattcacttcagggacacccccattgctactgtggtgatctagcttatgtttggacttctagtagtagagcaaatcctggtcgtcgattcttcggatgtccacactatgtaagagttttgtctttttagattcaaaagtacttctcatttatgttttctgtacttaggcagccatgataaactaatagggttattttcaactcaggagaacgatgaaagtcgaggatgtgattacttttgttggatcgataaatcacatggtaagagaagtacagatgctacacctggattgcgaaaccaaatcaagattttggaagaagataagaaacgcaatgagaatgttattagaaaattaatttttatcatttttatttgccttctcatcattgtccaacttatattgcgttaaagatatgggttgtcccaaaatgcaaatgttttgtatgtcttatgttctcaaaact

SEQ ID NO: 288488 - DNA, 534 bp, Cannabis indica
aaggcagccaggttcttctgtgttcgaaaggttgggaacaacccatgacctaagggacgacctaaatagaagaaggggaacagacgagcagaatactacaacgaacgtgcagtccggagcccatactcaaatccccgctcagaaagacgctgacgtggcccaacccgaccagaatgccaatcaagtcagcccagccgtacaggcccagcttgacgaactgaagaatatgtttcacggcatggccgggcagcgtaacaacgatcttgagttagaccgtgcacgcggaactcccttctcaccagaaatcaacctcctgccactacctcacaagttcaagatgccaacgtggaagatgtacactgggagagaagatcctctctcccatctcaagtatttcgagatgcaaatagatttacaaggggtacgaggagacgtatgttgcagaatcttccccgcaaccctgtcagaggccgcacagcaatggtatttcaagctgcctccaggaaagtttagttcatggaaaaccttctcttc

SEQ ID NO: 288489 - DNA, 640 bp, Cannabis indica
gttcaaactagactagtggaaatattgatttttaaaaatatgttaataataatattggacaaagttaatcaataaaattatgattatatatgttttaaattttaaaaatattgcatttatgttataaatgatgttgccgtgagttgtatgagaacaacaaataatattgtttataaatagaatttttaaattattaatatacaaattttgttaattagttgtggccttttcattaataccatatcaagacataaatatttattatccaaatctaaatatagaaagttgaatcattaatatttcaattataatttaattaaaaatatgtatgaatttttgtaaatatgttttcaaatgtgtacatttttaaaattgtgtttttttgcacattttttgtaatataattgtttttgttgtacactaatgaaaaaaccccttgattaaaagacaaggacgtcaaaattgacattcagtaattaaaaccttaagggctcgtttggaacgctgtattaagtattgtattgtattataatgaattgtattttatgcaatattttaatgtaaaactaatatgtggtagttaacttttattggtacgacctaaatatatataatattttagttataaattaaagtttaa

SEQ ID NO: 288490 - DNA, 538 bp, Cannabis indica
aaaaaaacataaaaaaaaaaaaaaaaaaaaaaaacgaaacaaaaagatcaattgaaaatgtgagttgtatctacttttttttaattaagttttttggttttttaaataaaaaaattaaaatattttcaaaaaacatgttcaataaaaggatttttactttttaatttttaaaatggcaatcaaaattttgaaacttttgaaaacaataaataaacggttttttttcttaattatggccctaggcttggaccctggcttcagacccgaacctagatcccaactccagacctaaactcgaattgcgaccccaatcccaaaccctagacctgactcggatcccggccccgacctggacacggatccgaacacggactcaaaacatgaactctggatgcgaacctagacccgtacgcaattcggcactcgaacccgaaccgaatcgaacctagaccctagaccataaacctcgaacttggacctacattctctcacctcagtttattatccctcatttaaatgaaaacaaaaataaaaatag

SEQ ID NO: 288491 - DNA, 431 bp, Cannabis indica
aattaaaatgagtaattaaaataaaaataaaaaaattgtaagagtaatttgcggcaaatcccctcaactattatttaagagcaatttgcggcgaaacccccttatgttttgatttttatacacttaacctccttatctttatttttggtggcaaaacccccttatgttttaatttttatacacttaacccccttatcttttttttggtggcaaaacccccttatgttttaatttttatacacttaacccccttatcttttttttggtggcaaaacccccttatgttttaatttttatacacttaacccctctatcttttgttttggtggcaaaacccttcagtttacttttctttgcaaatttaaagttttagttaaatattaccgttaaatactaaccggattactactgtatcgacttcgaggttttac

SEQ ID NO: 288492 - DNA, 843 bp, Cannabis indica
ttttttttttattttttttcatttaataatattaaaaaaattgtaacatctgaattaaatatacactcaaaccatactacttacttcttcacttatatagttaattaaatcaatatcactcatacatattctacttacatcaaaatcaatgaaaaatttatttattacttcttatagttttttcttctaattttatattttctaattaattgatataattaataaatactttacaactactaatcatgcaaaatagtacatatataaatagagaatatcatactaaatatcaatcaatattactagatcaattaacaacacaaatcaattttatattaaaggtaagtattcttgatcactattttttatatgttatatatatatgaacaattttttgttatatattgtttaataaatagatttttatttaatttaaaagtcttctataaaaatgcatatggagattcatgcaaaaaagcacattaaggagataaggaccaaattctctattagaagctaagcttaacttgattcctatactgatgatatatatatatgaaaaattattagatagtgattatttttgctatttatatgtacttttagtatttttgggaattaatttgtaattttattatttgttatctataataaaaaaagtattttgatatcctaacaaaaaaaattatattgtaatgtaaaaaattttaaaattattatacataccgcacgaagtgcagcttcgttaactagtatttaataaaataatctaactaattccatcaaatagctttaatactagggaattttttttatcccacaaaattaaatgcacctttatat

SEQ ID NO: 288493 - DNA, 667 bp, Cannabis indica
aattcaaagtaaaacaacattttacttccaacaaatagaacctatagatgtctatatctatgactaacactcccactaccgagttcccaatatgcaagtatgcgctagtccgtaaggtaagtaagtaactgttagagctattacttagtctgttatttcttttgcctaagttagttactgtacaactgtattctgttgttgtttgttagctttgtactgtcttctacgcttgtatatatactgagttattactcatttaataatatacaaaaaatcattcaactcaaattcgctctatccttttctctctaatctgttattcctcacacggtatctaaggttttccttttttttttttttttttttcttaatcaatcgtttgtgattcaagcttcgcttcctcatccatggctgctttagctgcaaataatcctgttgttttctcacgatttggttcaccacgtgccatcattagtgataatggtacccacttttataataggccttttgagcatttaatgaaacaatatggcattacacataaagtcactgcaccttatcacccacaaactagtagccaagttgagatatcaaatagggagattaagcacatcttagagaaaactgtcaaccccactaggaaagattggtccctaaaactcattga

SEQ ID NO: 288494 - DNA, 555 bp, Cannabis indica
atataaaattaataattttattctaaattataatacatgtataaaaataattttattataatatagtattatttttttattgttatcattattttattgatatttttagtgtaattttattaaattataattttttaattaaaatataatttacttaattttaagtttatttttaaataaaagttctattggatatatatacattgtaggtatatattgtttaacatgagttcccaaataaatctcacattcttttttatttaagaactactaactagttgaatttttatttaataactaatatttgattttttttaataacttataaaatgcatgtgatcaaatagtaatactcttgtatctcggaatatatttgattgtacttgatgaattatgagttgaaacgtgcatgtatatctatttatatatatatatattaattaaattggcatagattcattaaaaaaaaatggcatagattcacttattgacactataaaaaactgttatttttagtgataaacttttagtcacaacataattcttttgtgacta

SEQ ID NO: 288495 - DNA, 705 bp, Cannabis indica
ttaagaagtgttctatatatatttatatatatatttgtatatatataaaaaatataacaaaaaaaaaaaaaaaaaaagtagataagagattacaatataccatataacatatatatataacataataatatatgaagataagataaacaccacttacaattttgaatgtaaattagtaaaaatcaccattacttaatattcaaagtattattatctttgttacaaaaactttattttttcttcaaagcactaagagaactcttatatgtatataactttgagaatcatgcatcaaactttggactatgtttgaaagttagatttttataaagaaaaaaaatataagaaaaaaaagtagaaaataatagtaataataatataaataatattatatttggtataagaaaaaaattatataaaaatactcaatcaacaaaacttttcattttaaacttaaatatttaacttttttgttctacactacttttttttttccttacattttctctatctttttttccttcaccaaaatccaacttcacacgtagtcatagagttttctaacaaaatgccttttttttattatagaaaactaagttagtttaaatgaccacattaaaccaataatttactagtgtttaggatgatcgcacttcacattctcctactccactgatgtaatgagtgaaatatggattataaatg

SEQ ID NO: 288496 - DNA, 722 bp, Cannabis indica
atgctctggaaagaacatagaatttctccaaaatgcaagtaaactctgttttagactgtcataccagtaaagccctaatgttctgataaatctaggaatctttaatcacatagtcatgtttattttccactatgttgacaacacaataaacatgtttaagtatgtgaaaagggtttggatgaatttataaatcaaataaacaaataattgataaggtgaactaaaacatacacaaatgaatgaaaaatacttctgtttctttattgatatggaataatctggattacattgaaatggagttttatttagggcataaaacccaacaaactaccacttacactaatataaaactaatcagtacatctcaattaatcctaaattctgacggtgcctttcaaatgcagtcactgccaagactttggtgaatggatcagctaagttgtcttttgtgtccactttttccaccagtacatcccctcttgccacatattctctgatgatatgatatttcctttctatgtgtttgcttctcctgtggcttcgaggttccttactgttggctattgctccattgttatcacaaagtaagactagaggtttttccttccaagcacgacaccaagactggtgaagaactttctcagccagacaacttctttggcagcttctgctgcagctatgtattctgcctccatggtagaatctgaaatcgcggtctgttt

SEQ ID NO: 288497 - DNA, 395 bp, Cannabis indica
ccaatggcatagtcacttgcgtcgcacatcaactcaaacggcaattcccaatttggtgaagttactatcggtgctgtaatcaatctctcctttaaaatcttgaaagcttttaaacaatcttctccaaactcaaatggaacaccattgacaagtaagctagataaaggttttgagattttggagaagtccttgataaatctgcggtagaagccagcatgtcctaggaaactcctcactccttttacagaaactggaggtggaaaattttctattgttgaaactttagccttatccacctcaattcctgcctttgaaattttgtgcccaagaacaattccttctgttaccataaagtggcacttctcccagtttaacaccaagttagacttctcgca

SEQ ID NO: 288498 - DNA, 708 bp, Cannabis indica
gtttatgataaattattgggtaacaaattattagatgttgctacgtaaaagatcaacatccatgtagttagttaaacctaaatataattaatctacctaaagtgttaaaaaaatatttttttaaatttttatttaaaaaaaatattgtatttttttaaaatcaataaaaaaatatataatttttaaaaaagaagattattttttagatccttagattaagtgggccttaaacacaaatttaatttacctatgaccagtggaagccgtgataaatgttgtcggtagattgagtctgtttttcttgtatacatgcatcatgaattgtaaagagggaggttttgattttaaaagtgtgtgatgtggtttttagaaatagcatagtaattaagggtaagagacaacatggttaagcaataattgaaagaaaaaaaataaaataggagacacattcggaagtaatcaatgtgacataaatataagaggagaatattagtgtgatttatgatacaaatattggttggccactcatttggcactgagttgtagatttgatgtgaactctctatacttttaacaacacttactattaatgtccccttacatgttatcaatcacctccaaatttactatacacatccattaattaattattaattatgtccttaaataatatttcagattattattaacttgatgcgtatattaaac

SEQ ID NO: 288499 - DNA, 582 bp, Cannabis indica
agtaatctaagtaaataaaccaaaaaccctgaaatgctctcatccataggatataaaaattgtactttagaaaataataaagtaaacaacgaataatgtactttaataaccttgattatcattgattagtgtaattcaatacaatgaaataaaataaccttaattattaagtattaatgacccatttatttcataatccttcccaaaatagacaaaatcaaccattttaattcattattaatgtccccatttctaaaatattacaaattcctttattgtacttatcccaaaaaagcaatttttatacatatttatttatggtaaaacttgattataatcaatctatattgaattgaaattacttaaaataatccaattcagttattatgacataattattcctattttaatttccaaaagataggttgtaaaacttccaaaaattgtatccttttaagttaccataaaaacatttataatgataccttcctatacgacatagattacaaattaaattctataaaatttgacttcccaaatatatctgaacacaataaattcgcatctgacaattagtgttcc

SEQ ID NO: 288500 - DNA, 605 bp, Cannabis indica
atataatacaatacgacctaatacgacgttccaaacgagccctatcaaacttcggaagaagacaacaagggcctatgccagaattgccaatgtgatagatcacaagaatgcaatcttaataacaaattatacagaagtatctcagttcttaagcttaatcatcaactagatcctcaagagttttaccataggaatgagtaccaagtgatgatggaagctgttacttttcaattgcagagtctaacaatactgaattatggaaaatttgcattttacaaaattaaagaccaacaactctctttccaaggaatttattatccaactatgaaacttaaattcagtaatttgtattcataatcagagtttgctttcctagagttcaggattagttttagcacttcatgtaactatctacattccttatgcatatgaatccattgaaagctctccacaaacttattacaatcatctatggccacagtatattataacatattaaagtacagtttttcagtaggcatataagcaagcaaaattggcatactgctaatctagagagagagagagagagagagagagagagagagagagagagagagtacgta

SEQ ID NO: 288501 - DNA, 842 bp, Cannabis indica
cccacttatgacaagaattgtatgcactagtgcgtgccttagaaacatggcagcactatttgtggccaaatgagtttgtgattctcacggatcatgaatccttgaaacatttgaaaagccaacacaaactcaacaagagacatgcacgatgggttgagttcattgagacctttccttatgtcattcggtataaacaaggtaaggagaatgtggttgttgatgccctttctcgcaggtatgctctaatctctactcttgatgctaaattgcttgggtttgaacatataaaagagttgtattctgctgaccatgattttggggaaatttatgctctttgtgaaaagactgctgaaggaaagttttataggcatgaggattttctatttagggaacatagattgtgtgtgcctaattgttctgtgagagatttgcttgttagagagtcccacgttgatgggacattttggagttgctaaaactctagctatgttgcaagagcatttcttttggccccatatgaaacgagacgttgagcgaatttgtggtaggtgtgtcacttgtaggcaagctaaatcaagagtgcagccgaatggcctttacacacccctacctatccctagttcaccatgggttgacatttctatggattttgtgttaggtctaccaagaagtaagcgtgggagggattcaatctttgtggtagtagaccgattttctaaaatggctcattttatcccttgtcataaaactgatgatgcatctaatgttgcagattggttctttagggaaattgtgagattacatgttatgcctagaacaattgtatcagatagggatgctaa

SEQ ID NO: 288502 - DNA, 462 bp, Cannabis indica
gatttgcttgcaagaaatttgcacttaaaacgatttgtatgtgatttggatggtttcatgttgatctatgtgttatatgtttgtgatttgatagtttgaaaaaaattaagcaatttactattttacagaactcaatttcgattttatttgaattagttatgaatttttgaaaatcggaaaaatatcagggtggtgcaactcacctacgcgcgcggatgaggggcaaccctcggacagcacgcgctcagacacgttttttgtctgaaatccctgccttgcgtgcatggagaggctgcatgcagcctcctgggccgaggttcttcggtcgagcacccctcctcgtgcgctcattgcatactgtccttaccacttgcaaattttttcgttttcttcgatttttcatgctatttcatggaattaacttcctatttttttgtgtagttttgtattttgatttttact

SEQ ID NO: 288503 - DNA, 642 bp, Cannabis indica
atccatccagcatgagactttccattcaggttggccaactcacttgaatcttgaaaggaggtaagaactgtgtataatgtgtaatatgaatgtgcgagtgtatgtatatgttaagtgtatatgcatgcttatgtgttagttacattaccaacacttgtacagttatggtacaaagtgcattggtatcgtgtatattcttaaggagtacattacggtgataccagcacaagttcgggaaagtacagggtgtgtatggtatataattcggtggtactcagggtacgaaataaaccctaccaacacttgtacagtgaggtacgcagtgtatgtggtatagttgttgtaccctagtatggaacgttcttactcatctgttaagccttgtaagggcgcctagatacaagtcagtattatatgatatgttatatgcttttcttactgagtctatcgattcacagttctactttcatgtgtaggtaaaagaaaggcaaaaactgaatagaagtgagcttgagctgggatgggcttgtacatgtcatggcgacacgacttggagtgttcggtctcgggacatctggggttgttattttgtagtcgcgatgcgacttggatattgtattttgaatattttgtataaaagtt

SEQ ID NO: 288504 - DNA, 592 bp, Cannabis indica
ttagactgacatgataattggcgataaggtatacttacaccttagataagtgttatgtccttttcagggcattggtaaagtttaccagtatcagatgtatggagtatacattagatgtgaccgatattgatcttgtataagatatcataaacttatcattatatctttataagttaatattacttgttgatcttaggtctatggatcttaatcctgatatagtcaggttcagcttagttgtattatttatattcttcaagttgttcgtggaagctaacaaatagttttggcgaatatttacatcttaggaacatggtagttcaattgagtgggagcgctaatcatagatatggaatgtatagctcctataaatatttagaagtgaaacaacgatttcctttaagcttggctgaatagaaataaagtattgaggcctcatttcaagtaattatattagtttattgaaatatcatttataggtagctaagtgttttaaggataaaatacattgaagggtagaacagtaattttatccctattcagtgtagatcatctatagaagatccttgactattaggattgtaacaatgga

SEQ ID NO: 288505 - DNA, 891 bp, Cannabis indica
tgtaaaatttggtaaaatactttcatttgagtggtgtttgaatacaagaatgaccttattgaatcaaagactgcaaaattagaaagaattttatgatccaacaaaatactactttattccattcttaagaagaaaaaaaaatagttccttttattcgttttattgatattgaaagataaatcttaattttgacttgtataaatgaaaaaggtgaaaaaagaaaataaggctaaagaagaataatttttttagttccgtaaaaagcaaattacgttcatgatgatgctgaagtgcttgcaccaccgaccaaagtaatccatcttgacaattattgtttgttgttggcaacttccgcttaatctaactcaaaacttctttaagctcaatagtttttttggtaatttttgggttgaacagagttgttagagtatctctaaccatactttttaaacacactccttaactaaaataaagagtgagattttaaaaaaaaaaaaactctaactatataaaaaatgactagagaatggagcttttctacttttttgcaatttttttttataaaatgttgaatttattaacacaaacgatcaaccattacaattgtttgtaaatcaggagcatcaaactcataaaaagtacaatctaatataaacaagactcgaacaacacaatgagcaattatatttgcagatcgttaaacaaaaaataatgaaacattactcaaaagcactattaatattttattattttataaaaaaattaatttatatttaacaaatttaaattataaaaagatattaaaataatcaaatactaagaagcatgattagagtaataataataaaaatgactatctattttagctaaaaaaaaaaaaagaaatactct

SEQ ID NO: 288506 - DNA, 610 bp, Cannabis indica
acttgttttttaaaaatttagaataagttatactgctaaacataagatttaaacattcatttgtacatgtgcaaaagaaataaccatgagtctgctaaattttttgaactttatagaccgtcatgtaaataaacagaaatgtgaatttaaggacttttatctaattttagtaaaaaattgtaacatagatgaaagttcatggggcgtgatttagtacatatcaaagtttgaggggcgtgatttgatagatatcaaagtctggggagcatggtttagtacataaacaatcactgaacagtaaaattgaatgaaattagacaaaagtccttaaacttaacaatctcaatagttcgaggggaatttctaacggccaaaaaagttcaaggggcacgatttagtacatgtcaaagttcgggggaaaaattgctaattagccttatttttttaaatgcatcaacaaaacaatattttttttttttttagaataacctgtatccattaagaagagcatgaagtacaagatacatgttacagagaagattggatagaagggtttatccagaaagcttcctgctctaaacctaaagctgtcttagctagacaatgggca

SEQ ID NO: 288507 - DNA, 614 bp, Cannabis indica
tagaacttggaattgcactctaaataatatagaacgctctacatgttccacgatatagatacgctataaatatttaaccatcgttctaatcccaataatcaaagatcctctatagatgatttacaccgagtagggataaatttaccgtttgacccctcaatgtattttatccttaaaacacttagcttcctataaaagatatttcagtaaactaatataatcactgaaacaagagctcttccatttatctctattaagccaagcttgaaggaaatcatcatttcaattctatgtccagatagaagctatagattccatatcaatatttagctctctcactcaattgtattatcatgttcccaaagtgtacgtattacccgtaccaaaaggtaggcttaactaacaaataaaagaacataaataacactcttgagagatcgaacctaaccatgttaggattaaaatcttttgatctaagatcaaccagtgatattgacttagaaagatacaacggtaagattataatatctttaccaagatcaatatcggtcccaatccaatgtataatccatacatctgaaactagcatactttgccaatgttctggaaagaac

SEQ ID NO: 288508 - DNA, 651 bp, Cannabis indica
tgaaatggtagccgaatttcgggtataacaatgtgtatctataactatataaaagtgaccaataataatttttaggctttacatattaaattacttatttaaacctttaatttaaggtttacattaaaaaaaatttatattttaatataaattacattatattttgctacttttttttgttttcaattagttcctattgataattatatattagccaataatcatccaacaaatcaatatataaataattatataatacaatatacatatattataattaattaatcataaacattaccattaattacaaaaattagtagaatattctaattttcttatataattataataatatatttttaatcatttcttatgaataattattatattagctaataattatataataaatcaatataaataattatatttatattttttttgaataaataattatatttatattaattatagaaataatatacatatattataatttgtgttttcgggcttgtattttgcctcgtgtgcgttaggaggatgattgttgaagttgttctatctttgttgttgtttatttaatttgagtttttttttttttgtttgagttgttttggtgtggtgcacattatgtccttagtggaccttttt

SEQ ID NO: 288509 - DNA, 552 bp, Cannabis indica
gaaaacttcactgattgacaaatctgttattggagggaataaagtatcctaattttcttggaaatcaaacgaaatgtgaagttggaaagaaaggaagtaagagaaataccaacagcatggaaagcagtggggaagcgttcaagaagtcaacaagatcatagaccacagaacttccttcttcctttgccatggctgaatacaggtactgagatgaatatgaagaatatggctatggcgttaaagcctggttgaattttggtccctacttctctctctctctccgcctccattttatagcaagaggattgagatcctctgcatcatttctatcttaagtttcccgttcatccaatcaaatcatttatattttcacttttttttcttttttttttttaactttgagcttttttacttttatttttttttataaaactttttgtacctgaacttgagaagtcctttagtctagttcatctttggtgcaagagtgcttgattagtgagtgttatgtacttttttttttaagtataaatataattcattaagataaat

SEQ ID NO: 288510 - DNA, 863 bp, Cannabis indica
aatatacattcatagtatggttattctaacttagtttaaggtagggttctaaaaaaagcccaaccaacatactggttcccaactgaaagaccgattcctagagatcaaccagtcgaccggttcttacaggctcccctgaactagtagaccgatacaatgcagggaaccccaaaaatgtcctccacaactcaattcgagcccaaactctaccatactctctagaacacttgcatatactatactaaatccatttcaagcaacagaacacatcaaatagctcagaaattaaaaacacccttagagagccaacttaggctctctaacttcaagtttgagtaatccgtagcacaactagctagctatctcagcacaaaatcaactaaaacaaacctatcgtaaccccagaattcaaacccaaactagctgcacactacagaacctcaaatcactaaaatcatgcaattaacctatcttgagctaaagaaaaccataaagaagaaggctaagcattataccttgaattggacctcctatttctgattgaaaactctttaattgtagcaagggtagtttagtcatttaccactcctgacaaatccccgatatctccaatgcctaacaatagtaccccgctattgacattctaaatatacaaaacgtgactctctaatggcccacgttgctttccaccgttaccgaacacaagcacagaaaacgcgaaattcacatatatagcataataatacattttgaatttaaataaatctcaataaacatgtaaatcataattaataactcaatattgtaattaacccaaatcatttaataatccaaaatattgatcttaagcggtcattagagtt

SEQ ID NO: 288511 - DNA, 595 bp, Cannabis indica
gggtgtaaataaaatttccctatgaaaataggacaatttaacttacgttattctgcccacgagtgaacactctgtttcgtttatttatataccatattccaagaacaatctaaattggtccacaaaataatgtttttaagtgatttctttttgtgatatgaaagtggaaaactttttggtacactttattaatggttgtacagtatttgccaagaacgtttatttactcaagtttattttattttttatttagtctaggatttttgctctctgaattttgacatgtaccaaatcatgtctcctgaacttttaaggtcattgaaaatgccccttaaactattgagattgttggatttaggaaattttgtctaattttattcaattttactatttcaatgattgtttatgtactaaaccatgttccacagactttgatatctaccaaatcatgcccttcaaactttgacatgtactaaattatgcccctgaactttcatccatgttagacttttttattaaaattagaaaaaagtccttaaatccaacaatcttaatagttcagggggcattttcaatgaccttaaaagttcagagg

SEQ ID NO: 288512 - DNA, 1340 bp, Cannabis indica
atcaggtgcaaatagaacttccccaatgtatattatatttatatttatattttaataataaaataatcacctaaaaaatattattacttttaaattcttaagttttaaataatgttaacaaaaatttcaaaattttctaatgataaataattaacaaaaatatttacatattaatataaaggaatgcacacaaagcattctaggtggcatcttatatgaagtttctttccaattcttacttatctccatttttcacatttatttaatttttaaattactttttcattcaattacatcataataatctataatcaataagttagtaataataacaataataacttaatcaagtttataagagggagaaattatgtgtctataaatatcaattaatattaataagtattatgaaaaccaaaagtcattcaaaataatttgtactaatagaaagattataaagtacaaaacttattacatttatatttgtattaaatgaacaaataaaaatataattaatattcttatgaatgttacattttttagattgatattagaattaccttttgtaccaaaagtaaataaaaaaaaaaacataagtcaaacaatgatataataatcccttcaaaaaagtcaaaacaataataataatcattcttcacaaaaaattcactatttatagttgtaatatttttttaattcgattttattattttattattcatttaaaattatatctatttaatatttaaataaaaaaaaatattcatatttaaagttttgtaaatgttaagaattacttaaaaaaaattatgatgaattttaaaataaatttagtaacatattttattattctatatttattatctgttattaacaatatatataattgtgatagtatacataatgaaatatttagttactaaatcctttcaaaataatatatgttcagttgctaaagaaatttatgtaataagtttaatgaaccacaaatttatatttacacataataatagtaatattaataattgtaattatatataaaaaaaaatattaactaaacaattatacacaatatataagtaacagattaacataattatgttatacataaatattttaatgtaattattaataaattaacctattgaccttccaataccacaaaatattatgtagagactcttccactctaatttaattattacaatttgtaaagtcttttcattttcctacctatctttcaagtttttttttcctactataacatctcacactcatgcaataactttcttctataatataattccttctctcttgtatctcctcacactcctctctct

SEQ ID NO: 288513 - DNA, 414 bp, Cannabis indica
ccctctgaattggaattccagttcagtgcaggaaaggctaaaaattctaactcaaccaaaacaaccccaatccacatgaaaccttccagaactgttctaagcatcctaaagatcaaatcccaagcaacaaaaccaactaacatgctcagaaacacaaaccaccattaaagctccaagtttgagttcaaaactcaaaacttggttaaatctaactaacacccattagaacctgctcaaattaccctataccatcataatatagctactaaaaacataatccaacaacaaacaagaacagcaagcaaaacacatttcatgcaaaatccattttcttacaattcaagaactaaaaagattggagctaagaactaccttggctcaagacacagaacctagctgcaacaagcttgaatt

SEQ ID NO: 288514 - DNA, 549 bp, Cannabis indica
aagttccaatcccgatctgagtctggattcagttctaggtctaagtcttggttctgctcctggtttgcgttcgagtttgggtccgtgtctgggtctatctttgggtctgattctaggtgcgggtgctggagttcgggtccgagtctgtgtacgggtttgtgtctaggtctggaccccgatctgggtctacgttcgggtccaggtccaagtttgggtcttgagtgcgagtagaagtttggttctgggtcttcgttcatgtctaggttcgtttccggatccctatctaggtccaagtctttgtttgggatcgggtcccagatttaggttcaatttcgggtctcagttccggtctgggtacacggccgtgtctgggcccgagttctagtctcagttttggtctgaggctaagtctgtgttcaggtcttggtctgggtccgagtcctagtcacggtcctagtcttgttctaggatcgtggttcgtcgattcttgttcaggttctaattttcggtcccaggtcaaggtctaggttcgggtttcgttcttcgtct

SEQ ID NO: 288515 - DNA, 653 bp, Cannabis indica
gtttcagttctttgatgatccctttcgactgagctctgataccaattgatgtgatcaatgcatgatcaaacacctcgcaaacaacacaatgcaaagaacttgattaagaccagaactaagcaactaaaattaatcaatgcaacagtgaacaagaacagtaaaaaccagtttgcagaaaaccagtaacaagaacttgaatatggcaataatggacaatcaattttaacagtaagagaattagggaagagagatcaaacacaatagatttacgaggttcgaacaagtgatctgttgatcatttgcctactcctcggccagaacagccccaatggctttgagtctttattaatgctagattgagagagaattacaagttgttttacaaagtgttcatgacacacatacactcgagaagcaaagcttcaattacaactcatctcaccagaactctctcactgttttacagtctaaactagctctcaaaagtctatctctctttcttgtcccaaaagattgtaactcatggctttatatagcctttggcctttagtcttgatcctaactgtcataactgacagttaggtaagttagttagagttagttgctaacttcttggccaaacaaaatatgcctctattagtgaccaaactcca

SEQ ID NO: 288516 - DNA, 564 bp, Cannabis indica
gaaaattgagcaagaaatggaaggtttggggtgaactggtgcaaaccggctagccggttttgccagacctctaaaaccgtctagccagttttggcagggtccccaaaaacatcattttctcgattttcgtctatttcagtaccgcagttgggtgtttccgtatttttagagcttgagtaacctttagagggtataacagaacctagggttgtaggtttgggtttcccgggattagggttttgatcatgtaacttacccgggttcataatgtgaataggacatcaatctagcacgagacttttcgttcaggtcggccaacacacttgaatctggaaagaaggtaagaactgtatataatgtgtgatatcaatatctaagtgtatgtatatgttatgtgtatatgcatgcttaaagtgcttgtgcactaccaacacttgtacagttaaggtatagagtgcattggtatagtgaatgttatttgagagtacattacaatgataccagcacaggtacgagaaagtactgagagtgtgtggtatatcactcagtggtactcaggtatga

SEQ ID NO: 288517 - DNA, 546 bp, Cannabis indica
atgcagaacctcttcttaaccttcctatggcgcagtctaaggagaaagagacactctctgagtttcttcatctcttggtcaaatcatctccatctctttcaaacttctttttgctactattgatatagtttcaagctctgatttgtaagttattcttttcttcttcttctccttcctcttcttctttttttctttcaaattacatcaatataaaaattttaatttaaaagttttataagaatattgttgtagtgtgattctttattgttgattctacccatttgcccacaaattttgtgaaattttttcttcttctgtaagttgagttttttatttatatgtatataaggtcataccttccatgtgtttgacaaaatgcctaacatagttaatattttttattagcctaaagaaatagggcatcttcaattgtgctatttttttcatctttaagttaagtttcttcatgatattattattgtttttattttgtagaactgaatttaatgaattagtaattttatcttcagatcttaaataaatatg

SEQ ID NO: 288518 - DNA, 710 bp, Cannabis indica
ttataaaatctggggatttagccaccccaacccttgtttagaacttagggtttattattgccttatgtttcatacatgttttttgtttggaatactggttaggtccttcaaatgttgggtgtactgccgtaacttaatgttcatgtgtgcattcgcatgttccttaagtcactgcgacacacccagccatttgcgacatacggccagttttctcttttcttgcctttttcttttcattgcatgttaagactagctgactttctcaaaacaatgaggattttccattgacctaatgctcatgcaagaaatgcatgccccttgggacactagagactcctcagctgtttcttcaggtacatcattagttgtacatgtgcgatatgttttttagtcgcatgttgtaattgaccagatttcttgaaatggtgggtgttgcccattaactctatggtcatgctcaaaaacgcgtgccccttgggtcattgggaaacgaccagccatttttggagacactgtgtgggttgcacatatgcgacttgtactctaagaggattgcctaagttctcgaaatggtgggtgtgccccagtaccttaattttcatgtaacggcatgatcattaggttactgggataccccccgagtcccgatttcttgagatgctaggtcaatcctttatacttttgagttagtacgtttttattgcgggtgt

SEQ ID NO: 288519 - DNA, 732 bp, Cannabis indica
ttcacagtgtagccgtcaatagacttaaatgatcattacttcgtagctgcagattgggggttgtgccgtcagactttattgcgtgtagcagtcccaacacgtttcctcccatgcggcattaaatgcgacttgattgctcaggggaagcctgacacctcgcggagatgccttagtattacttgggcttccgggagcgtatggggctccctatgtcttctccgggaggcatgtcccggatgctgccttattacataaagacttagcaaataattcaaatgttaagctgtttgatccacgtgtccttgtccggttggtccacgtatattgggcaaaatcaggggcaacattaattaaataacaaattaagttttaaccattaatttgaaaaatattccattttaagttgatccaaaattttaacaaattttcaacttcaaaaaaatgtcctaagaatcttcaataactaattcctagaattcctcaacttaattttgaaattcaaaagatattcaaatttaagttgataaaaaaattagttagaaataactaatttacaacttaaataggaatatttaatgaaataataaaaaaataagcttcagaaggaatctagttagttataattctatatttaattaaatacaagaaaaatacatatagtttatctttaattaatttcattaaactaagtatgtttttcttaaattaatttcaaaattttcgaataaaaat

SEQ ID NO: 288520 - DNA, 755 bp, Cannabis indica
tactcaccttgtttttttggtttgcaattgcaggagacaaagtgttccttgttgtatcgtacgatggtgtttggttatgtgagaattataattggatctacaaagcaaatagcagcttgacgttgacagttacaaccgagacaaccctacaagaactgcgacaaattttatatgaagagttggaagttgatccggtagcgtatgatttaaagttggagatttgttccttgtacatgaagggaaaaatggttgcgccagaggttattaagagagaacgccaactgagaacgtttttagagatgagggcaacaatgtcaaatacagagtttatgccattattcgtgaccaaggtgagaaaagttgggaattcggagcctacgccgcctactaatcctctccctcggagtgtggtagggtcttgcgttcccgaaacagatgttgggattggtgtgaatgaggaggttccggccaatttagaggttccgaccaattttgatgttccgaccaatgtagggcaagaacaagaagcgacaggatttcatcagtttgaagagttcgatacacctgtgcagtagtccaggatataatcctcccatttaaagtttttcctcggacccttgtggctcgtccatgcactgctgatcatggcggtcacgaatgtggagagaatgatacccttctgaggaaatgtcagtggatagtcggtgcgtcgcctcctcagcatatgcattgctgcatctatatgctgcatataa

SEQ ID NO: 288521 - DNA, 489 bp, Cannabis indica
tgccctagatttactggaactttcaagatactcgagaacgtagggcaagtggcataccgattagctttgcctccagctcgttcaacagttcataacgtattccatgtctctatgttgagaaaatacgtttcagatcctactcatgtacttagctatgagaacttgagctgcaaccagatatgtcttatgaagaataattagttcagatccttgacagaaaggataaggttcttcggaacaagaccatagttctagtcaaagtactctagagaaatagcaaggtggaggaagccacctcggagttagaatcagacatgagagctcaatatccagagttgttcaggttagatttcgaggacgaaatcctttaaggggggataattgtaaagactggttagttttaatttggaaattagctgataaatagggtttaaatatgaaatctatgtttaattatgaatttatagtttatgatgatttatttgaatt

SEQ ID NO: 288522 - DNA, 663 bp, Cannabis indica
ggtacaactactctaagcaataatatcgactcactaacaacaccaataaatgagataattatcctcgcacaattaatatccaaaaaaaaaaataaaatacaatatttaaactggatattacatgtatgcccggagtggctcgccttgtcgctgttttacttcgaccaaatctcccagatgcaatgggagctgacgtgaggaagagaattgtgcatggaattccaaagagaaggttttccatgaactaaactttccaggagccaacttgaaataccattgatgtgcgacttccgacagagtggcggggaagattctacaacatacatcccctcgcactcactgtaaatccatttgcatcaaaatacttgagatgggagagaggatcttctctcccagtatacatcttccatgtttccattttgaacttgtggggcagtggcaggagattgatctctggtgagaaggaagttccgcaagcacgatctaactcaagatcattgttacgttgtccggccatgccatgaaacatattcttcaattcgtcaagctgggcctgtacgcctgggctgacttgattggcgttttggtcggtttggattacgtcagcgtctttctgagcggggatttgagtatggtctccgggctgcacgatcgttgtagtat

SEQ ID NO: 288523 - DNA, 799 bp, Cannabis indica
cattattttagatccaatctaatactacaacaaaacctcaaattcaatctagtccaattctacaatagcagagggtcatatcatatgtgcgattcattttactttccctttaacttttttgttcatattaaattttataataaaaatttttaggtattgtacaatttgacctcataaaaatagatttcttttttttttttatctgtgtccttacatatttttatttatatccttttaaaacttgtatttttatttttattcttacaaaatttgtattttttctaataaaaattatatatttcattaatacttaaaaacttagttcaatttttccaataaaaaaaattgtcaaataaactcaagtaggaattttaagtggaatgaaaaacatttatttatttttgttattttgatttcttgaagtataatccataaaataataaaatatattttttaaaaagtaaagttttggtaatgtattttaaaaaaagtgatgtatggtgtaatgtaaaataaagaaagtaaaaattttagtgatgtattttaaaataataaaataaaaaagctattgagaattcaggagtgctcttaggtggcagctttgcgagctttccaaccaatcaaaatagtcccaaattgttggagaacttgggatgcaagacatccctctttaccatatagattagaagcaatttttttagaaaagtcaaattacatatactataaaaaaatcttacgttacaacagttgtgactaaaagtaaaaaaattagcgactaattataaattatcattctaat

SEQ ID NO: 288524 - DNA, 734 bp, Cannabis indica
agaaaatcatttccttaattagaaaataatttccataaataaaatattctaatatagaattctcaagttgttgtaggtttggtgatacgaaatcatcaagttgatgtccatgttgttcttgctccaatgtttgagaaaatagggactgttggagagtggtaaagtccaaaaaaagagctaatttgatcaaagttaagttgaaagtcccaaacaagaggaatgatacaaaagatgatgatcaacagatttagaatgtgtctggagtgttgtaagagcatggtggaggttcgaaaaatggtaattctcttactaataattgatatgaataattacaatattatgagctaaaatattagaggccttaattgttctaatatataggagaatgtgcatgatatgtgtagaataaataatgtacgtattaatgctttgaaacaaaaacagaaggagaaaaagttggtaatatggtaagtacactacaacattaaggaccaatagcggcgggcccctcggccgctattggtccacaatctggccgctaaagggcaatagcggcggacctcggccgctattggtccgccgctattgcttggccgctattaatagtattagcggccaaaaacagggtccgccgctaatactattaatagcggcggagcaatagcggcgggaccccgccgctattgccctgtgtcagtttcgtgtttcgagactgacacagggcaatagcggcg

SEQ ID NO: 288525 - DNA, 595 bp, Cannabis indica
aaatcctaagtatagggggatatatgcccgcatgtactattgattgcatgaataaaattacttgctaagtttttcaagtgatttaaatttagtttaccaactttgaaaattttcctacttattacaccaagctgtaatggaagtcgcacatgtatataaaattgcgattacaccgagctgtaatcaaagtaaaaatatatataaaatcgcgagtacccgtgtactgcgtaaacattaaaggataagctatccccgcgaggatagaaatttgtccaaaagataaggtaaatttgtccaagtacagaagtgcgagtacccatgtaccgcatatataaaaaaaagagtgaaattaaacaacaacataaattagaatataatcaagcgtctggagcagcaggagtagtcccatcaggagcagcctcgtccgcgaccttgctgacgacctcattctcgacttcttcagcctgtacgccctcgatctcgtccagaaggttgcctcccccaccttgagtctgggaggcgacatggcgcgaaaggcctcagccatctcagcagcttcagctccaagaagcgagaagtcgaagtcggggacttt

SEQ ID NO: 288526 - DNA, 621 bp, Cannabis indica
ggtaaaataattccaacaattggtatcagagccatggtaatgatttactttcatgaaatatggattaaaacgatgttttgtgttgatttggatggtttcatgttgtttgatgaatgtatgtgttgtacagaatttttttcaatgaaaaatatttttctattttgaaaaattttatttggattccttgtaaacaattaagcaatttcgttttttacggaactcgattccgataaaaattgagaaagttatgatttttgaaaaaatcggatttcatggggtcgagtggatgctcatgagcaccaagcactcaaactgggaagcccatccgcgcgcgtgagccttggtcacgcaccttgctgtccgcccacgatcaccctgctggcgccgaggtttctcgcccagctcctcgtgctccgcgcgcggaaggctgatttgcagcctcgtggggctgcacgtgcagctcctccttacagccacctaacccaatgcgattttttgtgggttttttccccaaaaatccgattttatgggattttttcccaaaattcgattttttccaattttaaatattttcaattatggtcagatttaaaaatttgttaatttctttaatatttatat

SEQ ID NO: 288527 - DNA, 124 bp, Cannabis indica
ggaaagtaaccaaatgaaggaaatggttggctttcataggtaccaaagtgaatgaggaacaggcgctatcacctaccaatcgaacagctggggaggcacacgattcaaattcccaagaatcaac

SEQ ID NO: 288528 - DNA, 751 bp, Cannabis indica
tttttttttttttatatctttcctatatgtttaagttaatattgaaatcatgttctagaactaaaaattcagttaacaaattaaatcaatcaaattattaatagaattggattataagacttaaataaattggactaggtgattatgtcttttaaaattttattaatacttgtattggatcatattattatgtaaaaaaagttaaatttaattgaattagtacattaaacaaaaaaaataattagaaatattttaaaaaaattacaaagactgcgcaaagcgcggcttaattctctagtatttataataaattagtacattagccaaaaaaaaaaacgtattggctgataggtgaagttggaattatcaattaaaaaaataaaaagaaaatgagagaattaaggagaaaactaatagaggtatattttttatatttaatcaatattttatgaagctaataaaaaattaaaaaaaaataagagaattaaggagagagcgaataatactaattacagaaattttagagcgtcacgtcaccgtttcttatctctcctttagatatatggatatataaattattaaaataatactaaaatatcaatttgtagatttatgttttaataaaatattaaaattgagagaattaggaaaagaaaaaaaaaatagttttggaataattttagaattcctcgtactttttctatatatatatatatatttctaagtaaaaaaataaataaattaaaactta

SEQ ID NO: 288529 - DNA, 677 bp, Cannabis indica
tagggtattgggaaacaagcctttagactatggagactaagaaaatacaaaaaaatttgaagagaggttttttttttttgctcttggtttccttttcttttgatttttaattttttttctttgtttttcaagaatttcaaaattctagctcactaatgacacaaataaaatgagaaacaaagagacgagctttgtgaaaaaatttgggaaatcaatgagaaacaaaaataaggaaacagatttgtgacaaaaataaggaaactagaattcagtaataacaaattaaaattatttttttaaaaaaaattcggatttttttaagaagaaaataaaaaaaataagggaaactgatgacagcaaatacacgatgtttgacacaagaaaattatcagaatgtggttctaacagtttcgtatttcacaaagaaaaacagaagagatgaaacaggaattgacaggaatatagaacacaagttaaagaagattatagaacatgagtggaatagaaaaaaaacaaaagatagataggcaaacttgatgatcctaagctctgataccaaatgatatgaaacacaccaacagttgtgatgacacccgacaccaagtatggcagactctaagaattctcaaaatttggatgtggaaccgcgacctaatgtttagttaagcatgaacctt

SEQ ID NO: 288530 - DNA, 645 bp, Cannabis indica
aaaacttacatcgttcccaagccaaaacttcggagtatgcagttcgaggaaccaagacgaatggtatcgaccggtgaagcactctctcgggtaattgttcccaatctggccgagtacccaattgtgaaaagtcttgagcagcttccgatcaaccactctaagtgggtccgcattcacgagtgtcgaagtagccctagccttcttcttcatttcagtgtactcagcgaaccacctaggccgccttctcttcctccggttctccatgacttctggagctgtctctaacacctgcacctcagaatcctgagtatccccgatgctggtgatattcgtcttctcaggtgtacagaacatgtcatcatcatccggttggtaatcatttgggagaatgaagtcatcttccggtgtccgagcctcctcttccggttgtggctgtggctgtggctgtgaatctgctgccggccttccaggatcttgcaggagcgtcattatggtcttcaactgatccataatcgctgtttgtcctcttagcagagcggcctgccccctctccacagtctccaaccttgccaaaatggcagggtatactggatcgcgagcctctgaggtgctgggaatagaagctgacgggggaacaggaggatc

SEQ ID NO: 288531 - DNA, 713 bp, Cannabis indica
aaaagcatggcaatacccctaaaaacataaaaacgaggaaaactagggtttctgaaaattccccaaccggtagaccggttgcccaaccggaattccggttctgggaattactggacacccatccggaattccggttgcacaaccggaattccggttcctcgcaggaatttttcaaaaattcctaactcaaccaaatcaaacccaattggttccaaaccttccagacctgctctaaataccccaaagaacaaatctaaggcaacaaactaacccagaaatcacagaaacaaaattcaccattaaagctcaagctttgagttctaaactcaaacttgagcaaatcccacaaacatgcattcaaacctagttaattctactcaaatatgcatgaaatagcttctgaaatcaaacaaaaacatcaacaacaacccagcaacagattcaatcaattctctttgaaaaccatattttgagctaaaacttccaattttgagcaaagcaatttaacactcattactaacaacctaataatcacaaatcaacatacttaaatctcagaaacaacaacaatatttcagcagcaacaaccacaaagattcaagcatgcaacaaccattttcatcataaatttcaagaaaaacaaagtaagaaactaaagccaagaaatacctcaatgaaaatcactttgatcttgctaaaataacttgaattca

SEQ ID NO: 288532 - DNA, 573 bp, Cannabis indica
ttgctcaatttttcaccaaatgcaatgaaaccttccagagtacctaataagggcatacacaatatattccaaccaataaaccaaagaaaaactcaatgaatcaagatatgccattaatgatcaaagctttgaactcaaagctcaaagttgcataaaacctataccaaccatcaaaaccagccacaagaagctaataccaactcaattgaaccctataaatcgaaccctaagcacacctaaacctaacagccaccaattctcaaattcactatttcaagctaactcaaaacttgaaaatacacatactcaagggttttagggtttaccttagtttgattctccttgaaatcttgatagaaaccacaaattcagcaagaaatcccctggttcctagctggttcgaagagagagaggagaagaaaagagagcttcctttgaatttttgatatttcctttatttttttcctttttcttcaaatgagagaaatgcatttcctatgcattgattcagcccacaaagagggcagctgtcacaccctcacacagccacataaacctcaaaagaaaaagact

SEQ ID NO: 288533 - DNA, 511 bp, Cannabis indica
aaaaaaatagactcgaacttgttcacgtaaaatttagcttttacaaaaattaaattttaatatatttttaatatctaaatggattttttaataaaaataaataattttttaatcgcttaattagttttaagttttaatttctttcttaattttttcaatcattcaaaataattttttaaagatttaaagtaatttttaagatttactaaaaaatattgaatatttttcatttttatttttaatggagtatgatttgatggttgtcaaagtttagaggtaaaattactaatttacaaaaatacgtcagcattttaacagaataatgagacggtacctaacaaaatgattaaatttttataaatgtaaaagttcaggggaatttttaaataagtagtatatttaggggttagaagtagtattgttaaaagtttaggagcaaaattattaactattcaataaaaaaaagtaaacatcagagtgttatttaactttttttttacttttttctttt

SEQ ID NO: 288534 - DNA, 1038 bp, Cannabis indica
ttgacgtatggatttgaccagttcaatcgagttgatggtgcagttttactaacaactgatcctatagtagatttgaacgaggatggtgatgcggagttggaagttcatgaacctatagaggtaccttctttaaggttagaactacctccaccatctccaccacgtccaagggagcaaaggaaagaccaagaaagaagaaacccctcggacgtgaaaatcatgaaacaccaggcaccagtagcagccgcccaagtccttctcgtagtactgtaccatctgattttgaagtttgtacaaaattcaaacctattgtgtggacaagggaagacatagaggaaaataatgtttatacaacttctcttactggtacacattcaggggaaatatatgttggcaagctgtatacaaataagactaaattgaaaaatgtggttggaaggttcgcattgaaaatgaattttgagttcatggtgaagaagtctgggaccgatgttttttatgcaacttgcaggggttcagattacaaatggagagtgagggggaggaagagggcacgttgtgacatgtttgaggttactgtattccacaacgaacacacatgtagcctggattttagacatgctgataaccgtcaagcagcaccgtgggttgttggccacctcattaagaacaagttcaaatcagatggaactaagtacaaagctaaagacatacaaagggatatgtttcaggagtatgggatcaagatgagctatgagaaggcttggaggtgccgagagaagggacttatgtattcgaggggtacgccagcagcagcttatagtcagttacctagttacttttacgtgctggaacagaagaatccaggtactattacagacattatcacagaggaaacaggttcaagtactgtttctggtcactggctgcttgtaggaggggatttaagttttgtcgtcctgtgattagtatcgacggcacgttcttgaagacaaggtttgggggcacaatgctagttgctgtagcgtacgatgcaaa

SEQ ID NO: 288535 - DNA, 602 bp, Cannabis indica
tttcaatgacgattgatacctgatagtgatgatttgcaagcaacgagtaacttttgaccaagatcagttctagtcaactatagtgaatccactagtagtcacgctgggatgatcggggaatgcataacagatcgtacatgccttcctaaaacgccagcagtcattatggaaacggactttcaatgatgattgatacctgatagtgatgatttgcaagcaacgagtaactttgaccaagatcggttctagtcaactatagtgaatccactagtagtcacgctgggatgatcggggaatgcataacagatcgtacatgccttcctaaaacgccagcagtcattatggaaacggactttcaatgatgattgatacctgatagtgatgatttgcaagcaacgagtaactttgaccaagatcggttctagtcaactatagtgaatccactagtagtcacgctgggatgatcgaggaatgcataacggattgtacatgccttcctaaaacgcccccagtcattatggaaacggactttcaatgatgattgatacctgatagtgatgatttgcaagcaacgagtaactttgaccaagatcggttctagt

SEQ ID NO: 288536 - DNA, 699 bp, Cannabis indica
cttctataatgggattgtacccataaggttaaaaaaattaaaaaaaaaaaatttctcgacacaaaaaagattaaaaaaagtgtaatttgatttaaatattttatataaatatattttgatatagtataaaaagatatatttttttgattattttgttaattaaatagctaaattaagtataaaaatttaaatttcttttttattattcgttattggatcaaaatttaatggtttaatatttttataattaatagttatagttaaattcatttagtaactattaatgagtaatacacgttaagaagtgtttatatatattgaattaaattataattgagtatatatcataacactatatacaaattttacactatacaaagaaagaaatatatctagagaggggatttgacaggccaggctatggagaaagtgacccggatcctaaccgcacagtaaagagtctggctttagatgtagaaaatcttgttgatcagttgggacttggatccaaattttatgtgatgggattttccatgggtggtcaggccatatggggttgcctcaagtatatttccaataggtatggcagtgcctagttaataaaataattgttgtccttagttttaaattggtgattgttttaattctcaattctatacaaaatataataaaatactaggacagatatcttcttctcag

SEQ ID NO: 288537 - DNA, 507 bp, Cannabis indica
gctgaggaattttatttgattttcggaattgattgtttcgatgattgcaacaagttgttgttttcacaggaaacaaatcagttggtagaaatctgttttcgtggtgtaaaaaccattgaccacaaagccattaaggatgctttcttgggtagtaggtggggtttggatgagtcccttggtttgaaaatggttgttttgtattttattcagtgttttcttcttagtaatactcctgataaagaagtatctaggtttgatctagatgttgtggatagcggtcggtgggacgagtattgttggggtagggaatcctttgaattgactattgattcattcaaaggtagaattcagcatgggattttaatgaaaaataagaaggcagagaagggaggccagtatgatggttggtatagggctttgggatgtccatgggtttttacggtttggttttatgaatgctgtcctgctatggtgaactctttctgtaaaagagtttcatcttctatt

SEQ ID NO: 288538 - DNA, 514 bp, Cannabis indica
ttagaatagtgcaagtggatcctgtcacagaatacctaactcactactaatttaaactctaagtcagatttgcccatgcaagtaggagatttctaagattgaggacttatatcattttggaatagaatttcgggattataatcatatgcgtcatttaatttcttaagagaaaatcagaatggaaaaagaacgcaatgcagttctaaaatatgccttacggctgaaagctaacacaaggacatggaaaagaagagtcgcagaagtttcaaaccctagggtatcctaaaatgttctttctacagcaaagttacattcaaagcgtgtaagcatgcaaatgaaaagcataaagggaaccagaaacttactcaaagattcgaatgtctgggttcaagcaagccagaaattgtctgtaagctcttcagcaactttgaagccagaaagctctctcttttcgctctgaagtttgcttaacaacaaagggtgatgaaatgaggtaatgtgccagtactccaag

SEQ ID NO: 288539 - DNA, 582 bp, Cannabis indica
atcagcacggtggcttgccgactacgatcttcaatctccgaatggtgagcccttaatgcctccatctctttatctctccattcagcgaacatatgcctttgttcgtcgaacgcgagatttactgcagcacgcagttcgtcctgatcatgatacagagtgttgttatgactctccattagtccgagcgcgtcacagaaattttgtagtttggtggcgtctccgatggtcgtctgggcatttgttccaggtgcaatagtcgtattatggatgccctagttgggtgcggaattattattcccagtctcttgcacaccaagcacaattccattaataggaactatttcaccattcctcacgcttcccgtctgtctgggattaaaagcaggccgaccccttgaactccctgggttctgtgatgtaggatccagcgtctgtgaatttgctggatcagacagacctctacgagtttgcaccatcgtattggcggttggatgtcgaataaagatcgatttgtgatccttctctcaatgaaagcaccaaaatgttgacttcagttttagccaacgacaatgagtctatttt

SEQ ID NO: 288540 - DNA, 515 bp, Cannabis indica
tactagtagtagtcgtccaggcgaaaaccagaattacagaggaaccactgacagtacaggtcctaataatgctagagagaccaatgatgctagtggtcctagtgatgctagagggaccaatgtgactgaatttagcgatccattttctttatcgacaagttatggtaaattcaaggagaaaatgtatacaagagaagacatcgaggaatcatagtctattatatatctatgggtggcacaccaggcggggagttacatgtaggaaagtttttttaaagacaaagagcatgtaaaaaagggttgttggcttgtatgaaatgaagaaagggtttgactactccgttaggaagtccggtactactatttggtacgtcacatgtaaggatacaaattgtgggtggagattaagagcgaaaaagaaacgtactctctaacatgtttgaggtgagtacatttcataatgtacatacatgttcccttgatcttcgagtaaaagataaccgtcaagcatcatc

SEQ ID NO: 288541 - DNA, 514 bp, Cannabis indica
ataattttttttgtgactaaatatgactttttagtcacaatgaaaacttacttgtgactaaaacataatatttagatataagttgtcactaatttagttttagtcataacaagtattatgattaaaaatacattttgtcacaataaattgtaattttgtgactaatacctttagttaggatcttttagtcacaacataagaataataatttataattagtcataacttttttactttaagtcacaagttttgttatcactaaaattaaattttttgtactgaatatagatccatgtgcaacgttgataaacatgaagtacaaataatattaaattgagtaaattctattttggaccccgtgatttgcaaaagttacagattggaccctctgttttgttaaatgataaaatggacactgtattttttaaaatggtaaaaataggatcctgagtcctaatttttgtactaatttttttttaatactaaccaacttgaagacaattcctaatatgaa

SEQ ID NO: 288542 - DNA, 692 bp, Cannabis indica
atacacaacattgaatacttactccatatattacaattttttagctttaatgtacacatttattgtcaaaccctcaacaatttttttttatttaaatccccattatactatttgtaaatgcttcatcaaagtacttgccaaatattcagaattaaatagcaaattaatatattatattttttttccataatcaaatatattcaatcagtatatatattgatctcgatcgatctttgttcatactagatatatatattaagaatataaactaatacaaaaactaatgattaattgttatcatcgtggtttgagaataaatttgtattggtttaaatttgaataggtggatatgaggaataaatgtttaatggttgttatggtaattgaagtagtgatgttaatgaatagttgttgaaaatggttttggcttagaagagagggttgtatgagaaggtagtaaactttattgatagtttggatgttggttgtttggtgttgttttgttacactagctcctcaacccaagcttggtatttatagggagctaaggttgatactacaactttctagattttttttattttgaattacaatttaactttctaagatattctagaattttctaagtttcttagcttacaaatatagtttctaggtaattctagttttctctaattttcttagttttgtgt

SEQ ID NO: 288543 - DNA, 534 bp, Cannabis indica
ccgacatacatccaactgcgccctcagctcgcagtggtttctcctccatctcagcctaggtggtcttgtcgtctgtagtgatcattagatcatgtttgatcttcacatttaattcgtcaagatatttttccttcttgctaaaatcggttagcacaattatcgaggccaacctcgtcaaccgatcgaactgggtagtgtactctgtaaaactcatattctccttctgggtcaggtgggtgaactctttcctcttggcacttctaacagcctcattataatacttcgcgttgaagagtttcttgaacctttcccaggtcatagtggtgacatcatgaatctgagacaccatgtcccaccagactaaggcgtcttcttgaaactggaaggtggcacacaccaccctgtcattcccggtgacacccataaagttcagtatctttgctatcaccgttagccactgctcgactttcgtgacatccagacctcccagaaaaaccggaggtgcctgcttccggaacctttcatacaagggtt

SEQ ID NO: 288544 - DNA, 755 bp, Cannabis indica
cttgaaattggcctagcaaatatttagccttttcatgataagggactaaattctcatgcttgaccgcaaattcaccactcatttgtttaataaccaaaagagaatcgctaaatacctccaatgattgtattttcatttcgagtgcaacttcgaggccgataactaatgcttcatattctgctacattatttgtgcatatagctagaatatggaaagagtaaggtatcaggcctcctgacggtgtcacaaagacaattcccgcacctgccccactacttcttgctgccccatcaaaatataattgccacgatgaagtatcaattgcgaagacttcttcatctggaagatcctctcgcaactccatatcatctggaattgggtgtgctgccagaaaatcaaccaaagcttgtccttttattgctttttgcgggacaaagttgatttcaaatttcgatagcatcatggaccatttggcaagtagtccagacaacacgggcttggatatgatatatcttagagggtcagcttttgacacaaaagccacaggatgtgagagcaaatagtgtcgtagttttgtgacagcaaagattaaagccaaacacactttctcaattggagggtagttttgttctgcccctactaaagttctacttaggtagtaaagagcaacttcttttccctcctcattgttttgtgccagcatggctcccaaggggcggtcgagtgaagtgatatataatatcaatggctttcct

SEQ ID NO: 288545 - DNA, 509 bp, Cannabis indica
agagcatggagattaaaaatatcaatgcttaatccacgttgttacctctagctgagtgcagagtagacgacatcattacctccaacaaatgcgaacaacgaccaaagagaaaaatggcagcggaggaagcgatgatgggcgaggcttggtggtgaactacctgagaagaatcgaagagggaggagagagcttgtcaattggttggtggtctgatatgggttctcgtttcccctggtcaaaaatctggggattttagtttatgtatgtgtagggaagacaagagaagcttataaataaaaggacataaaaatgctttcattcttatactgtatattttgtccttatacaaacatatatataattaattaaatagctagtgctggcatctctaataacagtatggtgatataacaccaactctaatatttttctttatttttttaacttctgagagatcaaaaccaaataataataataataaaaaaacttcttctcaatatttgttcatc

SEQ ID NO: 288546 - DNA, 521 bp, Cannabis indica
agcaacccctgaagtgaatctttaactccttaagctcagctggagccattctatacggagccttggaaaccggttccactccgggtgccaaatctataatgaaatcaatctcccgctgaggtggtaaacctggaagttcttcgggaaaaacatctagaaattcccgaaccaccttgatatcctctggccgaatggtatctggccgagtggtgtccatcaccacggccagaaaccctaaacacccgccatgcagtaactccctagctgacatggccgaaatcaccgggatccgagatccccgaaccgaaccaacaaatacaaatggttcttcactttccggttggaagatcaccatttcctcttgcaatcaatactggctgagtatttagataggaaatccattcctaaaataatatcgaaatctactaggctcatctctatcaagtcagcacttaactccctaccatctattctgatcggcatagacctaatccaccttttggagataactaactctccgc

SEQ ID NO: 288547 - DNA, 753 bp, Cannabis indica
aaccaggtatgggctaagcttaattttttttttttgcaatttatcatttacattgtgcatctgtgatataactgaaatatgtagttgaaattaggttcgatttgcttgtttttgtgtttggagaagaatgtagaatagggggaattggtttttctggttttgggtattttgtgcgattttgtgcgatgttgtgcgacgtattatgcgattaaaaaatgcatttctgatttctgttagttttgggaatttgagcgatgttgtgcgagttacgtgcgattttgtgcgatgttcacctgacagttgtgcctataagaattgtgcgattatttggcgatttcatgcgatttttgtgcgatgacttacaccatttgttctctgttttttatgcgatttcaatgcgatttttatgcgattttatgcgatttatgataaataagcatttttgttttgtttgattgcagatggctccagaactgattctgccattggctgagcatttttcaggccgtatcaccttactatacgatgcatgtggaacactatactcctaataatttattattaaattcatcgaatcattgacaatctatttatttgtttgttatttcaagtctctttatctatgccgatttcatgtgatttactcttcatcttgtacactatttgggtatgtgtagtatagtgcagaatatttatggagtggtcgatgggcctctcctaaactttttttagtaaaaaaaaaaaaaaacgaaa

SEQ ID NO: 288548 - DNA, 234 bp, Cannabis indica
ctcatactttatatgtgtttattttataatctttttagatgttcatattttaatctttcaccaactctaaccaacgcctctgcctcatattcaagtccttctgggtaaagaagtatttcagactcttatgatcagtgtatatctcacacttctcgccaaaaaggtaatgccgccaaatctttaacgcaaacaccactgctgcaagttctagatcgtgagtagggtacctctgct

SEQ ID NO: 288549 - DNA, 712 bp, Cannabis indica
gatttgcacgcgcgtaggggggcaccagacgaggtccgcgcgcggatgaggaattcagacaagaaacttgtctgaatccgcgcgcgcgtgagagtgctcaaccccttatcttttttcgattcttcaaaaaatcataactaattcaaattaaatcgaaattgagttctttttttgaaataaagcgtatatatattagaaggaaacaaatagtcagacctcacggtcattacagaaaatattactcggaatagtagagacttctaccataccagaaatattgttggcaaacacccacttggccacattatgggccgcaaaattacagtttctagaaatataagaaaaattacagcaagtgaaagaattagagagatgtttgcattgtcttgcgtagttctcaagctgccaaaaggattcgtcaccctttaggttcttgatcaccatcttagaatcactctccaccataacaaaagggtgatgcatagtggccgccgtctccaaagctaacatacaagccgccgcttccccaataagagaatcactgaagtgaagcttgttagtcgccacccacaaaatcgattccgtatgatctctggcaattgccaccacacacatggattccgccccgactctgacatcgcagttgatcttgacccaatcctcaggcgggggggaccaaatcccgagtatcagcaacctgtcgagacttgag

SEQ ID NO: 288550 - DNA, 379 bp, Cannabis indica
actttaaaacacattaaatttatacaataacaaaataaatatatataatagataaaaaatataaataaatgtacttataccgagctcggagagagagggagacggacaagaggcggtggtggtccgacgtatgagacggagatgagagggacaccgacgggaggtagtggtggtctgacgtatgcaacggaggggagagggagaccaatgggaggaggggtgggtggaggagagagacgagaagaaagggagatcgagagagggaggaagacggctagagaggagggcgatggtgcggatgcgtgggtggggttttggagagttaagatttttgtttaaggtgtggaaaatagagaacaaatgtaaagaccgcttagtt

SEQ ID NO: 288551 - DNA, 528 bp, Cannabis indica
atttgttttctaaattgtaagtattattttgtgtattttttttatttactaatatagaaatagaacattgctattattttcttctatgacaacaattcatctgttgcgattcttcttcctcttcctttatttcatcaatactccctgccaccaatttaggtttgaagaattctacagatatagttttaaataaataaaataaatgtacttgagtattagattttatttattaaattaattattgacactatatcttaccatcttacatgaaaaataataactttatcgagcagattcagctagaatgaaaagtacaaaatacaaatattacactgttgtctcgcaaaagaaaattaaaatccaaccattaagagtatccttatttttcttttttacaacttttacacatgtgttatcttcacctatcaacaatttagaaattaaattttaatattttttttatttaactcaaatttaaattgtatgctttattttttgaacattaatttttggtttaattttggatta

SEQ ID NO: 288552 - DNA, 576 bp, Cannabis indica
accaccacttccatggtcgcgactatgacagcaagtttttttttcgtattttgcatatggtcgcgactaggctttatatggtcccaaccaggggcgaaatacaagatttttggccaatttttaactttttcaaaggtagcaaccctaatttctatttaaggggctcgtgttttagaaggaagggaggcagaaattgggcccaaaagtgaaagaaggaggcagaggaatcaatggtggcgatccagaatgcaatcaccaactagttctttcttaaactcttaatttctatgttaatttctgttttagttttgattatggatgttattatggattttatgaactaaactcctatttagggagatgatgaatgttgattgaaattaattttggttaatgataattgctattcctcttttcttaattgtggatttatccatatttgtgtttaattatatgtttaagattgatcaccttgtacatgctttatgatcccaattcaaaatctgaaaagtgagaattgggaatgctaaaattggataaactaggttttgatgtgaaacgaaagtatttgcatag

SEQ ID NO: 288553 - DNA, 660 bp, Cannabis indica
aaataaaaaaattaaaaaaatggtcgacaaaatatcgacatcctgtcgatattctgtcgacattatcaaacagtaagcaagaacataatttgttcgacatcatatcgacataccatcgatatgctgtcgacattccaataaaatcaacccaacacaacatcacacaatattatcgacattgtgtcgacattgtgtcgacatggagtcgatatatcacatagaaattaacagcataaagtgtcgataacatatcgacatacaatcgacatgctgtcgacaacaaattaaaacaatgaatttacattgtgtcgacaacgtattgacatacaatcgacatatggtcgacaaaatgaatttaaacactaaatccagttcaaaaaaatttcactcaacatctgtcgacattctatcgacacactatcgacatcctatcgatacactttaacacacagaaatttctaaaggtcattttgtcgatatcctatcgatatctcatcgataacatgcattgttttaacattgttttttggccgtggatcgtcgtggatcaatgtagaactgtgtgggtcgtcgtgggtggttcggtcgcgtcgtgggggtgagttccgccgcccccggttgcgtctgtgggtttagtcgtggggtgggtttagtcgtcgt

SEQ ID NO: 288554 - DNA, 544 bp, Cannabis indica
agtagatcaagaatttagcactatattttgtcatggtgggcatcttgaacccttgggggtatggcaatgccgagatgtgtggagcaaaaggctcaggttcctcatcaaaatcgtatcctccgactcttccttgagcattcaataactgctaaatttattgttctaatgctgttatctgtgggtcatttaccacaggagtaggagcattgagattggctggtggaggagcattcacattaagttggggtgcatattctccttgctgtggaggaatgtcatactgtgctcgataaggagcctccctctatgtgtgccccctgttcaagtggtctctcaaatcaggttgtcgcctttggttcagatggtcctgaaggtccgagctccttgcatcacgtggggggtatcgaggatgctcctcataatatggaggaggtgcattgtcttgaacgctcacagatcgactccttgagtcggaacggtaactctcccccatgaagctcaccgtcctctgttgttgcggcccccgaggtgcaggccattgttg

SEQ ID NO: 288555 - DNA, 556 bp, Cannabis indica
tgggattagaacggtggttaaatttttacagtgtatttatatcatagaacatatagagtgttctatataattgagagtgcaattccaaatctatagtggtgcaagaaagaattaataagttagggaatttacttggtaaattctagatctgcttattgaaagctcgattatataggcccatggttcccattatagttgagacaatactgcttgtaagactcggttagttgattttaattaatccattataattctaatattagacaatgtcttatttatgaattttcactaagctagggctaaattgtgaagattagagattctagggtttatttgttaattaagtgactttaataagcctaattaataaatatgttaaatgacaattttatttgataattaaatttaattattaaataaatatttttagcatttaagcggttgaattggaaaatatggcatttgtgaaagaataggataaatagttgaaaaatagcaaaattacaagtggtggacccacatcctatggtcgaccacttaaggtctcttttaccat

SEQ ID NO: 288556 - DNA, 509 bp, Cannabis indica
ttggatctcgatagataaatatttgtaaatgcaacatctagctattcatgaatagatgacaccttagacaagtatttacaatatgaaacaagaagtttatacaaataagaataactttaactctcgcctaccgggacatcgttggattcttattttaaattgaaattatcctttacttattcctcttagcttatttattttgaattttcttacataatatatcattggatgaatggtttataaatcatctgttttatacgcgagtcataacttttgattttcctctcccgtcagataggttataaataaaaaattataattgtttgatcccttcttcgtcaaaaaggtttgatcaagctgttataatgattcgacccctttctcgtcaaaaaggtttggtcagggagttataacggttcgactccacttttgtcaaagaggtttagtcgagaacctttgaatttaaaaaaaaaaatagacataacgggtatgcattatacaatgtattt

SEQ ID NO: 288557 - DNA, 69 bp, Cannabis indica
ttaggcaagagtcaaagctaccatctattgaatagagttgtcagctcatctaaaaatgataaacattct
